United States Patent Application Publication US 2023/0026259 A1 - sequence listing, part 47

SEQ ID NO: 138104 - DNA, 393 bp, Homo sapiens
  Payload ID: 7053
  Gene Symbol: GPHB5
  Gene Name: glycoprotein hormone beta 5
  Uniprot ID: Q86YW7
  ENST ID: ENST00000314140
  CDS Start-End: 1-393
atgaagctggcattcctcttccttggccccatggccctcctccttctggctggctatggctgtgtcctcggtgcctccagtgggaacctgcgcacctttgtgggctgtgccgtgagggagtttactttcctggccaagaagccaggctgcaggggccttcggatcaccacggatgcctgctggggtcgctgtgagacctgggagaaacccattctggaacccccctatattgaagcccatcatcgagtctgtacctacaacgagaccaaacaggtgactgtcaagctgcccaactgtgccccgggagtcgaccccttctacacctatcccgtggccatccgctgtgactgcggagcctgctccactgccaccacggagtgtgagaccatctga

SEQ ID NO: 138105 - DNA, 729 bp, Homo sapiens
  Payload ID: 7054
  Gene Symbol: CGA
  Gene Name: glycoprotein hormones, alpha polypeptide
  ENST ID: ENST00000369582
  CDS Start-End: 126-476
ccacagtcaaccgccctgaacacatcctgcaaaaagcccagagaaagcacttatgattgaattagaaggaagtctgtaaaatttggctgtgatcatagggagcgccatggattactacagaaaatatgcagctatctttctggtcacattgtcggtgtttctgcatgttctccattccgctcctgatgtgcagggtgcgtgaccaaatttgtgattgcccagaatgcacgctacaggaaaacccattcttctcccagccgggtgccccaatacttcagtgcatgggctgctgcttctctagagcatatcccactccactaaggtccaagaagacgatgttggtccaaaagaacgtcacctcagagtccacttgctgtgtagctaaatcatataacagggtcacagtaatggggggtttcaaagtggagaaccacacggcgtgccactgcagtacttgttattatcacaaatcttaaatgttttaccaagtgctgtcttgatgactgctgattttctggaatggaaaattaagttgtttagtgtttatggctttgtgagataaaactctccttttccttaccataccactttgacacgcttcaaggatatactgcagctttactgccttcctccttatcctacagtacaatcagcagtctagttcttttcatttggaatgaatacagcatttagcttgttccactgcaaataaagccttttaaatcatca

SEQ ID NO: 138106 - DNA, 615 bp, Homo sapiens
  Payload ID: 7054
  Gene Symbol: CGA
  Gene Name: glycoprotein hormones, alpha polypeptide
  ENST ID: ENST00000610310
  CDS Start-End: 100-543
agttactgagaactcataagacgaagctaaaatccctcttcggatccacagtcaaccgccctgaacacatcctgcaaaaagcccagagaaaggagcgccatggattactacagaaaatatgcagctatctttctggtcacattgtcggtgtttctgcatgttctccattccgctcctgatgtgcaggagacagggtttcaccatgttgcccaggctgctctcaaactcctgagctcaagcaatccacccactaaggcctcccaaagtgctaggattacagattgcccagaatgcacgctacaggaaaacccattcttctcccagccgggtgccccaatacttcagtgcatgggctgctgcttctctagagcatatcccactccactaaggtccaagaagacgatgttggtccaaaagaacgtcacctcagagtccacttgctgtgtagctaaatcatataacagggtcacagtaatggggggtttcaaagtggagaaccacacggcgtgccactgcagtacttgttattatcacaaatcttaaatgttttaccaagtgctgtcttgatgactgctgattttctggaatggaaaattaagttgtttagtgtttatg

SEQ ID NO: 138107 - DNA, 1010 bp, Homo sapiens
  Payload ID: 7054
  Gene Symbol: CGA
  Gene Name: glycoprotein hormones, alpha polypeptide
  Uniprot ID: P01215
  ENST ID: ENST00000627148
  CDS Start-End: 402-752
aaagtgtcagctttcaggatgttatgtgtatggctcaataaaattacgtacaaagtgacagcgtactctcttttcatgggctgaccttgtcgtcaccatcacctgaaaatggctccaaacaaaaatgacctaagggttgaaacaagataagatcaaattgacgtcatggtaaaaattgacgtcatggtaattacaccaagtacccttcaatcattggatggaatttcctgttgatcccagggcttagatgcaggtggaaacactctgctggtataaaagcaggtgaggacttcattaactgcagttactgagaactcataagacgaagctaaaatccctcttcggatccacagtcaaccgccctgaacacatcctgcaaaaagcccagagaaaggagcgccatggattactacagaaaatatgcagctatctttctggtcacattgtcggtgtttctgcatgttctccattccgctcctgatgtgcaggattgcccagaatgcacgctacaggaaaacccattcttctcccagccgggtgccccaatacttcagtgcatgggctgctgcttctctagagcatatcccactccactaaggtccaagaagacgatgttggtccaaaagaacgtcacctcagagtccacttgctgtgtagctaaatcatataacagggtcacagtaatggggggtttcaaagtggagaaccacacggcgtgccactgcagtacttgttattatcacaaatcttaaatgttttaccaagtgctgtcttgatgactgctgattttctggaatggaaaattaagttgtttagtgtttatggctttgtgagataaaactctccttttccttaccataccactttgacacgcttcaaggatatactgcagctttactgccttcctccttatcctacagtacaatcagcagtctagttcttttcatttggaatgaatacagcatttagcttgttccactgcaaataaagccttttaaatcatcattcaa

SEQ ID NO: 138108 - DNA, 587 bp, Homo sapiens
  Payload ID: 7054
  Gene Symbol: CGA
  Gene Name: glycoprotein hormones, alpha polypeptide
  ENST ID: ENST00000625577
  CDS Start-End: 401-587
gcagttactgagaactcataagacgaagctaaaatccctcttcggatccacagtcaaccgccctgaacacatcctgcaaaaagcccagagaaagtgttatataaatggaatcatatagtattcagcctgcattcagcacaattctcttgagatccattcaagctgctgtgtgtatcaatagtgtgttcatttttttgttgctggacagtattccatggtatggctataccatcatttgtatgaccattcaccttctgatggacatttgaaatgtttccaatttttggctactctaaacaaagtttctatgaatatttatatataagttttgtgtgaacatagtcttcatttctctgagataaatgcccaaaagtgcaactgttggggcatatggagcgccatggattactacagaaaatatgcagctatctttctggtcacattgtcggtgtttctgcatgttctccattccgctcctgatgtgcaggattgcccagaatgcacgctacaggaaaacccattcttctcccagccgggtgccccaatacttcagtgcatgggctgctgcttctctagagcatatccca

SEQ ID NO: 138109 - DNA, 832 bp, Homo sapiens
  Payload ID: 7054
  Gene Symbol: CGA
  Gene Name: glycoprotein hormones, alpha polypeptide
  ENST ID: ENST00000630630
  CDS Start-End: 100-405
agttactgagaactcataagacgaagctaaaatccctcttcggatccacagtcaaccgccctgaacacatcctgcaaaaagcccagagaaaggagcgccatggattactacagaaaatatgcagctatctttctggtcacattgtcggtgtttctgcatgttctccattccgctcctgatgtgcaggattgcccagaatgcacgctacaggaaaacccattcttctcccagccgggtgccccaatacttcagtgcatgggctgctgcttctctagagcatatcccactccactaaggtccaagaagacgatgttggtccaaaagaacgtcacctcagagtccacttgctgtgtagctaaatcatataacagggtaagaacctcaagatccccagaagctttctaacagcccaatcagagaaatgttcatagagcccacccatggaatttaatgccaaaggtgtctaatgacccagcctctgtcgagcatttgtacaggtggggaatacatttctacccattaattaaaagagtcaattgtcttgtgggtatagactggatttattcagaatgaggagaataggggtagaggtgacaaggggcaggttgggagaaagtacagcttacttgtgctaaaaatatttcctaaaaaggagactgtgcaaatgtagtatgcatctacttatttcagcagaatgcaaacaattttatgtaatattcttcaattttgtctctatctatctatctatcatctaatctataatatgtttttttttccttcccctttaggtcacagtaatggggggtttcaaagtggagaaccacacggcgtg

SEQ ID NO: 138110 - DNA, 2501 bp, Homo sapiens
  Payload ID: 7055
  Gene Symbol: GP1BA
  Gene Name: glycoprotein Ib (platelet), alpha polypeptide
  Uniprot ID: P07359
  ENST ID: ENST00000329125
  CDS Start-End: 76-2034
gagagaaggacggagtcgagtggcaccctagaagacgctctgtgccttcggaggtctttctgcctgcctgtcctcatgcctctcctcctcttgctgctcctgctgccaagccccttacacccccaccccatctgtgaggtctccaaagtggccagccacctagaagtgaactgtgacaagaggaatctgacagcgctgcctccagacctgccgaaagacacaaccatcctccacctgagtgagaacctcctgtacaccttctccctggcaaccctgatgccttacactcgcctcactcagctgaacctagataggtgcgagctcaccaagctccaggtcgatgggacgctgccagtgctggggaccctggatctatcccacaatcagctgcaaagcctgcccttgctagggcagacactgcctgctctcaccgtcctggacgtctccttcaaccggctgacctcgctgcctcttggtgccctgcgtggtcttggcgaactccaagagctctacctgaaaggcaatgagctgaagaccctgcccccagggctcctgacgcccacacccaagctggagaagctcagtctggctaacaacaacttgactgagctccccgctgggctcctgaatgggctggagaatctcgacacccttctcctccaagagaactcgctgtatacaataccaaagggcttttttgggtcccacctcctgccttttgcttttctccacgggaacccctggttatgcaactgtgagatcctctattttcgtcgctggctgcaggacaatgctgaaaatgtctacgtatggaagcaaggtgtggacgtcaaggccatgacctctaacgtggccagtgtgcagtgtgacaattcagacaagtttcccgtctacaaatacccaggaaaggggtgccccacccttggtgatgaaggtgacacagacctatatgattactacccagaagaggacactgagggcgataaggtgcgtgccacaaggactgtggtcaagttccccaccaaagcccatacaaccccctggggtctattctactcatggtccactgcttctctagacagccaaatgccctcctccttgcatccaacacaagaatccactaaggagcagaccacattcccacctagatggaccccaaatttcacacttcacatggaatccatcacattctccaaaactccaaaatccactactgaaccaaccccaagcccgaccacctcagagcccgtcccggagcccgccccaaacatgaccaccctggagcccactccaagcccgaccaccccagagcccacctcagagcccgcccccagcccgaccaccccggagcccacctcagagcccgcccccagcccgaccaccccagagcccacctcagagcccgcccccagcccgaccaccccggagcccaccccaatcccgaccatcgccacaagcccgaccatcctggtgtctgccacaagcctgatcactccaaaaagcacatttttaactaccacaaaacccgtatcactcttagaatccaccaaaaaaaccatccctgaacttgatcagccaccaaagctccgtggggtgctccaagggcatttggagagctccagaaatgacccttttctccaccccgacttttgctgcctcctccccctgggcttctatgtcttgggtctcttctggctgctctttgcctctgtggtcctcatcctgctgctgagctgggttgggcatgtgaaaccacaggccctggactctggccaaggtgctgctctgaccacagccacacaaaccacacacctggagctgcagaggggacggcaagtgacagtgccccgggcctggctgctcttccttcgaggttcgcttcccactttccgctccagcctcttcctgtgggtacggcctaatggccgtgtggggcctctagtggcaggaaggaggccctcagctctgagtcagggtcgtggtcaggacctgctgagcacagtgagcattaggtactctggccacagcctctgagggtgggaggtttggggaccttgagagaagagcctgtgggctctcctattggaatctagttgggggttggaggggtaaggaacacagggtgatagggaggggtcttagttcctttttctgtatcagaagccctgtcttcacaacacaggcacacaatttcagtcccagccaaagcagaaggggtaatgacatggacttggcggggggacaagacaaagctcccgatgctgcatggggcgctgccagatctcacggtgaaccattttggcagaatacagcatggttcccacatgcatctatgcacagaagaaaatctggaaagtgatttatcaggatgtgagcactcgttgtgtctggatgttacaaatatgggtggttttattttctttttccctgtttagcattttctagttttccactattattgtatattatctgtataataaaaaataattttagggttggga

SEQ ID NO: 138111 - DNA, 2339 bp, Homo sapiens
  Payload ID: 7055
  Gene Symbol: GP1BA
  Gene Name: glycoprotein Ib (platelet), alpha polypeptide
  ENST ID: ENST00000611961
  CDS Start-End: 43-1923
gacgctctgtgccttcggaggtctttctgcctgcctgtcctcatgcctctcctcctcttgctgctcctgctgccaagccccttacacccccaccccatctgtgaggtctccaaagtggccagccacctagaagtgaactgtgacaagaggaatctgacagcgctgcctccagacctgccgaaagacacaaccatcctccacctgagtgagaacctcctgtacaccttctccctggcaaccctgatgccttacactcgcctcactcagctgaacctagataggtgcgagctcaccaagctccaggtcgatgggacgctgccagtgctggggaccctggatctatcccacaatcagctgcaaagcctgcccttgctagggcagacactgcctgctctcaccgtcctggacgtctccttcaaccggctgacctcgctgcctcttggtgccctgcgtggtcttggcgaactccaagagctctacctgaaaggcaatgagctgaagaccctgcccccagggctcctgacgcccacacccaagctggagaagctcagtctggctaacaacaacttgactgagctccccgctgggctcctgaatgggctggagaatctcgacacccttctcctccaagagaactcgctgtatacaataccaaagggcttttttgggtcccacctcctgccttttgcttttctccacgggaacccctggttatgcaactgtgagatcctctattttcgtcgctggctgcaggacaatgctgaaaatgtctacgtatggaagcaaggtgtggacgtcaaggccatgacctctaacgtggccagtgtgcagtgtgacaattcagacaagtttcccgtctacaaatacccaggaaaggggtgccccacccttggtgatgaaggtgacacagacctatatgattactacccagaagaggacactgagggcgataaggtgcgtgccacaaggactgtggtcaagttccccaccaaagcccatacaaccccctggggtctattctactcatggtccactgcttctctagacagccaaatgccctcctccttgcatccaacacaagaatccactaaggagcagaccacattcccacctagatggaccccaaatttcacacttcacatggaatccatcacattctccaaaactccaaaatccactactgaaccaaccccaagcccgaccacctcagagcccgtcccggagcccgccccaaacatgaccaccctggagcccactccaagcccgaccaccccagagcccacctcagagcccgcccccagcccgaccaccccggagcccaccccaatcccgaccatcgccacaagcccgaccatcctggtgtctgccacaagcctgatcactccaaaaagcacatttttaactaccacaaaacccgtatcactcttagaatccaccaaaaaaaccatccctgaacttgatcagccaccaaagctccgtggggtgctccaagggcatttggagagctccagaaatgacccttttctccaccccgacttttgctgcctcctccccctgggcttctatgtcttgggtctcttctggctgctctttgcctctgtggtcctcatcctgctgctgagctgggttgggcatgtgaaaccacaggccctggactctggccaaggtgctgctctgaccacagccacacaaaccacacacctggagctgcagaggggacggcaagtgacagtgccccgggcctggctgctcttccttcgaggttcgcttcccactttccgctccagcctcttcctgtgggtacggcctaatggccgtgtggggcctctagtggcaggaaggaggccctcagctctgagtcagggtcgtggtcaggacctgctgagcacagtgagcattaggtactctggccacagcctctgagggtgggaggtttggggaccttgagagaagagcctgtgggctctcctattggaatctagttgggggttggaggggtaaggaacacagggtgatagggaggggtcttagttcctttttctgtatcagaagccctgtcttcacaacacaggcacacaatttcagtcccagccaaagcagaaggggtaatgacatggacttggcggggggacaagacaaagctcccgatgctgcatggggcgctgccagatctcacggtgaaccattttggcagaatacagcatggttcccacatgcatctatgcacagaagaaaatctggaaagtgatttatcaggatgtgagcactcgttgtgtctggatgttacaaatatgggtggttttattttctttttccctgtttagcattttctagttttc

SEQ ID NO: 138112 - DNA, 1553 bp, Homo sapiens
  Payload ID: 7056
  Gene Symbol: GP1BB
  Gene Name: glycoprotein Ib (platelet), beta polypeptide
  Uniprot ID: P13224
  ENST ID: ENST00000366425
  CDS Start-End: 626-1246
gtcttcccttatccccagacgcctagcgggcagggttgggctgaatcaaatgggagccctccagacataaggaggccagaggctgcaaggagcggggtcgtgaccgcttacaccccttctccacagcccggcccgacctggagggcccccggggcactgggcggtgagccacctcctggcaactctcggtgccgtcccctgccctcgctcgaggcctcttctccccagcaccgctgtggtgtgccgggatcctgagcctaggcctcccgatgttcccacccgcatgatcccttcccgccacacgatgctccgttttcttccgttgtgaatgccgcgtcctgtcctggtgacaggagaacaatgttggtgaacgtcgcagcgggtgtccgagtgctccgtgtgcccctgagagcgggtgggagcggaagcctgagcggcctgcggcctccggcgatagtgtgctatctgccgctgcagcgcgcgtccgcgcggcctctgggctatttctggccaggccgcagcactgtggtcggtgcgggcgtggcaggggcggggcggccttatcgctcggctctcccgcctacgcctcccgctgcagagtaagccgggctgccgtcttctcgccatgggctccgggccgcgcggggcgctgagcttactgctcctgctgctggccccgccgagccgcccggccgcaggttgcccggcgccctgtagctgcgcggggacgctcgtggactgcgggcgccgcgggctgacttgggcctcgctgccgaccgccttccctgtcgacacaaccgagctggtgctgaccggcaacaacctgacggcgctgccgccggggctgctggacgcgctgcccgcgctgcgcaccgcacacctgggcgccaacccctggcgctgcgactgccgccttgtgccgctgcgcgcctggctggccggccgccccgagcgtgcgccctaccgcgacctgcgttgcgtggcgcccccagcgctgcgcggccgcctgctgccctatctggccgaggacgagctgcgcgccgcttgcgctcccggcccgctctgctggggggcgctggcggcgcagcttgcgctgctgggccttgggctgctgcacgcgttgctgctggtgctgctgctgtgccgcctgcggaggctgcgggcccgggcccgcgctcgcgccgcagcccggctgtcgctgaccgacccgctggtggccgagcgagccggaaccgacgagtcctgaggagagaaccggtgcgtcctgaggagagaaccggcgctgggcaacacgggcctgcaaactcgacaggaccctgcccgaggggccctcgcgccaacctggaccggtccccgcctcctccgctgcccaatctctcagacccaccccacctgcaggcccagaccacgtgggacagaactcctgcccaccctaccccgagggaggcgaacccgcacttccaggcttgggaggaccatggggcacaatgcggtccagaccctgctgcgtctcccttccaaactctggtgctgaataaacccttctgatctgg

SEQ ID NO: 138113 - DNA, 2024 bp, Homo sapiens
  Payload ID: 7057
  Gene Symbol: GINM1
  Gene Name: glycoprotein integral membrane 1
  Uniprot ID: Q9NU53
  ENST ID: ENST00000367419
  CDS Start-End: 122-1114
cccgcccctccccgtctctccccgcccctccccgtccctcccgccgaagctccgtcccgcccgcgggccggctccgccctcacctcccggccgcggctgccctctgcccgggttgtccaagatggagggcgctccaccggggtcgctcgccctccggctcctgctgttcgtggcgctacccgcctccggctggctgacgacgggcgcccccgagccgccgccgctgtccggagccccacaggacggcatcagaattaatgtaactacactgaaagatgatggggacatatctaaacagcaggttgttcttaacataacctatgagagtggacaggtgtatgtaaatgacttacctgtaaatagtggtgtaacccgaataagctgtcagactttgatagtgaagaatgaaaatcttgaaaatttggaggaaaaagaatattttggaattgtcagtgtaaggattttagttcatgagtggcctatgacatctggttccagtttgcaactaattgtcattcaagaagaggtagtagagattgatggaaaacaagttcagcaaaaggatgtcactgaaattgatattttagttaagaaccggggagtactcagacattcaaactataccctccctttggaagaaagcatgctctactctatttctcgagacagtgacattttatttacccttcctaacctctccaaaaaagaaagtgttagttcactgcaaaccactagccagtatcttatcaggaatgtggaaaccactgtagatgaagatgttttacctggcaagttacctgaaactcctctcagagcagagccgccatcttcatataaggtaatgtgtcagtggatggaaaagtttagaaaagatctgtgtaggttctggagcaacgttttcccagtattctttcagtttttgaacatcatggtggttggaattacaggagcagctgtggtaataaccatcttaaaggtgtttttcccagtttctgaatacaaaggaattcttcagttggataaagtggacgtcatacctgtgacagctatcaacttatatccagatggtccagagaaaagagctgaaaaccttgaagataaaacatgtatttaaaacgccatctcatatcatggactccgaagtagcctgttgcctccaaatttgccacttgaatataattttctttaaatcgttaagaatcagtttatacactagagaaattgctaaactctaagactgcctgaaaattgacctttacagtgccaagttaaagtttaccttattctcggccgggtgcagtggctcatgcctgtaatcccaggactttgggaggccaatgcgggcggatcacgaggtcagatcaagaccatcctgccaacatggtgaaaccctgtctctactaaaaaaaataaaaaaattagctgggtgtggcggtgcacgcctgtagtcccagctacttgggaggctgaggcaggagaattgcttgaacccgggaggcggaggctgcagtgagccaagatcacgccactgcactccagcctgggtgacagagcgagactctgtttcaaaaaaaaaaaagttgaccttattctctaaaagggctggctattcatatgatgaattgttaaggaaaacttaaagtggaagagaacacatgtgaagagactttgaaattatcaaaagaaaaaaaaaagaccagacaaaatctcatgtgccaataacttttcaaggtgcctttgttaaggaaattatatccacttaattactataatatataagactttatgaaaagcactttataaaattctaatttaaaaggtcaagaacttaacacttatttttttattcagtacagtgtgcctttatattaagtatgtgactcagtataaaatcactgaagtgtatcatgatttgattgtatcctgtaccaagactacttaccttgaatgctccaagatttaaaagtagtatgacatgttctcactctaaaataaactttttttttttttttttgaggaaaaaa

SEQ ID NO: 138114 - DNA, 563 bp, Homo sapiens
  Payload ID: 7057
  Gene Symbol: GINM1
  Gene Name: glycoprotein integral membrane 1
  ENST ID: ENST00000433539
  CDS Start-End: 1-378
ttgcaactaattgtcattcaagaagaggtagtagagattgatggaaaacaagttcagcaaaaggatgtcactgaaattgatattttagttaagaaccggggagtactcagacattcaaactataccctccctttggaagaaagcatgctctactctatttctcgagacagtgacattttatttacccttcctaacctctccaaaaaagaaagtgttagttcactgcaaaccactagccagtatcttatcaggaatgtggaaaccactgtagatgaagatgttttacctggcaagttacctgaaactcctctcagagcagagccgccatcttcatataaggtactggaaacagttgactctgctccatttcgtttataatggactagcctaacgaatctcttgtcaattagcaattattttcacttgatttgtagttagaaaacaatataaataattttacaggctattaacatttttgtgcttgtattgttagaacataatttttaaagttgtaagtaacttcattgaggtacattctaaaataaaatcaccatttaaaatat

SEQ ID NO: 138115 - DNA, 889 bp, Homo sapiens
  Payload ID: 7058
  Gene Symbol: GP9
  Gene Name: glycoprotein IX (platelet)
  Uniprot ID: P14770
  ENST ID: ENST00000307395
  CDS Start-End: 223-756
cagctgtatcccatagagttgccacccaggcctcagccaggacctttcaggccagacaggagcacctgaccaaaggcttcacagccgccctcaccgcccggccttctacggtgtccagagacagttagccaggcctgggctgggcacactccaccttccctagtcaccagctggtttcccagaggagaaggctgagacccgagaagggagccagcctgtcccatgcctgcctggggagccctgttcctgctctgggccacagcagaggccaccaaggactgccccagcccatgtacctgccgcgccctggaaaccatggggctgtgggtggactgcaggggccacggactcacggccctgcctgccctgccggcccgcacccgccaccttctgctggccaacaacagccttcagtccgtgcccccgggagcctttgaccacctgccccagctgcagaccctcgatgtgacgcagaacccctggcactgtgactgcagcctcacctatctgcgcctctggctggaggaccgcacgcccgaggccctgctgcaggtccgctgtgccagccccagcctcgctgcccatggcccgctgggccggctgacaggctaccagctgggcagctgtggctggcagctgcaggcgtcctgggtgcgcccgggggtcttgtgggacgtggcgctggtcgccgtggccgcgctgggcctggctcttctggctggcctgctgtgtgccaccacagaggccctggattgagccaggcccccagaacccctggctccaggccagggggccagtccctgaggcaggtccccagactccaccaagcctggtcagcccaaaccaccagaagcccagaataaactggcagctcagctgttttatataa

SEQ ID NO: 138116 - DNA, 2854 bp, Homo sapiens
  Payload ID: 7059
  Gene Symbol: GPM6A
  Gene Name: glycoprotein M6A
  Uniprot ID: P51674
  ENST ID: ENST00000280187
  CDS Start-End: 47-883
gagaagcaggacctcgggccatggattctactgaagaaaggtagccatggaagagaatatggaagagggacagacacaaaaagggtgttttgaatgctgtatcaaatgcctggggggcattccctatgcctctctgattgccaccatcctgctctatgcgggtgttgccctgttctgtggctgcggtcatgaagcgctttctggaactgtcaacattctgcaaacctactttgagatggcaagaactgctggagacacactggatgtttttaccatgattgacatctttaagtatgtgatctacggcatcgcagctgcgttctttgtgtatggcattttgctgatggtggaaggtttcttcacaactggggccatcaaagatctctatggggatttcaaaatcaccacttgtggcagatgtgtgagcgcttggttcattatgctgacatatcttttcatgttggcctggctgggagtcacggctttcacctcactgccagtttacatgtacttcaatctgtggaccatctgccggaacaccacattagtggagggagcaaatctctgcttggaccttcgtcagtttggaattgtgacaattggagaggaaaagaaaatttgtactgtctctgagaatttcttgaggatgtgcgaatctactgagctgaacatgaccttccacttgtttattgtggcacttgctggagctggggcagcagtcattgctatggttcactaccttatggttctgtctgccaactgggcctatgtgaaagacgcctgccggatgcagaagtatgaagacatcaagtcgaaggaagagcaagagcttcatgacatccactctactcgctccaaagagcggctcaatgcatacacataaatgcatcttcctgttctttctaccatttgaatgcattggtgtttaactaagggccatccaaccatccaacctttaaaaaacaaaacgaaagtgcttctcatcaatgatatgtaaggtgacttatgaatcacctgagtacaattctttgttgtttagcacttaaatttcccaatttattaaattgatgtaaatcagatcttttctacaagctcctatccagccttttttttgaaatttctcaaactcatttactagttctgtaaaatcaaagatactaacattgtcaaatgcaaagatttgtttgatttttaaccacttcccatgtgttatacataacaccttttgcattatttcttatgttttgaaaagaaaatagctttttatactttttagttttgatttcggtaactagtttaactacaggtaaccttcaaagggaccattgtacattatgaacaatagatagagattacatcttgatgactcttgaaatatggaaattttgtctgaagatcagtggccatattactgtaggccctggttcatgttttcatcaatctaaggtgcaatttctaaatttgtaagagtaggtttaaaaaaaaaagtgcttcttatctttgttaacattgtacttttccttgatgttcttaaaaggtatttccctcagattactcatgtttatgttgtgagcatgtagaaacagtaatgctaatgcatggctagttgcctttttaagattgtgacaccaggcttaccttttaaagtttagtatatagagacaattttaatggaaataactactgtagactattgaagaatgatctctttgtgatttaagaagtggctggattggaacttttaatatgctaatgtggaaaattaattacctttatgaaggtggtttattacaaataagcacactaacccctcggaagttgttttacctactttaaaagttttaatggattgcacctctgtaaactattcctaaaatgtgtatgatatatttgaaaaggcttccattaatataatagctttgcttgcagccttccaatctatgttggtttacctgtagtgttttataaagtgtggtcagaggcccctatagaatgtattgtttgaaagtgtagtgatatatttgtgtttttatttcaagtaagtcattttaaccgaatgttcattcatattcatttataaaaagtacctgtatcaaaggaattttaacaaagagcaatcagtattattggaccaaatttggtgtttgttttcaccttgacgctcttcttttcattatttctaatgctacaagaatgctgtaaagtgtcttctaaaatgatgtagcctgacaagacatttttttcagtgtataaaactaggtagtattgtgcactgatttgaccattgtgaaatcctttctcagtgtaactgcatttctaataaaaatttattgagtgaaacaatctttgtacaatgactagtcatgcatcatcagtaattttacaagttcttgtagtaggtagggggtactactagggatatctgtggcatgattatgcattccgtagtattatttaattaatttggggttcattttgcttccttttctttatgcttagattatcttactggttcaacatttttctgatatatgcagtattacagatattcagcaaaagtattaatgggcttctttaaattctatattatagtatttcagttccgtgtcttaacagtttgtgataatttctaaaactgtcttttcaacttatgtaatgatgttgacacttttggcttttatttctggtattagagtttgtattttcacagagtgctttgtagcaggcattacaattaatctgttttgtacataaatgtgccaacagcttgatggtggcgtttttgaaatgtagaacagagtgcttgcaaaatgtaataaatacacttgtgtactttgtgtacttattattagct

SEQ ID NO: 138117 - DNA, 2821 bp, Homo sapiens
  Payload ID: 7059
  Gene Symbol: GPM6A
  Gene Name: glycoprotein M6A
  Uniprot ID: P51674
  ENST ID: ENST00000393658
  CDS Start-End: 525-1361
actctggaatgaaggggggaattacgggttggtggtcggcttcatgttaggaggacacccctccatctgttcacagctcagcctgtttccaatttaaagcccagatttcaatacaaacctcaatttcttttccccattttaaatgcaaagcaagacttgtgaatcatagtgtctctgctcctgggattcagaccaaatttccccccaaaattctcaggctatttgtttgaatacctgcttacagtggtacacaatgggcagctttgagaagaaaaattgataatcttcacggaagagtaatttgaatgaaattacacttgacagcctgtctccaagcaaacaagaggaacgagggagcctgagctaagctctgaggacttgcccaagccactgctgttggagcttcccaggaaaaaaaaaaaaaaaaaaaaaaaaaaaaaaaaaaaaaaacccccagtttttccaacatctaattgagcttttgattaattccgtgtaccagattctactgaagaaaggtagccatggaagagaatatggaagagggacagacacaaaaagggtgttttgaatgctgtatcaaatgcctggggggcattccctatgcctctctgattgccaccatcctgctctatgcgggtgttgccctgttctgtggctgcggtcatgaagcgctttctggaactgtcaacattctgcaaacctactttgagatggcaagaactgctggagacacactggatgtttttaccatgattgacatctttaagtatgtgatctacggcatcgcagctgcgttctttgtgtatggcattttgctgatggtggaaggtttcttcacaactggggccatcaaagatctctatggggatttcaaaatcaccacttgtggcagatgtgtgagcgcttggttcattatgctgacatatcttttcatgttggcctggctgggagtcacggctttcacctcactgccagtttacatgtacttcaatctgtggaccatctgccggaacaccacattagtggagggagcaaatctctgcttggaccttcgtcagtttggaattgtgacaattggagaggaaaagaaaatttgtactgtctctgagaatttcttgaggatgtgcgaatctactgagctgaacatgaccttccacttgtttattgtggcacttgctggagctggggcagcagtcattgctatggttcactaccttatggttctgtctgccaactgggcctatgtgaaagacgcctgccggatgcagaagtatgaagacatcaagtcgaaggaagagcaagagcttcatgacatccactctactcgctccaaagagcggctcaatgcatacacataaatgcatcttcctgttctttctaccatttgaatgcattggtgtttaactaagggccatccaaccatccaacctttaaaaaacaaaacgaaagtgcttctcatcaatgatatgtaaggtgacttatgaatcacctgagtacaattctttgttgtttagcacttaaatttcccaatttattaaattgatgtaaatcagatcttttctacaagctcctatccagccttttttttgaaatttctcaaactcatttactagttctgtaaaatcaaagatactaacattgtcaaatgcaaagatttgtttgatttttaaccacttcccatgtgttatacataacaccttttgcattatttcttatgttttgaaaagaaaatagctttttatactttttagttttgatttcggtaactagtttaactacaggtaaccttcaaagggaccattgtacattatgaacaatagatagagattacatcttgatgactcttgaaatatggaaattttgtctgaagatcagtggccatattactgtaggccctggttcatgttttcatcaatctaaggtgcaatttctaaatttgtaagagtaggtttaaaaaaaaaagtgcttcttatctttgttaacattgtacttttccttgatgttcttaaaaggtatttccctcagattactcatgtttatgttgtgagcatgtagaaacagtaatgctaatgcatggctagttgcctttttaagattgtgacaccaggcttaccttttaaagtttagtatatagagacaattttaatggaaataactactgtagactattgaagaatgatctctttgtgatttaagaagtggctggattggaacttttaatatgctaatgtggaaaattaattacctttatgaaggtggtttattacaaataagcacactaacccctcggaagttgttttacctactttaaaagttttaatggattgcacctctgtaaactattcctaaaatgtgtatgatatatttgaaaaggcttccattaatataatagctttgcttgcagccttccaatctatgttggtttacctgtagtgttttataaagtgtggtcagaggcccctatagaatgtattgtttgaaagtgtagtgatatatttgtgtttttatttcaagtaagtcattttaaccgaatgttcattcatattcatttataaaaagtacctgtatcaaaggaattttaacaaagagcaatcagtattattggaccaaatttggtgtttgttttcaccttgacgctcttcttttcattatttctaatgctacaagaatgctgtaaagtgtcttctaaaatgatgtagcctgacaagacatttttttcagtgtataaaactaggtagtattgtgcactgatttgaccattgtgaaatcctttctcagtgtaactgcatttctaataaaaatttattgagtgaaacaa

SEQ ID NO: 138118 - DNA, 579 bp, Homo sapiens
  Payload ID: 7059
  Gene Symbol: GPM6A
  Gene Name: glycoprotein M6A
  ENST ID: ENST00000513667
  CDS Start-End: 284-579
gaggcagcaggtgttctgtaagacagaccaggaagaggtagtaaggcagccagaaagctaccatggtacaccagagaagccaaattattcttgaggtacccactgagcttgtcagctgcaatggctaagagggtgttttgaatgctgtatcaaatgcctggggggcattccctatgcctctctgattgccaccatcctgctctatgcgggtgttgccctgttctgtggctgcggtcatgaagcgctttctggaactgtcaacattctgcaaacctactttgagatggcaagaactgctggagacacactggatgtttttaccatgattgacatctttaagtatgtgatctacggcatcgcagctgcgttctttgtgtatggcattttgctgatggtggaaggtttcttcacaactggggccatcaaagatctctatggggatttcaaaatcaccacttgtggcagatgtgtgagcgcttggttcattatgctgacatatcttttcatgttggcctggctgggagtcacggctttcacctcactgccagtttacatgtacttcaatctgtggaccatctg

SEQ ID NO: 138119 - DNA, 568 bp, Homo sapiens
  Payload ID: 7059
  Gene Symbol: GPM6A
  Gene Name: glycoprotein M6A
  ENST ID: ENST00000507540
  CDS Start-End: 445-568
aaaagagcaatgcagtttttaagaggcagttcaaattctcaccaccttcttttctctcttacagcttctcaaggaataactactgtcctgaaattagaatgacttttttctgtatgtttctgttttaattacttattctggttaatgcctcctaacaaagatcatcaggaaatctgtatttgaataagttcggtacatttcgatgatggagaatgcacatcataagaaagcgtggagcacctcagtaagagggtgttagaaaggatttattacagatttggacttgcattagggtgttttgaatgctgtatcaaatgcctggggggcattccctatgcctctctgattgccaccatcctgctctatgcgggtgttgccctgttctgtggctgcggtcatgaagcgctttctggaactgtcaacattctgcaaacctactttgagatggcaagaactgctggagacacactggatgtttttaccatgattgacatctttaagtatgtgatctacggcatcgcagctgcgttctttgtgtatggcattttgctgatggtggaaggtttct

SEQ ID NO: 138120 - DNA, 2614 bp, Homo sapiens
  Payload ID: 7059
  Gene Symbol: GPM6A
  Gene Name: glycoprotein M6A
  Uniprot ID: P51674
  ENST ID: ENST00000506894
  CDS Start-End: 353-1156
gggtgctgagacaacgtgtgtgtctgtaatgtgcattcaatgtatttaggagagagactttgcacgtgtctctaatgaaagtgaaagggggcagggtgggggcctctggggaggagacccacagtgaaggggaggaaaacgggcttctcgcagaggaggcaggtggaaagagggaggggtctgtgcgcccgcagagtcgccaggcgccctgcgagttgtctccgctgggaggggcgaggctgtcacttgccagggcgcgaggagcctcagcgcggcttggagaacttggccccgcgcagcgtctggtcactcgctctcctctggggactgcagagaagcaggacctcgggccatggggtgttttgaatgctgtatcaaatgcctggggggcattccctatgcctctctgattgccaccatcctgctctatgcgggtgttgccctgttctgtggctgcggtcatgaagcgctttctggaactgtcaacattctgcaaacctactttgagatggcaagaactgctggagacacactggatgtttttaccatgattgacatctttaagtatgtgatctacggcatcgcagctgcgttctttgtgtatggcattttgctgatggtggaaggtttcttcacaactggggccatcaaagatctctatggggatttcaaaatcaccacttgtggcagatgtgtgagcgcttggttcattatgctgacatatcttttcatgttggcctggctgggagtcacggctttcacctcactgccagtttacatgtacttcaatctgtggaccatctgccggaacaccacattagtggagggagcaaatctctgcttggaccttcgtcagtttggaattgtgacaattggagaggaaaagaaaatttgtactgtctctgagaatttcttgaggatgtgcgaatctactgagctgaacatgaccttccacttgtttattgtggcacttgctggagctggggcagcagtcattgctatggttcactaccttatggttctgtctgccaactgggcctatgtgaaagacgcctgccggatgcagaagtatgaagacatcaagtcgaaggaagagcaagagcttcatgacatccactctactcgctccaaagagcggctcaatgcatacacataaatgcatcttcctgttctttctaccatttgaatgcattggtgtttaactaagggccatccaaccatccaacctttaaaaaacaaaacgaaagtgcttctcatcaatgatatgtaaggtgacttatgaatcacctgagtacaattctttgttgtttagcacttaaatttcccaatttattaaattgatgtaaatcagatcttttctacaagctcctatccagccttttttttgaaatttctcaaactcatttactagttctgtaaaatcaaagatactaacattgtcaaatgcaaagatttgtttgatttttaaccacttcccatgtgttatacataacaccttttgcattatttcttatgttttgaaaagaaaatagctttttatactttttagttttgatttcggtaactagtttaactacaggtaaccttcaaagggaccattgtacattatgaacaatagatagagattacatcttgatgactcttgaaatatggaaattttgtctgaagatcagtggccatattactgtaggccctggttcatgttttcatcaatctaaggtgcaatttctaaatttgtaagagtaggtttaaaaaaaaaagtgcttcttatctttgttaacattgtacttttccttgatgttcttaaaaggtatttccctcagattactcatgtttatgttgtgagcatgtagaaacagtaatgctaatgcatggctagttgcctttttaagattgtgacaccaggcttaccttttaaagtttagtatatagagacaattttaatggaaataactactgtagactattgaagaatgatctctttgtgatttaagaagtggctggattggaacttttaatatgctaatgtggaaaattaattacctttatgaaggtggtttattacaaataagcacactaacccctcggaagttgttttacctactttaaaagttttaatggattgcacctctgtaaactattcctaaaatgtgtatgatatatttgaaaaggcttccattaatataatagctttgcttgcagccttccaatctatgttggtttacctgtagtgttttataaagtgtggtcagaggcccctatagaatgtattgtttgaaagtgtagtgatatatttgtgtttttatttcaagtaagtcattttaaccgaatgttcattcatattcatttataaaaagtacctgtatcaaaggaattttaacaaagagcaatcagtattattggaccaaatttggtgtttgttttcaccttgacgctcttcttttcattatttctaatgctacaagaatgctgtaaagtgtcttctaaaatgatgtagcctgacaagacatttttttcagtgtataaaactaggtagtattgtgcactgatttgaccattgtgaaatcctttctcagtgtaactgcatttctaataaaaatttattgagtgaaac

SEQ ID NO: 138121 - DNA, 551 bp, Homo sapiens
  Payload ID: 7059
  Gene Symbol: GPM6A
  Gene Name: glycoprotein M6A
  ENST ID: ENST00000509865
  CDS Start-End: 403-551
atctctgtaccgcaccctgtgttcttcagttgggaaaaaaaagggtctgtcggtatcgagtgatgcctacacttgaatgcagtagtgacttctgaactcctatatgctggccaaaaaaagaaaatcagttttattttgatttttgttgaatgaacattcttctttaaaagtaatctaaagatcatgtctacagaagctgagtgatcatagttcctgctctattagccattcatctggagaaacaaatgagggtgttttgaatgctgtatcaaatgcctggggggcattccctatgcctctctgattgccaccatcctgctctatgcgggtgttgccctgttctgtggctgcggtcatgaagcgctttctggaactgtcaacattctgcaaacctactttgagatggcaagaactgctggagacacactggatgtttttaccatgattgacatctttaagtatgtgatctacggcatcgcagctgcgttctttgtgtatggcattttgctgatggtggaaggtttcttcacaactggggccatcaaagatct

SEQ ID NO: 138122 - DNA, 737 bp, Homo sapiens
  Payload ID: 7059
  Gene Symbol: GPM6A
  Gene Name: glycoprotein M6A
  ENST ID: ENST00000503397
  CDS Start-End: 83-737
aagcacaggctctggcgtccatctctgtaccgcaccctgtgttcttcagttgggaaaaaaaagggtctgtcggtatcgagtgatgcctacacttgggtgttttgaatgctgtatcaaatgcctggggggcattccctatgcctctctgattgccaccatcctgctctatgcgggtgttgccctgttctgtggctgcggtcatgaagcgctttctggaactgtcaacattctgcaaacctactttgagatggcaagaactgctggagacacactggatgtttttaccatgattgacatctttaagtatgtgatctacggcatcgcagctgcgttctttgtgtatggcattttgctgatggtggaaggtttcttcacaactggggccatcaaagatctctatggggatttcaaaatcaccacttgtggcagatgtgtgagcgcttggttcattatgctgacatatcttttcatgttggcctggctgggagtcacggctttcacctcactgccagtttacatgtacttcaatctgtggaccatctgccggaacaccacattagtggagggagcaaatctctgcttggaccttcgtcagtttggaattgtgacaattggagaggaaaagaaaatttgtactgtctctgagaatttcttgaggatgtgcgaatctactgagctgaacatgaccttccacttgtttattgtggcacttgctggagctggggcagcagtcattg

SEQ ID NO: 138123 - DNA, 734 bp, Homo sapiens
  Payload ID: 7059
  Gene Symbol: GPM6A
  Gene Name: glycoprotein M6A
  ENST ID: ENST00000513365
  CDS Start-End: 348-734
agcaggtgttctgtaagacagaccaggaagaggtagtaaggcagccagaaagctaccatggtacaccagagaagccaaattattcttgaggtacccactgagcttgtcagctgcaatggctaagagtggctgataatgttccttacttctgtagctgagatttcccaacttaatttgggttctcatcagggtagaattccatccaagtcaatcgcagcatctgcacccacagctctgagaagggaaagatgtgcttggtggtggccccaagtttgcagtatcggattggactcattagaattacaaggaaatgaaataaagaaagattctactgaagaaaggtagccatggaagagaatatggaagagggacagacacaaaaagggtgttttgaatgctgtatcaaatgcctggggggcattccctatgcctctctgattgccaccatcctgctctatgcgggtgttgccctgttctgtggctgcggtcatgaagcgctttctggaactgtcaacattctgcaaacctactttgagatggcaagaactgctggagacacactggatgtttttaccatgattgacatctttaagtatgtgatctacggcatcgcagctgcgttctttgtgtatggcattttgctgatggtggaaggtttcttcacaactggggccatcaaagatctctatggggatttcaaaatcaccacttgtggcagatgtgtgagcgcttgg

SEQ ID NO: 138124 - DNA, 1500 bp, Homo sapiens
  Payload ID: 7059
  Gene Symbol: GPM6A
  Gene Name: glycoprotein M6A
  Uniprot ID: P51674
  ENST ID: ENST00000515090
  CDS Start-End: 326-1141
gcatatattaaatttgtctgactaggaagagttatgtcagtaaagcaattagatacatgggttgtgatttggggaaaaaagctgaattagaaatctgtacttgtaaatcatcaacaagtatgtaatcattggtgatgttgatactgatgaaatcaacctaaaggtggaacaaaaaggaccaaaaatagtgacttaaaaaaacaatttagaaaaaatctcagaacacgaaacagaatgttaaattgtcacaggagagagcttatgcccttgaatcaagggaaaatagagttcacaaggagccagcggccggcagcatcacacttttatgacagacctggaagggtgttttgaatgctgtatcaaatgcctggggggcattccctatgcctctctgattgccaccatcctgctctatgcgggtgttgccctgttctgtggctgcggtcatgaagcgctttctggaactgtcaacattctgcaaacctactttgagatggcaagaactgctggagacacactggatgtttttaccatgattgacatctttaagtatgtgatctacggcatcgcagctgcgttctttgtgtatggcattttgctgatggtggaaggtttcttcacaactggggccatcaaagatctctatggggatttcaaaatcaccacttgtggcagatgtgtgagcgcttggttcattatgctgacatatcttttcatgttggcctggctgggagtcacggctttcacctcactgccagtttacatgtacttcaatctgtggaccatctgccggaacaccacattagtggagggagcaaatctctgcttggaccttcgtcagtttggaattgtgacaattggagaggaaaagaaaatttgtactgtctctgagaatttcttgaggatgtgcgaatctactgagctgaacatgaccttccacttgtttattgtggcacttgctggagctggggcagcagtcattgctatggttcactaccttatggttctgtctgccaactgggcctatgtgaaagacgcctgccggatgcagaagtatgaagacatcaagtcgaaggaagagcaagagcttcatgacatccactctactcgctccaaagagcggctcaatgcatacacataaatgcatcttcctgttctttctaccatttgaatgcattggtgtttaactaagggccatccaaccatccaacctttaaaaaacaaaacgaaagtgcttctcatcaatgatatgtaaggtgacttatgaatcacctgagtacaattctttgttgtttagcacttaaatttcccaatttattaaattgatgtaaatcagatcttttctacaagctcctatccagccttttttttgaaatttctcaaactcatttactagttctgtaaaatcaaagatactaacattgtcaaatgcaaagatttgtttgatttttaaccacttcccatgtgttatacataacaccttttgcattatttcttatg

SEQ ID NO: 138125 - DNA, 566 bp, Homo sapiens
  Payload ID: 7059
  Gene Symbol: GPM6A
  Gene Name: glycoprotein M6A
  ENST ID: ENST00000507520
  CDS Start-End: 251-566
tcacaaggagccagcggccggcagcatcacacttttatgacagacctggaagaataaagtttagccttgttcctcgaactcaaagaaagaaagtttggggtgttttgaatgctgtatcaaatgcctggggggcattccctatgcctctctgattgccaccatcctgctctatgcgggtgttgccctgttctgtggctgcggtcatgaagcgctttctggaactgtcaacattctgcaaacctactttgagatggcaagaactgctggagacacactggatgtttttaccatgattgacatctttaagtatgtgatctacggcatcgcagctgcgttctttgtgtatggcattttgctgatggtggaaggtttcttcacaactggggccatcaaagatctctatggggatttcaaaatcaccacttgtggcagatgtgtgagcgcttggttcattatgctgacatatcttttcatgttggcctggctgggagtcacggctttcacctcactgccagtttacatgtacttcaatctgtggaccatctgccggaacaccacattagtgg

SEQ ID NO: 138126 - DNA, 561 bp, Homo sapiens
  Payload ID: 7059
  Gene Symbol: GPM6A
  Gene Name: glycoprotein M6A
  ENST ID: ENST00000505375
  CDS Start-End: 316-561
aattccgtgtaccagattctactgaagaaaggtagccatggaagagaatatggaagagggacagacacaaaaagggcatccaaacagaccacctgggattcctcagtccgcttgggcctctgatagaagcatttgtgtgcttgtatgatcttattttcgcacgggtgttttgaatgctgtatcaaatgcctggggggcattccctatgcctctctgattgccaccatcctgctctatgcgggtgttgccctgttctgtggctgcggtcatgaagcgctttctggaactgtcaacattctgcaaacctactttgagatggcaagaactgctggagacacactggatgtttttaccatgattgacatctttaagtatgtgatctacggcatcgcagctgcgttctttgtgtatggcattttgctgatggtggaaggtttcttcacaactggggccatcaaagatctctatggggatttcaaaatcaccacttgtggcagatgtgtgagcgcttggttcattatgctgacatatcttttcatgttggcctggctgggagtcacg

SEQ ID NO: 138127 - DNA, 566 bp, Homo sapiens
  Payload ID: 7059
  Gene Symbol: GPM6A
  Gene Name: glycoprotein M6A
  ENST ID: ENST00000512509
  CDS Start-End: 306-566
actcgctctcctctggggactgcagagaagcaggacctcgggccatggaatgcagtagtgacttctgaactcctatatgctggccaaaaaaagaaaatcagttttattttgatttttgttgaatgaacattcttctttaaaagtaatctaaagggtgttttgaatgctgtatcaaatgcctggggggcattccctatgcctctctgattgccaccatcctgctctatgcgggtgttgccctgttctgtggctgcggtcatgaagcgctttctggaactgtcaacattctgcaaacctactttgagatggcaagaactgctggagacacactggatgtttttaccatgattgacatctttaagtatgtgatctacggcatcgcagctgcgttctttgtgtatggcattttgctgatggtggaaggtttcttcacaactggggccatcaaagatctctatggggatttcaaaatcaccacttgtggcagatgtttcattatgctgacatatcttttcatgttggcctggctgggagtcacggctttcacctcactgccagtttacatg

SEQ ID NO: 138128 - DNA, 690 bp, Homo sapiens
  Payload ID: 7059
  Gene Symbol: GPM6A
  Gene Name: glycoprotein M6A
  ENST ID: ENST00000505561
  CDS Start-End: 423-690
aagtcgtgaattgaatccaaaaagatgaattggttcaattggccttctttcttgagaacggggaaaagatgactctcagtatgctctgaggatctctttatcccacggcaaattttaataataactatgctgccccatctttcagctactctgggtgaatctctattctttgcaatcgaaagacctctaagtaaaacaaatcttcagatccttttaggagtcttacataaagaggcttactgctaagaaattttccctgagtttaacctgggtgttttgaatgctgtatcaaatgcctggggggcattccctatgcctctctgattgccaccatcctgctctatgcgggtgttgccctgttctgtggctgcggtcatgaagcgctttctggaactgtcaacattctgcaaacctactttgagatggcaagaactgctggagacacactggatgtttttaccatgattgacatctttaagtatgtgatctacggcatcgcagctgcgttctttgtgtatggcattttgctgatggtggaaggtttcttcacaactggggccatcaaagatctctatggggatttcaaaatcaccacttgtggcagatgtgtgagcgcttggttcattatgctgacatatcttttcatgttggcctggctgggagtcacggctttcacctcactgccagttt

SEQ ID NO: 138129 - DNA, 550 bp, Homo sapiens
  Payload ID: 7059
  Gene Symbol: GPM6A
  Gene Name: glycoprotein M6A
  ENST ID: ENST00000505304
  CDS Start-End: 352-550
aaatctgaaataaaggatgagaagagtgtagatggaaaaaatggggaagaaaagatgaaacaatggaaaagtgtaattttcataacttaaaacttcaaagtatatatgtatgacttttttcgtcttcatgagattgatttgttcattcattcaacatttaataaatatataacaagcacccagtgtgggccagctgtagtcaaattgctgggaagatagcaattaaaaacaagctaacaagccaaaaccagccttcatggagcctatattctgtaaggagagagcttatgcccttgaatcaagggaaaatagagttcacaaggagccagcggccggcagcatcacacttttatgacagacctggaagggtgttttgaatgctgtatcaaatgcctggggggcattccctatgcctctctgattgccaccatcctgctctatgcgggtgttgccctgttctgtggctgcggtcatgaagcgctttctggaactgtcaacattctgcaaacctactttgagatggcaagaactgctggagacacactggatg

SEQ ID NO: 138130 - DNA, 584 bp, Homo sapiens
  Payload ID: 7059
  Gene Symbol: GPM6A
  Gene Name: glycoprotein M6A
  ENST ID: ENST00000512897
  CDS Start-End: 454-584
gagaagcgaggtgctagcaaaatcaaatctgaaataaaggatgagaagagtgtagatggaaaaaatggggaagaaaagatgaaacaatggaaaagtgtaattttcataacttaaaacttcaaagtatatatgtatgacttttttcgtcttcatgagattgatttgttcattcattcaacatttaataaatatataacaagcacccagtgtgggccagctgtagtcaaattgctgggaagatagcaattaaaaacaagctaacaagccaaaaccagccttcatggagcctatattctgtaagggtgttttgaatgctgtatcaaatgcctggggggcattccctatgcctctctgattgccaccatcctgctctatgcgggtgttgccctgttctgtggctgcggtcatgaagcgctttctggaactgtcaacattctgcaaacctactttgagatggcaagaactgctggagacacactggatgtttttaccatgattgacatctttaagtatgtgatctacggcatcgcagctgcgttctttgtgtatggcattttgctgatggtggaaggtttcttcacaac

SEQ ID NO: 138131 - DNA, 555 bp, Homo sapiens
  Payload ID: 7059
  Gene Symbol: GPM6A
  Gene Name: glycoprotein M6A
  ENST ID: ENST00000503563
  CDS Start-End: 525-555
agttgggattgagattggaaaagagcacaattaaaactagaggactctcatgggaacaagtagtcctcttgggtgtatgcatgtgtacgtgaatctgattggaggtggaagaatggcatgtaggagagaaaaaccagtgttctgaggcagcaggtgttctgtaagacagaccaggaagaggtagtaaggcagccagaaagctaccatggtacaccagagaagccaaattattcttgaggtacccactgagcttgtcagctgcaatggctaagagcttctcaaggaataactactgtcctgaaattagaatgacttttttctgtatgtttctgttttaattacttattctggttaatgcctcctaacaaagatcatcaggaaatctgtatttgaataagttcggtacatttcgatgatggagaatgcacatcataagaaagcgtggagcacctcagtaagagggtgttagaaaggatttattacagatttggacttgcattagattctactgaagaaaggtagccatggaagagaatatggaagagggacagacac

SEQ ID NO: 138132 - DNA, 616 bp, Homo sapiens
  Payload ID: 7059
  Gene Symbol: GPM6A
  Gene Name: glycoprotein M6A
  ENST ID: ENST00000502754
  CDS Start-End: 265-616
gaacaatgtactcagctgcatgccccagcagtaagacagcgtgtgtcaggccaaggaaataactgtttccaccctcccaaaagcaagagatcccatcactgactttcacaagggtgttttgaatgctgtatcaaatgcctggggggcattccctatgcctctctgattgccaccatcctgctctatgcgggtgttgccctgttctgtggctgcggtcatgaagcgctttctggaactgtcaacattctgcaaacctactttgagatggcaagaactgctggagacacactggatgtttttaccatgattgacatctttaagtatgtgatctacggcatcgcagctgcgttctttgtgtatggcattttgctgatggtggaaggtttcttcacaactggggccatcaaagatctctatggggatttcaaaatcaccacttgtggcagatgtgtgagcgcttggttcattatgctgacatatcttttcatgttggcctggctgggagtcacggctttcacctcactgccagtttacatgtacttcaatctgtggaccatctgccggaacaccacattagtggagggagcaaatctctgcttggaccttcgtcagtttg

SEQ ID NO: 138133 - DNA, 579 bp, Homo sapiens
  Payload ID: 7059
  Gene Symbol: GPM6A
  Gene Name: glycoprotein M6A
  ENST ID: ENST00000512610
  CDS Start-End: 221-579
acataaatttcggcattgcttacatattaatccttgggttcctaggctggcattggagaaactttactggtgttttgaatgctgtatcaaatgcctggggggcattccctatgcctctctgattgccaccatcctgctctatgcgggtgttgccctgttctgtggctgcggtcatgaagcgctttctggaactgtcaacattctgcaaacctactttgagatggcaagaactgctggagacacactggatgtttttaccatgattgacatctttaagtatgtgatctacggcatcgcagctgcgttctttgtgtatggcattttgctgatggtggaaggtttcttcacaactggggccatcaaagatctctatggggatttcaaaatcaccacttgtggcagatgtgtgagcgcttggttcattatgctgacatatcttttcatgttggcctggctgggagtcacggctttcacctcactgccagtttacatgtacttcaatctgtggaccatctgccggaacaccacattagtggagggagcaaatctctgcttggaccttcgtcagtttggtaagtg

SEQ ID NO: 138134 - DNA, 3275 bp, Homo sapiens
  Payload ID: 7060
  Gene Symbol: GPM6B
  Gene Name: glycoprotein M6B
  Uniprot ID: Q13491
  ENST ID: ENST00000316715
  CDS Start-End: 439-1425
agaagaaatgaggtggggagaaagagagagagagagagagatcgagattgagatcttaagaaagagagcaaggaggaagagcccggtggggagcaggtccttctcccccacccccctacccccaactcccactggagccgcattgagactgtaggcaccaccgggcgccgaatggctgttttctaactgggatcctcggtgacgtatggctgcctgccccttggcagctgtctttatggaccagtaggcagagcgaaattgacgctgacaagacttttgcatcttggaagggactgtaatctactgtagtgaagaacagagcctctcaatcagacgggtgtaaataagagacggaggggagtccaaaagaaaaggaagaggaggaaaaacaagtgtgtgttggggggaacagggggaaaagcatttttggtggatggtatgaagccagccatggaaactgcagccgaggaaaatactgaacaaagccaagagagaaaagtgaacagcagagctgaaatggaaattggcaggtaccactggatgtacccaggctcaaagaaccaccagtaccatcccgtgccaaccctgggggacagggctagccccttgagcagtccaggctgctttgaatgctgcatcaagtgtctgggaggagtcccctacgcctccctggtggccaccatcctctgcttctccggggtggccttattctgcggctgtgggcatgtggctctcgcaggcaccgtggcgattcttgagcaacacttctccaccaacgccagtgaccatgccttgctgagcgaggtgatacaactgatgcagtatgtcatctatggaattgcgtcctttttcttcttgtatgggatcattctgttggcagaaggcttttacaccacaagtgcagtgaaagaactgcacggtgagtttaaaacaaccgcttgtggccgatgcatcagtggaatgttcgttttcctcacctatgtgcttggagtggcctggctgggtgtgtttggtttctcagcggtgcccgtgtttatgttctacaacatatggtcaacttgtgaagtcatcaagtcaccgcagaccaacgggaccacgggtgtggagcagatctgtgtggatatccgacaatacggtatcattccttggaatgctttccccggaaaaatatgtggctctgccctggagaacatctgcaacacaaacgagttctacatgtcctatcacctgttcattgtggcctgtgcaggagctggtgccaccgtcattgccctgatccacttcctcatgatactgtcttctaactgggcttacttaaaggatgcgagcaaaatgcaggcttaccaggatatcaaagcaaaggaagaacaggaactgcaagatatccagtctcggtcaaaagaacaactcaattcttacacataaatgtttgccagagtgtttcggccgacgtatttacagctctgacaaatcatcagacagctgctctgcagtacagatgtgtatcccaccaaactaatgtagatgtacaaacacttcactgtctgtctcaagctgctgggatgtatctctaggaaaaccttccagtgggtaaatctttttctttagaacaaatattggaggtttcatgttagccattttaaaaggcaacactttgacaaaatgatcgttcatactttgggaatttgtggcatgttcacatttattgctagggcaattctaccaagacactcaatggaatatgtcacactccttaatagggacctgtgactccttaataaggacctgtgacatgcccagcatcaagggataagaccgtaaattcacatatatgccatctgtcctcaagtgttatctacataggaaataaaatggaattgatgtaaagttccatttctgacagctgacatttattaaactttggatcaaagataatgtgattcttatgattgatttctcaaactagcttttccctcccaagtccaggacccattaatttcctgagccaatcagaaatatatttttcaataatgctaaaattagctacaattctgctgaccctactattaaagaatctggatgctggactcactgacaagctttccagaagcaattttataacagatttcattttaacaaaatactgatccaattttcattattcttgagaaatgtcagctttgccttaatgagtatttgctttaaatttctaagaatttatatcataactagagacccaaatatctttcacagaattttgttccataaatgtttttcttaattattaagaagtgttaccttattaaaatgaccaccattctaaaccatttttcagtggtctggatacgaagtttacagtttcataccaactatctaaaacctaattgcaaattgaccacagacctctaacctcctacttttatagacttgaatacttaagtaatttaaattagggttggtatttcatttttttcttatctaaatcttagtttcctggaataataaagtttgatgttcagcaagagaactgcttgagtttaagccattttcaaaagaaacttgccttttacattattgtgttccagaacattaagtgactgtaggtactgggtattagtgatggtaaactttgtgttgctctttatgaaatgatccatataactgttgggtgcatcagtgcttttcaaaggggctgcttactatagggttaactatgtatattcattgttaagagttaacttgtggtttggctgtttcctggattttataacatacatgtgcagaaatgtattcaaatgaaaggaagcatacctttatcaagatgctattaaaattgaacatcaagtataatatttcatttggattctcttttttggttaatgcctaaaaatgcctatttgggatttttttttttttttaaattaagagaagctctcttctgtgtagaacagttgttccaaaatagcttagtgttttgttttcctgttgcatgacagatttaactattctttccagcagtggaggtgctgtcagagtccagtgttctagaagaggcagtgtctaaagcctaattttacttttctaattctggtagctattaccaggaatttttgaaagttttgtttaagtagtctaatattttttatgtaaagagcattaaattttgctatgtataaatttttgtaacctaacagtgaatcaatattttctatcagtgccaagggcttcctgtagttctattcaagtgttacaataaatatttgtagataatagtc

SEQ ID NO: 138135 - DNA, 1673 bp, Homo sapiens
  Payload ID: 7060
  Gene Symbol: GPM6B
  Gene Name: glycoprotein M6B
  Uniprot ID: Q13491
  ENST ID: ENST00000355135
  CDS Start-End: 166-1083
cttttgcatcttggaagggactgtaatctactgtagtgaagaacagagcctctcaatcagacgggtgtaaataagagacggaggggagtccaaaagaaaaggaagaggaggaaaaacaagtgtgtgttggggggaacagggggaaaagcatttttggtggatggtatgaagccagccatggaaactgcagccgaggaaaatactgaacaaagccaagagagaaaagtgaacagcagagctgaaatggaaattggcaggtaccactggatgtacccaggctcaaagaaccaccagtaccatcccgtgccaaccctgggggacagggctagccccttgagcagtccaggctgctttgaatgctgcatcaagtgtctgggaggagtcccctacgcctccctggtggccaccatcctctgcttctccggggtggccttattctgcggctgtgggcatgtggctctcgcaggcaccgtggcgattcttgagcaacacttctccaccaacgccagtgaccatgccttgctgagcgaggtgatacaactgatgcagtatgtcatctatggaattgcgtcctttttcttcttgtatgggatcattctgttggcagaaggcttttacaccacaagtgcagtgaaagaactgcacggtgagtttaaaacaaccgcttgtggccgatgcatcagtggaatgttcgttttcctcacctatgtgcttggagtggcctggctgggtgtgtttggtttctcagcggtgcccgtgtttatgttctacaacatatggtcaacttgtgaagtcatcaagtcaccgcagaccaacgggaccacgggtgtggagcagatctgtgtggatatccgacaatacggtatcattccttggaatgctttccccggaaaaatatgtggctctgccctggagaacatctgcaacacaaacgagttctacatgtcctatcacctgttcattgtggcctgtgcaggagctggtgccaccgtcattgccctgctgatctacatgatggctactacatataactatgcggttttgaagtttaagagtcgggaagattgctgcactaaattctaaattgcataaggagttttagagagctatgctctgtagcatgaaatatcactgacactccagactaaagcagagtctaggtttctgcaattttgttacagtaatttgtaaatagctttagtaaactcaccttgcatggtagattaataagatgacttactgtacatgaattacacaataatgagatctggtggctatttccacattttgaaaaggattcagttatttactgacagtggtgagcatcctttttaaaataatgttctcatacttaaacattagagagcagtatctttaaatgaattattaacactttggaatacttacattttctgttatttttgattgcctgataaccagtttcaatgatgaaaatgaaaacaagtgctgaagatgaaatggaagagaaccgttttaatctggattttgttttgtcacacctggaaaatactttgcaaatatgttctaaattgaaaacaatttttttatgatcacatggttcactaccaaatgaccctcaaataagccagatgaaaatttgaagaaaaaggtcacccagttctctggaaaaaaaaaaaaaaaaaaaaaaaaaa

SEQ ID NO: 138136 - DNA, 1830 bp, Homo sapiens
  Payload ID: 7060
  Gene Symbol: GPM6B
  Gene Name: glycoprotein M6B
  Uniprot ID: Q13491
  ENST ID: ENST00000356942
  CDS Start-End: 443-1240
ggctagaagaaatgaggtggggagaaagagagagagagagagagatcgagattgagatcttaagaaagagagcaaggaggaagagcccggtggggagcaggtccttctcccccacccccctacccccaactcccactggagccgcattgagactgtaggcaccaccgggcgccgaatggctgttttctaactgggatcctcggtgacgtatggctgcctgccccttggcagctgtctttatggaccagtaggcagagcgaaattgacgctgacaagacttttgcatcttggaagggactgtaatctactgtagtgaagaacagagcctctcaatcagacgggtgtaaataagagacggaggggagtccaaaagaaaaggaagaggaggaaaaacaagtgtgtgttggggggaacagggggaaaagcatttttggtggatggtatgaagccagccatggaaactgcagccgaggaaaatactgaacaaagccaagagagaaaaggctgctttgaatgctgcatcaagtgtctgggaggagtcccctacgcctccctggtggccaccatcctctgcttctccggggtggccttattctgcggctgtgggcatgtggctctcgcaggcaccgtggcgattcttgagcaacacttctccaccaacgccagtgaccatgccttgctgagcgaggtgatacaactgatgcagtatgtcatctatggaattgcgtcctttttcttcttgtatgggatcattctgttggcagaaggcttttacaccacaagtgcagtgaaagaactgcacggtgagtttaaaacaaccgcttgtggccgatgcatcagtggaatgttcgttttcctcacctatgtgcttggagtggcctggctgggtgtgtttggtttctcagcggtgcccgtgtttatgttctacaacatatggtcaacttgtgaagtcatcaagtcaccgcagaccaacgggaccacgggtgtggagcagatctgtgtggatatccgacaatacggtatcattccttggaatgctttccccggaaaaatatgtggctctgccctggagaacatctgcaacacaaacgagttctacatgtcctatcacctgttcattgtggcctgtgcaggagctggtgccaccgtcattgccctgctgatctacatgatggctactacatataactatgcggttttgaagtttaagagtcgggaagattgctgcactaaattctaaattgcataaggagttttagagagctatgctctgtagcatgaaatatcactgacactccagactaaagcagagtctaggtttctgcaattttgttacagtaatttgtaaatagctttagtaaactcaccttgcatggtagattaataagatgacttactgtacatgaattacacaataatgagatctggtggctatttccacattttgaaaaggattcagttatttactgacagtggtgagcatcctttttaaaataatgttctcatacttaaacattagagagcagtatctttaaatgaattattaacactttggaatacttacattttctgttatttttgattgcctgataaccagtttcaatgatgaaaatgaaaacaagtgctgaagatgaaatggaagagaaccgttttaatctggattttgttttgtcacacctggaaaatactttgcaaatatgttctaaattgaaaacaatttttttatgatcacatggttcactaccaaatgaccctcaaataagccagatgaaaatttgaagaaaaaggtcacccagttctctggaaaaaaaaaaaaaaaaaaaaaaaaaa

SEQ ID NO: 138137 - DNA, 1033 bp, Homo sapiens
  Payload ID: 7060
  Gene Symbol: GPM6B
  Gene Name: glycoprotein M6B
  ENST ID: ENST00000398361
  CDS Start-End: 287-826
gctcaggtggcgcctcctcggccacctctgcgacgaagccgggacgctggaggtgggaggggcgcggcgcaggtgtccggaacgcccaggctgctttgaatgctgcatcaagtgtctgggaggagtcccctacgcctccctggtggccaccatcctctgcttctccggggtggccttattctgcggctgtgggcatgtggctctcgcaggcaccgtggcgattcttgagcaacacttctccaccaacgccagtgaccatgccttgctgagcgaggtgatacaactgatgcagtatgtcatctatggaattgcgtcctttttcttcttgtatgggatcattctgttggcagaaggcttttacaccacaagtgcagtgaaagaactgcacggtgagtttaaaacaaccgcttgtggccgatgcatcagtggaatgttcgttttcctcacctatgtgcttggagtggcctggctgggtgtgtttggtttctcagcggtgcccgtgtttatgttctacaacatatggtcaacttgtgaagtcatcaagtcaccgcagaccaacgggaccacgggtgtggagcagatctgtgtggatatccgacaatacggtatcattccttggaatgctttccccggaaaaatatgtggctctgccctggagaacatctgcaacacaaacgagttctacatgtcctatcacctgttcattgtggcctgtgcaggagctggtgccaccgtcattgccctgctgatctacatgatggctactacatataactatgcggttttgaagtttaagagtcgggaagattgctgcactaaattctaaattgcataaggagttttagagagctatgctctgtagcatgaaatatcactgacactccagactaaagcagagtctaggtttctgcaattttgttacagtaatttgtaaatagctttagtaaactcaccttgcatggtagattaataagatgacttactgtacatgaattacacaataatgagatctggtggctatttccacattttg

SEQ ID NO: 138138 - DNA, 3957 bp, Homo sapiens
  Payload ID: 7060
  Gene Symbol: GPM6B
  Gene Name: glycoprotein M6B
  Uniprot ID: Q13491
  ENST ID: ENST00000454189
  CDS Start-End: 129-869
agcgcagcccgcagaagcccggtcagcgcacgtgcccgcgagacctgcaaacttgtgccaccggctctgcccgtccccggggagcccgaacgccccgcagccctcacccctcccgccagtctccagccatgggctgctttgaatgctgcatcaagtgtctgggaggagtcccctacgcctccctggtggccaccatcctctgcttctccggggtggccttattctgcggctgtgggcatgtggctctcgcaggcaccgtggcgattcttgagcaacacttctccaccaacgccagtgaccatgccttgctgagcgaggtgatacaactgatgcagtatgtcatctatggaattgcgtcctttttcttcttgtatgggatcattctgttggcagaaggcttttacaccacaagtgcagtgaaagaactgcacggtgagtttaaaacaaccgcttgtggccgatgcatcagtggaatgttcgttttcctcacctatgtgcttggagtggcctggctgggtgtgtttggtttctcagcggtgcccgtgtttatgttctacaacatatggtcaacttgtgaagtcatcaagtcaccgcagaccaacgggaccacgggtgtggagcagatctgtgtggatatccgacaatacggtatcattccttggaatgctttccccggaaaaatatgtggctctgccctggagaacatctgcaacacaaacgagttctacatgtcctatcacctgttcattgtggcctgtgcaggagctggtgccaccgtcattgccctgctgatctacatgatggctactacatataactatgcggttttgaagtttaagagtcgggaagattgctgcactaaattctaaattgcataaggagttttagagagctatgctctgtagcatgaaatatcactgacactccagactaaagcagagtctaggtttctgcaattttgttacagtaatttgtaaatagctttagtaaactcaccttgcatggtagattaataagatgacttactgtacatgaattacacaataatgagatctggtggctatttccacattttgaaaaggattcagttatttactgacagtggtgagcatcctttttaaaataatgttctcatacttaaacattagagagcagtatctttaaatgaattattaacactttggaatacttacattttctgttatttttgattgcctgataaccagtttcaatgatgaaaatgaaaacaagtgctgaagatgaaatggaagagaaccgttttaatctggattttgttttgtcacacctggaaaatactttgcaaatatgttctaaattgaaaacaatttttttatgatcacatggttcactaccaaatgaccctcaaataagccagatgaaaatttgaagaaaaaggtcacccagttctctggaaaaaaaaaaaaaaaaaaaaaaaaaaggatttatatgtgggtagttttttttttggtacaacacaatcattctgttagagcccacaaaattggtaaccttaaattgtgtgttttggtaagtaataactaactgtttcctcatagctagttctcaagctgcatgtaagattttaacgggaagagaaaataggcctggacctgaaggtctcaaatatgttgagaagaaagtatgaactataaggaacttgagatgtagatttattttgcaggaaatacgaggaaaataggaaagaagtgtttgccgcatcaagtgtaaagaatgatactgaggatttttacattttatgaaatgaaataatggcatttacaaaatgaaaaatgtagtttcacaactaagttttgttaacagagactgcatgctttgcttatagttcttaattttggttttgacattcatttaattttttccatgttaaatatgtagtttaattatttactcaaaataaacattgttcatgcttttaggcctttgggggaattgatttttatccacaggtagaaaatggtctttgcacacactacacttatttcaaatatacaatgtgctcccgaactttcgcattagtctttaaaattactctcaaaatggtattaaaaaaaaaaaaaaaagcaccctctcgtatttcatttttgctttttcttaacaatacctttggccatttttttccagttcactatgtttgtatactaacttttcttcagccttttaatgcgaagccaactagtagagcatgctttcaggatctgacagctctgctagtagagcgagtatttattaatacagaattaaccttcgcccctttaaagtcaagtctgtctaatctaactagcgcctcgctttgccttctcacaatgctcactagccatcatgctcacccttctcttccagatccacttcctcatgatactgtcttctaactgggcttacttaaaggatgcgagcaaaatgcaggcttaccaggatatcaaagcaaaggaagaacaggaactgcaagatatccagtctcggtcaaaagaacaactcaattcttacacataaatgtttgccagagtgtttcggccgacgtatttacagctctgacaaatcatcagacagctgctctgcagtacagatgtgtatcccaccaaactaatgtagatgtacaaacacttcactgtctgtctcaagctgctgggatgtatctctaggaaaaccttccagtgggtaaatctttttctttagaacaaatattggaggtttcatgttagccattttaaaaggcaacactttgacaaaatgatcgttcatactttgggaatttgtggcatgttcacatttattgctagggcaattctaccaagacactcaatggaatatgtcacactccttaatagggacctgtgactccttaataaggacctgtgacatgcccagcatcaagggataagaccgtaaattcacatatatgccatctgtcctcaagtgttatctacataggaaataaaatggaattgatgtaaagttccatttctgacagctgacatttattaaactttggatcaaagataatgtgattcttatgattgatttctcaaactagcttttccctcccaagtccaggacccattaatttcctgagccaatcagaaatatatttttcaataatgctaaaattagctacaattctgctgaccctactattaaagaatctggatgctggactcactgacaagctttccagaagcaattttataacagatttcattttaacaaaatactgatccaattttcattattcttgagaaatgtcagctttgccttaatgagtatttgctttaaatttctaagaatttatatcataactagagacccaaatatctttcacagaattttgttccataaatgtttttcttaattattaagaagtgttaccttattaaaatgaccaccattctaaaccatttttcagtggtctggatacgaagtttacagtttcataccaactatctaaaacctaattgcaaattgaccacagacctctaacctcctacttttatagacttgaatacttaagtaatttaaattagggttggtatttcatttttttcttatctaaatcttagtttcctggaataataaagtttgatgttcagcaagagaactgcttgagtttaagccattttcaaaagaaacttgccttttacattattgtgttccagaacattaagtgactgtaggtactgggtattagtgatggtaaactttgtgttgctctttatgaaatgatccatataactgttgggtgcatcagtgcttttcaaaggggctgcttactatagggttaactatgtatattcattgttaagagttaacttgtggtttggctgtttcctggattttataacatacatgtgcagaaatgtattcaaatgaaaggaagcatacctttatcaagatgctattaaaattgaacatcaagtataa

SEQ ID NO: 138139 - DNA, 558 bp, Homo sapiens
  Payload ID: 7060
  Gene Symbol: GPM6B
  Gene Name: glycoprotein M6B
  ENST ID: ENST00000493085
  CDS Start-End: 275-558
aattccaacgtgcatcaagacggaaaaccaccgtgtaactccttgcttctcaaaatgtcccaggacaaaggccccaggctgctttgaatgctgcatcaagtgtctgggaggagtcccctacgcctccctggtggccaccatcctctgcttctccggggtggccttattctgcggctgtgggcatgtggctctcgcaggcaccgtggcgattcttgagcaacacttctccaccaacgccagtgaccatgccttgctgagcgaggtgatacaactgatgcagtatgtcatctatggaattgcgtcctttttcttcttgtatgggatcattctgttggcagaaggcttttacaccacaagtgcagtgaaagaactgcacggtgagtttaaaacaaccgcttgtggccgatgcatcagtggaatgttcgttttcctcacctatgtgcttggagtggcctggctgggtgtgtttggtttctcagcggtgcccgtgtttatgttctacaacatatggtcaacttgtgaagtcatcaagtcaccgcagaccaacgggaccacggg

SEQ ID NO: 138140 - DNA, 678 bp, Homo sapiens
  Payload ID: 7060
  Gene Symbol: GPM6B
  Gene Name: glycoprotein M6B
  ENST ID: ENST00000475307
  CDS Start-End: 358-678
gaaagagagagagagagagagatcgagattgagatcttaagaaagagagcaaggaggaagagcccgactgtaggcaccaccgggcgccgaatggctgttttctaactgggatcctcggtgacgtatggctgcctgccccttggcagctgtctttatggaccagtaggcagagcgaaattgacgctgacaagacttttgcatcttggaagggactgtaatctactgtagtgaagaacagagcctctcaatcagacgggtgtaaataagagacggaggggagtccaaaagaaaaggaagaggaggaaaaacaagtgtgtgttggggggaacagggggaaaagcatttttggtggatggtatgaagccagccatggaaactgcagccgaggaaaatactgaacaaagccaagagagaaaaggctgctttgaatgctgcatcaagtgtctgggaggagtcccctacgcctccctggtggccaccatcctctgcttctccggggtggccttattctgcggctgtgggcatgtggctctcgcaggcaccgtggcgattcttgagcaacacttctccaccaacgccagtgaccatgccttgctgagcgaggtgatacaactgatgcagtatgtcatctatggaattgcgtcctttttcttcttgtatgggatcattctgttggca

SEQ ID NO: 138141 - DNA, 587 bp, Homo sapiens
  Payload ID: 7060
  Gene Symbol: GPM6B
  Gene Name: glycoprotein M6B
  ENST ID: ENST00000468080
  CDS Start-End: 359-587
aaccatatgcttgcctgcatctaatgtgaaaccatccctgctccatgttcttagcatcctaggttcgtttccttcttggcactcaccgtggcttgaaatcacatggatttatgtgattatttgagtatgcctttccccactaaactgtcagcttcatgaaggctgctttgaatgctgcatcaagtgtctgggaggagtcccctacgcctccctggtggccaccatcctctgcttctccggggtggccttattctgcggctgtgggcatgtggctctcgcaggcaccgtggcgattcttgagcaacacttctccaccaacgccagtgaccatgccttgctgagcgaggtgatacaactgatgcagtatgtcatctatggaattgcgtcctttttcttcttgtatgggatcattctgttggcagaaggcttttacaccacaagtgcagtgaaagaactgcacggtgagtttaaaacaaccgcttgtggccgatgcatcagtggaatgttcgttttcctcacctatgtgcttggagtggcctggctgggtgtgtttggtttctcagcggtgcccgtgtttatgttctaca

SEQ ID NO: 138142 - DNA, 1372 bp, Homo sapiens
  Payload ID: 7060
  Gene Symbol: GPM6B
  Gene Name: glycoprotein M6B
  ENST ID: ENST00000493677
  CDS Start-End: 282-1190
cttttgcatcttggaagggactgtaatctactgtagtgaagaacagagcctctcaatcagacgggtgtaaataagagacggaggggagtccaaaagaaaaggaagaggaggaaaaacaagtgtgtgttggggggaacagggggaaaagcatttttggtggatggtatgaagccagccatggaaactgcagccgaggaaaatactgaacaaagccaagagagaaaagaacatttaaatgtggaaaagatctcaacgagccatttgtgaacagcagagctgaaatggaaattggcaggtaccactggatgtacccaggctcaaagaaccaccagtaccatcccgtgccaaccctgggggacagggctagccccttgagcagtccaggctgctttgaatgctgcatcaagtgtctgggaggagtcccctacgcctccctggtggccaccatcctctgcttctccggggtggccttattctgcggctgtgggcatgtggctctcgcaggcaccgtggcgattcttgagcaacacttctccaccaacgccagtgaccatgccttgctgagcgaggtgatacaactgatgcagtatgtcatctatggaattgcgtcctttttcttcttgtatgggatcattctgttggcagaaggcttttacaccacaagtgcagtgaaagaactgcacggtgagtttaaaacaaccgcttgtggccgatgcatcagtggaatgttcgttttcctcacctatgtgcttggagtggcctggctgggtgtgtttggtttctcagcggtgcccgtgtttatgttctacaacatatggtcaacttgtgaagtcatcaagtcaccgcagaccaacgggaccacgggtgtggagcagatctgtgtggatatccgacaatacggtatcattccttggaatgctttccccggaaaaatatgtggctctgccctggagaacatctgcaacacaaacgagttctacatgtcctatcacctgttcattgtggcctgtgcaggagctggtgccaccgtcattgccctgatccacttcctcatgatactgtcttctaactgggcttacttaaaggatgcgagcaaaatgcaggcttaccaggatatcaaagcaaaggaagaacaggaactgcaagatatccagtctcggtcaaaagaacaactcaattcttacacataaatgtttgccagagtgtttcggccgacgtatttacagctctgacaaatcatcagacagctgctctgcagtacagatgtgtatcccaccaaactaatgtagatgtacaaacacttcactgtctgtctcaagctgctgggatgtatctctaggaaaaccttccagtgggtaaatctttttcttta

SEQ ID NO: 138143 - DNA, 3534 bp, Homo sapiens
  Payload ID: 7061
  Gene Symbol: GP5
  Gene Name: glycoprotein V (platelet)
  Uniprot ID: P40197
  ENST ID: ENST00000401815
  CDS Start-End: 73-1755
ggatcccagggttcagtacaggcgcgaacgctcctgtgtgttgaccacactcccacggttgctttttcagacatgctgagggggactctactgtgcgcggtgctcgggcttctgcgcgcccagcccttcccctgtccgccagcttgcaagtgtgtcttccgggacgccgcgcagtgctcggggggcgacgtggcgcgcatctccgcgctaggcctgcccaccaacctcacgcacatcctgctcttcggaatgggccgcggcgtcctgcagagccagagcttcagcggcatgaccgtcctgcagcgcctcatgatctccgacagccacatttccgccgttgcccccggcaccttcagtgacctgataaaactgaaaaccctgaggctgtcgcgcaacaaaatcacgcatcttccaggtgcgctgctggataagatggtgctcctggagcagttgtttttggaccacaatgcgctaaggggcattgaccaaaacatgtttcagaaactggttaacctgcaggagctcgctctgaaccagaatcagctcgatttccttcctgccagtctcttcacgaatctggagaacctgaagttgttggatttatcgggaaacaacctgacccacctgcccaaggggttgcttggagcacaggctaagctcgagagacttctgctccactcgaaccgccttgtgtctctggattcggggctgttgaacagcctgggcgccctgacggagctgcagttccaccgaaatcacatccgttccatcgcacccggggccttcgaccggctcccaaacctcagttctttgacgctttcgagaaaccaccttgcgtttctcccctctgcgctctttcttcattcgcacaatctgactctgttgactctgttcgagaacccgctggcagagctcccgggggtgctcttcggggagatggggggcctgcaggagctgtggctgaaccgcacccagctgcgcaccctgcccgccgccgccttccgcaacctgagccgcctgcggtacttaggggtgactctgagcccgcggctgagcgcgcttccgcagggcgccttccagggccttggcgagctccaggtgctcgccctgcactccaacggcctgaccgccctccccgacggcttgctgcgcggcctcggcaagctgcgccaggtgtccctgcgccgcaacaggctgcgcgccctgccccgtgccctcttccgcaatctcagcagcctggagagcgtccagctcgaccacaaccagctggagaccctgcctggcgacgtgtttggggctctgccccggctgacggaggtcctgttggggcacaactcctggcgctgcgactgtggcctggggcccttcctggggtggctgcggcagcacctaggcctcgtgggcggggaagagcccccacggtgcgcaggccctggggcgcacgccggcctgccgctctgggccctgccggggggtgacgcggagtgcccgggcccccggggcccgcctccccgccccgctgcggacagctcctcggaagcccctgtccacccagccttggctcccaacagctcagaaccctgggtgtgggcccagccggtgaccacgggcaaaggtcaagatcatagtccgttctgggggttttattttctgcttttagctgttcaggccatgatcaccgtgatcatcgtgtttgctatgattaaaattggccaactctttcgaaaattaatcagagagagagcccttgggtaaaccaatgggaaaatcttctaattacttagaacctgaccagatgtggctcggaggggaatccagacccgctgctgtcttgctctccctcccctccccactcctcctctcttcttcctcttctctctcactgccacgccttcctttccctcctcctccccctctccgctctgtgctcttcattctcacaggcccgcaacccctcctctctgtgtcccccgcccgttcctggaaactgagcttgacgtttgtaaactgtggttgcctgccttccccagctcccacgcgggtgtgcgctgacactgccgggggcgctggactgtgttggacccatccgtgctccgctgtgcctggcttggcgtctggtggagagaggggcctcttcagtgtctactgagtaaggggacagctccaggccggggcctgtctcctgcacagagtaagccggtaaatgtttgtgaaatcaatgcgtggataaaggaacacatgccatccaagtgatgatggcttttcctggagggaaaggataggctgttgctctatctaattttttgtttttgtttttggacagtctagctctgtggcccaggctggcgtgcagtgggccgtctcagttcactgcagcctccgcctcccaggttcaagtgattctcatgcctcagcgttctgagtagctgggattagaggcgtgtgccactacacccggctaatttttgtactttttaaagtagagacggggctttgccatattggcctggctgatctcaaactcctggtcttgaactcctggccacaagtgatctgcccgccttggcctcccaaagtgctgggattacaggcgtaagccactacacctggccctcttcatcgaattttatttgagaagtagagctcttgccattttttcccttgctccatttttctcactttatgtctctctgacctatgggctacttgggagagcactggactccattcatgcatgagcattttcaggataagcgacttctgtgaggctgagagaggaagaaaacacggagccttccctccaggtgcccagtgtaggtccagcgtgtttcctgagcctcctgtgagtttccacttgctttacatccatgcaacatgtcattttgaaactggattgatttgcatttcctggaactctgccacctcatttcacaagcatttatggagcagttaacatgtgactggtattcatgaatataatgataagcttgattctagttcagctgctgtcacagtctcatttgttcttccaactgaaagccgtaaaacctttgttgctttaattgaatgtctgtgcttatgagaggcagtggttaaaacaggggctggcgagttgacaactgtgggttcaaatcccagctctaccacttactaactgcatgggactttgggtaagacacctgcttacattctctaagccttggtttcctgaaccttaaaacaggataacatagtacctgcttcgtagagtttttgtgagaattaaaggcaataaagcatataatgacttagcccagcggcctgcaggcaatacatgttaatgaatgttagctattattactaaaggatgagcaattattattggcatcatgatttctaaagaagagctttgagttggtatttttctctgtgtataagggtaagtccgaactttctcagactggaggttacattcacatcagtctgtcttcccctgcggatggcctcagccctgggtggccagactctgtgctcacaatccagagcaatggatcc

SEQ ID NO: 138144 - DNA, 2268 bp, Homo sapiens
  Payload ID: 7062
  Gene Symbol: GP6
  Gene Name: glycoprotein VI (platelet)
  Uniprot ID: Q9HCN6
  ENST ID: ENST00000310373
  CDS Start-End: 29-1891
acagagctcaggacagggctgaggaaccatgtctccatccccgaccgccctcttctgtcttgggctgtgtctggggcgtgtgccagcgcagagtggaccgctccccaagccctccctccaggctctgcccagctccctggtgcccctggagaagccagtgaccctccggtgccagggacctccgggcgtggacctgtaccgcctggagaagctgagttccagcaggtaccaggatcaggcagtcctcttcatcccggccatgaagagaagtctggctggacgctaccgctgctcctaccagaacggaagcctctggtccctgcccagcgaccagctggagctcgttgccacgggagtttttgccaaaccctcgctctcagcccagcccggcccggcggtgtcgtcaggaggggacgtaaccctacagtgtcagactcggtatggctttgaccaatttgctctgtacaaggaaggggaccctgcgccctacaagaatcccgagagatggtacagggctagttttcccatcatcacggtgaccgccgcccacagcggaacctaccgatgctacagcttctccagcagggacccatacctgtggtcagcccccagcgaccccctggagcttgtggtcacaggaacctctgtgacccccagccggttaccaacagaaccaccttccccggtagcagaattctcagaagccaccgctgaactgaccgtctcattcacaaacgaagtcttcacaactgagacttctaggagtatcaccgccagtccaaaggagtcagactctccagctggtgagtcctgcccgccagtactacaccaagggcaacctggtccggatatgcctcggggctgtgatcctaataatcctggcggggtttctggcagaggactggcacagccggaggaagcgcctgcggcacaggggcagggctgtgcagaggccgcttccgcccctcccgcccctcccgctgacccggaaatcaaacgggggtcaggatggaggccgacaggatgttcacagccgcgggttatgttcatgaccgctgaaccccaggcacggtcgtatccaagggagggatcatggcatgggaggcgactcaaagactggcgtgtgtggagcgtggaagcaggagggcagaggctacagctgtggaaacgaggccatgctgcctcctcctggtgttccatcagggagccgttcggccagtgtctgtctgtctgtctgcctctctgtctgagggcaccctccatttgggatggaaggaatctgtggagaccccatcctcctccctgcacactgtggatgacatggtaccctggctggaccacatactggcctctttcttcaacctctctaatatgggctccagacggatctctaaggttcccagctctcagggttgactctgttccatcctctgtgcaaaatcctcccgtgcttccctttggccctctgtgctcttgtctggttttccccagaaactctcaccctcactccatctcccactgcggtctaacaaatctcctttcgtctctcagaacgggtcttgcaggcagtttgggtatgtcattcattttccttagtgtaaaactagcacgttgcccgcttcccttcacattagaaaacaagatcagcctgtgcaacatggtgaaacctcatctctaccaacaaaacaaaaaaacacaaaaattagccaggtgtggtggtgcatccctatactcccagcaactcagggggctgaggtgggagaatggcttgagcctgggaggcagaggttgcagtgagctgagatcacaccactgcactctagctcgggtgacgaagcctgactttgtctcaaaaaatacagggatgaatatgtcaattaccctgatttgatcatagcacgttgtatacatgtactgcaatattgctgtccaccccataaatatgtacaattctgtatacatttttaaaatcataaaaataagataatgcaccgtctccacccctctcatatttactttctgaaggaaatgttaggtcttctcaaggtaaagttctatatttattatagcgtttaggcatttcttgaccatctaatgagtgtaaaactgtaccactgggccaagtgcagtggatcatgtctgtaatcctagcactgtgggaggccaaggcaggaggatcgcttgagcccaggagttcaagaccagcctgggcaacatagtgagaccccatctctacttaaaataaagaagataaaaattgttttaaaa

SEQ ID NO: 138145 - DNA, 2210 bp, Homo sapiens
  Payload ID: 7062
  Gene Symbol: GP6
  Gene Name: glycoprotein VI (platelet)
  Uniprot ID: Q9HCN6
  ENST ID: ENST00000333884
  CDS Start-End: 29-994
acagagctcaggacagggctgaggaaccatgtctccatccccgaccgccctcttctgtcttgggctgtgtctggggcgtgtgccagcgcagagtggaccgctccccaagccctccctccaggctctgcccagctccctggtgcccctggagaagccagtgaccctccggtgccagggacctccgggcgtggacctgtaccgcctggagaagctgagttccagcaggtaccaggatcaggcagtcctcttcatcccggccatgaagagaagtctggctggacgctaccgctgctcctaccagaacggaagcctctggtccctgcccagcgaccagctggagctcgttgccacgggagtttttgccaaaccctcgctctcagcccagcccggcccggcggtgtcgtcaggaggggacgtaaccctacagtgtcagactcggtatggctttgaccaatttgctctgtacaaggaaggggaccctgcgccctacaagaatcccgagagatggtacagggctagttttcccatcatcacggtgaccgccgcccacagcggaacctaccgatgctacagcttctccagcagggacccatacctgtggtcagcccccagcgaccccctggagcttgtggtcacagaattctcagaagccaccgctgaactgaccgtctcattcacaaacgaagtcttcacaactgagacttctaggagtatcaccgccagtccaaaggagtcagactctccagctggtcctgcccgccagtactacaccaagggcaacctggtccggatatgcctcggggctgtgatcctaataatcctggcggggtttctggcagaggactggcacagccggaggaagcgcctgcggcacaggggcagggctgtgcagaggccgcttccgcccctcccgcccctcccgctgacccggaaatcaaacgggggtcaggatggaggccgacaggatgttcacagccgcgggttatgttcatgaccgctgaaccccaggcacggtcgtatccaagggagggatcatggcatgggaggcgactcaaagactggcgtgtgtggagcgtggaagcaggagggcagaggctacagctgtggaaacgaggccatgctgcctcctcctggtgttccatcagggagccgttcggccagtgtctgtctgtctgtctgcctctctgtctgagggcaccctccatttgggatggaaggaatctgtggagaccccatcctcctccctgcacactgtggatgacatggtaccctggctggaccacatactggcctctttcttcaacctctctaatatgggctccagacggatctctaaggttcccagctctcagggttgactctgttccatcctctgtgcaaaatcctcccgtgcttccctttggccctctgtgctcttgtctggttttccccagaaactctcaccctcactccatctcccactgcggtctaacaaatctcctttcgtctctcagaacgggtcttgcaggcagtttgggtatgtcattcattttccttagtgtaaaactagcacgttgcccgcttcccttcacattagaaaacaagatcagcctgtgcaacatggtgaaacctcatctctaccaacaaaacaaaaaaacacaaaaattagccaggtgtggtggtgcatccctatactcccagcaactcagggggctgaggtgggagaatggcttgagcctgggaggcagaggttgcagtgagctgagatcacaccactgcactctagctcgggtgacgaagcctgactttgtctcaaaaaatacagggatgaatatgtcaattaccctgatttgatcatagcacgttgtatacatgtactgcaatattgctgtccaccccataaatatgtacaattctgtatacatttttaaaatcataaaaataagataatgcaccgtctccacccctctcatatttactttctgaaggaaatgttaggtcttctcaaggtaaagttctatatttattatagcgtttaggcatttcttgaccatctaatgagtgtaaaactgtaccactgggccaagtgcagtggatcatgtctgtaatcctagcactgtgggaggccaaggcaggaggatcgcttgagcccaggagttcaagaccagcctgggcaacatagtgagaccccatctctacttaaaataaagaagataaaaattgttttaaaa

SEQ ID NO: 138146 - DNA, 2264 bp, Homo sapiens
  Payload ID: 7062
  Gene Symbol: GP6
  Gene Name: glycoprotein VI (platelet)
  Uniprot ID: Q9HCN6
  ENST ID: ENST00000417454
  CDS Start-End: 29-1048
acagagctcaggacagggctgaggaaccatgtctccatccccgaccgccctcttctgtcttgggctgtgtctggggcgtgtgccagcgcagagtggaccgctccccaagccctccctccaggctctgcccagctccctggtgcccctggagaagccagtgaccctccggtgccagggacctccgggcgtggacctgtaccgcctggagaagctgagttccagcaggtaccaggatcaggcagtcctcttcatcccggccatgaagagaagtctggctggacgctaccgctgctcctaccagaacggaagcctctggtccctgcccagcgaccagctggagctcgttgccacgggagtttttgccaaaccctcgctctcagcccagcccggcccggcggtgtcgtcaggaggggacgtaaccctacagtgtcagactcggtatggctttgaccaatttgctctgtacaaggaaggggaccctgcgccctacaagaatcccgagagatggtacagggctagttttcccatcatcacggtgaccgccgcccacagcggaacctaccgatgctacagcttctccagcagggacccatacctgtggtcagcccccagcgaccccctggagcttgtggtcacaggaacctctgtgacccccagccggttaccaacagaaccaccttccccggtagcagaattctcagaagccaccgctgaactgaccgtctcattcacaaacgaagtcttcacaactgagacttctaggagtatcaccgccagtccaaaggagtcagactctccagctggtcctgcccgccagtactacaccaagggcaacctggtccggatatgcctcggggctgtgatcctaataatcctggcggggtttctggcagaggactggcacagccggaggaagcgcctgcggcacaggggcagggctgtgcagaggccgcttccgcccctcccgcccctcccgctgacccggaaatcaaacgggggtcaggatggaggccgacaggatgttcacagccgcgggttatgttcatgaccgctgaaccccaggcacggtcgtatccaagggagggatcatggcatgggaggcgactcaaagactggcgtgtgtggagcgtggaagcaggagggcagaggctacagctgtggaaacgaggccatgctgcctcctcctggtgttccatcagggagccgttcggccagtgtctgtctgtctgtctgcctctctgtctgagggcaccctccatttgggatggaaggaatctgtggagaccccatcctcctccctgcacactgtggatgacatggtaccctggctggaccacatactggcctctttcttcaacctctctaatatgggctccagacggatctctaaggttcccagctctcagggttgactctgttccatcctctgtgcaaaatcctcccgtgcttccctttggccctctgtgctcttgtctggttttccccagaaactctcaccctcactccatctcccactgcggtctaacaaatctcctttcgtctctcagaacgggtcttgcaggcagtttgggtatgtcattcattttccttagtgtaaaactagcacgttgcccgcttcccttcacattagaaaacaagatcagcctgtgcaacatggtgaaacctcatctctaccaacaaaacaaaaaaacacaaaaattagccaggtgtggtggtgcatccctatactcccagcaactcagggggctgaggtgggagaatggcttgagcctgggaggcagaggttgcagtgagctgagatcacaccactgcactctagctcgggtgacgaagcctgactttgtctcaaaaaatacagggatgaatatgtcaattaccctgatttgatcatagcacgttgtatacatgtactgcaatattgctgtccaccccataaatatgtacaattctgtatacatttttaaaatcataaaaataagataatgcaccgtctccacccctctcatatttactttctgaaggaaatgttaggtcttctcaaggtaaagttctatatttattatagcgtttaggcatttcttgaccatctaatgagtgtaaaactgtaccactgggccaagtgcagtggatcatgtctgtaatcctagcactgtgggaggccaaggcaggaggatcgcttgagcccaggagttcaagaccagcctgggcaacatagtgagaccccatctctacttaaaataaagaagataaaaattgttttaaaa

SEQ ID NO: 138147 - DNA, 876 bp, Homo sapiens
  Payload ID: 7062
  Gene Symbol: GP6
  Gene Name: glycoprotein VI (platelet)
  ENST ID: ENST00000468239
  CDS Start-End: 525-876
caccgtgtctaacacgaacaagtccacagagagcagtacgccaccatgccttgccctcctctcccaccacccccagccatggatctgctttcttctccatctcctatagatttacctattctggatatttcatgtaaatgacctcataaactatgtggctttttctgaccggtttctctcacttaaattacattcctgtgtgtcttttgaagaaattattaggacagagtaaagcatatgcatgcaaatgtcttatcaccgcgcccagcaggcaggaatgtccataaaagcgagtcctggcatctggtccctttcttctttcctcagggctgtgtctggggcgtgtgccagcgcagagtggaccgctccccaagccctccctccaggctctgcccagctccctggtgcccctggagaagccagtgaccctccggtgccagggacctccgggcgtggacctgtaccgcctggagaagctgagttccagcaggtaccaggatcaggcagtcctcttcatcccggccatgaagagaagtctggctggacgctaccgctgctcctaccagaacggaagcctctggtccctgcccagcgaccagctggagctcgttgccacgggagtttttgccaaaccctcgctctcagcccagcccggcccggcggtgtcgtcaggaggggacgtaaccctacagtgtcagactcggtatggctttgaccaatttgctctgtacaaggaaggggaccctgcgccctacaagaatcccgagagatggtacagggctagttttcccatcatcacggtgaccgccgcccacagcggaacctaccgatgctacagcttctccagcagggacccatacctgtggtcagccccca

SEQ ID NO: 138148 - DNA, 2268 bp, Homo sapiens; identical to SEQ ID NO: 138144
  Payload ID: 7062
  Gene Symbol: GP6
  Gene Name: glycoprotein VI (platelet)
  ENST ID: ENST00000614662
  CDS Start-End: 29-1891

SEQ ID NO: 138149 - DNA, 2210 bp, Homo sapiens; identical to SEQ ID NO: 138145
  Payload ID: 7062
  Gene Symbol: GP6
  Gene Name: glycoprotein VI (platelet)
  Uniprot ID: Q9HCN6
  ENST ID: ENST00000614889
  CDS Start-End: 29-994

SEQ ID NO: 138150 - DNA, 2210 bp, Homo sapiens; identical to SEQ ID NO: 138145
  Payload ID: 7062
  Gene Symbol: GP6
  Gene Name: glycoprotein VI (platelet)
  Uniprot ID: Q9HCN6
  ENST ID: ENST00000622653
  CDS Start-End: 29-994

SEQ ID NO: 138151 - DNA, 2210 bp, Homo sapiens; identical to SEQ ID NO: 138145
  Payload ID: 7062
  Gene Symbol: GP6
  Gene Name: glycoprotein VI (platelet)
  Uniprot ID: Q9HCN6
  ENST ID: ENST00000613801
  CDS Start-End: 29-994

SEQ ID NO: 138152 - DNA, 2268 bp, Homo sapiens; identical to SEQ ID NO: 138144
  Payload ID: 7062
  Gene Symbol: GP6
  Gene Name: glycoprotein VI (platelet)
  ENST ID: ENST00000619136
  CDS Start-End: 29-1891

SEQ ID NO: 138153 - DNA, 2210 bp, Homo sapiens; identical to SEQ ID NO: 138145
  Payload ID: 7062
  Gene Symbol: GP6
  Gene Name: glycoprotein VI (platelet)
  ENST ID: ENST00000621278
  CDS Start-End: 29-994

SEQ ID NO: 138154 - DNA, 2268 bp, Homo sapiens; identical to SEQ ID NO: 138144
  Payload ID: 7062
  Gene Symbol: GP6
  Gene Name: glycoprotein VI (platelet)
  Uniprot ID: Q9HCN6
  ENST ID: ENST00000613649
  CDS Start-End: 29-1891

SEQ ID NO: 138155 - DNA, 2210 bp, Homo sapiens; identical to SEQ ID NO: 138145
  Payload ID: 7062
  Gene Symbol: GP6
  Gene Name: glycoprotein VI (platelet)
  Uniprot ID: Q9HCN6
  ENST ID: ENST00000612184
  CDS Start-End: 29-994

SEQ ID NO: 138156 - DNA, 2268 bp, Homo sapiens; identical to SEQ ID NO: 138144
  Payload ID: 7062
  Gene Symbol: GP6
  Gene Name: glycoprotein VI (platelet)
  ENST ID: ENST00000610746
  CDS Start-End: 29-1891

SEQ ID NO: 138157 - DNA, 2210 bp, Homo sapiens; identical to SEQ ID NO: 138145
  Payload ID: 7062
  Gene Symbol: GP6
  Gene Name: glycoprotein VI (platelet)
  ENST ID: ENST00000610596
  CDS Start-End: 29-994

SEQ ID NO: 138158 - DNA, 2268 bp, Homo sapiens; identical to SEQ ID NO: 138144
  Payload ID: 7062
  Gene Symbol: GP6
  Gene Name: glycoprotein VI (platelet)
  ENST ID: ENST00000617954
  CDS Start-End: 29-1891

SEQ ID NO: 138159 - DNA, 2268 bp, Homo sapiens; identical to SEQ ID NO: 138144
  Payload ID: 7062
  Gene Symbol: GP6
  Gene Name: glycoprotein VI (platelet)
  ENST ID: ENST00000622589
  CDS Start-End: 29-1891

SEQ ID NO: 138160 - DNA, 2210 bp, Homo sapiens; identical to SEQ ID NO: 138145
  Payload ID: 7062
  Gene Symbol: GP6
  Gene Name: glycoprotein VI (platelet)
  ENST ID: ENST00000616319
  CDS Start-End: 29-994

SEQ ID NO: 138161 - DNA, 2268 bp, Homo sapiens; identical to SEQ ID NO: 138144
  Payload ID: 7062
  Gene Symbol: GP6
  Gene Name: glycoprotein VI (platelet)
  Uniprot ID: Q9HCN6
  ENST ID: ENST00000615407
  CDS Start-End: 29-1891

SEQ ID NO: 138162 - DNA, 2210 bp, Homo sapiens; identical to SEQ ID NO: 138145
  Payload ID: 7062
  Gene Symbol: GP6
  Gene Name: glycoprotein VI (platelet)
  ENST ID: ENST00000612096
  CDS Start-End: 29-994

SEQ ID NO: 138163 - DNA, 2268 bp, Homo sapiens; identical to SEQ ID NO: 138144
  Payload ID: 7062
  Gene Symbol: GP6
  Gene Name: glycoprotein VI (platelet)
  Uniprot ID: Q9HCN6
  ENST ID: ENST00000611436
  CDS Start-End: 29-1891

SEQ ID NO: 138164 - DNA, 2264 bp, Homo sapiens; identical to SEQ ID NO: 138146
  Payload ID: 7062
  Gene Symbol: GP6
  Gene Name: glycoprotein VI (platelet)
  Uniprot ID: Q9HCN6
  ENST ID: ENST00000616456
  CDS Start-End: 29-1048

SEQ ID NO: 138165 - DNA, 2210 bp, Homo sapiens; identical to SEQ ID NO: 138145
  Payload ID: 7062
  Gene Symbol: GP6
  Gene Name: glycoprotein VI (platelet)
  ENST ID: ENST00000612862
  CDS Start-End: 29-994

SEQ ID NO: 138166 - DNA, 876 bp, Homo sapiens; identical to SEQ ID NO: 138147
  Payload ID: 7062
  Gene Symbol: GP6
  Gene Name: glycoprotein VI (platelet)
  ENST ID: ENST00000617356
  CDS Start-End: 525-876

SEQ ID NO: 138167 - DNA, 2268 bp, Homo sapiens; identical to SEQ ID NO: 138144
  Payload ID: 7062
  Gene Symbol: GP6
  Gene Name: glycoprotein VI (platelet)
  Uniprot ID: Q9HCN6
  ENST ID: ENST00000622279
  CDS Start-End: 29-1891

SEQ ID NO: 138168 - DNA, 1604 bp, Homo sapiens
  Payload ID: 7063
  Gene Symbol: GLMP
  Gene Name: glycosylated lysosomal membrane protein
  Uniprot ID: Q8WWB7
  ENST ID: ENST00000362007
  CDS Start-End: 28-1248
ctcttccgtcggctgaattgcggccgtatgcgcggctctgtggagtgcacctggggttgggggcactgtgcccccagccccctgctcctttggactctacttctgtttgcagccccatttggcctgctgggggagaagacccgccaggtgtctctggaggtcatccctaactggctgggccccctgcagaacctgcttcatatacgggcagtgggcaccaattccacactgcactatgtgtggagcagcctggggcctctggcagtggtaatggtggccaccaacaccccccacagcaccctgagcgtcaactggagcctcctgctatcccctgagcccgatgggggcctgatggtgctccctaaggacagcattcagttttcttctgcccttgtttttaccaggctgcttgagtttgacagcaccaacgtgtccgatacggcagcaaagcctttgggaagaccatatcctccatactccttggccgatttctcttggaacaacatcactgattcattggatcctgccaccctgagtgccacatttcaaggccaccccatgaacgaccctaccaggacttttgccaatggcagcctggccttcagggtccaggccttttccaggtccagccgaccagcccaaccccctcgcctcctgcacacagcagacacctgtcagctagaggtggccctgattggagcctctccccggggaaaccgttccctgtttgggctggaggtagccacattgggccagggccctgactgcccctcaatgcaggagcagcactccatcgacgatgaatatgcaccggccgtcttccagttggaccagctactgtggggctccctcccatcaggctttgcacagtggcgaccagtggcttactcccagaagccggggggccgagaatcagccctgccctgccaagcttcccctcttcatcctgccttagcatactctcttccccagtcacccattgtccgagccttctttgggtcccagaataacttctgtgccttcaatctgacgttcggggcttccacaggccctggctattgggaccaacactacctcagctggtcgatgctcctgggtgtgggcttccctccagtggacggcttgtccccactagtcctgggcatcatggcagtggccctgggtgccccagggctcatgctgctagggggcggcttggttctgctgctgcaccacaagaagtactcagagtaccagtccataaattaaggcccgctctctggagggaaggacattactgaacctgtcttgctgtgcctcgaaactctggaggttggagcatcaagttccagccggccccttcactcccccatcttgcttttctgtggaacctcagaggccagcctcgacttcctggagacccccaggtggggcttccttcatactttgttgggggactttggaggcgggcaggggacagggctattgataaggtccccttggtgttgccttcttgcatctccacacatttcccttggatgggacttgcaggcctaaatgagaggcattctgactggttggctgccctggaaggcaagaaaatagatttattttttttcacaggg

SEQ ID NO: 138169 - DNA, 837 bp, Homo sapiens
  Payload ID: 7063
  Gene Symbol: GLMP
  Gene Name: glycosylated lysosomal membrane protein
  ENST ID: ENST00000368264
  CDS Start-End: 10-561
tgcggccgtatgcgcggctctgtggagtgcacctggggttgggggcactgtgcccccagccccctgctcctttggactctacttctgtttgcagccccatttggcctgctgggggagaagacccgccagctgcttgagtttgacagcaccaacgtgtccgatacggcagcaaagcctttgggaagaccatatcctccatactccttggccgatttctcttggaacaacatcactgattcattggatcctgccaccctgagtgccacatttcaaggccaccccatgaacgaccctaccaggacttttgccaatggcagcctggccttcagggtccaggccttttccaggtccagccgaccagcccaaccccctcgcctcctgcacacagcagacacctgtcagctagaggtggccctgattggagcctctccccggggaaaccgttccctgtttgggctggaggtagccacattgggccagggccctgactgcccctcaatgcaggagcagcactccatcgacgatgaatatgcaccggccgtcttccagaggagggattgaggccctgcctaggactcaggactcctgctgctagtcacagaataaggctgggagtggcaaggaaaagagggtcgggcacaggttggtcctctttaccctcccttgtttgcctttcttcccagttggaccagctactgtggggctccctcccatcaggctttgcacagtggcgaccagtggcttactcccagaagccggggggccgagaatcagccctgccctgccaagcttcccctcttcatcctgccttagcatactctcttccccagtcaccca

SEQ ID NO: 138170 - DNA, 658 bp, Homo sapiens
  Payload ID: 7063
  Gene Symbol: GLMP
  Gene Name: glycosylated lysosomal membrane protein
  ENST ID: ENST00000461597
  CDS Start-End: 1-228
ttcaatctgacgttcggggcttccacaggccctggctattgggaccaacactacctcagctggtcgatgctcctgggtgtgggcttccctccagtggacggcttgtccccactagtcctgggcatcatggcagtggccctgggtgccccagggctcatgctgctagggggcggcttggttctgctgctgcaccacaagaagtactcagagtaccagtccataaattaaggcccgctctctggagggaaggacattactgaacctgtcttgctgtgcctcgaaactctggaggttggagcatcaagttccagccggccccttcactcccccatcttgcttttctgtggaacctcagaggccagcctcgacttcctggagacccccagaccagtgtgcttttcttggagaaagaagaaaagaagaaagaaggaagaagaagaagaaagaaaggaggaagaaggaagaagaagagccagtgtgataatacattgagtgattttttaaaaagtgcatatatgagcaaaaagttatttttcccttttctgaagtatggcagcatactatatagactgtctctgcatgtttatttttcccccatttaatatatcctggagatcattttatatcaatataaaaatggttttctcattcttttata

SEQ ID NO: 138171 - DNA, 1188 bp, Homo sapiens
  Payload ID: 7063
  Gene Symbol: GLMP
  Gene Name: glycosylated lysosomal membrane protein
  ENST ID: ENST00000472870
  CDS Start-End: 10-402
tgcggccgtatgcgcggctctgtggagtgcacctggggttgggggcactgtgcccccagccccctgctcctttggactctacttctgtttgcagccccatttggcctgctgggggagaagacccgccaggtgtctctggaggtcatccctaactggctgggccccctgcagaacctgcttcatatacgggcagtgggcaccaattccacactgcactatgtgtggagcagcctggggcctctggcagtggtaatggtggccaccaacaccccccacagcaccctgagcgtcaactggagcctcctgctatcccctgagcccgatgggggcctgatggtgctccctaaggacagcattcagttttcttctgcccttgtttttaccaggggctcatgctgctagggggcggcttggttctgctgctgcaccacaagaagtactcagagtaccagtccataaattaaggcccgctctctggagggaaggacattactgaacctgtcttgctgtgcctcgaaactctggaggttggagcatcaagttccagccggccccttcactcccccatcttgcttttctgtggaacctcagaggccagcctcgacttcctggagacccccagagacatggtcttgctatgttgccagtctgggctcaaacttctggccttgagtgattctctcacctcagactcctgagtagctgggattacagatgcgggccaccacacctggctgtacaaactttaaaatgtttgagcaaattcaatgagtatagtaaaatatcttcctccctttaccgattcccaccctattctcccccacccccaccccaggcatcaatattatggtttcttgtgcactgagtgattttttaaattattattatttttttatttttgagacagagtctctctctgtcacccaggctggagtgcagtggtgcgatctcagctcactgcaacctccgcctcccgggttcaagcaattctcctgcctcagcctcctgagtagctgagactacgggcgcccgccaccatgcctggctatttttttgtatttttagtagagatggggtttcacccgagatggtctcaatctcctgacctgatgatccgcctgccttggcctcccaaagtgctgggattacaggcgtgagccaccgcgcctggcctattttttttttttt

SEQ ID NO: 138172 - DNA, 684 bp, Homo sapiens
  Payload ID: 7063
  Gene Symbol: GLMP
  Gene Name: glycosylated lysosomal membrane protein
  ENST ID: ENST00000481050
  CDS Start-End: 1-335
gcccctcaatgcaggagcagcactccatcgacgatgaatatgcaccggccgtcttccagtcacccattgtccgagccttctttgggtcccagaataacttctgtgccttcaatctgacgttcggggcttccacaggccctggctattgggaccaacactacctcagctggtcgatgctcctgggtgtgggcttccctccagtggacggcttgtccccactagtcctgggcatcatggcagtggccctgggtgccccagggctcatgctgctagggggcggcttggttctgctgctgcaccacaagaagtactcagagtaccagtccataaattaaggcccgctctctggagggaaggacattactgaacctgtcttgctgtgcctcgaaactctggaggttggagcatcaagttccagccggccccttcactcccccatcttgcttttctgtggaacctcagaggccagcctcgacttcctggagacccccaggtggggcttccttcatactttgttgggggactttggaggcgggcaggggacagggctattgataaggtccccttggtgttgccttcttgcatctccacacatttcccttggatgggacttgcaggcctaaatgagaggcattctgactggttggctgccctggaaggcaagaaaatagatttatttttttt

SEQ ID NO: 138173 - DNA, 795 bp, Homo sapiens
  Payload ID: 7063
  Gene Symbol: GLMP
  Gene Name: glycosylated lysosomal membrane protein
  ENST ID: ENST00000476177
  CDS Start-End: 9-278
gcggccgtatgcgcggctctgtggagtgcacctggggttgggggcactgtgcccccagccccctgctcctttggactctacttctgtttgcagccccatttggcctgctgggggagaagacccgccaggtgaggaggttgggagagaaccaaggagaagagtgcagaggagagagttcatcccaattagagggtggaactaaagactggggcaaagcctttgggaagaccatatcctccatactccttggccgatttctcttggaacaacatcactgattcattggatcctgccaccctgagtgccacatttcaaggccaccccatgaacgaccctaccaggacttttgccaatggcagcctggccttcagggtccaggccttttccaggtccagccgaccagcccaaccccctcgcctcctgcacacagcagacacctgtcagctagaggtggccctgattggagcctctccccggggaaaccgttccctgtttgggctggaggtagccacattgggccagggccctgactgcccctcaatgcaggagcagcactccatcgacgatgaatatgcaccggccgtcttccagttggaccagctactgtggggctccctcccatcaggctttgcacagtggcgaccagtggcttactcccagaagccggggggccgagaatcagccctgccctgccaagcttcccctcttcatcctgccttagcatactctcttccccagtcacccattgtccgagccttctttgggtcccagaataacttctgtgccttcaatctg

SEQ ID NO: 138174 - DNA, 1364 bp, Homo sapiens
  Payload ID: 7063
  Gene Symbol: GLMP
  Gene Name: glycosylated lysosomal membrane protein
  ENST ID: ENST00000622703
  CDS Start-End: 45-1007
atgtgaccctctggcacctcttccgtcggctgaattgcggccgtatgcgcggctctgtggagtgcacctggggttgggggcactgtgcccccagccccctgctcctttggactctacttctgtttgcagccccatttggcctgctgggggagaagacccgccagctgcttgagtttgacagcaccaacgtgtccgatacggcagcaaagcctttgggaagaccatatcctccatactccttggccgatttctcttggaacaacatcactgattcattggatcctgccaccctgagtgccacatttcaaggccaccccatgaacgaccctaccaggacttttgccaatggcagcctggccttcagggtccaggccttttccaggtccagccgaccagcccaaccccctcgcctcctgcacacagcagacacctgtcagctagaggtggccctgattggagcctctccccggggaaaccgttccctgtttgggctggaggtagccacattgggccagggccctgactgcccctcaatgcaggagcagcactccatcgacgatgaatatgcaccggccgtcttccagttggaccagctactgtggggctccctcccatcaggctttgcacagtggcgaccagtggcttactcccagaagccggggggccgagaatcagccctgccctgccaagcttcccctcttcatcctgccttagcatactctcttccccagtcacccattgtccgagccttctttgggtcccagaataacttctgtgccttcaatctgacgttcggggcttccacaggccctggctattgggaccaacactacctcagctggtcgatgctcctgggtgtgggcttccctccagtggacggcttgtccccactagtcctgggcatcatggcagtggccctgggtgccccagggctcatgctgctagggggcggcttggttctgctgctgcaccacaagaagtactcagagtaccagtccataaattaaggcccgctctctggagggaaggacattactgaacctgtcttgctgtgcctcgaaactctggaggttggagcatcaagttccagccggccccttcactcccccatcttgcttttctgtggaacctcagaggccagcctcgacttcctggagacccccaggtggggcttccttcatactttgttgggggactttggaggcgggcaggggacagggctattgataaggtccccttggtgttgccttcttgcatctccacacatttcccttggatgggacttgcaggcctaaatgagaggcattctgactggttggctgccctggaaggcaagaaaatagatttattttttttcacagggc

SEQ ID NO: 138175 - DNA, 1851 bp, Homo sapiens
  Payload ID: 7063
  Gene Symbol: GLMP
  Gene Name: glycosylated lysosomal membrane protein
  Uniprot ID: Q8WWB7
  ENST ID: ENST00000614643
  CDS Start-End: 517-1494
atgtgaccctctggcacctcttccgtcggctgaattgcggccgtatgcgcggctctgtggagtgcacctggggttgggggcactgtgcccccagccccctgctcctttggactctacttctgtttgcagccccatttggcctgctgggggagaagacccgccaggtgagggccctggggctacagcgatagaagtttcaggaaacgctacccttgcagggtggctggaaccgggcatccaggggctaggggtggagggtggctgccaagaggagggttcttcaacctggagggtgtgggagatggtcatgggtcatgggacgggattgtggagtagggcaaatgtgagggtgatgtctggaccccgactcagccctgggtgacccaggtccaggtgtctctggaggtcatccctaactggctgggccccctgcagaacctgcttcatatacgggcagtgggcaccaattccacactgcactatgtgtggagcagcctggggcctctggcagtggtaatggtggccaccaacaccccccacagcaccctgagcgtcaactggagcctcctgctatcccctgagcccgatgggggcctgatggtgctccctaaggacagcattcagttttcttctgcccttgtttttaccaggctgcttgagtttgacagcaccaacgtgtccgatacggcagcaaagcctttgggaagaccatatcctccatactccttggccgatttctcttggaacaacatcactgattcattggatcctgccaccctgagtgccacatttcaaggccaccccatgaacgaccctaccaggacttttgccaatggcagcctggccttcagggtccaggccttttccaggtccagccgaccagcccaaccccctcgcctcctgcacacagcagacacctgtcagctagaggtggccctgattggagcctctccccggggaaaccgttccctgtttgggctggaggtagccacattgggccagggccctgactgcccctcaatgcaggagcagcactccatcgacgatgaatatgcaccggccgtcttccagttggaccagctactgtggggctccctcccatcaggctttgcacagtggcgaccagtggcttactcccagaagccggggggccgagaatcagccctgccctgccaagcttcccctcttcatcctgccttagcatactctcttccccagtcacccattgtccgagccttctttgggtcccagaataacttctgtgccttcaatctgacgttcggggcttccacaggccctggctattgggaccaacactacctcagctggtcgatgctcctgggtgtgggcttccctccagtggacggcttgtccccactagtcctgggcatcatggcagtggccctgggtgccccagggctcatgctgctagggggcggcttggttctgctgctgcaccacaagaagtactcagagtaccagtccataaattaaggcccgctctctggagggaaggacattactgaacctgtcttgctgtgcctcgaaactctggaggttggagcatcaagttccagccggccccttcactcccccatcttgcttttctgtggaacctcagaggccagcctcgacttcctggagacccccaggtggggcttccttcatactttgttgggggactttggaggcgggcaggggacagggctattgataaggtccccttggtgttgccttcttgcatctccacacatttcccttggatgggacttgcaggcctaaatgagaggcattctgactggttggctgccctggaaggcaagaaaatagatttattttttttcacagggc

SEQ ID NO: 138176 - DNA, 1365 bp, Homo sapiens
  Payload ID: 7063
  Gene Symbol: GLMP
  Gene Name: glycosylated lysosomal membrane protein
  ENST ID: ENST00000612353
  CDS Start-End: 45-1040
atgtgaccctctggcacctcttccgtcggctgaattgcggccgtatgcgcggctctgtggagtgcacctggggttgggggcactgtgcccccagccccctgctcctttggactctacttctgtttgcagccccatttggcctgctgggggagaagacccgccaggtgtctctggaggtcatccctaactggctgggccccctgcagaacctgcttcatatacgggcagtgggcaccaattccacactgcactatgtgtggagcagcctggggcctctggcagtggtaatggtggccaccaacaccccccacagcaccctgagcgtcaactggagcctcctgctatcccctgagcccgatgggggcctgatggtgctccctaaggacagcattcagttttcttctgcccttgtttttaccaggctgcttgagtttgacagcaccaacgtgtccgatacggcagcaaagcctttgggaagaccatatcctccatactccttggccgatttctcttggaacaacatcactgattcattggatcctgccaccctgagtgccacatttcaaggccaccccatgaacgaccctaccaggacttttgccaatggcagcctggccttcagggtccaggccttttccaggtccagccgaccagcccaaccccctcgcctcctgcacacagcagacacctgtcagctagaggtggccctgattggagcctctccccggggaaaccgttccctgtttgggctggaggtagccacattgggccagggccctgactgcccctcaatgcaggagcagcactccatcgacgatgaatatgcaccggccgtcttccaggtcgatgctcctgggtgtgggcttccctccagtggacggcttgtccccactagtcctgggcatcatggcagtggccctgggtgccccagggctcatgctgctagggggcggcttggttctgctgctgcaccacaagaagtactcagagtaccagtccataaattaaggcccgctctctggagggaaggacattactgaacctgtcttgctgtgcctcgaaactctggaggttggagcatcaagttccagccggccccttcactcccccatcttgcttttctgtggaacctcagaggccagcctcgacttcctggagacccccaggtggggcttccttcatactttgttgggggactttggaggcgggcaggggacagggctattgataaggtccccttggtgttgccttcttgcatctccacacatttcccttggatgggacttgcaggcctaaatgagaggcattctgactggttggctgccctggaaggcaagaaaatagatttattttttttcacagggc

SEQ ID NO: 138177 - DNA, 2078 bp, Homo sapiens
  Payload ID: 7064
  Gene Symbol: GPAA1
  Gene Name: glycosylphosphatidylinositol anchor attachment 1
  Uniprot ID: O43292
  ENST ID: ENST00000355091
  CDS Start-End: 122-1987
gtctctgggaccggaagtgcgggcgagcgcgggtccccgggtctgacaggagcagcctgtgggcaccgcggcggtagttggaggcgggagagggtccgtagccgcgccgccctgccccgccatgggcctcctgtcggacccggttcgccggcgcgcgctcgcccgcctagtgctgcgcctcaacgcgccgttgtgcgtgctgagctacgtggcgggcatcgcctggttcttggcgctggttttcccgccgctgacccagcgcacttacatgtcggagaacgccatgggctccaccatggtggaggagcagtttgcgggcggagaccgtgcccgggcttttgcccgggacttcgccgcccaccgcaagaagtcgggggctctgccagtggcctggcttgaacggacgatgcggtcagtagggctggaggtctacacgcagagtttctcccggaaactgcccttcccagatgagacccacgagcgctatatggtgtcgggcaccaacgtgtacggcatcctgcgggccccgcgtgctgccagcaccgagtcgcttgtgctcaccgtgccctgtggctctgactctaccaacagccaggctgtggggctgctgctggcactggctgcccacttccgggggcagatttattgggccaaagatatcgtcttcctggtaacagaacatgaccttctgggcactgaggcttggcttgaagcctaccacgatgtcaatgtcactggcatgcagtcgtctcccctgcagggccgagctggggccattcaggcagccgtggccctggagctgagcagtgatgtggtcaccagcctcgatgtggccgtggaggggcttaacgggcagctgcccaaccttgacctgctcaatctcttccagaccttctgccagaaagggggcctgttgtgcacgcttcagggcaagctgcagcccgaggactggacatcattggatggaccgctgcagggcctgcagacactgctgctcatggttctgcggcaggcctccggccgcccccacggctcccatggcctcttcctgcgctaccgtgtggaggccctaaccctgcgtggcatcaatagcttccgccagtacaagtatgacctggtggcagtgggcaaggctttggagggcatgttccgcaagctcaaccacctcctggagcgcctgcaccagtccttcttcctctacttgctccccggcctctcccgcttcgtctccatcggcctctacatgcccgctgtcggcttcttgctcctggtccttggtctcaaggctctggaactgtggatgcagctgcatgaggctggaatgggccttgaggagcccgggggtgcccctggccccagtgtaccccttcccccatcacagggtgtggggctggcctcgctcgtggcacctctgctgatctcacaggccatgggactggccctctatgtcctgccagtgctgggccaacacgttgccacccagcacttcccagtggcagaggctgaggctgtggtgctgacactgctggcgatttatgcagctggcctggccctgccccacaatacccaccgggtggtaagcacacaggccccagacaggggctggatggcactgaagctggtagccctgatctacctagcactgcagctgggctgcatcgccctcaccaacttctcactgggcttcctgctggccaccaccatggtgcccactgctgcgcttgccaagcctcatgggccccggaccctctatgctgccctgctggtgctgaccagcccggcagccacgctccttggcagcctgttcctgtggcgggagctgcaggaggcgccactgtcactggccgagggctggcagctcttcctggcagcgctagcccagggtgtgctggagcaccacacctacggcgccctgctcttcccactgctgtccctgggcctctacccctgctggctgcttttctggaatgtgctcttctggaagtgagatctgcctgtccgggctgggacagagactccccaaggaccccattctgcctccttctggggaaataaatgagtgtctgtttcagcagcta

SEQ ID NO: 138178 - DNA, 1840 bp, Homo sapiens
  Payload ID: 7064
  Gene Symbol: GPAA1
  Gene Name: glycosylphosphatidylinositol anchor attachment 1
  Uniprot ID: O43292
  ENST ID: ENST00000361036
  CDS Start-End: 64-1749
gtgggcaccgcggcggtagttggaggcgggagagggtccgtagccgcgccgccctgccccgccatgggcctcctgtcggacccggttcgccggcgcgcgctcgcccgcctagtgctgcgcctcaacgcgccgttgtgggctctgccagtggcctggcttgaacggacgatgcggtcagtagggctggaggtctacacgcagagtttctcccggaaactgcccttcccagatgagacccacgagcgctatatggtgtcgggcaccaacgtgtacggcatcctgcgggccccgcgtgctgccagcaccgagtcgcttgtgctcaccgtgccctgtggctctgactctaccaacagccaggctgtggggctgctgctggcactggctgcccacttccgggggcagatttattgggccaaagatatcgtcttcctggtaacagaacatgaccttctgggcactgaggcttggcttgaagcctaccacgatgtcaatgtcactggcatgcagtcgtctcccctgcagggccgagctggggccattcaggcagccgtggccctggagctgagcagtgatgtggtcaccagcctcgatgtggccgtggaggggcttaacgggcagctgcccaaccttgacctgctcaatctcttccagaccttctgccagaaagggggcctgttgtgcacgcttcagggcaagctgcagcccgaggactggacatcattggatggaccgctgcagggcctgcagacactgctgctcatggttctgcggcaggcctccggccgcccccacggctcccatggcctcttcctgcgctaccgtgtggaggccctaaccctgcgtggcatcaatagcttccgccagtacaagtatgacctggtggcagtgggcaaggctttggagggcatgttccgcaagctcaaccacctcctggagcgcctgcaccagtccttcttcctctacttgctccccggcctctcccgcttcgtctccatcggcctctacatgcccgctgtcggcttcttgctcctggtccttggtctcaaggctctggaactgtggatgcagctgcatgaggctggaatgggccttgaggagcccgggggtgcccctggccccagtgtaccccttcccccatcacagggtgtggggctggcctcgctcgtggcacctctgctgatctcacaggccatgggactggccctctatgtcctgccagtgctgggccaacacgttgccacccagcacttcccagtggcagaggctgaggctgtggtgctgacactgctggcgatttatgcagctggcctggccctgccccacaatacccaccgggtggtaagcacacaggccccagacaggggctggatggcactgaagctggtagccctgatctacctagcactgcagctgggctgcatcgccctcaccaacttctcactgggcttcctgctggccaccaccatggtgcccactgctgcgcttgccaagcctcatgggccccggaccctctatgctgccctgctggtgctgaccagcccggcagccacgctccttggcagcctgttcctgtggcgggagctgcaggaggcgccactgtcactggccgagggctggcagctcttcctggcagcgctagcccagggtgtgctggagcaccacacctacggcgccctgctcttcccactgctgtccctgggcctctacccctgctggctgcttttctggaatgtgctcttctggaagtgagatctgcctgtccgggctgggacagagactccccaaggaccccattctgcctccttctggggaaataaatgagtgtctgtttcagcagcta

SEQ ID NO: 138179 - DNA, 835 bp, Homo sapiens
  Payload ID: 7064
  Gene Symbol: GPAA1
  Gene Name: glycosylphosphatidylinositol anchor attachment 1
  ENST ID: ENST00000530633
  CDS Start-End: 106-402
gtgcgggcgagcgcgggtccccgggtctgacaggagcagcctgtgggcaccgcggcggtagttggaggcgggagagggtccgtagccgcgccgccctgccccgccatgggcctcctgtcggacccggttcgccggcgcgcgctcgcccgcctagtgctgcgcctcaacgcgccgttgtgggctctgccagtggcctggcttgaacggacgatgcgatggtgtcgggcaccaacgtgtacggcatcctgcgggccccgcgtgctgccagcaccgagtcgcttgtgctcaccgtgccctgtggctctgactctaccaacagccaggctgtggggctgctgctggcactggctgcccacttccgggggcagatttattgggccaaagatatcgtcttcctggtaacagaacatgaccttctgggcactgaggcttggcttgaagcctaccacgatgtcaatgtcactggcatgcagtcgtctcccctgcagggccgagctggggccattcaggcagccgtggccctggagctgagcagtgatgtggtcaccagcctcgatgtggccgtggaggggcttaacgggcagctgcccaaccttgacctgctcaatctcttccagaccttctgccagaaagggggcctgttgtgcacgcttcagggcaagctgcagcccgaggactggacatcattggatggaccgctgcagggcctgcagacactgctgctcatggttctgcggcaggcctccggccgcccccacggctcccatggcctcttcctgcgctaccgtgtggaggccctaaccctgcgtggcatcaatagcttccgccagtacaa

SEQ ID NO: 138180 - DNA, 937 bp, Homo sapiens
  Payload ID: 7064
  Gene Symbol: GPAA1
  Gene Name: glycosylphosphatidylinositol anchor attachment 1
  ENST ID: ENST00000525087
  CDS Start-End: 118-937
ctgggaccggaagtgcgggcgagcgcgggtccccgggtctgacaggagcagcctgtgggcaccgcggcggtagttggaggcgggagagggtccgtagccgcgccgccctgccccgccatgggcctcctgtcggacccggttcgccggcgcgcgctcgcccgcctagtgctgcgcctcaacgcgccgttgtgcgtgctgagctacgtggcgggcatcgcctggttcttggcgctggttttcccgccgctgacccagcgcacttacatgtcggagaacgccatgggctccaccatggtggaggagcagtttgcgggcggagaccgtgcccgggcttttgcccgggacttcgccgcccaccgcaagaagtcgggccaggctgtggggctgctgctggcactggctgcccacttccgggggcagatttattgggccaaagatatcgtcttcctggtaacagaacatgaccttctgggcactgaggcttggcttgaagcctaccacgatgtcaatgtcactggcatgcagtcgtctcccctgcagggccgagctggggccattcaggcagccgtggccctggagctgagcagtgatgtggtcaccagcctcgatgtggccgtggaggggcttaacgggcagctgcccaaccttgacctgctcaatctcttccagaccttctgccagaaagggggcctgttgtgcacgcttcagggcaagctgcagcccgaggactggacatcattggatggaccgctgcagggcctgcagacactgctgctcatggttctgcggcaggcctccggccgcccccacggctcccatggcctcttcctgcgctaccgtgtggaggccctaaccctgcgtggcatcaatagcttccgccagtacaagtatgacctggtggcagtgggcaaggctttggagggcatgttccgcaagc

SEQ ID NO: 138181 - DNA, 825 bp, Homo sapiens
  Payload ID: 7064
  Gene Symbol: GPAA1
  Gene Name: glycosylphosphatidylinositol anchor attachment 1
  ENST ID: ENST00000524418
  CDS Start-End: 46-825
gttggaggcgggagagggtccgtagccgcgccgccctgccccgccatgggcctcctgtcggacccggttcgccggcgcgcgctcgcccgcctagtgctgcgcctcaacgcgccgttgtgcgtgctgagctacgtggcgggcatcgcctggttcttggcgctggttttcccgccgctgacccagcgcacttacatgtcggagaacgccatgggctccaccatggtggaggagcagtttgcgggcggagaccgtgcccgggcttttgcccgggacttcgccgcccaccgcaagaagtcgggggctctgccagtggcctggcttgaacggacgatgcggtcagtagggctggaggtctacacgcagagtttctcccggaaactgcccttcccagatgagacccacgagcgctatatggtgtcgggcaccaacgtgtacggcatcctgcgggccccgcgtgctgccagcaccgagtcgcttgtgctcaccgtgccctgtggctctgactctaccaacagccaggctgtggggctgctgctggcactggctgcccacttccgggaacatgaccttctgggcactgaggcttggcttgaagcctaccacgatgtcaatgtcactggcatgcagtcgtctcccctgcagggccgagctggggccattcaggcagccgtggccctggagctgagcagtgatgtggtcaccagcctcgatgtggccgtggaggggcttaacgggcagctgcccaaccttgacctgctcaatctcttccagaccttctgccagaaagggggcctgttgtgcacgcttcagggcaaggtggggctg

SEQ ID NO: 138182 - DNA, 878 bp, Homo sapiens
  Payload ID: 7064
  Gene Symbol: GPAA1
  Gene Name: glycosylphosphatidylinositol anchor attachment 1
  ENST ID: ENST00000529503
  CDS Start-End: 142-618
acatgcgcgccgtcgcgagcgtctctgggaccggaagtgcgggcgagcgcgggtccccgggtctgacaggagcagcctgtgggcaccgcggcggtagttggaggcgggagagggtccgtagccgcgccgccctgccccgccatgggcctcctgtcggacccggttcgccggcgcgcgctcgcccgcctagtgctgcgcctcaacgcgccgttgtgcgtgctgagctacgtggcgggcatcgcctggttcttggcgctggttttcccgccgctgacccagcgcacttacatgtcggagaacgccatgggctccaccatggtggaggagcagtttgcgggcggagaccgtgcccgggcttttgcccgggacttcgccgcccaccgcaagaagtcgggggctctgccagtggcctggcttgaacggacgatgcgatggtgtcgggcaccaacgtgtacggcatcctgcgggccccgcgtgctgccagcaccgagtcgcttgtgctcaccgtgccctgtggctctgactctaccaacagccaggctgtggggctgctgctggcactggctgcccacttccgggggcagatttattgggccaaagatatcgtcttcctggtaacagaacatgaccttctgggcactgaggcttggcttgaagcctaccacgatgtcaatgtcactggcatgcagtcgtctcccctgcagggccgagctggggccattcaggcagccgtggccctggagctgagcagtgatgtggtcaccagcctcgatgtggccgtggaggggcttaacgggcagctgcccaaccttgacctgctcaatctcttccagaccttctgccagaaagggggcctgttgtgcacgcttcagggcaag

SEQ ID NO: 138183 - DNA, 986 bp, Homo sapiens
  Payload ID: 7064
  Gene Symbol: GPAA1
  Gene Name: glycosylphosphatidylinositol anchor attachment 1
  ENST ID: ENST00000528073
  CDS Start-End: 44-748
tggaggcgggagagggtccgtagccgcgccgccctgccccgccatgggcctcctgtcggacccggttcgccggcgcgcgctcgcccgcctagtgctgcgcctcaacgcgccgttgtgcgtgctgagctacgtggcgggcatcgcctggttcttggcgctggttttcccgccgctgacccagcgcacttacatgtcggagaacgccatgggctccaccatggtggaggagcagtttgcgggcggagaccgtgcccgggcttttgcccgggacttcgccgcccaccgcaagaagtcgggggctctgccagtggcctggcttgaacggacgatgcggtcagtagggctggaggtctacacgcagagtttctcccggaaactgcccttcccagatgagacccacgagcgctatatggtgtcgggcaccaacgtgtacggcatcctgcgggccccgcgtgctgccagcaccgagtcgcttgtgctcaccgtgccctgtggctctgactctaccaacagccaggctgtggggctgctgctggcactggctgcccacttccgggggcagatttattgggccaaagatatcgtcttcctggtaacagaacatgaccttctgggcactgaggcttggcttgaagcctaccacgatgtcaatgtcactgcactcattcacttgctcctacaggcatgcagtcgtctcccctgcagggccgagctggggccattcaggcagccgtggccctggagctgagcagtgatgtggtcaccagcctcgatgtggccgtggaggggcttaacgggcagctgcccaaccttgacctgctcaatctcttccagaccttctgccagaaagggggcctgttgtgcacgcttcagggcaagctgcagcccgaggactggacatcattggatggaccgctgcagggcctgcagacactgctgctcatggttctgcggcaggcctccggccgcccccacggctcccatgg

SEQ ID NO: 138184 - DNA, 535 bp, Homo sapiens
  Payload ID: 7064
  Gene Symbol: GPAA1
  Gene Name: glycosylphosphatidylinositol anchor attachment 1
  ENST ID: ENST00000530258
  CDS Start-End: 293-535
tcgcgcccctccggctgctcgcgcccttccgctcctgccctctggaagcactgagggtatcaggcccaggcttagggctcgggtccggcgtcccgatgcaggactccgggtttaggtctcccagacccgcgcgatcgaccccgggtgcggaggttgtggcctcgggtcggcgtctgaggacccgctgacgctccggtgcccctccgtcctctctcacagcgtgctgagctacgtggcgggcatcgcctggttcttggcgctggttttcccgccgctgacccagcgcacttacatgtcggagaacgccatgggctccaccatggtggaggagcagtttgcgggcggagaccgtgcccgggcttttgcccgggacttcgccgcccaccgcaagaagtcgggggctctgccagtggcctggcttgaacggacgatgcggtcagtagggctggaggtctacacgcagagtttctcccggaaactgcccttcccagatgagacccacgagcgctatatggtgtcgggcaccaacgtgtac

SEQ ID NO: 138185 - DNA, 2282 bp, Homo sapiens
  Payload ID: 7065
  Gene Symbol: GPIHBP1
  Gene Name: glycosylphosphatidylinositol anchored high density lipoprotein binding protein 1
  Uniprot ID: Q8IV16
  ENST ID: ENST00000622500
  CDS Start-End: 76-630
ccttcatcccacttaccgcagctccagagccctgcgggaggactcagagtcagggacacagcagcgtccggcgagatgaaggcgctcggggctgtcctgcttgccctcttgctgttcgggcggccagggagagggcagacacagcaggaggaagaggaagaggacgaggaccacgggccagatgactacgacgaggaagatgaggatgaggtggaagaggaggagaccaacaggctccctggtggcaggagcagagtgctgctgcggtgctacacctgcaagtccctgcccagggacgagcgctgcaacctgacgcagaactgctcacatggccagacctgcacaaccctcattgcccacgggaacaccgagtcaggcctcctgaccacccactccacgtggtgcacagacagctgccagcccatcaccaagacggtggaggggacccaggtgaccatgacctgctgccagtccagcctgtgcaatgtcccaccctggcaaagctcccgagtccaggacccaacaggcaagggggcaggcggcccccggggcagctccgaaactgtgggcgcagccctcctgctcaacctccttgccggccttggagcaatgggggccaggagaccctgacccacggcccctccccacccccacccggctcacccccggccctgccagcactctgtctggtaccttcccctcctgcccctgcaccagctttggagaatggatttggagtgtcttgggcgatccagccagcgcaggccccccggcccggttgcttcctcagttcccggctgtgtccttggtgtcctttctccaccacctgtgagcagcaagactgccgcacgtgggcgctgggtccagacctcggctgccacgccccaggacctgcagccctcatgggggctggggatccccatcagcacagccaggcagagatgatacccaccacacacctgggggcccccacacccagtcctcacccttaacttctgccatgggaattcctccatctgcagcggtcacacgggcccaccctgcccttccccaggtcggcctctccgctgtctggagggaaggggatttggagggaggctgtcgtcgcccccaggaaagacgggcctgggggaggcgggacagtgggagaggcgcgctgaggatgagagggcacagggaggtgggttggggtgaggccacatgcggaggggcggggcgggggggggctggggggacaggcaccaagtatgaagaggatggggccagcggggcctgtctggctatggcgtgagcaccgctatgggagaccctggcttggaaagtgaacttgcagccttggatggggaagggccagatgctgggtgggtgcctgtcaccttgaggtgaccatctagggtcagtacctgctgggcttaggacagcgcctgaggctgggaatacctgtctctgctctagcagaggctaaagcaggctagagcagtggaggggtggagttgatgaaaggagaggagtagatgagatggaatttttccagcctcatcctggcctgccctctagactccagtccccaagccctcagcctagtgggtgtcatggatggatctgggggtgtcagacaggctaccctgtgccagggagggggcagaatgggcctgcagcttcctgcagaggaagcaggactgggtagcagagccgggaaggtgggtggcccattacaggggggtccccagggtgtcctctggcagggctgtgactgctgcaagctctgccttcaccagtagctggtgccaggacagagctctgggacagcaggcagaggccgagcctgggccacagctcagccactgacttgggtatcagtttccccttctgagaagtacagagtgagacttaaagaacccctagatccccaccagttcaacactccattaactgggaagcccagagtcctgtccggcctgccaagttcatcctggtggacagcgggaggcctccgctaactgttctcttcttttccttattaataaaacacacaatgcctagctggggggtcggaaggcaaatgccctagatggtggggtcacgtctttctccttctccttcctccttctgctggctgaagtgatgactggagctcagcaaccactttgcaccatgaggcagcactgagcacggtagggcagcctggtgagaggggcctagctcgctgccgacagaagtcactgcctacctcagggtccccttacctgggtgggaaataaatttctgctgtgttgaagcta

SEQ ID NO: 138186 - DNA, 723 bp, Homo sapiens
  Payload ID: 7066
  Gene Symbol: GML
  Gene Name: glycosylphosphatidylinositol anchored molecule like
  Uniprot ID: Q99445
  ENST ID: ENST00000220940
  CDS Start-End: 91-567
gtcggcgcgggaggctcagatggctggaggcggcgggcacgcacactgcggggctccgaggggcacaggtccaggctcctgcgtgaagtgatgctcctctttgccttactcctagccatggagctcccattggtggcagccagtgccaccatgcgcgctcagtggacttacagtttgagatgccatgactgtgcggtcataaatgacttcaactgtcccaacattagagtatgtccgtatcatattaggcgctgtatgacaatctccattcgcataaattctcgtgaactacttgtttataagaactgtacaaacaactgcacatttgtatatgcagctgaacagcctcctgaagccccaggaaaaatcttcaaaactaatagcttctactgggtttgttgttgtaatagcatggtttgcaatgcaggaggacctactaatcttgaaagggacatgttacccgatgaagtaactgaggaggagcttccagaaggaactgtgaggctgggggtatcaaaactgttgctgagttttgcctctatcatagtcagcaatatattgccatgaggaccccaccttggagggtctgaccatcttcacctgttccgcagagaaatgttgctctccattattcccttctaagccagagacccttatccactgctcctctaggtggcccatttatggtttgttgtaagagaaaaattaaaaaaatattgttta

SEQ ID NO: 138187 - DNA, 420 bp, Homo sapiens
  Payload ID: 7066
  Gene Symbol: GML
  Gene Name: glycosylphosphatidylinositol anchored molecule like
  ENST ID: ENST00000522728
  CDS Start-End: 66-420
caagcgaaagccaggcaggtctccccctgaaacctctgcacaggtccaggctcctgcgtgaagtgatgctcctctttgccttactcctagccatggagctcccattggtggcagccagtgccaccatgcgcgctcagtggacttacagtttgagatgccatgactgtgcggtcataaatgacttcaactgtcccaacattagagtatgtccgtatcatattaggcgctgtatgacaatctccattcagctttccagtggggacagagctgctgtgtgtccagggcctcatccaactttcttccagcctggagcatggatccccacacaggtgaccgactccaagcatcagcctctccctgcccacctgaccaggcgccaccctctccacgggccaggaaacatcctccccagtgccatca

SEQ ID NO: 138188 - DNA, 3489 bp, Homo sapiens
  Payload ID: 7067
  Gene Symbol: GPLD1
  Gene Name: glycosylphosphatidylinositol specific phospholipase D1
  Uniprot ID: P80108
  ENST ID: ENST00000230036
  CDS Start-End: 112-2634
gtgacctgcttagagagaagcggtgggtctgcacctggattttggagtcccagtgctgctgcagctctgagcattcccacgtcaccagagaagccggtgggcaatgagatcatgtctgctttcaggttgtggcctggcctgctgatcatgttgggttctctctgccatagaggttcaccgtgtggcctttcaacacacgtagaaataggacacagagctctggagtttcttcagcttcacaatgggcgtgttaactacagagagctgttactagaacaccaggatgcgtatcaggctggaatcgtgtttcctgattgtttttaccctagcatctgcaaaggaggaaaattccatgatgtgtctgagagcactcactggactccgtttcttaatgcaagcgttcattatatccgagagaactatccccttccctgggagaaggacacagagaaactggtagctttcttgtttggaattacttctcacatggcggcagatgtcagctggcatagtctgggccttgaacaaggattccttaggaccatgggagctattgattttcacggctcctattcagaggctcattcggctggtgattttggaggagatgtgttgagccagtttgaatttaattttaattaccttgcacgacgctggtatgtgccagtcaaagatctactgggaatttatgagaaactgtatggtcgaaaagtcatcaccgaaaatgtaatcgttgattgttcacatatccagttcttagaaatgtatggtgagatgctagctgtttccaagttatatcccacttactctacaaagtccccgtttttggtggaacaattccaagagtattttcttggaggactggatgatatggcattttggtccactaatatttaccatctaacaagcttcatgttggagaatgggaccagtgactgcaacctgcctgagaaccctctgttcattgcatgtggcggccagcaaaaccacacccagggctcaaaaatgcagaaaaatgattttcacagaaatttgactacatccctaactgaaagtgttgacaggaatataaactatactgaaagaggagtgttctttagtgtaaattcctggaccccggattccatgtcctttatctacaaggctttggaaaggaacataaggacaatgttcataggtggctctcagttgtcacaaaagcacgtctccagccccttagcatcttacttcttgtcatttccttatgcgaggcttggctgggcaatgacctcagctgacctcaaccaggatgggcacggtgacctcgtggtgggcgcaccaggctacagccgccccggccacatccacatcgggcgcgtgtacctcatctacggcaatgacctgggcctgccacctgttgacctggacctggacaaggaggcccacaggatccttgaaggcttccagccctcaggtcggtttggctcggccttggctgtgttggactttaacgtggacggcgtgcctgacctggccgtgggagctccctcggtgggctccgagcagctcacctacaaaggtgccgtgtatgtctactttggttccaaacaaggaggaatgtcttcttcccctaacatcaccatttcttgccaggacatctactgtaacttgggctggactctcttggctgcagatgtgaatggagacagtgaacccgatctggtcatcggctccccttttgcaccaggtggagggaagcagaagggaattgtggctgcgttttattctggccccagcctgagcgacaaagaaaaactgaacgtggaggcagccaactggacggtgagaggcgaggaagacttctcctggtttggatattcccttcacggtgtcactgtggacaacagaaccttgctgttggttgggagcccgacctggaagaatgccagcaggctgggccatttgttacacatccgagatgagaaaaagagccttgggagggtgtatggctacttcccaccaaacggccaaagctggtttaccatttctggagacaaggcaatggggaaactgggtacttccctttccagtggccacgtactgatgaatgggactctgaaacaagtgctgctggttggagcccctacgtacgatgacgtgtctaaggtggcattcctgaccgtgaccctacaccaaggcggagccactcgcatgtacgcactcacatctgacgcgcagcctctgctgctcagcaccttcagcggagaccgccgcttctcccgatttggtggcgttctgcacttgagtgacctggatgatgatggcttagatgaaatcatcatggcagcccccctgaggatagcagatgtaacctctggactgattgggggagaagacggccgagtatatgtatataatggcaaagagaccacccttggtgacatgactggcaaatgcaaatcatggataactccatgtccagaagaaaaggcccaatatgtattgatttctcctgaagccagctcaaggtttgggagctccctcatcaccgtgaggtccaaggcaaagaaccaagtcgtcattgctgctggaaggagttctttgggagcccgactctccggggcacttcacgtctatagccttggctcagattgaagatttcactgcatttccccactctgcccacctctctcatgctgaatcacatccatggtgagcattttgatggacaaagtggcacatccagtggagcggtggtagatcctgatagacatggggctcctgggagtagagagacacactaacagccacaccctctggaaatctgatacagtaaatatatgactgcaccagaaatatgtgaaatagcagacattctgcttactcatgtctccttccacagtttacttcctcgctccctttgcatctaaacctttcttctttcccaacttattgcctgtagtcagacctgctgtacaacctatttcctcttcctcttgaatgtctttccaatggctggaaaggtccctctgtggttatctgttagaacagtctctgtacacaattcctcctaaaaacatccttttttaaaaaaagaattgttcagccataaagaaagaacaagatcatgccctttgcagggacatggatggagctggaggccattatccttcataaactattgcaggaacagaaaaccaaacactccatattctcacttgtaagtgggagctaaatgagaacacgtggacacatagagggaaacaacacacactggggcctatgagagggcggaaggtgggaggagggagagatcaggaaaaataactaatggatacttagggtgatgaaataatctgtgtaacaaacccccatgacacacctttatgtatgtaacaaaccagcacttcctgcgcatgtacccctgaacttaaaagttaaaaaaaagttgaacttaaaaataacagattggcccatgccaatcaaagtataatagaaagcatagtatac

SEQ ID NO: 138189 - DNA, 2725 bp, Homo sapiens
  Payload ID: 7068
  Gene Symbol: GLT1D1
  Gene Name: glycosyltransferase 1 domain containing 1
  Uniprot ID: Q96MS3
  ENST ID: ENST00000281703
  CDS Start-End: 47-847
gtcggcggcggcggggccggtcgatggcccgggcggcggcggcggcatgcggctcctgttcctggcggtgctgcggccacacaccggcaacgcggtcacggcccagcgcgttcgggcccatctagaggctgcagggcacgtgtgcgttttgaaggatgcctttgactttgaaagccgatctgagattgcaaacctcatcttggctgagaactgcgaggctgccctggctcttcatctctataggggaggcaggcttttgcaaggccaccgaatcccttttggagtcatctttggtggaactgatgtaaatgaagatgccaaccaggcggaaaaaaacacagtcatgggcagagttcttgaggaagccagatttgctgtcgctttcacagagtcaatgaaggaaatggcacaagcgcagtgggtcgatccagtgtttacaagggaagtgaaagccaaagtgaaaagagccgctggggtacgattgattggagagatgcctcaagaagatctgcacgcggtggtgaagaattgcttcgcggtggtgaatagctctgtctctgaaggcatgtcagctgcaattttggaggcaatggatttagaagtaccggtattggccaggaacatccccgggaatgctgccgtggtgaagcatgaagtcacagggctactgttttccaatcctcaggagtttgttcatctggcaaagagactggttagtgatcctgcattagaaaaggaaatcgtagtgaacggaagggaatacgtgagaatgtatcattcatggcaggtggaaagagacacctaccaacagctcatcaggaagctggaaggaagcactgaagattgagggccccgcctcatcagacacctgctctctgacacacagctctgggtgcacactcagagacagagttctggatcacgtgggcccagtgcagttcaaataaaaccagcctcagcggaatcctagaaaatgttagtcgtgagtccccagagccactgcattcatcccatatccttctgtgcgttcagatgctgtcccaggcgtgttcaccagccagtcctgatggaggtgcatgagtgactgggttgactgggacagggaaaggggaactggttttcagggaatttgggagagaatttgattacctgccttagggctttggtgtggacaatagaggcttattttcaagcagtcatggttcagactcctcccgcctgccttctgaccaacctctccccatcgttgccagtttgaaaggcaaaagcaaaacagacgtgtcagctgagccgagtcctcgcaggatttttgttgtgatctcaggactctgacaggcacgtgggtgacccgaggcttctctgaacactagaaagcgctgtgagtgagctcacgcccggcacagctcacttttcaatggtggaattgaaagttgtgctttttagaaaagtggccaggctgcccgcaggccccgcccacctcttggctgaatttgagtggaaaaccaggaaggaacaagcgccacgtcacgcatagcctgcaaatcgcccgcgtgaccctgagatggaggcctgaggctttgggtccagggtgggctcttccccttcccacatcagggacccggggatggatgtcggaagggtcaccagcctccagcctttggcaggatggagcttgggtctgcagggctttgcagccacacagcgaggtcagtccggggccagccgcgccatcatggtaatggtggcctcgccccatccatgtcatccatgtcacatgaggacgtgcagtcttccttgtcctctcctagtggaatttgcctgggagaacctccactgaatactgaaattgttgcatgcctgtggattccttacgacaatggggaacgcggtgtttcccacctcttgtgggtagaaagcagtctgctttgaggaggcgagaaggcaaagccagggcagggcgttgctgtgggaagcgttcggtgaaagcgggtttcgacgcttaggagggccgagggagaagattccaccagcattgtccttgcttcaagttttaggatgtctgaactttcagctttcatgttttcaaccatcatttttttaatggcacaacctacatcttgtttttaaaagaagtagcctcaaattaaactccttaaactctgatgccctggggatgagaacaactagcttggatctcgtgccgtgtaattcaatgtttcattccgctgcctccatcatgtaatagaatcgctttccagaaaggcagttaactggaagcagcagaggctcccagccgtgagaggactgctcaacaatgccccccatcgccgcccccccacccctcgcaccccttgtgttttccctctgaggggcccaagggttatggctttcatgtctaggtgtggggacagaggagggagaggcagatcctgggccgggagaggatggcctggtctgaatctggagtaattaatgccacccaaagaaaaggccctgccaggtccaatgttgtcttagatctgatgatgctgctatttacaaaacactgatcgtccgaaagcttgaatctgttcctcctcgaatgaccctgtagatgcctgacctccaccgtacctccacatcactattcatgtccttctaggaaaatgtgcacatgcctcacgcactatgtgggaagggcgtgtttttaaattaataaagtgtgtcaccattagccatacgaaaa

SEQ ID NO: 138190 - DNA, 2995 bp, Homo sapiens
  Payload ID: 7068
  Gene Symbol: GLT1D1
  Gene Name: glycosyltransferase 1 domain containing 1
  Uniprot ID: Q96MS3
  ENST ID: ENST00000442111
  CDS Start-End: 89-1129
cggctcccccgccgtccgcgtctgcgccggccccggggcctggtcggcggcggcggggccggtcgatggcccgggcggcggcggcggcatgcggctcctgttcctggcggtgctgcggccacacaccggcaacgcggtcacggcccagcgcgttcgggcccatctagaggctgcagggcacgtgtgcgttttgaaggatgcctttgactttgaaagccgatctgagattgcaaacctcatcttggctgagaactgcgaggctgccctggctcttcatctctataggggaggcaggcttttgcaaggccaccgaatcccttttggagtcatctttggtggaactgatgtaaatgaagatgccaaccaggcggaaaaaaacacagtcatgggcagagttcttgaggaagccagatttgctgtcgctttcacagagtcaatgaaggaaatggcacaagcgcagtggccgcatgctaagggtaaggtctatgtccagagtcaaggaattgcaacaacaccaaacgccgcttttaactggaatacctttcttcaacgctctgagattaaccaaagtgctgataatttgcacatatttcttctgatatgtggacttcgacaagttaaggatcctctctatctggtggacgcattttcagcctggcatcaggaggagcccaatgtgcacctggtgattgtgggtcctgaagtcgatccagtgtttacaagggaagtgaaagccaaagtgaaaagagccgctggggtacgattgattggagagatgcctcaagaagatctgcacgcggtggtgaagaattgcttcgcggtggtgaatagctctgtctctgaaggcatgtcagctgcaattttggaggcaatggatttagaagtaccggtattggccaggaacatccccgggaatgctgccgtggtgaagcatgaagtcacagggctactgttttccaatcctcaggagtttgttcatctggcaaagagactggttagtgatcctgcattagaaaaggaaatcgtagtgaacggaagggaatacgtgagaatgtatcattcatggcaggtggaaagagacacctaccaacagctcatcaggaagctggaaggaagcactgaagattgagggccccgcctcatcagacacctgctctctgacacacagctctgggtgcacactcagagacagagttctggatcacgtgggcccagtgcagttcaaataaaaccagcctcagcggaatcctagaaaatgttagtcgtgagtccccagagccactgcattcatcccatatccttctgtgcgttcagatgctgtcccaggcgtgttcaccagccagtcctgatggaggtgcatgagtgactgggttgactgggacagggaaaggggaactggttttcagggaatttgggagagaatttgattacctgccttagggctttggtgtggacaatagaggcttattttcaagcagtcatggttcagactcctcccgcctgccttctgaccaacctctccccatcgttgccagtttgaaaggcaaaagcaaaacagacgtgtcagctgagccgagtcctcgcaggatttttgttgtgatctcaggactctgacaggcacgtgggtgacccgaggcttctctgaacactagaaagcgctgtgagtgagctcacgcccggcacagctcacttttcaatggtggaattgaaagttgtgctttttagaaaagtggccaggctgcccgcaggccccgcccacctcttggctgaatttgagtggaaaaccaggaaggaacaagcgccacgtcacgcatagcctgcaaatcgcccgcgtgaccctgagatggaggcctgaggctttgggtccagggtgggctcttccccttcccacatcagggacccggggatggatgtcggaagggtcaccagcctccagcctttggcaggatggagcttgggtctgcagggctttgcagccacacagcgaggtcagtccggggccagccgcgccatcatggtaatggtggcctcgccccatccatgtcatccatgtcacatgaggacgtgcagtcttccttgtcctctcctagtggaatttgcctgggagaacctccactgaatactgaaattgttgcatgcctgtggattccttacgacaatggggaacgcggtgtttcccacctcttgtgggtagaaagcagtctgctttgaggaggcgagaaggcaaagccagggcagggcgttgctgtgggaagcgttcggtgaaagcgggtttcgacgcttaggagggccgagggagaagattccaccagcattgtccttgcttcaagttttaggatgtctgaactttcagctttcatgttttcaaccatcatttttttaatggcacaacctacatcttgtttttaaaagaagtagcctcaaattaaactccttaaactctgatgccctggggatgagaacaactagcttggatctcgtgccgtgtaattcaatgtttcattccgctgcctccatcatgtaatagaatcgctttccagaaaggcagttaactggaagcagcagaggctcccagccgtgagaggactgctcaacaatgccccccatcgccgcccccccacccctcgcaccccttgtgttttccctctgaggggcccaagggttatggctttcatgtctaggtgtggggacagaggagggagaggcagatcctgggccgggagaggatggcctggtctgaatctggagtaattaatgccacccaaagaaaaggccctgccaggtccaatgttgtcttagatctgatgatgctgctatttacaaaacactgatcgtccgaaagcttgaatctgttcctcctcgaatgaccctgtagatgcctgacctccaccgtacctccacatcactattcatgtccttctaggaaaatgtgcacatgcctcacgcactatgtgggaagggcgtgtttttaaattaataaagtgtgtcaccatta

SEQ ID NO: 138191 - DNA, 2233 bp, Homo sapiens
  Payload ID: 7068
  Gene Symbol: GLT1D1
  Gene Name: glycosyltransferase 1 domain containing 1
  ENST ID: ENST00000413816
  CDS Start-End: 1-363
gtgctgcggccacacaccggcaacgcggtcacggcccagcgcgttcgggcccatctagaggctgcagggcacgtgtgcgttttgaaggatgcctttgactttgaaagccgatctgagattgcaaacctcatcttggctgagaactgcgaggctgccctggctcttcatctctataggggaggcaggcttttgcaaggccaccgaatcccttttggagtcatctttggtggaactgatgtaaatgaagatgccaaccaggcggaaaaaaacacagtcatgggcagagttcttgaggaagccagatttgctgtcgctttcacagagtcaatgaaggaaatggcacaagcgcagtgggtatgttgaacttgccctttttttgtttctttgacccaggaattgcaacaacaccaaacgccgcttttaactggaatacctttcttcaacgctctgagattaaccaaagtgctgataatttgcacatatttcttctgatatgtggacttcgacaagttaaggatcctctctatctggtggacgcattttcagcctggcatcaggaggagcccaatgtgcacctggtgattgtgggtcctgaagtaaattcttggaatcagagccactcttcctgctttgtgtttcagagccgctggggtacgattgattggagagatgcctcaagaagatctgcacgcggtggtgaagaattgcttcgcggtggtgaatagctctgtctctgaaggcatgtcagctgcaattttggaggcaatggatttagaagtaccggtattggccaggaacatccccgggaatgctgccgtggtgaagcatgaagtcacagggctactgttttccaatcctcaggagtttgttcatctggcaaagagactggttagtgatcctgcattagaaaaggaaatcgtagtgaacggaagggaatacgtgagaatgtatcattcatggcaggtggaaagagacacctaccaacagctcatcaggaagctggaaggaagcactgaagattgagggccccgcctcatcagacacctgctctctgacacacagctctgggtgcacactcagagacagagttctggatcacgtgggcccagtgcagttcaaataaaaccagcctcagcggaatcctagaaaatgttagtcgtgagtccccagagccactgcattcatcccatatccttctgtgcgttcagatgctgtcccaggcgtgttcaccagccagtcctgatggaggtgcatgagtgactgggttgactgggacagggaaaggggaactggttttcagggaatttgggagagaatttgattacctgccttagggctttggtgtggacaatagaggcttattttcaagcagtcatggttcagactcctcccgcctgccttctgaccaacctctccccatcgttgccagtttgaaaggcaaaagcaaaacagacgtgtcagctgagccgagtcctcgcaggatttttgttgtgatctcaggactctgacaggcacgtgggtgacccgaggcttctctgaacactagaaagcgctgtgagtgagctcacgcccggcacagctcacttttcaatggtggaattgaaagttgtgctttttagaaaagtggccaggctgcccgcaggccccgcccacctcttggctgaatttgagtggaaaaccaggaaggaacaagcgccacgtcacgcatagcctgcaaatcgcccgcgtgaccctgagatggaggcctgaggctttgggtccagggtgggctcttccccttcccacatcagggacccggggatggatgtcggaagggtcaccagcctccagcctttggcaggatggagcttgggtctgcagggctttgcagccacacagcgaggtcagtccggggccagccgcgccatcatggtaatggtggcctcgccccatccatgtcatccatgtcacatgaggacgtgcagtcttccttgtcctctcctagtggaatttgcctgggagaacctccactgaatactgaaattgttgcatgcctgtggattccttacgacaatggggaacgcggtgtttcccacctcttgtgggtagaaagcagtctgctttgaggaggcgagaaggcaaagccagggcagggcgttgctgtgggaagcgttcggtgaaagcgggtttcgacgcttaggagggccgagggagaagattccaccagcattgtccttgcttcaagttttaggat

SEQ ID NO: 138192 - DNA, 3010 bp, Homo sapiens
  Payload ID: 7068
  Gene Symbol: GLT1D1
  Gene Name: glycosyltransferase 1 domain containing 1
  Uniprot ID: Q96MS3
  ENST ID: ENST00000441390
  CDS Start-End: 156-614
tggcgccggaacctgcgagctggggcgcggcctcggggaggggcgggcgggacagacccagccgccccggctcccccgccgtccgcgtctgcgccggccccggggcctggtcggcggcggcggggccggtcgatggcccgggcggcggcggcggcatgcggctcctgttcctggcggtgctgcggccacacaccggcaacgcggtcacggcccagcgcgttcgggcccatctagaggctgcagggcacgtgtgcgttttgaaggatgcctttgactttgaaagccgatctgagattgcaaacctcatcttggctgagaactgcgaggctgccctggctcttcatctctataggggaggcaggcttttgcaaggccaccgaatcccttttggagtcatctttggtggaactgatgtaaatgaagatgccaaccaggcggaaaaaaacacagtcatgggcagagttcttgaggaagccagccgcatgctaagggtaaggtctatgtccagagtcaaggaattgcaacaacaccaaacgccgcttttaactggaatacctttcttcaacgctctgagattaaccaaagtgctgataatttgcacatatttcttctgatatgtggacttcgacaagttaaggatcctctctatctggtggacgcattttcagcctggcatcaggaggagcccaatgtgcacctggtgattgtgggtcctgaagtcgatccagtgtttacaagggaagtgaaagccaaagtgaaaagagccgctggggtacgattgattggagagatgcctcaagaagatctgcacgcggtggtgaagaattgcttcgcggtggtgaatagctctgtctctgaaggcatgtcagctgcaattttggaggcaatggatttagaagtaccggtattggccaggaacatccccgggaatgctgccgtggtgaagcatgaagtcacagggctactgttttccaatcctcaggagtttgttcatctggcaaagagactggttagtgatcctgcattagaaaaggaaatcgtagtgaacggaagggaatacgtgagaatgtatcattcatggcaggtggaaagagacacctaccaacagctcatcaggaagctggaaggaagcactgaagattgagggccccgcctcatcagacacctgctctctgacacacagctctgggtgcacactcagagacagagttctggatcacgtgggcccagtgcagttcaaataaaaccagcctcagcggaatcctagaaaatgttagtcgtgagtccccagagccactgcattcatcccatatccttctgtgcgttcagatgctgtcccaggcgtgttcaccagccagtcctgatggaggtgcatgagtgactgggttgactgggacagggaaaggggaactggttttcagggaatttgggagagaatttgattacctgccttagggctttggtgtggacaatagaggcttattttcaagcagtcatggttcagactcctcccgcctgccttctgaccaacctctccccatcgttgccagtttgaaaggcaaaagcaaaacagacgtgtcagctgagccgagtcctcgcaggatttttgttgtgatctcaggactctgacaggcacgtgggtgacccgaggcttctctgaacactagaaagcgctgtgagtgagctcacgcccggcacagctcacttttcaatggtggaattgaaagttgtgctttttagaaaagtggccaggctgcccgcaggccccgcccacctcttggctgaatttgagtggaaaaccaggaaggaacaagcgccacgtcacgcatagcctgcaaatcgcccgcgtgaccctgagatggaggcctgaggctttgggtccagggtgggctcttccccttcccacatcagggacccggggatggatgtcggaagggtcaccagcctccagcctttggcaggatggagcttgggtctgcagggctttgcagccacacagcgaggtcagtccggggccagccgcgccatcatggtaatggtggcctcgccccatccatgtcatccatgtcacatgaggacgtgcagtcttccttgtcctctcctagtggaatttgcctgggagaacctccactgaatactgaaattgttgcatgcctgtggattccttacgacaatggggaacgcggtgtttcccacctcttgtgggtagaaagcagtctgctttgaggaggcgagaaggcaaagccagggcagggcgttgctgtgggaagcgttcggtgaaagcgggtttcgacgcttaggagggccgagggagaagattccaccagcattgtccttgcttcaagttttaggatgtctgaactttcagctttcatgttttcaaccatcatttttttaatggcacaacctacatcttgtttttaaaagaagtagcctcaaattaaactccttaaactctgatgccctggggatgagaacaactagcttggatctcgtgccgtgtaattcaatgtttcattccgctgcctccatcatgtaatagaatcgctttccagaaaggcagttaactggaagcagcagaggctcccagccgtgagaggactgctcaacaatgccccccatcgccgcccccccacccctcgcaccccttgtgttttccctctgaggggcccaagggttatggctttcatgtctaggtgtggggacagaggagggagaggcagatcctgggccgggagaggatggcctggtctgaatctggagtaattaatgccacccaaagaaaaggccctgccaggtccaatgttgtcttagatctgatgatgctgctatttacaaaacactgatcgtccgaaagcttgaatctgttcctcctcgaatgaccctgtagatgcctgacctccaccgtacctccacatcactattcatgtccttctaggaaaatgtgcacatgcctcacgcactatgtgggaagggcgtgtttttaaattaataaagtgtgtcaccatta

SEQ ID NO: 138193 - DNA, 1714 bp, Homo sapiens
  Payload ID: 7068
  Gene Symbol: GLT1D1
  Gene Name: glycosyltransferase 1 domain containing 1
  ENST ID: ENST00000537468
  CDS Start-End: 10-1065
agtcttaacatgctgactgcgaggtgcctgtcagacgacacactggcccatctagaggctgcagggcacgtgtgcgttttgaaggatgcctttgactttgaaagccgatctgagattgcaaacctcatcttggctgagaactgcgaggctgccctggctcttcatctctataggggaggcaggcttttgcaaggccaccgaatcccttttggagtcatctttggtggaactgatgtaaatgaagatgccaaccaggcggaaaaaaacacagtcatgggcagagttcttgaggaagccagatttgctgtcgctttcacagagtcaatgaaggaaatggcacaagcgcagtggaaagcaagacagatctcattggctgtcacaagtgcagttcctgtacagccgcatgctaagggtaaggtctatgtccagagtcaaggaattgcaacaacaccaaacgccgcttttaactggaatacctttcttcaacgctctgagattaaccaaagtgctgataatttgcacatatttcttctgatatgtggacttcgacaagttaaggatcctctctatctggtggacgcattttcagcctggcatcaggaggagcccaatgtgcacctggtgattgtgggtcctgaagtcgatccagtgtttacaagggaagtgaaagccaaagtgaaaagagccgctggggtacgattgattggagagatgcctcaagaagatctgcacgcggtggtgaagaattgcttcgcggtggtgaatagctctgtctctgaaggcatgtcagctgcaattttggaggcaatggatttagaagtaccggtattggccaggaacatccccgggaatgctgccgtggtgaagcatgaagtcacagggctactgttttccaatcctcaggagtttgttcatctggcaaagagactggttagtgatcctgcattagaaaaggaaatcgtagtgaacggaagggaatacgtgagaatgtatcattcatggcaggtggaaagagacacctaccaacagctcatcaggaagctggaaggaagcactgaagattgagggccccgcctcatcagacacctgctctctgacacacagctctgggtgcacactcagagacagagttctggatcacgtgggcccagtgcagttcaaataaaaccagcctcagcggaatcctagaaaatgttagtcgtgagtccccagagccactgcattcatcccatatccttctgtgcgttcagatgctgtcccaggcgtgttcaccagccagtcctgatggaggtgcatgagtgactgggttgactgggacagggaaaggggaactggttttcagggaatttgggagagaatttgattacctgccttagggctttggtgtggacaatagaggcttattttcaagcagtcatggttcagactcctcccgcctgccttctgaccaacctctccccatcgttgccagtttgaaaggcaaaagcaaaacagacgtgtcagctgagccgagtcctcgcaggatttttgttgtgatctcaggactctgacaggcacgtgggtgacccgaggcttctctgaacactagaaagcgctgtgagtgagctcacgcccggcacagctcacttttcaatggtggaattgaaagttgtgctttttagaaaagtggccaggctgcccgcaggccccgcccacctcttggctgaatttgagt

SEQ ID NO: 138194 - DNA, 791 bp, Homo sapiens
  Payload ID: 7068
  Gene Symbol: GLT1D1
  Gene Name: glycosyltransferase 1 domain containing 1
  Uniprot ID: Q96MS3
  ENST ID: ENST00000539044
  CDS Start-End: 1-459
atgcggctcctgttcctggcggtgctgcggccacacaccggcaacgcggtcacggcccagcgcgttcgggcccatctagaggctgcagggcacgtgtgcgttttgaaggatgcctttgactttgaaagccgatctgagattgcaaacctcatcttggctgagaactgcgaggctgccctggctcttcatctctataggggaggcaggcttttgcaaggccaccgaatcccttttggagtcatctttggtggaactgatgtaaatgaagatgccaaccaggcggaaaaaaacacagtcatgggcagagttcttgaggaagccagccgcatgctaagggtaaggtctatgtccagagtcaaggaattgcaacaacaccaaacgccgcttttaactggaatacctttcttcaacgctctgagattaaccaaagtgctgataatttgcacatatttcttctgatatgtggacttcgacaagttaaggatcctctctatctggtggacgcattttcagcctggcatcaggaggagcccaatgtgcacctggtgattgtgggtcctgaaaacattgaaagaaaaacttctagtttgatgctaaaattctggctaatcaagagagaaggcctcagactgggagccatgagcaggcaacaacagtatctagaaggcatttaataatgtggttttctttttcattgttttcattctgatgatcacatctcaggtacagtgcttgataccagctttccaattatgaaaattgcctttcaaaataaattgacttcacaaaaa

SEQ ID NO: 138195 - DNA, 1526 bp, Homo sapiens
  Payload ID: 7069
  Gene Symbol: GLT6D1
  Gene Name: glycosyltransferase 6 domain containing 1
  Uniprot ID: Q7Z4J2
  ENST ID: ENST00000371763
  CDS Start-End: 255-1085
attctcctagatcaagaagacttcctcatcaagacctcattctatttgcacagccctgcagtggagagatttattgcgtttctttcatgcaatcaacgcagactttgatgtgaacacggggagagacagtgcacgtgcagctgacccacggggaacagtcagccccgggcacttgaaggagaacagaggcttccctaactcaagtcgctgtctcctgccagctgaacattctagaagcaacctctaaggagagaatgaattctaaaagaatgctgttattggttttatttgctttttcactgatgttggttgagcgttatttcaggaatcaccaagtagaagaacttcggctctcagactggtttcatcctagaaaacgccctgatgttataacgaaaacagactggctcgctcctgtcctatgggaagggactttcgacaggcgggtcctggaaaaacattacagaaggcggaatatcactgtgggcctggccgtctttgctactggcaggtttgcagaggagtacctgaggccgttcctacactccgcaaataagcacttcatgacaggctaccgagtgatcttctacatcatggtggacgccttcttcaagctgcctgacatagagcccagtcctcttcgaacgttcaaagcatttaaagtgggcaccgagaggtggtggctcgatggccccctggtgcatgtgaagagcctgggtgaacacatcgccagtcacatccaggacgaggtggacttcctcttcagcatggctgccaaccaggtcttccagaatgagttcggggtggagaccctgggcccgttggtggcccagctccacgcctggtggtatttcagaaacaccaagaacttcccttatgagaggaggccgacctcagcagcttgcatcccgtttggacagggagatttctattatggcaacttgatggttggtggcacaccccataatattttagacttcatcaaagaatatctgaacggagttattcatgacatcaaaaatggactcaatagcacttatgaaaagcaccttaacaaatatttttacctcaataaacccacctagctgttatcaccagcatacagctgggatcttgcattttctcctcctccacagatccaatacgtcaaggtcgcacatgattcccagaggaaattatgaattacgccatgaggtttatgacgaataaatgaatcacggcaatttcttataaatgagggaagtcttaagaccttccattttttagagacatacaaatttacatccttcccaaataaatgtttcttcttgccattttgagccatcttatttggctaatgtaggataaagaataaaaggataattacttaatgttaatacacagtaatgttattatctatgtattgtagacaatgtgaaaatacatttgacatagaatgaatatttttaatggagaaagactctagttgagaaaaaacattcataaaatggaaaagtagttcacgcaaaggaaaaaataaatgccag

SEQ ID NO: 138196 - DNA, 1523 bp, Homo sapiens
  Payload ID: 7069
  Gene Symbol: GLT6D1
  Gene Name: glycosyltransferase 6 domain containing 1
  ENST ID: ENST00000613244
  CDS Start-End: 255-1178
attctcctagatcaagaagacttcctcatcaagacctcattctatttgcacagccctgcagtggagagatttattgcgtttctttcatgcaatcaacgcagactttgatgtgaacacggggagagacagtgcacgtgcagctgacccacggggaacagtcagccccgggcacttgaaggagaacagaggcttccctaactcaagtcgctgtctcctgccagctgaacattctagaagcaacctctaaggagagaatgaattctaaaagaatgctgttattggttttatttgctttttcactgatgttggttgagcgttatttcaggaatcaccaagtagaagaacttcggctctcagactggtttcatcctagaaaacgccctgatgttataacgaaaacagactggctcgctcctgtcctatgggaagggactttcgacaggcgggtcctggaaaaacattacagaaggcggaatatcactgtgggcctggccgtctttgctactggcaggtttgcagaggagtacctgaggccgttcctacactccgcaaataagcacttcatgacaggctaccgagtgatcttctacatcatggtggacgccttcttcaagctgcctgacatagagcccagtcctcttcgaacgttcaaagcatttaaagtgggcaccgagaggtggtggctcgatggccccctggtgcatgtgaagagcctgggtgaacacatcgccagtcacatccaggacgaggtggacttcctcttcagcatggctgccaaccaggtcttccagaatgagttcggggtggagaccctgggcccgttggtggcccagctccacgcctggtggtatttcagaaacaccaagaacttcccttatgagaggaggccgacctcagcagcttgcatcccgtttggacagggagatttctattatggcaacttgatggttggtggcacaccccataatattttagacttcatcaaagaatatctgaacggagttattcatgacatcaaaaatggactcaatagcacttatgaaaagcaccttaacaaatatttttacctcaataaacccaccctgttatcaccagcatacagctgggatcttgcattttctcctcctccacagatccaatacgtcaaggtcgcacatgattcccagaggaaattatgaattacgccatgaggtttatgacgaataaatgaatcacggcaatttcttataaatgagggaagtcttaagaccttccattttttagagacatacaaatttacatccttcccaaataaatgtttcttcttgccattttgagccatcttatttggctaatgtaggataaagaataaaaggataattacttaatgttaatacacagtaatgttattatctatgtattgtagacaatgtgaaaatacatttgacatagaatgaatatttttaatggagaaagactctagttgagaaaaaacattcataaaatggaaaagtagttcacgcaaaggaaaaaataaatgccag

SEQ ID NO: 138197 - DNA, 2149 bp, Homo sapiens
  Payload ID: 7070
  Gene Symbol: GLT8D1
  Gene Name: glycosyltransferase 8 domain containing 1
  Uniprot ID: Q68CQ7
  ENST ID: ENST00000266014
  CDS Start-End: 674-1789
gacgggccggtacagcccgtgtccccgccccgcgccatcgctaggcgacgtgcgcttttgccgcgccgtgctgcccgcgagggcagctgaggtggtggtggcggccgccttgtcgaggcatcgcgcgcccgtgaagtgttcgccgtcagtgctgttgggtgcctggagccgcgtcccccgtcccgaaaactgtccttgacagtacttgcgcggcccaacggccgccggcgcccccgcgtctccatggcgacggcctttttccctgcgaggaccccggcggcagggctgccccgcggcgcctgcttggcgcgacgctctagcggttaccgctgcgggctggctgggcgtagtggggctgcgcggctgccacggagctagagggcaagtgtgctcggcccagcgtgcagggaacgcgggcggccagacaacgggctgggctccggggcctgcggcgcgggcgctgagctggcagggcgggtcggggcgcgggctgcatccgcatctcctccatcgcctgcagtaagggcggccgcggcgagcctttgaggggaacgacttgtcggagccctaaccaggggtatctctgagcctggtgggatccccggagcgtcacatcactttccgatcacttcaaagtggttaaaaactaatatttatatgacagaagaaaaagatgtcattccgtaaagtaaacatcatcatcttggtcctggctgttgctctcttcttactggttttgcaccataacttcctcagcttgagcagtttgttaaggaatgaggttacagattcaggaattgtagggcctcaacctatagactttgtcccaaatgctctccgacatgcagtagatgggagacaagaggagattcctgtggtcatcgctgcatctgaagacaggcttgggggggccattgcagctataaacagcattcagcacaacactcgctccaatgtgattttctacattgttactctcaacaatacagcagaccatctccggtcctggctcaacagtgattccctgaaaagcatcagatacaaaattgtcaattttgaccctaaacttttggaaggaaaagtaaaggaggatcctgaccagggggaatccatgaaacctttaacctttgcaaggttctacttgccaattctggttcccagcgcaaagaaggccatatacatggatgatgatgtaattgtgcaaggtgatattcttgccctttacaatacagcactgaagccaggacatgcagctgcattttcagaagattgtgattcagcctctactaaagttgtcatccgtggagcaggaaaccagtacaattacattggctatcttgactataaaaaggaaagaattcgtaagctttccatgaaagccagcacttgctcatttaatcctggagtttttgttgcaaacctgacggaatggaaacgacagaatataactaaccaactggaaaaatggatgaaactcaatgtagaagagggactgtatagcagaaccctggctggtagcatcacaacacctcctctgcttatcgtattttatcaacagcactctaccatcgatcctatgtggaatgtccgccaccttggttccagtgctggaaaacgatattcacctcagtttgtaaaggctgccaagttactccattggaatggacatttgaagccatggggaaggactgcttcatatactgatgtttgggaaaaatggtatattccagacccaacaggcaaattcaacctaatccgaagatataccgagatctcaaacataaagtgaaacagaatttgaactgtaagcaagcatttctcaggaagtcctggaagatagcatgcgtgggaagtaacagttgctaggcttcaatgcctatcggtagcaagccatggaaaaagatgtgtcagctaggtaaagatgacaaactgccctgtctggcagtcagcttcccagacagactatagactataaatatgtctccatctgccttaccaagtgttttcttactacaatgctgaatgactggaaagaagaactgatatggctagttcagctagctggtacagataattcaaaactgctgttggttttaattttgtaacctgtggcctgatctgtaaataaaacttacatttttcaataggt

SEQ ID NO: 138198 - DNA, 1621 bp, Homo sapiens
  Payload ID: 7070
  Gene Symbol: GLT8D1
  Gene Name: glycosyltransferase 8 domain containing 1
  Uniprot ID: Q68CQ7
  ENST ID: ENST00000394783
  CDS Start-End: 153-1268
gtgggatttatttgagtgcaagatcgttttctcagtggtggtggaagttgcctcatcgcaggcagatgttggggctttgtccgaacagctcccctctgccagcttctgtagataagggttaaaaactaatatttatatgacagaagaaaaagatgtcattccgtaaagtaaacatcatcatcttggtcctggctgttgctctcttcttactggttttgcaccataacttcctcagcttgagcagtttgttaaggaatgaggttacagattcaggaattgtagggcctcaacctatagactttgtcccaaatgctctccgacatgcagtagatgggagacaagaggagattcctgtggtcatcgctgcatctgaagacaggcttgggggggccattgcagctataaacagcattcagcacaacactcgctccaatgtgattttctacattgttactctcaacaatacagcagaccatctccggtcctggctcaacagtgattccctgaaaagcatcagatacaaaattgtcaattttgaccctaaacttttggaaggaaaagtaaaggaggatcctgaccagggggaatccatgaaacctttaacctttgcaaggttctacttgccaattctggttcccagcgcaaagaaggccatatacatggatgatgatgtaattgtgcaaggtgatattcttgccctttacaatacagcactgaagccaggacatgcagctgcattttcagaagattgtgattcagcctctactaaagttgtcatccgtggagcaggaaaccagtacaattacattggctatcttgactataaaaaggaaagaattcgtaagctttccatgaaagccagcacttgctcatttaatcctggagtttttgttgcaaacctgacggaatggaaacgacagaatataactaaccaactggaaaaatggatgaaactcaatgtagaagagggactgtatagcagaaccctggctggtagcatcacaacacctcctctgcttatcgtattttatcaacagcactctaccatcgatcctatgtggaatgtccgccaccttggttccagtgctggaaaacgatattcacctcagtttgtaaaggctgccaagttactccattggaatggacatttgaagccatggggaaggactgcttcatatactgatgtttgggaaaaatggtatattccagacccaacaggcaaattcaacctaatccgaagatataccgagatctcaaacataaagtgaaacagaatttgaactgtaagcaagcatttctcaggaagtcctggaagatagcatgcgtgggaagtaacagttgctaggcttcaatgcctatcggtagcaagccatggaaaaagatgtgtcagctaggtaaagatgacaaactgccctgtctggcagtcagcttcccagacagactatagactataaatatgtctccatctgccttaccaagtgttttcttactacaatgctgaatgactggaaagaagaactgatatggctagttcagctagctggtacagataattcaaaactgctgttggttttaattttgtaacctgtggcctgatctgtaaataaaacttacatttttc

SEQ ID NO: 138199 - DNA, 1419 bp, Homo sapiens
  Payload ID: 7070
  Gene Symbol: GLT8D1
  Gene Name: glycosyltransferase 8 domain containing 1
  ENST ID: ENST00000407584
  CDS Start-End: 739-1419
ccaagtgtgcctcttgatcccgtaactgctaactggaagtcaagaaactaaaaacattatctcttgtaccattaattaagtgggatttatttgagtgcaagatcgttttctcagtggtggtggaagttgcctcatcgcaggcagatgttggggctttgtccgaacagctcccctctgccagcttctgtagataagggttaaaaactaatatttatatgacagaagaaaaagatgtcattccgtaaagtaaacatcatcatcttggtcctggctgttgctctcttcttactggttttgcaccataacttcctcagcttgagcagtttgttaaggaatgaggttacagattcaggaattgtagggcctcaacctatagactttgtcccaaatgctctccgacatgcagtagatgggagacaagaggagattcctgtggtcatcgctgcatctgaagacaggcttgggggggccattgcagctataaacagcattcagcacaacactcgctccaatgtgattttctacattgttactctcaacaatacagcagaccatctccggtcctggctcaacagtgattccctgaaaagcatcagatacaaaattgtcaattttgaccctaaacttttggaaggaaaagtaaaggaggatcctgaccagggggaatccatgaaacctttaacctttgcaaggttctacttgccaattctggttcccagcgcaaagaaggccatatacatggatgatgatgtaattgtgcaaggtgatattcttgccctttacaatacagcactgaagccaggacatgcagctgcattttcagaagattgtgattcagcctctactaaagttgtcatccgtggagcaggaaaccagtacaattacattggctatcttgactataaaaaggaaagaattcgtaagctttccatgaaagccagcacttgctcatttaatcctggagtttttgttgcaaacctgacggaatggaaacgacagaatataactaaccaactggaaaaatggatgaaactcaatgtagaagagggactgtatagcagaaccctggctggtagcatcacaacacctcctctgcttatcgtattttatcaacagcactctaccatcgatcctatgtggaatccgccaccttggttccagtgctggaaaacgatattcacctcagtttgtaaaggctgccaagttactcattggaatggacatttgaagccatggggaaggactgcttcatatacttgtttgggaaaaatggtatattccagacccaacaggcaaattcaacctaatccgaagatataccgagatctcaaacataaagtgaaacagaatttgaactgtaagcaagcatttctcaggaagtcctggaagatagcatgcgtgggaagtaacagttgctag

SEQ ID NO: 138200 - DNA, 724 bp, Homo sapiens
  Payload ID: 7070
  Gene Symbol: GLT8D1
  Gene Name: glycosyltransferase 8 domain containing 1
  ENST ID: ENST00000489119
  CDS Start-End: 377-724
gcctgcttggcgcgacgctctagcggttaccgctgcgggctggctgggcgtagtggggctgcgcggctgccacggagctagagggcaagtgtgctcggcccagcgtgcagggaacgcgggcggccagacaacgggctgggctccggggcctgcggcgcgggcgctgagctggcagggcgggtcggggcgcgggctgcatccgcatctcctccatcgcctgcagtaagggcggccgcggcgagcctttgaggggaacgacttgtcggagccctaaccaggggtatctctgagcctggtgggatccccggagcgtcacatcactttccgatcacttcaaagtggttaaaaactaatatttatatgacagaagaaaaagatgtcattccgtaaagtaaacatcatcatcttggtcctggctgttgctctcttcttactggttttgcaccataacttcctcagcttgagcagtttgttaaggaatgaggttacagattcaggaattgtagggcctcaacctatagactttgtcccaaatgctctccgacatgcagtagatgggagacaagaggagattcctgtggtcatcgctgcatctgaagacaggcttgggggggccattgcagctataaacagcattcagcacaacactcgctccaatgtgattttctacattgttactctcaacaatacagcagaccatctccggtcctggctcaacagtgat

SEQ ID NO: 138201 - DNA, 720 bp, Homo sapiens
  Payload ID: 7070
  Gene Symbol: GLT8D1
  Gene Name: glycosyltransferase 8 domain containing 1
  ENST ID: ENST00000479553
  CDS Start-End: 198-720
attgggttcttgggaactgtgaattcaaaatgagtttctggcggaatactgtatatgcctcttgtttcttcctgaattaaaaaaaaaaaaaaagtgttagggcattttgatgtcccttctcatgtgcttactgactttgggggcttgtttttgttttgtagggttaaaaactaatatttatatgacagaagaaaaagatgtcattccgtaaagtaaacatcatcatcttggtcctggctgttgctctcttcttactggttttgcaccataacttcctcagcttgagcagtttgttaaggaatgaggttacagattcaggaattgtagggcctcaacctatagactttgtcccaaatgctctccgacatgcagtagatgggagacaagaggagattcctgtggtcatcgctgcatctgaagacaggcttgggggggccattgcagctataaacagcattcagcacaacactcgctccaatgtgattttctacattgttactctcaacaatacagcagaccatctccggtcctggctcaacagtgattccctgaaaagcatcagatacaaaattgtcaattttgaccctaaacttttggaaggaaaagtaaaggaggatcctgaccagggggaatccatgaaacctttaacctttgcaaggttctacttgccaattctggttcccagcgcaaagaaggccatatacatggatgatgatgtaa

SEQ ID NO: 138202 - DNA, 622 bp, Homo sapiens
  Payload ID: 7070
  Gene Symbol: GLT8D1
  Gene Name: glycosyltransferase 8 domain containing 1
  ENST ID: ENST00000464705
  CDS Start-End: 531-622
cgctctagcggttaccgctgcgggctggctgggcgtagtggggctgcgcggctgccacggagctagagggcaagtgtgctcggcccagcgtgcagggaacgcgggcggccagacaacgggctgggctccggggcctgcggcgcgggcgctgagctggcagggcgggtcggggcgcgggctgcatccgcatctcctccatcgcctgcagtaagggcggccgcggcgagcctttgaggggaacgacttgtcggagccctaaccaggggtatctctgagcctggtgggatccccggagcgtcacatcactttccgatcacttcaaagtagatggggtttcaccatcttggacaggctggtctcgaactcctgacctcttgatccacctgccttggcctcccaaagtgctgggattacagacgtgagccacggcgccctgatgtatatgagaagaagttcactgacacgttgtacttcatatatactgctttggaaagggttaaaaactaatatttatatgacagaagaaaaagatgtcattccgtaaagtaaacatcatcatcttggtcctggctgttgctctcttcttactggttttgcaccataacttcctcagcttgagcag

SEQ ID NO: 138203 - DNA, 796 bp, Homo sapiens
  Payload ID: 7070
  Gene Symbol: GLT8D1
  Gene Name: glycosyltransferase 8 domain containing 1
  ENST ID: ENST00000481643
  CDS Start-End: 1-72
gtaaaggaggatcctgaccagggggaatccatgaaacctgtgatattcttgccctttacaatacagcactgaagccaggacatgcagctgcattttcagaagattgtgattcagcctctactaaagttgtcatccgtggagcaggaaaccagtacaattacattggctatcttgactataaaaaggaaagaattcgtaagctttccatgaaagccagcacttgctcatttaatcctggagtttttgttgcaaacctgacggaatggaaacgacagaatataactaaccaactggaaaaatggatgaaactcaatgtagaagagggactgtatagcagaaccctggctggtagcatcacaacacctcctctgcttatcgtattttatcaacagcactctaccatcgatcctatgtggaatgtccgccaccttggttccagtgctggaaaacgatattcacctcagtttgtaaaggctgccaagttactccattggaatggacatttgaagccatggggaaggactgcttcatatactgatgtttgggaaaaatggtatattccagacccaacaggcaaattcaacctaatccgaagatataccgagatctcaaacataaagtgaaacagaatttgaactgtaagcaagcatttctcaggaagtcctggaagatagcatgcgtgggaagtaacagttgctaggcttcaatgcctatcggtagcaagccatggaaaaagatgtgtcagctaggtaaagatgacaaactgccctgtctggcagtcagcttcccagacaga

SEQ ID NO: 138204 - DNA, 1577 bp, Homo sapiens
  Payload ID: 7070
  Gene Symbol: GLT8D1
  Gene Name: glycosyltransferase 8 domain containing 1
  Uniprot ID: Q68CQ7
  ENST ID: ENST00000491606
  CDS Start-End: 120-1235
cttggcgcgacgctctagcggttaccgctgcgggctggctgggcgtagtggggctgcgcggctgccacggagctagagggcaaggttaaaaactaatatttatatgacagaagaaaaagatgtcattccgtaaagtaaacatcatcatcttggtcctggctgttgctctcttcttactggttttgcaccataacttcctcagcttgagcagtttgttaaggaatgaggttacagattcaggaattgtagggcctcaacctatagactttgtcccaaatgctctccgacatgcagtagatgggagacaagaggagattcctgtggtcatcgctgcatctgaagacaggcttgggggggccattgcagctataaacagcattcagcacaacactcgctccaatgtgattttctacattgttactctcaacaatacagcagaccatctccggtcctggctcaacagtgattccctgaaaagcatcagatacaaaattgtcaattttgaccctaaacttttggaaggaaaagtaaaggaggatcctgaccagggggaatccatgaaacctttaacctttgcaaggttctacttgccaattctggttcccagcgcaaagaaggccatatacatggatgatgatgtaattgtgcaaggtgatattcttgccctttacaatacagcactgaagccaggacatgcagctgcattttcagaagattgtgattcagcctctactaaagttgtcatccgtggagcaggaaaccagtacaattacattggctatcttgactataaaaaggaaagaattcgtaagctttccatgaaagccagcacttgctcatttaatcctggagtttttgttgcaaacctgacggaatggaaacgacagaatataactaaccaactggaaaaatggatgaaactcaatgtagaagagggactgtatagcagaaccctggctggtagcatcacaacacctcctctgcttatcgtattttatcaacagcactctaccatcgatcctatgtggaatgtccgccaccttggttccagtgctggaaaacgatattcacctcagtttgtaaaggctgccaagttactccattggaatggacatttgaagccatggggaaggactgcttcatatactgatgtttgggaaaaatggtatattccagacccaacaggcaaattcaacctaatccgaagatataccgagatctcaaacataaagtgaaacagaatttgaactgtaagcaagcatttctcaggaagtcctggaagatagcatgcgtgggaagtaacagttgctaggcttcaatgcctatcggtagcaagccatggaaaaagatgtgtcagctaggtaaagatgacaaactgccctgtctggcagtcagcttcccagacagactatagactataaatatgtctccatctgccttaccaagtgttttcttactacaatgctgaatgactggaaagaagaactgatatggctagttcagctagctggtacagataattcaaaactgctgttggttttaattttgtaacctgtggcctgatctgtaaataaaac

SEQ ID NO: 138205 - DNA, 789 bp, Homo sapiens
  Payload ID: 7070
  Gene Symbol: GLT8D1
  Gene Name: glycosyltransferase 8 domain containing 1
  ENST ID: ENST00000497953
  CDS Start-End: 600-789
gggctgggctccggggcctgcggcgcgggcgctgagctggcagggcgggtcggggcgcgggctgcatccgcatctcctccatcgcctgcagtaagggcggccgcggcgagcctttgaggggaacgacttgtcggagccctaaccaggggtatctctgagcctggtgggatccccggagcgtcacatcactttccgatcacttcaaagtcagaccgaggacacggttgttaccaagaccaggctgttgccttggaagagcccagagcgtgtcaagggagacagccacatcacgccagaaatacatgacagctggattagccctgggagagggaggcccagatgtgggagctcaggggaggtgcagctcaacgtggagtttggaggaggctaccttgacctttgaatgccaagtgggagccagccagatgaaaggatccagcgtctgtgtgcaatttcgttttgagaattccttctaaccagatcaggaaagctctcttaccaggaatagccccaggaaagacaatatggattagacgtactccatgataactggcgttttgcatggttaaaaactaatatttatatgacagaagaaaaagatgtcattccgtaaagtaaacatcatcatcttggtcctggctgttgctctcttcttactggttttgcaccataacttcctcagcttgagcagtttgttaaggaatgaggttacagattcaggaattgtagggcctcaacctatagactttgtcccaaatgctctccgacatgcagtagatgggagacaag

SEQ ID NO: 138206 - DNA, 1826 bp, Homo sapiens
  Payload ID: 7070
  Gene Symbol: GLT8D1
  Gene Name: glycosyltransferase 8 domain containing 1
  Uniprot ID: Q68CQ7
  ENST ID: ENST00000478968
  CDS Start-End: 355-1470
gcggcgcctgcttggcgcgacgctctagcggttaccgctgcgggctggctgggcgtagtggggctgcgcggctgccacggagctagaggacagcagaccgaggacacggttgttaccaagaccaggctgttgccttggaagagcccagagcgtgtcaagggagacagccacatcacgccagaaatacatgacagctggattagccctgggagagggaggcccagatgtgggagctcaggggaggtgcagctcaacgtggagtttggaggaggctaccttgacctttgaatgccaagtgggagccagccagatgaaaggggttaaaaactaatatttatatgacagaagaaaaagatgtcattccgtaaagtaaacatcatcatcttggtcctggctgttgctctcttcttactggttttgcaccataacttcctcagcttgagcagtttgttaaggaatgaggttacagattcaggaattgtagggcctcaacctatagactttgtcccaaatgctctccgacatgcagtagatgggagacaagaggagattcctgtggtcatcgctgcatctgaagacaggcttgggggggccattgcagctataaacagcattcagcacaacactcgctccaatgtgattttctacattgttactctcaacaatacagcagaccatctccggtcctggctcaacagtgattccctgaaaagcatcagatacaaaattgtcaattttgaccctaaacttttggaaggaaaagtaaaggaggatcctgaccagggggaatccatgaaacctttaacctttgcaaggttctacttgccaattctggttcccagcgcaaagaaggccatatacatggatgatgatgtaattgtgcaaggtgatattcttgccctttacaatacagcactgaagccaggacatgcagctgcattttcagaagattgtgattcagcctctactaaagttgtcatccgtggagcaggaaaccagtacaattacattggctatcttgactataaaaaggaaagaattcgtaagctttccatgaaagccagcacttgctcatttaatcctggagtttttgttgcaaacctgacggaatggaaacgacagaatataactaaccaactggaaaaatggatgaaactcaatgtagaagagggactgtatagcagaaccctggctggtagcatcacaacacctcctctgcttatcgtattttatcaacagcactctaccatcgatcctatgtggaatgtccgccaccttggttccagtgctggaaaacgatattcacctcagtttgtaaaggctgccaagttactccattggaatggacatttgaagccatggggaaggactgcttcatatactgatgtttgggaaaaatggtatattccagacccaacaggcaaattcaacctaatccgaagatataccgagatctcaaacataaagtgaaacagaatttgaactgtaagcaagcatttctcaggaagtcctggaagatagcatgcgtgggaagtaacagttgctaggcttcaatgcctatcggtagcaagccatggaaaaagatgtgtcagctaggtaaagatgacaaactgccctgtctggcagtcagcttcccagacagactatagactataaatatgtctccatctgccttaccaagtgttttcttactacaatgctgaatgactggaaagaagaactgatatggctagttcagctagctggtacagataattcaaaactgctgttggttttaattttgtaacctgtggcctgatctgtaaataaaacttacatttttcaat

SEQ ID NO: 138207 - DNA, 577 bp, Homo sapiens
  Payload ID: 7070
  Gene Symbol: GLT8D1
  Gene Name: glycosyltransferase 8 domain containing 1
  ENST ID: ENST00000497436
  CDS Start-End: 310-577
atggcgacggcctttttccctgcgaggaccccggcggcagggctgccccgcggcgcctgcttggcgcgacgctctagcggttaccgctgcgggctggctgggcgtagtggggctgcgcggctgccacggagctagaggttacaatggctagaaatgtactccacacttttgatatcgattggattttgtgaatttttgtagctttttctgtgctgtgggtttgtcaagtgaatttggataatattcttttctctgaggacactcatgttaaagggttaaaaactaatatttatatgacagaagaaaaagatgtcattccgtaaagtaaacatcatcatcttggtcctggctgttgctctcttcttactggttttgcaccataacttcctcagcttgagcagtttgttaaggaatgaggttacagattcaggaattgtagggcctcaacctatagactttgtcccaaatgctctccgacatgcagtagatgggagacaagaggagattcctgtggtcatcgctgcatctgaagacaggcttgggggggccattgcagctataaacagcattcagcaca

SEQ ID NO: 138208 - DNA, 770 bp, Homo sapiens
  Payload ID: 7070
  Gene Symbol: GLT8D1
  Gene Name: glycosyltransferase 8 domain containing 1
  ENST ID: ENST00000487642
  CDS Start-End: 584-770
gcggttaccgctgcgggctggctgggcgtagtggggctgcgcggctgccacggagctagagggcaagtgtgctcggcccagcgtgcagggaacgcgggcggccagacaacgggctgggctccggggcctgcggcgcgggcgctgagctggcagggcgggtcggggcgcgggctgcatccgcatctcctccatcgcctgcagtaagggcggccgcggcgagcctttgaggggaacgacttgtcggagccctaaccaggggtatctctgagcctggtgggatccccggagcgtcacatcactttccgatcacttcaaagtacagcagaccgaggacacggttgttaccaagaccaggctgttgccttggaagagcccagagcgtgtcaagggagacagccacatcacgccagaaatacatgacagctggattagccctgggagagggaggcccagatgtgggagctcaggggaggtgcagctcaacgtggagtttggaggaggctaccttgacctttgaatgccaagtgggagccagccagatgaaaggggttaaaaactaatatttatatgacagaagaaaaagatgtcattccgtaaagtaaacatcatcatcttggtcctggctgttgctctcttcttactggttttgcaccataacttcctcagcttgagcagtttgttaaggaatgaggttacagattcaggaattgtagggcctcaacctatagactttgtcccaaatgctctccgacatgcagtagatgggagac

SEQ ID NO: 138209 - DNA, 1880 bp, Homo sapiens
  Payload ID: 7071
  Gene Symbol: GLT8D2
  Gene Name: glycosyltransferase 8 domain containing 2
  Uniprot ID: Q9H1C3
  ENST ID: ENST00000360814
  CDS Start-End: 407-1456
aagaaacccgagacgttccgaagtcaacgcaagcaaaggggagtgcgggtcggggaggaatattcttttggaaacgtaatattggccttggggctctccagccctttgggacttccaatgggatcttagaagcagccgaagcagcgtgagggcggcagcccagggccagccacgatttgaacgctctgccttgcagctcttctggaccgaggagcccaaagccctaccctcaccattcaccaggtcctgtgggaagagcagcgtggaggtgggctgaggttagaaggtgcagagcgtggaagaagattgtgagctgagtattggacatctgttcttgaatagtccctgggcctgccataggaaaggaagttctccagggttacagttcttatccgcgtgaatacacatggctctgttacgaaaaattaatcaggtgctgctgttccttctgatcgtgaccctctgtgtgattctgtataagaaagttcataaggggactgtgcccaagaatgacgcagatgatgaatccgagactcctgaagaactggaagaagagattcctgtggtgatttgtgctgcagcagggaggatgggtgccactatggctgccatcaatagcatctacagcaacactgacgccaacatcttgttctatgtagtgggactccggaatactctgactcgaatacgaaaatggattgaacattccaaactgagagaaataaactttaaaatcgtggaattcaacccgatggtcctcaaagggaagatcagaccagactcatcgaggcctgaattgctccagcctctgaactttgttcgattttatctccctctacttatccaccaacacgagaaagtcatctatttggacgatgatgtaattgtacaaggtgatatccaagaactgtatgacaccaccttggccctgggccacgcggcggctttctcagatgactgcgatttgccctctgctcaggacataaacagactcgtgggacttcagaacacatatatgggctatctggactaccggaagaaggccatcaaggaccttggcatcagccccagcacctgctctttcaatcctggtgtgattgttgccaacatgacagaatggaagcaccagcgcatcaccaagcaattggagaaatggatgcaaaagaatgtggaggaaaacctctatagcagctccctgggaggaggggtggccacctccccaatgctgattgtgtttcatgggaaatattccacaattaaccccctgtggcacataaggcacctgggctggaatccagatgccagatattcggagcattttctgcaggaagctaaattactccactggaatggaagacataaaccttgggacttccctagtgttcacaacgacttatgggaaagctggtttgttcctgaccctgcagggatatttaaactcaatcaccatagctgatataactctacccttaaaatattccctgtatagaaatgtggaattgtccctttgtagccaactataacattgttctttatgaatattacctttgatacatatgatccacaatataaaaaccaaaaactactgtgtgcaaattataccttggaccatataggcattgattaacttctttaagtacatgtgataactatggaaatcaagattatgtgactgaaaaacataaaggaagagacccatctagataacagcaatcaacctgcttaattctgaatgacaattatatccacaaatttttaaaacttctacatgtatttttcacatgaagatctccttaacaggttgccaaccttttcttttataaaactattacatttaaaatatggacgtctgaaaaataaaatattcatcatttttatga

SEQ ID NO: 138210 - DNA, 582 bp, Homo sapiens
  Payload ID: 7071
  Gene Symbol: GLT8D2
  Gene Name: glycosyltransferase 8 domain containing 2
  ENST ID: ENST00000546851
  CDS Start-End: 385-582
aagaaacccgagacgttccgaagtcaacgcaagcaaaggggagtgcgggtcggggaggaatattcttttggaaacgtaatattggccttggggctctccagccctttgggacttccaatgggatcttagaagcagccgaagcagcgtgagggcggcagcccagggccagccacgatttgaacgctctgccttgcagctcttctggaccgaggagcccaaagccctaccctcaccattcaccagaatctgccttaggaagctgttctgaggatctccatccccccagaaagaactggccgttgtggaaacccaaatgatgaatccgagactcctgaagaactggaagaagagattcctgtggtgatttgtgctgcagcagggaggatgggtgccactatggctgccatcaatagcatctacagcaacactgacgccaacatcttgttctatgtagtgggactccggaatactctgactcgaatacgaaaatggattgaacattccaaactgagagaaataaactttaaaatcgtggaattcaacccgatggtcctcaaagggaagatcagaccagactcatcg

SEQ ID NO: 138211 - DNA, 1835 bp, Homo sapiens
  Payload ID: 7071
  Gene Symbol: GLT8D2
  Gene Name: glycosyltransferase 8 domain containing 2
  Uniprot ID: Q9H1C3
  ENST ID: ENST00000548660
  CDS Start-End: 658-1707
acaagcaacgtgagagaagctcgggtagaggttcgaagagctgggagcgcagggcggggacctcgcacgggagggtgcgggcgggagcctgcctcgcgagcccgggccacggcggctgctcccgaccgtgactgggacccgggcagggaaggtcgctacaaagcctgccgggcgaaccgaaggcagctttgtgcggagccatgccaggaagcttgggaaccgtgagccacaagagaacagcgttgttttttgcatgttttgcacttagccagaggaagtctggcgcatccgagccggccagccgagcacatctggaagtggtttctggggccgcccctctctgccagcgcaactcctgggttcccagcggcttcgcgcagaggtggaagaaacccgagacgttccgaagtcaacgcaagcaaaggggagtgcgggtcggggaggaatattcttttggaaacgtaatattggccttggggctctccagccctttgggacttccaatgggatcttagaagcagccgaagcagcgtgagggcggcagcccagggccagccacgatttgaacgctctgccttgcagctcttctggaccgaggagcccaaagccctaccctcaccattcaccaggttacagttcttatccgcgtgaatacacatggctctgttacgaaaaattaatcaggtgctgctgttccttctgatcgtgaccctctgtgtgattctgtataagaaagttcataaggggactgtgcccaagaatgacgcagatgatgaatccgagactcctgaagaactggaagaagagattcctgtggtgatttgtgctgcagcagggaggatgggtgccactatggctgccatcaatagcatctacagcaacactgacgccaacatcttgttctatgtagtgggactccggaatactctgactcgaatacgaaaatggattgaacattccaaactgagagaaataaactttaaaatcgtggaattcaacccgatggtcctcaaagggaagatcagaccagactcatcgaggcctgaattgctccagcctctgaactttgttcgattttatctccctctacttatccaccaacacgagaaagtcatctatttggacgatgatgtaattgtacaaggtgatatccaagaactgtatgacaccaccttggccctgggccacgcggcggctttctcagatgactgcgatttgccctctgctcaggacataaacagactcgtgggacttcagaacacatatatgggctatctggactaccggaagaaggccatcaaggaccttggcatcagccccagcacctgctctttcaatcctggtgtgattgttgccaacatgacagaatggaagcaccagcgcatcaccaagcaattggagaaatggatgcaaaagaatgtggaggaaaacctctatagcagctccctgggaggaggggtggccacctccccaatgctgattgtgtttcatgggaaatattccacaattaaccccctgtggcacataaggcacctgggctggaatccagatgccagatattcggagcattttctgcaggaagctaaattactccactggaatggaagacataaaccttgggacttccctagtgttcacaacgacttatgggaaagctggtttgttcctgaccctgcagggatatttaaactcaatcaccatagctgatataactctacccttaaaatattccctgtatagaaatgtggaattgtccctttgtagccaactataacattgttctttatgaatattacctttgatacatatgatccacaatataaaaaccaaaaact

SEQ ID NO: 138212 - DNA, 862 bp, Homo sapiens
  Payload ID: 7071
  Gene Symbol: GLT8D2
  Gene Name: glycosyltransferase 8 domain containing 2
  ENST ID: ENST00000547583
  CDS Start-End: 406-657
agaaacccgagacgttccgaagtcaacgcaagcaaaggggagtgcgggtcggggaggaatattcttttggaaacgtaatattggccttggggctctccagccctttgggacttccaatgggatcttagaagcagccgaagcagcgtgagggcggcagcccagggccagccacgatttgaacgctctgccttgcagctcttctggaccgaggagcccaaagccctaccctcaccattcaccaggtcctgtgggaagagcagcgtggaggtgggctgaggttagaaggtgcagagcgtggaagaagattgtgagctgagtattggacatctgttcttgaatagtccctgggcctgccataggaaaggaagttctccagggttacagttcttatccgcgtgaatacacatggctctgttacgaaaaattaatcaggtgctgctgttccttctgatcgtgaccctctgtgtgattctgtataagaaagttcataaggggactgtgcccaagaatgacgcagaatctcactctgttgccccagctcaaatacagtggcacaatagcagctccctgcagcctcgacctccagggctcaagcaatcctccggcctcagcaccccaggaagttggaactacaggataccagtcttactgggataaggcctaccaaatggcttcattttaacttatttgcctttttaaaggcaattaagtgcatggacatcctgagatgctggaagctaagacgttaacaaacggactctggaggacacaattcagtccatagcagtatctacacctcaataaactgttctaaaagagagagagagagaaggaagtcacataaagacaaatgtcatctgaa

SEQ ID NO: 138213 - DNA, 1578 bp, Homo sapiens
  Payload ID: 7071
  Gene Symbol: GLT8D2
  Gene Name: glycosyltransferase 8 domain containing 2
  Uniprot ID: Q9H1C3
  ENST ID: ENST00000546436
  CDS Start-End: 110-1159
agagatggagttatttccctagaatcacacgatcataatggcttgtataagtggggttccaactgtttgccaagtactgttgttacagttcttatccgcgtgaatacacatggctctgttacgaaaaattaatcaggtgctgctgttccttctgatcgtgaccctctgtgtgattctgtataagaaagttcataaggggactgtgcccaagaatgacgcagatgatgaatccgagactcctgaagaactggaagaagagattcctgtggtgatttgtgctgcagcagggaggatgggtgccactatggctgccatcaatagcatctacagcaacactgacgccaacatcttgttctatgtagtgggactccggaatactctgactcgaatacgaaaatggattgaacattccaaactgagagaaataaactttaaaatcgtggaattcaacccgatggtcctcaaagggaagatcagaccagactcatcgaggcctgaattgctccagcctctgaactttgttcgattttatctccctctacttatccaccaacacgagaaagtcatctatttggacgatgatgtaattgtacaaggtgatatccaagaactgtatgacaccaccttggccctgggccacgcggcggctttctcagatgactgcgatttgccctctgctcaggacataaacagactcgtgggacttcagaacacatatatgggctatctggactaccggaagaaggccatcaaggaccttggcatcagccccagcacctgctctttcaatcctggtgtgattgttgccaacatgacagaatggaagcaccagcgcatcaccaagcaattggagaaatggatgcaaaagaatgtggaggaaaacctctatagcagctccctgggaggaggggtggccacctccccaatgctgattgtgtttcatgggaaatattccacaattaaccccctgtggcacataaggcacctgggctggaatccagatgccagatattcggagcattttctgcaggaagctaaattactccactggaatggaagacataaaccttgggacttccctagtgttcacaacgacttatgggaaagctggtttgttcctgaccctgcagggatatttaaactcaatcaccatagctgatataactctacccttaaaatattccctgtatagaaatgtggaattgtccctttgtagccaactataacattgttctttatgaatattacctttgatacatatgatccacaatataaaaaccaaaaactactgtgtgcaaattataccttggaccatataggcattgattaacttctttaagtacatgtgataactatggaaatcaagattatgtgactgaaaaacataaaggaagagacccatctagataacagcaatcaacctgcttaattctgaatgacaattatatccacaaatttttaaaacttctacatgtatttttcacatgaagatctccttaacaggttgccaaccttttcttttataaaactattacatttaaaatatggacgtctgaaaaataaaatattcatcatttt

SEQ ID NO: 138214 - DNA, 2522 bp, Homo sapiens
  Payload ID: 7072
  Gene Symbol: GYLTL1B
  Gene Name: glycosyltransferase-like 1B
  Uniprot ID: Q8N3Y3
  ENST ID: ENST00000325468
  CDS Start-End: 106-2271
gccgcccagggctgagtctcccatctcgcccctcggtccgcagggcctgcgatggagcctgcagccccgggtcgcgtccctccctgagcgcccccgtcggcggccatgctgccccgagggcgcccccgggcgctgggggccgccgcgctgttgctgctgctgctgctgctcggattcctcctgttcggtggggacctggggtgtgagcgccgcgagcctggcgggcgagcgggggccccgggatgcttccccggcccgctcatgccacgtgtccccccagacgggaggctgcggagagccgccgccctcgacggagacccgggggccggccccggggaccacaaccgctccgactgcggcccgcagccgccgccgccgcccaagtgcgagctcttgcatgtggccatcgtgtgtgcggggcataactccagccgagacgtcatcaccctggtgaagtccatgctcttctacaggaaaaatccactgcacctccacttggtgactgacgccgtggccagaaacatcctggagacgctcttccacacatggatggtgcctgctgtccgtgtcagcttttatcatgccgaccagctcaagccccaggtctcctggatccccaacaagcactactccggcctctatgggctaatgaagctggtgctgcccagtgccttgcctgctgagctggcccgcgtcattgtcctggacacggatgtcaccttcgcctctgacatctcggagctctgggccctctttgctcacttttctgacacgcaggcgatcggtcttgtggagaaccagagtgactggtacctgggcaacctctggaagaaccacaggccctggcctgccttgggccggggatttaacacaggtgtgatcctgctgcggctggaccggctccggcaggctggctgggagcagatgtggaggctgacagccaggcgggagctccttagcctgcctgccacctcactggctgaccaggacatcttcaacgctgtgatcaaggagcacccggggctagtgcagcgtctgccttgtgtctggaatgtgcagctgtcagatcacacactggccgagcgctgctactctgaggcgtctgacctcaaggtgatccactggaactcaccaaagaagcttcgggtgaagaacaagcatgtggaattcttccgcaatttctacctgaccttcctggagtacgatgggaacctgctgcggagagagctctttgtgtgccccagccagcccccacctggtgctgagcagttgcagcaggccctggcacaactggacgaggaagacccctgctttgagttccggcagcagcagctcactgtgcaccgtgtgcatgtcactttcctgccccatgaaccgccacccccccggcctcacgatgtcacccttgtggcccagctgtccatggaccggctgcagatgttggaagccctgtgcaggcactggcctggccccatgagcctggccttgtacctgacagacgcagaagctcagcagttcctgcatttcgtcgaggcctcaccagtgcttgctgcccggcaggacgtggcctaccatgtggtgtaccgtgaggggcccctataccccgtcaaccagcttcgcaacgtggccttggcccaggccctcacgccttacgtcttcctcagtgacattgacttcctgcctgcctattctctctacgactacctcagggcctccattgagcagctggggctgggcagccggcgcaaggcagcactggtggtgccggcattcgagaccctgcgctaccgcttcagcttcccccattccaaggtggagctgttggccttgctggatgcgggcactctctacaccttcaggtaccacgagtggccccgaggccacgcacccacagactatgcccgctggcgggaggctcaggccccgtaccgtgtgcaatgggcggccaactatgaaccctacgtggtggtgccacgagactgtccccgctatgatcctcgctttgtgggcttcggctggaacaaagtggcccacattgtggagctggatgcccaggaatatgagctcctggtgctgcccgaggccttcaccatccatctgccccacgctccaagcctggacatctcccgcttccgctccagccccacctatcgtgactgcctccaggccctcaaggacgaattccaccaggacttgtcccgccaccatggggctgctgccctcaaatacctcccagccctgcagcagccccagagccctgcccgaggctgaggctgggccggcgctgcccctcatcttagcattgggcagacaccagggcaacctgccctccgccatccctgctatttaaattatttaaggtctctgggaagggctggggcagagcatctgtggggtggggtcttccccttgctgctattgtatggctggggactggtctctctctgccccagccagtttggggctggttcccccatcttgaattgtttatccctttttcataattaaagttttaaaacatc

SEQ ID NO: 138215 - DNA, 2516 bp, Homo sapiens
  Payload ID: 7072
  Gene Symbol: GYLTL1B
  Gene Name: glycosyltransferase-like 1B
  Uniprot ID: Q8N3Y3
  ENST ID: ENST00000401752
  CDS Start-End: 100-2265
gcgagcgcagggcccagcccgggagccgctggagcagggcctgcgatggagcctgcagccccgggtcgcgtccctccctgagcgcccccgtcggcggccatgctgccccgagggcgcccccgggcgctgggggccgccgcgctgttgctgctgctgctgctgctcggattcctcctgttcggtggggacctggggtgtgagcgccgcgagcctggcgggcgagcgggggccccgggatgcttccccggcccgctcatgccacgtgtccccccagacgggaggctgcggagagccgccgccctcgacggagacccgggggccggccccggggaccacaaccgctccgactgcggcccgcagccgccgccgccgcccaagtgcgagctcttgcatgtggccatcgtgtgtgcggggcataactccagccgagacgtcatcaccctggtgaagtccatgctcttctacaggaaaaatccactgcacctccacttggtgactgacgccgtggccagaaacatcctggagacgctcttccacacatggatggtgcctgctgtccgtgtcagcttttatcatgccgaccagctcaagccccaggtctcctggatccccaacaagcactactccggcctctatgggctaatgaagctggtgctgcccagtgccttgcctgctgagctggcccgcgtcattgtcctggacacggatgtcaccttcgcctctgacatctcggagctctgggccctctttgctcacttttctgacacgcaggcgatcggtcttgtggagaaccagagtgactggtacctgggcaacctctggaagaaccacaggccctggcctgccttgggccggggatttaacacaggtgtgatcctgctgcggctggaccggctccggcaggctggctgggagcagatgtggaggctgacagccaggcgggagctccttagcctgcctgccacctcactggctgaccaggacatcttcaacgctgtgatcaaggagcacccggggctagtgcagcgtctgccttgtgtctggaatgtgcagctgtcagatcacacactggccgagcgctgctactctgaggcgtctgacctcaaggtgatccactggaactcaccaaagaagcttcgggtgaagaacaagcatgtggaattcttccgcaatttctacctgaccttcctggagtacgatgggaacctgctgcggagagagctctttgtgtgccccagccagcccccacctggtgctgagcagttgcagcaggccctggcacaactggacgaggaagacccctgctttgagttccggcagcagcagctcactgtgcaccgtgtgcatgtcactttcctgccccatgaaccgccacccccccggcctcacgatgtcacccttgtggcccagctgtccatggaccggctgcagatgttggaagccctgtgcaggcactggcctggccccatgagcctggccttgtacctgacagacgcagaagctcagcagttcctgcatttcgtcgaggcctcaccagtgcttgctgcccggcaggacgtggcctaccatgtggtgtaccgtgaggggcccctataccccgtcaaccagcttcgcaacgtggccttggcccaggccctcacgccttacgtcttcctcagtgacattgacttcctgcctgcctattctctctacgactacctcagggcctccattgagcagctggggctgggcagccggcgcaaggcagcactggtggtgccggcattcgagaccctgcgctaccgcttcagcttcccccattccaaggtggagctgttggccttgctggatgcgggcactctctacaccttcaggtaccacgagtggccccgaggccacgcacccacagactatgcccgctggcgggaggctcaggccccgtaccgtgtgcaatgggcggccaactatgaaccctacgtggtggtgccacgagactgtccccgctatgatcctcgctttgtgggcttcggctggaacaaagtggcccacattgtggagctggatgcccaggaatatgagctcctggtgctgcccgaggccttcaccatccatctgccccacgctccaagcctggacatctcccgcttccgctccagccccacctatcgtgactgcctccaggccctcaaggacgaattccaccaggacttgtcccgccaccatggggctgctgccctcaaatacctcccagccctgcagcagccccagagccctgcccgaggctgaggctgggccggcgctgcccctcatcttagcattgggcagacaccagggcaacctgccctccgccatccctgctatttaaattatttaaggtctctgggaagggctggggcagagcatctgtggggtggggtcttccccttgctgctattgtatggctggggactggtctctctctgccccagccagtttggggctggttcccccatcttgaattgtttatccctttttcataattaaagttttaaaacatc

SEQ ID NO: 138216 - DNA, 2459 bp, Homo sapiens
  Payload ID: 7072
  Gene Symbol: GYLTL1B
  Gene Name: glycosyltransferase-like 1B
  ENST ID: ENST00000529052
  CDS Start-End: 136-2208
aagcaaacaacttcaactttccatgagtgctagccagccctgggaggctccgctgccagaaggaacgtcaaggggcctgcgatggagcctgcagccccgggtcgcgtccctccctgagcgcccccgtcggcggccatgctgccccgagggcgcccccgggcgctgggggccgccgcgctgttgctgctgctgctgctgctcggattcctcctgttcgacgggaggctgcggagagccgccgccctcgacggagacccgggggccggccccggggaccacaaccgctccgactgcggcccgcagccgccgccgccgcccaagtgcgagctcttgcatgtggccatcgtgtgtgcggggcataactccagccgagacgtcatcaccctggtgaagtccatgctcttctacaggaaaaatccactgcacctccacttggtgactgacgccgtggccagaaacatcctggagacgctcttccacacatggatggtgcctgctgtccgtgtcagcttttatcatgccgaccagctcaagccccaggtctcctggatccccaacaagcactactccggcctctatgggctaatgaagctggtgctgcccagtgccttgcctgctgagctggcccgcgtcattgtcctggacacggatgtcaccttcgcctctgacatctcggagctctgggccctctttgctcacttttctgacacgcaggcgatcggtcttgtggagaaccagagtgactggtacctgggcaacctctggaagaaccacaggccctggcctgccttgggccggggatttaacacaggtgtgatcctgctgcggctggaccggctccggcaggctggctgggagcagatgtggaggctgacagccaggcgggagctccttagcctgcctgccacctcactggctgaccaggacatcttcaacgctgtgatcaaggagcacccggggctagtgcagcgtctgccttgtgtctggaatgtgcagctgtcagatcacacactggccgagcgctgctactctgaggcgtctgacctcaaggtgatccactggaactcaccaaagaagcttcgggtgaagaacaagcatgtggaattcttccgcaatttctacctgaccttcctggagtacgatgggaacctgctgcggagagagctctttgtgtgccccagccagcccccacctggtgctgagcagttgcagcaggccctggcacaactggacgaggaagacccctgctttgagttccggcagcagcagctcactgtgcaccgtgtgcatgtcactttcctgccccatgaaccgccacccccccggcctcacgatgtcacccttgtggcccagctgtccatggaccggctgcagatgttggaagccctgtgcaggcactggcctggccccatgagcctggccttgtacctgacagacgcagaagctcagcagttcctgcatttcgtcgaggcctcaccagtgcttgctgcccggcaggacgtggcctaccatgtggtgtaccgtgaggggcccctataccccgtcaaccagcttcgcaacgtggccttggcccaggccctcacgccttacgtcttcctcagtgacattgacttcctgcctgcctattctctctacgactacctcagggcctccattgagcagctggggctgggcagccggcgcaaggcagcactggtggtgccggcattcgagaccctgcgctaccgcttcagcttcccccattccaaggtggagctgttggccttgctggatgcgggcactctctacaccttcaggtaccacgagtggccccgaggccacgcacccacagactatgcccgctggcgggaggctcaggccccgtaccgtgtgcaatgggcggccaactatgaaccctacgtggtggtgccacgagactgtccccgctatgatcctcgctttgtgggcttcggctggaacaaagtggcccacattgtggagctggatgcccaggaatatgagctcctggtgctgcccgaggccttcaccatccatctgccccacgctccaagcctggacatctcccgcttccgctccagccccacctatcgtgactgcctccaggccctcaaggacgaattccaccaggacttgtcccgccaccatggggctgctgccctcaaatacctcccagccctgcagcagccccagagccctgcccgaggctgaggctgggccggcgctgcccctcatcttagcattgggcagacaccagggcaacctgccctccgccatccctgctatttaaattatttaaggtctctgggaagggctggggcagagcatctgtggggtggggtcttccccttgctgctattgtatggctggggactggtctctctctgccccagccagtttggggctggttcccccatcttgaattgtttatccctttttcataattaaagttttaaaacatc

SEQ ID NO: 138217 - DNA, 2528 bp, Homo sapiens
  Payload ID: 7072
  Gene Symbol: GYLTL1B
  Gene Name: glycosyltransferase-like 1B
  Uniprot ID: Q8N3Y3
  ENST ID: ENST00000531526
  CDS Start-End: 112-2277
gagtgctagccagccctgggaggctccgctgccagaaggaacgtcaaggggcctgcgatggagcctgcagccccgggtcgcgtccctccctgagcgcccccgtcggcggccatgctgccccgagggcgcccccgggcgctgggggccgccgcgctgttgctgctgctgctgctgctcggattcctcctgttcggtggggacctggggtgtgagcgccgcgagcctggcgggcgagcgggggccccgggatgcttccccggcccgctcatgccacgtgtccccccagacgggaggctgcggagagccgccgccctcgacggagacccgggggccggccccggggaccacaaccgctccgactgcggcccgcagccgccgccgccgcccaagtgcgagctcttgcatgtggccatcgtgtgtgcggggcataactccagccgagacgtcatcaccctggtgaagtccatgctcttctacaggaaaaatccactgcacctccacttggtgactgacgccgtggccagaaacatcctggagacgctcttccacacatggatggtgcctgctgtccgtgtcagcttttatcatgccgaccagctcaagccccaggtctcctggatccccaacaagcactactccggcctctatgggctaatgaagctggtgctgcccagtgccttgcctgctgagctggcccgcgtcattgtcctggacacggatgtcaccttcgcctctgacatctcggagctctgggccctctttgctcacttttctgacacgcaggcgatcggtcttgtggagaaccagagtgactggtacctgggcaacctctggaagaaccacaggccctggcctgccttgggccggggatttaacacaggtgtgatcctgctgcggctggaccggctccggcaggctggctgggagcagatgtggaggctgacagccaggcgggagctccttagcctgcctgccacctcactggctgaccaggacatcttcaacgctgtgatcaaggagcacccggggctagtgcagcgtctgccttgtgtctggaatgtgcagctgtcagatcacacactggccgagcgctgctactctgaggcgtctgacctcaaggtgatccactggaactcaccaaagaagcttcgggtgaagaacaagcatgtggaattcttccgcaatttctacctgaccttcctggagtacgatgggaacctgctgcggagagagctctttgtgtgccccagccagcccccacctggtgctgagcagttgcagcaggccctggcacaactggacgaggaagacccctgctttgagttccggcagcagcagctcactgtgcaccgtgtgcatgtcactttcctgccccatgaaccgccacccccccggcctcacgatgtcacccttgtggcccagctgtccatggaccggctgcagatgttggaagccctgtgcaggcactggcctggccccatgagcctggccttgtacctgacagacgcagaagctcagcagttcctgcatttcgtcgaggcctcaccagtgcttgctgcccggcaggacgtggcctaccatgtggtgtaccgtgaggggcccctataccccgtcaaccagcttcgcaacgtggccttggcccaggccctcacgccttacgtcttcctcagtgacattgacttcctgcctgcctattctctctacgactacctcagggcctccattgagcagctggggctgggcagccggcgcaaggcagcactggtggtgccggcattcgagaccctgcgctaccgcttcagcttcccccattccaaggtggagctgttggccttgctggatgcgggcactctctacaccttcaggtaccacgagtggccccgaggccacgcacccacagactatgcccgctggcgggaggctcaggccccgtaccgtgtgcaatgggcggccaactatgaaccctacgtggtggtgccacgagactgtccccgctatgatcctcgctttgtgggcttcggctggaacaaagtggcccacattgtggagctggatgcccaggaatatgagctcctggtgctgcccgaggccttcaccatccatctgccccacgctccaagcctggacatctcccgcttccgctccagccccacctatcgtgactgcctccaggccctcaaggacgaattccaccaggacttgtcccgccaccatggggctgctgccctcaaatacctcccagccctgcagcagccccagagccctgcccgaggctgaggctgggccggcgctgcccctcatcttagcattgggcagacaccagggcaacctgccctccgccatccctgctatttaaattatttaaggtctctgggaagggctggggcagagcatctgtggggtggggtcttccccttgctgctattgtatggctggggactggtctctctctgccccagccagtttggggctggttcccccatcttgaattgtttatccctttttcataattaaagttttaaaacatc

SEQ ID NO: 138218 - DNA, 476 bp, Homo sapiens
  Payload ID: 7072
  Gene Symbol: GYLTL1B
  Gene Name: glycosyltransferase-like 1B
  ENST ID: ENST00000534410
  CDS Start-End: 1-476
tggaactcaccaaagaagcttcgggtgaagaacaagcatgtggaattcttccgcaatttctacctgaccttcctggagtacgatgggaacctgctgcggagagagctctttgtgtgccccagccagcccccacctggtgctgagcagttgcagcaggccctggcacaactggacgaggaagacccctgctttgagttccggcagcagcagctcactgtgcaccgtgtgcatgtcactttcctgccccatgaaccgccacccccccggcctcacgatgtcacccttgtggcccagctgtccatggaccggacgtggcctaccatgtggtgtaccgtgaggggcccctataccccgtcaaccagcttcgcaacgtggccttggcccaggccctcacgccttacgtcttcctcagtgacattgacttcctgcctgcctattctctctacgactacctcagggcctccattgagcagctg

SEQ ID NO: 138219 - DNA, 501 bp, Homo sapiens
  Payload ID: 7072
  Gene Symbol: GYLTL1B
  Gene Name: glycosyltransferase-like 1B
  ENST ID: ENST00000531847
  CDS Start-End: 1-329
ccttgctggatgcgggcactctctacaccttcaggaatatgagctcctggtgctgcccgaggccttcaccatccatctgccccacgctccaagcctggacatctcccgcttccgctccagccccacctatcgtgactgcctccaggccctcaaggacgaattccaccaggacttgtcccgccaccatggggctgctgccctcaaatacctcccagccctgcagcagccccagagccctgcccgaggctgaggctgggccggcgctgcccctcatcttagcattgggcagacaccagggcaacctgccctccgccatccctgctatttaaattatttaaggtctctgggaagggctggggcagagcatctgtggggtggggtcttccccttgctgctattgtatggctggggactggtctctctctgccccagccagtttggggctggttcccccatcttgaattgtttatccctttttcataattaaagttttaaaacatc

SEQ ID NO: 138220 - DNA, 1346 bp, Homo sapiens
  Payload ID: 7072
  Gene Symbol: GYLTL1B
  Gene Name: glycosyltransferase-like 1B
  ENST ID: ENST00000536139
  CDS Start-End: 404-1177
ttccgcaatttctacctgaccttcctggagtacgatgggaacctgctgcggagagagctctttgtgtgccccagccagcccccacctggtgctgagcagttgcagcaggccctggcacaactggacgaggaagacccctgctttgagttccggcagcagcagctcactgtgcaccgtgtgcatgtcactttcctgccccatgaaccgccacccccccggcctcacgatgtcacccttgtggcccagctgtccatggaccggctgcagatgttggaagccctgtgcaggcactggcctggccccatgagcctggccttgtacctgacagacgcagaagctcagcagttcctgcatttcgtcgaggcctcaccagtgcttgctgcccggcaggacgtggcctaccatgtggtgtaccgtgagggcccctataccccgtcaaccagcttcgcaacgtggccttggccaggccctcacgccttacgtcttcctcagtgacattgacttcctgcctgcctattctctctacgactacctcagggcctccattgagcagctggggctgggcagccggcgcaaggcagcactggtggtgccggcattcgagaccctgcgctaccgcttcagcttcccccattccaaggtggagctgttggccttgctggatgcgggcactctctacaccttcaggtaccacgagtggccccgaggccacgcacccacagactatgcccgctggcgggaggctcaggccccgtaccgtgtgcaatgggcggccaactatgaaccctacgtggtggtgccacgagactgtccccgctatgatcctcgctttgtgggcttcggctggaacaaagtggcccacattgtggagctggatgcccaggaatatgagctcctggtgctgcccgaggccttcaccatccatctgccccacgctccaagcctggacatctccgcttccgctccagccccacctatcgtgactgcctccaggccctcaaggacgaattccaccaggacttgtcccgccaccatggggctgctgccctcaaatacctcccagccctgcagcagccccagagccctgcccgaggctgaggctgggccggcgctgcccctcatcttagcattgggcagacaccagggcaacctgccctccgccatccctgctatttaaattatttaaggtctctgggaagggctggggcagagcatctgtggggtggggtcttccccttgctgctattgtatggctggggactggtctctctctgccccagccagtttggggctggttcccccatcttgaattgtttatccctttttcataattaaagttttaaaac

SEQ ID NO: 138221 - DNA, 2356 bp, Homo sapiens
  Payload ID: 7073
  Gene Symbol: GTDC1
  Gene Name: glycosyltransferase-like domain containing 1
  Uniprot ID: Q4AE62
  ENST ID: ENST00000241391
  CDS Start-End: 89-1219
attgtgcttcaagaagaccatagggaagaacgcattttcatcttgctgcaaaagttgcaatagaagatctgaaggtttgaatgggccaatgagtatcctcatcattgaagcattctatggaggctcccataaacagctggtggatcttcttcaagaagagttaggagactgtgtcgtttatacccttcctgcaaagaaatggcattggagagcccggacatctgctttatatttctctcagaccattcccatcagtgagcattacaggaccctctttgcaagttcagtgcttaacctgaccgaactggctgcccttcggcctgaccttgggaaactgaaaaagattctgtattttcacgagaaccagttgatatatcctgtcaagaaatgtcaggagagggatttccaatatggatacaaccaaattctttcatgcctggtggctgatgtggttgtattcaactcagtttttaatatggaatcatttctcacttccatgggaaaatttatgaagctgattcctgatcacagacccaaggatctggaaagcatcatcagacccaagtgccaagttatttactttcccatcaggtttcctgatgtgagcagattcatgcccaagcacaaaacaacccatttaaagaagatgctcggccttaaaggaaatggcggtgcggttctgtccatggcccttccttttcagccagagcagagagattcagaggatttattgaagaattttaattcagagtgtgatacacactgtggccttgatactgcacgacaagaatatttgggtaactcattaagacaggaatcagacttgaaaaaatccacctcgtcagataattcaagctctcatcatggtgaaaataaacaaaatctgactgttgatccctgtgacattttgggtggagttgataatcagcaaagactgctacacattgtctggcctcacaggtgggagcatgataaagatccagaaagcttttttaaggtattaatgcatcttaaagacttaggactcaatttccacgtgtctgtacttggagaaaccttcacagatgtcccaggttggaagctgtgtactgtgggtgttacccactttgtcctaaagatttggtttatcccgaaatatttccagctgaatatctgtattctacacctgaacagctttcaaaaaggctccagaatttctgcaagagaccagatattataagaaaacatctctataagggtgaaatcgctccgttttcttgggcagccctacatggtaaattcaggtctctgcttacaacagaacctagggaagatttgtgacagatggggctaagtcacaaacttgcagcctaaggcagaatctgaagaactttccagagtgtgcccatatttacctgatcagagagaaaagaaaatctgcagaggaagctgagcctggctgcttgtcatagctgacacagagccatctgccacaaacctgtggcggcttcagatctccaatccctgccaccaccccaactcaaattaaatacagattcctagagacgttatgatggttacacatgtcctcggcatcacatgtaggagactgttcaaaaaaaatatgtggcctgttgtataaccgcactcatgtatcccatatgtggtgccacattgaatttccggttgaatccgtttttatcctttgtactggatgacatggtgcctgaattctttcttttcgccgacacgatggcagccaaactgcagcttcaaacgctcacacttggctgggtttctacctaggttgccaggttatcatcggagccttcttgtgtcctcaaagggccacgaggcctgaaaggaggatcagaatgctttgggattaattgggcagccatcgcagaattgtttgtgggcaaagggctgctttagcacttttcttttagcaaattaatgactctcaggcacagggggttttaagtgaaggtattaataagaggtctggcaggtattcccatgattcacagagttacatttgcatttaattaatcttaaagttgcaagataaacagctgtaattcggacaaacatgacaaacacagtgaagccaactatcccataaaatgaacactgacatacttgttttaatttttttcccagcgtaaaaatagaaaaatcaaaatactcctaacaaaaccagtgattttgatagaaatatttctccaatatacttgcatccacctacaaatataaccttttcaagataaatcgcttatgatttcaatagtcaaactgctgtgtttgttgatgtaaagatgttttgaatggctagatggtaaaataaattcttaataaagtacccactgcaattttt

SEQ ID NO: 138222 - DNA, 2607 bp, Homo sapiens
  Payload ID: 7073
  Gene Symbol: GTDC1
  Gene Name: glycosyltransferase-like domain containing 1
  Uniprot ID: Q4AE62
  ENST ID: ENST00000344850
  CDS Start-End: 195-1571
atatggttgtctgagagcatcagaaaagaacctgctctggtcaggtatctctgcattagccagattggacatatgtaaagggacatcagtatatctggatcatcagattgtgcttcaagaagaccatagggaagaacgcattttcatcttgctgcaaaagttgcaatagaagatctgaaggtttgaatgggccaatgagtatcctcatcattgaagcattctatggaggctcccataaacagctggtggatcttcttcaagaagagttaggagactgtgtcgtttatacccttcctgcaaagaaatggcattggagagcccggacatctgctttatatttctctcagaccattcccatcagtgagcattacaggaccctctttgcaagttcagtgcttaacctgaccgaactggctgcccttcggcctgaccttgggaaactgaaaaagattctgtattttcacgagaaccagttgatatatcctgtcaagaaatgtcaggagagggatttccaatatggatacaaccaaattctttcatgcctggtggctgatgtggttgtattcaactcagtttttaatatggaatcatttctcacttccatgggaaaatttatgaagctgattcctgatcacagacccaaggatctggaaagcatcatcagacccaagtgccaagttatttactttcccatcaggtttcctgatgtgagcagattcatgcccaagcacaaaacaacccatttaaagaagatgctcggccttaaaggaaatggcggtgcggttctgtccatggcccttccttttcagccagagcagagagattcagaggatttattgaagaattttaattcagagtgtgatacacactgtggccttgatactgcacgacaagaatatttgggtaactcattaagacaggaatcagacttgaaaaaatccacctcgtcagataattcaagctctcatcatggtgaaaataaacaaaatctgactgttgatccctgtgacattttgggtggagttgataatcagcaaagactgctacacattgtctggcctcacaggtgggagcatgataaagatccagaaagcttttttaaggtattaatgcatcttaaagacttaggactcaatttccacgtgtctgtacttggagaaaccttcacagatgtcccagatattttttcagaggccaaaaaggcattgggatcttctgtcttacactggggctacttacccagcaaagatgactatttccaagtactgtgcatggctgatgttgtcatctcaacagctaagcatgaattctttggagtggcaatgttggaagctgtgtactgtgggtgttacccactttgtcctaaagatttggtttatcccgaaatatttccagctgaatatctgtattctacacctgaacagctttcaaaaaggctccagaatttctgcaagagaccagatattataagaaaacatctctataagggtgaaatcgctccgttttcttgggcagccctacatggtaaattcaggtctctgcttacaacagaacctagggaagatttgtgacagatggggctaagtcacaaacttgcagcctaaggcagaatctgaagaactttccagagtgtgcccatatttacctgatcagagagaaaagaaaatctgcagaggaagctgagcctggctgcttgtcatagctgacacagagccatctgccacaaacctgtggcggcttcagatctccaatccctgccaccaccccaactcaaattaaatacagattcctagagacgttatgatggttacacatgtcctcggcatcacatgtaggagactgttcaaaaaaaatatgtggcctgttgtataaccgcactcatgtatcccatatgtggtgccacattgaatttccggttgaatccgtttttatcctttgtactggatgacatggtgcctgaattctttcttttcgccgacacgatggcagccaaactgcagcttcaaacgctcacacttggctgggtttctacctaggttgccaggttatcatcggagccttcttgtgtcctcaaagggccacgaggcctgaaaggaggatcagaatgctttgggattaattgggcagccatcgcagaattgtttgtgggcaaagggctgctttagcacttttcttttagcaaattaatgactctcaggcacagggggttttaagtgaaggtattaataagaggtctggcaggtattcccatgattcacagagttacatttgcatttaattaatcttaaagttgcaagataaacagctgtaattcggacaaacatgacaaacacagtgaagccaactatcccataaaatgaacactgacatacttgttttaatttttttcccagcgtaaaaatagaaaaatcaaaatactcctaacaaaaccagtgattttgatagaaatatttctccaatatacttgcatccacctacaaatataaccttttcaagataaatcgcttatgatttcaatagtcaaactgctgtgtttgttgatgtaaagatgttttgaatggctagatggtaaaataaattcttaataaagtacccactgcaattttt

SEQ ID NO: 138223 - DNA, 2408 bp, Homo sapiens
  Payload ID: 7073
  Gene Symbol: GTDC1
  Gene Name: glycosyltransferase-like domain containing 1
  Uniprot ID: Q4AE62
  ENST ID: ENST00000392867
  CDS Start-End: 249-1370
aggtctggctagctgtccctaacgtcatttcctggtctcaactctttaagaccctgacatactctgagattggagtgaagatttctgtgacatgctgggtatctctgcattagccagattggacatatgtaaagggacatcagtatatctggatcatcagattgtgcttcaagaagaccatagggaagaacgcattttcatcttgctgcaaaagttgcaatagaagatctgaaggtttgaatgggccaatgagtatcctcatcattgaagcattctatggaggctcccataaacagctggtggatcttcttcaagaagagttaggagactgtgtcgtttatacccttcctgcaaagaaatggcattggagagcccggacatctgctttatatttctctcagaccattcccatcagtgagcattacaggaccctctttgcaagttcagtgcttaacctgaccgaactggctgcccttcggcctgaccttgggaaactgaaaaagattctgtattttcacgagaaccagttgatatatcctgtcaagaaatgtcaggagagggatttccaatatggatacaaccaaattctttcatgcctggtggctgatgtggttgtattcaactcagtttttaatatggaatcatttctcacttccatgggaaaatttatgaagctgattcctgatcacagacccaaggatctggaaagcatcatcagacccaagtgccaagttatttactttcccatcaggtttcctgatgtgagcagattcatgcccaagcacaaaacaacccatttaaagaagatgctcggccttaaaggaaatggcggtgcggttctgtccatggcccttccttttcagccagagcagagagattcagaggatttattgaagaattttaattcagagtgtgatacacactgtggccttgatactgcacgacaagaatatttgggtaactcattaagacaggaatcagacttgaaaaaatccacctcgtcagataattcaagctctcatcatggtgaaaataaacaaaatctgactgttgatccctgtgacattttgggtggagttgataatcagcaaagactgctacacattgtctggcctcacaggtggttggaagctgtgtactgtgggtgttacccactttgtcctaaagatttggtttatcccgaaatatttccagctgaatatctgtattctacacctgaacagctttcaaaaaggctccagaatttctgcaagagaccagatattataagaaaacatctctataagggtgaaatcgctccgttttcttgggcagccctacatggtaaattcaggtctctgcttacaacagaacctagggaagatttgtgacagatggggctaagtcacaaacttgcagcctaaggcagaatctgaagaactttccagagtgtgcccatatttacctgatcagagagaaaagaaaatctgcagaggaagctgagcctggctgcttgtcatagctgacacagagccatctgccacaaacctgtggcggcttcagatctccaatccctgccaccaccccaactcaaattaaatacagattcctagagacgttatgatggttacacatgtcctcggcatcacatgtaggagactgttcaaaaaaaatatgtggcctgttgtataaccgcactcatgtatcccatatgtggtgccacattgaatttccggttgaatccgtttttatcctttgtactggatgacatggtgcctgaattctttcttttcgccgacacgatggcagccaaactgcagcttcaaacgctcacacttggctgggtttctacctaggttgccaggttatcatcggagccttcttgtgtcctcaaagggccacgaggcctgaaaggaggatcagaatgctttgggattaattgggcagccatcgcagaattgtttgtgggcaaagggctgctttagcacttttcttttagcaaattaatgactctcaggcacagggggttttaagtgaaggtattaataagaggtctggcaggtattcccatgattcacagagttacatttgcatttaattaatcttaaagttgcaagataaacagctgtaattcggacaaacatgacaaacacagtgaagccaactatcccataaaatgaacactgacatacttgttttaatttttttcccagcgtaaaaatagaaaaatcaaaatactcctaacaaaaccagtgattttgatagaaatatttctccaatatacttgcatccacctacaaatataaccttttcaagataaatcgcttatgatttcaatagtcaaactgctgtgtttgttgatgtaaagatgttttgaatggctagatggtaaaataaattcttaataaagtacccactgcaatttttaa

SEQ ID NO: 138224 - DNA, 10514 bp, Homo sapiens
  Payload ID: 7073
  Gene Symbol: GTDC1
  Gene Name: glycosyltransferase-like domain containing 1
  Uniprot ID: Q4AE62
  ENST ID: ENST00000392869
  CDS Start-End: 154-1530
caggtatctctgcattagccagattggacatatgtaaagggacatcagtatatctggatcatcagattgtgcttcaagaagaccatagggaagaacgcattttcatcttgctgcaaaagttgcaatagaagatctgaaggtttgaatgggccaatgagtatcctcatcattgaagcattctatggaggctcccataaacagctggtggatcttcttcaagaagagttaggagactgtgtcgtttatacccttcctgcaaagaaatggcattggagagcccggacatctgctttatatttctctcagaccattcccatcagtgagcattacaggaccctctttgcaagttcagtgcttaacctgaccgaactggctgcccttcggcctgaccttgggaaactgaaaaagattctgtattttcacgagaaccagttgatatatcctgtcaagaaatgtcaggagagggatttccaatatggatacaaccaaattctttcatgcctggtggctgatgtggttgtattcaactcagtttttaatatggaatcatttctcacttccatgggaaaatttatgaagctgattcctgatcacagacccaaggatctggaaagcatcatcagacccaagtgccaagttatttactttcccatcaggtttcctgatgtgagcagattcatgcccaagcacaaaacaacccatttaaagaagatgctcggccttaaaggaaatggcggtgcggttctgtccatggcccttccttttcagccagagcagagagattcagaggatttattgaagaattttaattcagagtgtgatacacactgtggccttgatactgcacgacaagaatatttgggtaactcattaagacaggaatcagacttgaaaaaatccacctcgtcagataattcaagctctcatcatggtgaaaataaacaaaatctgactgttgatccctgtgacattttgggtggagttgataatcagcaaagactgctacacattgtctggcctcacaggtgggagcatgataaagatccagaaagcttttttaaggtattaatgcatcttaaagacttaggactcaatttccacgtgtctgtacttggagaaaccttcacagatgtcccagatattttttcagaggccaaaaaggcattgggatcttctgtcttacactggggctacttacccagcaaagatgactatttccaagtactgtgcatggctgatgttgtcatctcaacagctaagcatgaattctttggagtggcaatgttggaagctgtgtactgtgggtgttacccactttgtcctaaagatttggtttatcccgaaatatttccagctgaatatctgtattctacacctgaacagctttcaaaaaggctccagaatttctgcaagagaccagatattataagaaaacatctctataagggtgaaatcgctccgttttcttgggcagccctacatggtaaattcaggtctctgcttacaacagaacctagggaagatttgtgacagatggggctaagtcacaaacttgcagcctaaggcagaatctgaagaactttccagagtgtgcccatatttacctgatcagagagaaaagaaaatctgcagaggaagctgagcctggctgcttgtcatagctgacacagagccatctgccacaaacctgtggcggcttcagatctccaatccctgccaccaccccaactcaaattaaatacagattcctagagacgttatgatggttacacatgtcctcggcatcacatgtaggagactgttcaaaaaaaatatgtggcctgttgtataaccgcactcatgtatcccatatgtggtgccacattgaatttccggttgaatccgtttttatcctttgtactggatgacatggtgcctgaattctttcttttcgccgacacgatggcagccaaactgcagcttcaaacgctcacacttggctgggtttctacctaggttgccaggttatcatcggagccttcttgtgtcctcaaagggccacgaggcctgaaaggaggatcagaatgctttgggattaattgggcagccatcgcagaattgtttgtgggcaaagggctgctttagcacttttcttttagcaaattaatgactctcaggcacagggggttttaagtgaaggtattaataagaggtctggcaggtattcccatgattcacagagttacatttgcatttaattaatcttaaagttgcaagataaacagctgtaattcggacaaacatgacaaacacagtgaagccaactatcccataaaatgaacactgacatacttgttttaatttttttcccagcgtaaaaatagaaaaatcaaaatactcctaacaaaaccagtgattttgatagaaatatttctccaatatacttgcatccacctacaaatataaccttttcaagataaatcgcttatgatttcaatagtcaaactgctgtgtttgttgatgtaaagatgttttgaatggctagatggtaaaataaattcttaataaagtacccactgcaatttttaattagcatattcatttacatatagatgtatacatctacctatgtgtttctcactgaacgttttccttgtgacagagacaacaaatacaattgtttcttttccggatgaacaaggatctgttttgcaaatgtttgtaagatattatgacatttccaagattttctttgcattctggaaagcaggaggtaaacatttgtagtcattaaggtaaagtctgttgataaaccatcttctgtttactgacaggtaaattgtaactttccctagcttttgaaatgagtaacttctatacaccacaaagtgaggcacagcctgggaaaggtggctagacaaggggcaagccaggctttctagcttctggaaggatcgagtggcctagcaggcatctaagataaagaaagcaatgattcggaagtccagtagggcccatttgaccggtagcaaaatcgaaagcacgaaatagatcaaggttagggagccagacaaagcccttggaagagaggcagtattgcagatcgaagcaagcagttcagagtctatgaggcctgggaatttaaaagcaggaagagtaagaagcagaaacaagaagctccatctgaacagactcctctctccaaccttcatgagacccacagtgtgtgatgggccaccacagcactggcttctagacttttacagggaagccagtgaacaaattacctcgtcacccagaaaacaaagagctcaggaactattttggaagttccttccagtctaagactatggaactcagaatctagcaggtgtgttcctttggatagcaaaactaaagatataaatatgaataagaaattctttgccacttctcctgggcaaggttatactttatgccatctactgagataaaccagatgagtcagtttgcttctgtcagttgctgtgtcacagatgacatcttctcaaaataatattatctcacagccaagaaatagcgcttcgtttactgtgtttttctatcctgaaactaaatgggcttacgcttcatagtggctaagatactccacacacaactagtacccatagatcttttctcactgataggaaaaaaaaaaaaaaagcattaaacacctttcagagagtacatctgaaacatttacgtattttcctgatttaggcaaatataatattgaaagttacctgtatgtgggcatttttttctacactcataaatgcaaatcaaattttgccattagctgtggccaacattccttccaggacaaaagcttacattaggccgggtgcggtggcgcacgcctgtaatcccagcactttgggaggccgagacgggtggatcatgaggtcaggagatcgagaccatcctggctaacacggtgaaaccccatctctactaaaaatacaaaaaaaattagccaggcatggtggcgggtgcctgtagtcccagctactggggaggctgaggcaggagaatggcgtgaacccaggaggcggagcttgcagtgagccgagatcgtgccactgcactccagcctgggcgacagagcgagactctgtctcaaaaaataaataaataaataaatttaaaataaattttaaaaaaattacattaaaggtgtcacttatttgcatgataccgagatttggagtttaaagaaaaaccttataaagactgtaatgtcagagttgctactagttcacataagcaataaaaagttttgtaaatgtgtaattcttaacatttaaaaatatgtaggagtgtgtgtgtgtgtgtgtgtgtgcacacgcacattcatgcttctcaacacccacgacctagtggaatggagtgttattaaataagttaatcagtattttgttgaaatctcagcagataattagtactacacgttgactcattaattcagtttcccttatcaaccacccccatcatttattgttttgagtatgtttgatggaaaacttagtcttcctctttttttttaacactcgattgtttttttcttttaaaataaagtcaattttaattttaaatgtctttaaaagtccatccattatcaagactttgacacagtgtcttgaaatacagcttgccctaaacttaatctatgcttctggctaggtgtttctataacaaatatcagggcacctggttcttaaccttctcatttatactgtgttgacagaaatagatgcaaatacctttttaaaaatgctcctggtttaataagcatccttcaaatacagttaagtttaaatgccctgctcctgttctcagtccttcagacatcaatatggcaggcagaatccataagtcaatggaaactcttagccatagagggctgcagagattaatttcaacaccttgaaatgcatctggaagcaaagatttcattttatgttgaaggtgttaattatatttgatatttttaaaagtaaaatctgtttttgagaaagcatctgctacccagaaatattatgagccacaaaagaaattttactgaagtctcaagatactttctgtggatgatagaatcagttttcaaatgatagtccatgctgtcttttaatgctgacatacactgtgggtcttattcttctattgactattgacccaactgcctttctttttcagtggaaaatttgggactatttaatattagatcttatgtttaacaatgaagagagtatattataaaccactgacttgaacatgtttcattttaaaatttgagttgtgatacagacaactaatgctcctatcctatgccctctcttcaaagctattcattaaaatataactggggaagtttgaaaaacatgcgagcaattctacatgctgctcaaagatacagacatgtgtgattaaagtacagtattacagaaaacctgggaattaaccaaacttacaataatggttatgtcagaggggccatggtagagaaaaaaaaggacatagaagtagggaaaggtgcattcgttgcatgatgagaagtctgtttcttaagctgagtcgtgatacacaaaggcttcttgccactctttgtgacatttcatgtgtcttcagtgtatttattgcatatatcttttgataggagatataaatacttcaggaagcatgttactagttttgctatcaggctatccttaacatttcttggttttctcaattattgattgagtcagaaaactgcttgcctcagacagtgatacaaactactctactgccaatgttgcttgagaagactttcctctgcttaacaggagccaggggcttcacctcaaccctcatgctgtggagaaagtcagactcaactggccacaggttcctgtttcttggggctgctaatcaccatttctaacagatgcctgtggcattgcaaacacaagatggaaaactatagctctaaactcccttctgaagggtaaggaaaggaagaggaaggcagatgttaaatgagcccagtctttctcatctcaaaaaattcagagctgcctgttagagcacaagagctctcagagctcccaaccacactgcccactccccatagtgttgcctctcccctttcctctttaagacgcaggagcgaatcgtggtctttgtgctttcactgcaatctatcccaggggaagagttctcccgggtatctgtgggatgcccttgctgcatgtgaggcacaaatggcttcagggaccaggatcctcactcactctgcagtccatttttctaaattggaatttgcgatcggtttcttcaggtgtcccaccatcatctatcattatctgagttattccttatcctctcccaaccccaaggagaggatcttaattgtttttataaactgacagaaggaattggtgattcttggaagataattttaaatggttatattactttcctattactgcatttactgcatttaaatagcaggtctaaggtggggtgcgagaagatgtgacccctaggaatattggtatgacctttctcaagcaatttgaagtcctttagatctgaaaatttaatgtcttcaatatcatttcacagatgagaaaattaaggcacatatagtgacatatttaggagctgaagtgtgttacagaaacaaagtttttttgtataagcctttccctacatgggatgttatcattgtcacctatgtgcctttcaggaagcaccaagtgcagtatgcgtgactcagttggacccctagttcccttctatttctccagctggcaggagacagcaaaggacagtggaggtggttattttgtggcccacatttctgccattaaaagggacataagagactatgtagtgtggccaatttttttttttttttttttgagagagagagtctggctctgtcgcccaggctggagtgcagtggcaccatctcggctcactgcaagctccacctcccgggttcacgccattctcctgcctcagcctcccgagtagctgggactacaggtgcccaccaccacgcccggctaatttttttgtatttttagtagagacggggtttcaccatgttagccagggtggtctcaatctcctgacctcgtgatccacctgtctcggcctcccaaagtgctgggattacaggtgtaagccaccatgcccggaatatggccattattttaagtgtttttattattgctctggttctccctttagggaggcattcagtgagtataccccatctgtcacaggcccccaccactccctgtggtcttacactctgctgaattcatacatttaggtaacttccctggccctcctgagaatcacttatttttgtaacctcctgtatttgagatgtaggaaactggggcctgaggagaagttgacttgccttgggtcccacagtggtacaggcagatctagaactcagattttccagggctctttcagtaggctgtggttgagcagtagtcaagaccacctcttcaagaagggaaaaacatttgtcttctctttctcctctttcttccttctgcctctcactgtaagaagaaacgtgttaataagttgctaataccttactctaggtgtatttcatgttacaccagccagtgcttgtattctcaatgaccataaggagaggaatgcggaagaattgatttctgtactaaaagttcagactctgtggcacttgtgatatttctggacaactgactcttctctattgcctttcgaatcatacagtggcaaagctgctcacccatgtgtgtataaagctgacccttcatcagaaaggcagcccccagtgtctccccacacagggcagaagagcagagggagcaggtggcaatgtggcagcaccttgaactgtgcatcactgggcctgctccccctcatcccaaagcaataacccagaaattacatcctgagacttacttcctcagaaagaaaaggaaggggagggataacttaaaaaggagaaacttctaatatggtattagactgtaattcatagggaaatttatgcctgagatatgaatttctgaaaataaggggcttttttggaagggaaacactgacacatccttaattatagagtaataaataccaatggtatattatctttcgatatttccttacacagatatcaaagcatgcagctgtttttgaaaactgataatcaagtacaatataagtatattacatcttgcacttacaacacacccttcaactaagcagcatcatggagcacttaacggtgagaaacagagctgctcatagtagaaacctaactgaacaaattagctttgaattgtaacttaagaatcgtagtcaaaccaaagcgtctgtccttgccaggaaaggcattccaaaggcagagagcatgccaagtaaaaaggctttgcttcaggattatggagacagttctgaaaagccagcataacttaatgatcaatcagaaaaatatagagcagtaactacacaactgaaggatgcataaaaattgtacaaaacgttaatagtggaatggggaggtaggatgggattttacgggcaagtattaagctcttggaaagcttcatttgttgccctcaatccacacagcagaaagaaagagaaagagacaaacatggtcaaagaaaagtatgtggacaaatgtggggggtagaaaaggaaatgaaggttaagcaaggccaatataattcagaataaaagggagggagggaagtataaggagccagctgtaattactgaatgttacattaagaagagctgaaattgagagggggaggtcttgagtattttactaagtggattaatgtcctcttcctcgggtgtctgaagttgcagattttaatttatttggtgcagggatttattacagaattcttaatgggtggggagataaacagggacaattataagctcttaagaagaagaaaagaggaccatataatactttctataaatttaactgtaataaacagggtttcaagctatggacaaagatagtcaaaaaaagcatttattccatgatataggactaaaagggaaataagaggtgtgtccaaaaaacttaaagaccaaaacaaagaaagaaaaacccacatagatgtgtgatgccaggattttgaatgacttgggagctagttattgccgctctcctttctccacccatttaaaaaaataaatcataactctggcatttaaaaacctactcatgaacatcatttattaatataaacttaatcctgtgctattctttggtgggtggtaagaacatgaattaacaacaactggactaaaacgatggcaacaggatgatccactcaaacacaggaaagctgtaagaaaaagaaaaactcctaatctgctctttcaccttacttattttacagaaggagaaagccaaaaaggggagagcatgtggctaaaccacagaaagactagatgcctaaaggaaaaattttaaagtgttcctaaataggtattagaaggggaagggggatgtaaagcttatgtgatttacatcattttgttaatctgctaatctacttccctggaaggtgagaaagagtgttgtctgccttctgcaattgaagagactagggcagaaacttaattatgttcttaccctgtgtatacctggctgtcatctggctggcaactagtccacaaactattggttcaggcatttgcctggcaataatgttagccatcatttaaattgttaaatatggatcagaagatctctaagaattactgatatgcagctattaatactggatgtaaataatattatttggggtgtgggtaaatcatttgactggaaccacatttaaaaaaaggacttggaaattttatttttgaaatgctgttggggagatggcattgatgaaaaaaaaaattgaaaatggaaaaaaacatcatctacaaagagatgggtaaaaatgactaagcaaagaagccttgtcaccttcgacctgatgcttcattgtatcagaagaaagtaaacagattgctaacaaagagaccaccccttctaatttccaaaaccggcccagcaacaagagggagaaaatagagaagagtgcactgcgtggtggctcagggtgatcctttaatttgagtgttaaaaatgagggcacagacctagaggtttttaatggtccgcgggtggacttcagattctgaacactcctccaccttctgtggagaattcgggacacggtggagtttaaccagtatcttaaatcccagggacagggtggagattgctttgtgatcctgattaattaaaaggaaagaaatcaaagcagacatctctcctttttccatttgagccgcagagccatggaggggaacttgtgctctctggtgcttgcagctatgttccctggctttcatcgtcttggcttttccccttgtatttctaatgctgtgataccaggccaataaaatggaatctacaaaactgcaaaacaaaa

SEQ ID NO: 138225 - DNA, 2352 bp, Homo sapiens
  Payload ID: 7073
  Gene Symbol: GTDC1
  Gene Name: glycosyltransferase-like domain containing 1
  Uniprot ID: Q4AE62
  ENST ID: ENST00000392871
  CDS Start-End: 92-1222
cagattgtgcttcaagaagaccatagggaagaacgcattttcatcttgctgcaaaagttgcaatagaagatctgaaggtttgaatgggccaatgagtatcctcatcattgaagcattctatggaggctcccataaacagctggtggatcttcttcaagaagagttaggagactgtgtcgtttatacccttcctgcaaagaaatggcattggagagcccggacatctgctttatatttctctcagaccattcccatcagtgagcattacaggaccctctttgcaagttcagtgcttaacctgaccgaactggctgcccttcggcctgaccttgggaaactgaaaaagattctgtattttcacgagaaccagttgatatatcctgtcaagaaatgtcaggagagggatttccaatatggatacaaccaaattctttcatgcctggtggctgatgtggttgtattcaactcagtttttaatatggaatcatttctcacttccatgggaaaatttatgaagctgattcctgatcacagacccaaggatctggaaagcatcatcagacccaagtgccaagttatttactttcccatcaggtttcctgatgtgagcagattcatgcccaagcacaaaacaacccatttaaagaagatgctcggccttaaaggaaatggcggtgcggttctgtccatggcccttccttttcagccagagcagagagattcagaggatttattgaagaattttaattcagagtgtgatacacactgtggccttgatactgcacgacaagaatatttgggtaactcattaagacaggaatcagacttgaaaaaatccacctcgtcagataattcaagctctcatcatggtgaaaataaacaaaatctgactgttgatccctgtgacattttgggtggagttgataatcagcaaagactgctacacattgtctggcctcacaggtgggagcatgataaagatccagaaagcttttttaaggtattaatgcatcttaaagacttaggactcaatttccacgtgtctgtacttggagaaaccttcacagatgtcccaggttggaagctgtgtactgtgggtgttacccactttgtcctaaagatttggtttatcccgaaatatttccagctgaatatctgtattctacacctgaacagctttcaaaaaggctccagaatttctgcaagagaccagatattataagaaaacatctctataagggtgaaatcgctccgttttcttgggcagccctacatggtaaattcaggtctctgcttacaacagaacctagggaagatttgtgacagatggggctaagtcacaaacttgcagcctaaggcagaatctgaagaactttccagagtgtgcccatatttacctgatcagagagaaaagaaaatctgcagaggaagctgagcctggctgcttgtcatagctgacacagagccatctgccacaaacctgtggcggcttcagatctccaatccctgccaccaccccaactcaaattaaatacagattcctagagacgttatgatggttacacatgtcctcggcatcacatgtaggagactgttcaaaaaaaatatgtggcctgttgtataaccgcactcatgtatcccatatgtggtgccacattgaatttccggttgaatccgtttttatcctttgtactggatgacatggtgcctgaattctttcttttcgccgacacgatggcagccaaactgcagcttcaaacgctcacacttggctgggtttctacctaggttgccaggttatcatcggagccttcttgtgtcctcaaagggccacgaggcctgaaaggaggatcagaatgctttgggattaattgggcagccatcgcagaattgtttgtgggcaaagggctgctttagcacttttcttttagcaaattaatgactctcaggcacagggggttttaagtgaaggtattaataagaggtctggcaggtattcccatgattcacagagttacatttgcatttaattaatcttaaagttgcaagataaacagctgtaattcggacaaacatgacaaacacagtgaagccaactatcccataaaatgaacactgacatacttgttttaatttttttcccagcgtaaaaatagaaaaatcaaaatactcctaacaaaaccagtgattttgatagaaatatttctccaatatacttgcatccacctacaaatataaccttttcaagataaatcgcttatgatttcaatagtcaaactgctgtgtttgttgatgtaaagatgttttgaatggctagatggtaaaataaattcttaataaagtacccactgc

SEQ ID NO: 138226 - DNA, 2954 bp, Homo sapiens
  Payload ID: 7073
  Gene Symbol: GTDC1
  Gene Name: glycosyltransferase-like domain containing 1
  Uniprot ID: Q4AE62
  ENST ID: ENST00000409214
  CDS Start-End: 280-1656
ggacttgctggagatatagaaagggacctgacacagtttctggccttaaggagctctcattccagtggggaagaaaaaaactaaaataatgatgtccgagagcatcagaaaagaacctgctctggtcaggtatctctgcattagccagattggacatatgtaaagggacatcagtatatctggatcatcagattgtgcttcaagaagaccatagggaagaacgcattttcatcttgctgcaaaagttgcaatagaagatctgaaggtttgaatgggccaatgagtatcctcatcattgaagcattctatggaggctcccataaacagctggtggatcttcttcaagaagagttaggagactgtgtcgtttatacccttcctgcaaagaaatggcattggagagcccggacatctgctttatatttctctcagaccattcccatcagtgagcattacaggaccctctttgcaagttcagtgcttaacctgaccgaactggctgcccttcggcctgaccttgggaaactgaaaaagattctgtattttcacgagaaccagttgatatatcctgtcaagaaatgtcaggagagggatttccaatatggatacaaccaaattctttcatgcctggtggctgatgtggttgtattcaactcagtttttaatatggaatcatttctcacttccatgggaaaatttatgaagctgattcctgatcacagacccaaggatctggaaagcatcatcagacccaagtgccaagttatttactttcccatcaggtttcctgatgtgagcagattcatgcccaagcacaaaacaacccatttaaagaagatgctcggccttaaaggaaatggcggtgcggttctgtccatggcccttccttttcagccagagcagagagattcagaggatttattgaagaattttaattcagagtgtgatacacactgtggccttgatactgcacgacaagaatatttgggtaactcattaagacaggaatcagacttgaaaaaatccacctcgtcagataattcaagctctcatcatggtgaaaataaacaaaatctgactgttgatccctgtgacattttgggtggagttgataatcagcaaagactgctacacattgtctggcctcacaggtgggagcatgataaagatccagaaagcttttttaaggtattaatgcatcttaaagacttaggactcaatttccacgtgtctgtacttggagaaaccttcacagatgtcccagatattttttcagaggccaaaaaggcattgggatcttctgtcttacactggggctacttacccagcaaagatgactatttccaagtactgtgcatggctgatgttgtcatctcaacagctaagcatgaattctttggagtggcaatgttggaagctgtgtactgtgggtgttacccactttgtcctaaagatttggtttatcccgaaatatttccagctgaatatctgtattctacacctgaacagctttcaaaaaggctccagaatttctgcaagagaccagatattataagaaaacatctctataagggtgaaatcgctccgttttcttgggcagccctacatggtaaattcaggtctctgcttacaacagaacctagggaagatttgtgacagatggggctaagtcacaaacttgcagcctaaggcagaatctgaagaactttccagagtgtgcccatatttacctgatcagagagaaaagaaaatctgcagaggaagctgagcctggctgcttgtcatagctgacacagagccatctgccacaaacctgtggcggcttcagatctccaatccctgccaccaccccaactcaaattaaatacagattcctagagacgttatgatggttacacatgtcctcggcatcacatgtaggagactgttcaaaaaaaatatgtggcctgttgtataaccgcactcatgtatcccatatgtggtgccacattgaatttccggttgaatccgtttttatcctttgtactggatgacatggtgcctgaattctttcttttcgccgacacgatggcagccaaactgcagcttcaaacgctcacacttggctgggtttctacctaggttgccaggttatcatcggagccttcttgtgtcctcaaagggccacgaggcctgaaaggaggatcagaatgctttgggattaattgggcagccatcgcagaattgtttgtgggcaaagggctgctttagcacttttcttttagcaaattaatgactctcaggcacagggggttttaagtgaaggtattaataagaggtctggcaggtattcccatgattcacagagttacatttgcatttaattaatcttaaagttgcaagataaacagctgtaattcggacaaacatgacaaacacagtgaagccaactatcccataaaatgaacactgacatacttgttttaatttttttcccagcgtaaaaatagaaaaatcaaaatactcctaacaaaaccagtgattttgatagaaatatttctccaatatacttgcatccacctacaaatataaccttttcaagataaatcgcttatgatttcaatagtcaaactgctgtgtttgttgatgtaaagatgttttgaatggctagatggtaaaataaattcttaataaagtacccactgcaatttttaattagcatattcatttacatatagatgtatacatctacctatgtgtttctcactgaacgttttccttgtgacagagacaacaaatacaattgtttcttttccggatgaacaaggatctgttttgcaaatgtttgtaagatattatgacatttccaagattttctttgcattctggaaagcaggaggtaaacatttgtagtcattaaggtaaagtctgttgataaaccatcttctgtttactgacaggtaaattgtaacttt

SEQ ID NO: 138227 - DNA, 2209 bp, Homo sapiens
  Payload ID: 7073
  Gene Symbol: GTDC1
  Gene Name: glycosyltransferase-like domain containing 1
  ENST ID: ENST00000409298
  CDS Start-End: 151-1173
gtatctctgcattagccagattggacatatgtaaagggacatcagtatatctggatcatcagattgtgcttcaagaagaccatagggaagaacgcattttcatcttgctgcaaaagttgcaatagaagatctgaaggtttgaatgggccaatgagtatcctcatcattgaagcattctatggaggctcccataaacagctggtggatcttcttcaagaagagttaggagactgtgtcgtttatacccttcctgcaaagaaatggcattggagagcccggacatctgctttatatttctctcagaccattcccatcagtgagcattacaggaccctctttgcaagttcagtgcttaacctgaccgaactggctgcccttcggcctgaccttgggaaactgaaaaagattctgtattttcacgagaaccagttgatatatcctgtcaagaaatgtcaggagagggatttccaatatggatacaaccaaattctttcatgcctggtggctgatgtggttgtattcaactcagtttttaatatggaatcatttctcacttccatgggaaaatttatgaagctgattcctgatcacagacccaaggatctggaaagcatcatcagacccaagtgccaagttatttactttcccatcaggtttcctgatgtgagcagggagcatgataaagatccagaaagcttttttaaggtattaatgcatcttaaagacttaggactcaatttccacgtgtctgtacttggagaaaccttcacagatgtcccagatattttttcagaggccaaaaaggcattgggatcttctgtcttacactggggctacttacccagcaaagatgactatttccaagtactgtgcatggctgatgttgtcatctcaacagctaagcatgaattctttggagtggcaatgttggaagctgtgtactgtgggtgttacccactttgtcctaaagatttggtttatcccgaaatatttccagctgaatatctgtattctacacctgaacagctttcaaaaaggctccagaatttctgcaagagaccagatattataagaaaacatctctataagggtgaaatcgctccgttttcttgggcagccctacatggtaaattcaggtctctgcttacaacagaacctagggaagatttgtgacagatggggctaagtcacaaacttgcagcctaaggcagaatctgaagaactttccagagtgtgcccatatttacctgatcagagagaaaagaaaatctgcagaggaagctgagcctggctgcttgtcatagctgacacagagccatctgccacaaacctgtggcggcttcagatctccaatccctgccaccaccccaactcaaattaaatacagattcctagagacgttatgatggttacacatgtcctcggcatcacatgtaggagactgttcaaaaaaaatatgtggcctgttgtataaccgcactcatgtatcccatatgtggtgccacattgaatttccggttgaatccgtttttatcctttgtactggatgacatggtgcctgaattctttcttttcgccgacacgatggcagccaaactgcagcttcaaacgctcacacttggctgggtttctacctaggttgccaggttatcatcggagccttcttgtgtcctcaaagggccacgaggcctgaaaggaggatcagaatgctttgggattaattgggcagccatcgcagaattgtttgtgggcaaagggctgctttagcacttttcttttagcaaattaatgactctcaggcacagggggttttaagtgaaggtattaataagaggtctggcaggtattcccatgattcacagagttacatttgcatttaattaatcttaaagttgcaagataaacagctgtaattcggacaaacatgacaaacacagtgaagccaactatcccataaaatgaacactgacatacttgttttaatttttttcccagcgtaaaaatagaaaaatcaaaatactcctaacaaaaccagtgattttgatagaaatatttctccaatatacttgcatccacctacaaatataaccttttcaagataaatcgcttatgatttcaatagtcaaactgctgtgtttgttgatgtaaagatgttttgaatggctagatggtaaaataaattcttaataaagtacccactgcaattttt

SEQ ID NO: 138228 - DNA, 586 bp, Homo sapiens
  Payload ID: 7073
  Gene Symbol: GTDC1
  Gene Name: glycosyltransferase-like domain containing 1
  ENST ID: ENST00000429978
  CDS Start-End: 281-481
aggcggccgcgggccgggaggggcggcggcatccgcggcggccgcgggggaggggcacggcgtcagcgcgtcgccggctgggccgcgccggtggccaggagggagagacaaggaggaggaggaggaggaggtatctctgcattagccagattggacatatgtaaagggacatcagtatatctggatcatcagattgtgcttcaagaagaccatagggaagaacgcattttcatcttgctgcaaaagttgcaatagaagatctgaaggtttgaatgggccaatgagtatcctcatcattgaagcattctatggaggctcccataaacagctggtggatcttcttcaagaagagttaggagactgtgtcgtttatacccttcctgcaaagaaatggcattggagagcccggacatctgctttatatttctctcagaccattcccatcagtgagcattacaggcaatcagaaattacaaattaggaaacaggagagatgagaatggaatgttaaccttttggtatgaagcaggtcaacattgaaaatgcaagaagcctggatccagcttcctgaaaagaagctccttgg

SEQ ID NO: 138229 - DNA, 601 bp, Homo sapiens
  Payload ID: 7073
  Gene Symbol: GTDC1
  Gene Name: glycosyltransferase-like domain containing 1
  ENST ID: ENST00000417450
  CDS Start-End: 303-601
aggtgacactgatgataaaaatccatccaagaatttatatgtgacatctgcagcaggttcaaatctctcagctatgagacaaactggatacttcctaaggattgccatctattatgcacagagagccaaaatccgttactgaaattgtctgggtatctctgcattagccagattggacatatgtaaagggacatcagtatatctggatcatcagattgtgcttcaagaagaccatagggaagaacgcattttcatcttgctgcaaaagttgcaatagaagatctgaaggtttgaatgggccaatgagtatcctcatcattgaagcattctatggaggctcccataaacagctggtggatcttcttcaagaagagttaggagactgtgtcgtttatacccttcctgcaaagaaatggcattggagagcccggacatctgctttatatttctctcagaccattcccatcagtgagcattacaggaccctctttgcaagttcagtgcttaacctgaccgaactggctgcccttcggcctgaccttgggaaactgaaaaagattctgtattttcacgagaaccagttgatatatcctgtcaagaa

SEQ ID NO: 138230 - DNA, 2780 bp, Homo sapiens
  Payload ID: 7073
  Gene Symbol: GTDC1
  Gene Name: glycosyltransferase-like domain containing 1
  ENST ID: ENST00000415569
  CDS Start-End: 153-353
aggtatctctgcattagccagattggacatatgtaaagggacatcagtatatctggatcatcagattgtgcttcaagaagaccatagggaagaacgcattttcatcttgctgcaaaagttgcaatagaagatctgaaggtttgaatgggccaatgagtatcctcatcattgaagcattctatggaggctcccataaacagctggtggatcttcttcaagaagagttaggagactgtgtcgtttatacccttcctgcaaagaaatggcattggagagcccggacatctgctttatatttctctcagaccattcccatcagtgagcattacaggcaatcagaaattacaaattaggaaacaggagagatgagaatggaatgttaaccttttggtatgaagcaggtcaacattgaaaatgcaagaagcctggatccagcttcctgaaaagaagctccttgataaagaggattgatgtcttcacatgttgactcttcatgtctggatatggtttggatttatgccttgcccaaatctcatgcagaattataatcaccaatgttgcaggaccctctttgcaagttcagtgcttaacctgaccgaactggctgcccttcggcctgaccttgggaaactgaaaaagattctgtattttcacgagaaccagttgatatatcctgtcaagaaatgtcaggagagggatttccaatatggatacaaccaaattctttcatgcctggtggctgatgtggttgtattcaactcagtttttaatatggaatcatttctcacttccatgggaaaatttatgaagctgattcctgatcacagacccaaggatctggaaagcatcatcagacccaagtgccaagttatttactttcccatcaggtttcctgatgtgagcagattcatgcccaagcacaaaacaacccatttaaagaagatgctcggccttaaaggaaatggcggtgcggttctgtccatggcccttccttttcagccagagcagagagattcagaggatttattgaagaattttaattcagagtgtgatacacactgtggccttgatactgcacgacaagaatatttgggtaactcattaagacaggaatcagacttgaaaaaatccacctcgtcagataattcaagctctcatcatggtgaaaataaacaaaatctgactgttgatccctgtgacattttgggtggagttgataatcagcaaagactgctacacattgtctggcctcacaggtgggagcatgataaagatccagaaagcttttttaaggtattaatgcatcttaaagacttaggactcaatttccacgtgtctgtacttggagaaaccttcacagatgtcccagatattttttcagaggccaaaaaggcattgggatcttctgtcttacactggggctacttacccagcaaagatgactatttccaagtactgtgcatggctgatgttgtcatctcaacagctaagcatgaattctttggagtggcaatgttggaagctgtgtactgtgggtgttacccactttgtcctaaagatttggtttatcccgaaatatttccagctgaatatctgtattctacacctgaacagctttcaaaaaggctccagaatttctgcaagagaccagatattataagaaaacatctctataagggtgaaatcgctccgttttcttgggcagccctacatggtaaattcaggtctctgcttacaacagaacctagggaagatttgtgacagatggggctaagtcacaaacttgcagcctaaggcagaatctgaagaactttccagagtgtgcccatatttacctgatcagagagaaaagaaaatctgcagaggaagctgagcctggctgcttgtcatagctgacacagagccatctgccacaaacctgtggcggcttcagatctccaatccctgccaccaccccaactcaaattaaatacagattcctagagacgttatgatggttacacatgtcctcggcatcacatgtaggagactgttcaaaaaaaatatgtggcctgttgtataaccgcactcatgtatcccatatgtggtgccacattgaatttccggttgaatccgtttttatcctttgtactggatgacatggtgcctgaattctttcttttcgccgacacgatggcagccaaactgcagcttcaaacgctcacacttggctgggtttctacctaggttgccaggttatcatcggagccttcttgtgtcctcaaagggccacgaggcctgaaaggaggatcagaatgctttgggattaattgggcagccatcgcagaattgtttgtgggcaaagggctgctttagcacttttcttttagcaaattaatgactctcaggcacagggggttttaagtgaaggtattaataagaggtctggcaggtattcccatgattcacagagttacatttgcatttaattaatcttaaagttgcaagataaacagctgtaattcggacaaacatgacaaacacagtgaagccaactatcccataaaatgaacactgacatacttgttttaatttttttcccagcgtaaaaatagaaaaatcaaaatactcctaacaaaaccagtgattttgatagaaatatttctccaatatacttgcatccacctacaaatataaccttttcaagataaatcgcttatgatttcaatagtcaaactgctgtgtttgttgatgtaaagatgttttgaatggctagatggtaaaataaattcttaataaag

SEQ ID NO: 138231 - DNA, 753 bp, Homo sapiens
  Payload ID: 7073
  Gene Symbol: GTDC1
  Gene Name: glycosyltransferase-like domain containing 1
  ENST ID: ENST00000437114
  CDS Start-End: 233-753
gtatctctgcattagccagattggacatatgtaaagggacatcagtatatctggatcatcagtggtataatgtgttatagaggtggacaagcctgcagattgaagtggggatcgtccagattgttcccttccctggaccatatgattgtgcttcaagaagaccatagggaagaacgcattttcatcttgctgcaaaagttgcaatagaagatctgaaggtttgaatgggccaatgagtatcctcatcattgaagcattctatggaggctcccataaacagctggtggatcttcttcaagaagagttaggagactgtgtcgtttatacccttcctgcaaagaaatggcattggagagcccggacatctgctttatatttctctcagaccattcccatcagtgagcattacaggaccctctttgcaagttcagtgcttaacctgaccgaactggctgcccttcggcctgaccttgggaaactgaaaaagattctgtattttcacgagaaccagttgatatatcctgtcaagaaatgtcaggagagggatttccaatatggatacaaccaaattctttcatgcctggtggctgatgtggttgtattcaactcagtttttaatatggaatcatttctcacttccatgggaaaatttatgaagctgattcctgatcacagacccaaggatctggaaagcatcatcagacccaagtgccaagttatttactttcccatcaggtttcctgatgtgagcag

SEQ ID NO: 138232 - DNA, 1563 bp, Homo sapiens
  Payload ID: 7073
  Gene Symbol: GTDC1
  Gene Name: glycosyltransferase-like domain containing 1
  Uniprot ID: Q4AE62
  ENST ID: ENST00000463875
  CDS Start-End: 349-1338
gggcacggcgtcagcgcgtcgccggctgggccgcgccggtggccaggagggagagacaaggaggaggaggaggaggaggtatctctgcattagccagattggacatatgtaaagggacatcagtatatctggatcatcaggaccctctttgcaagttcagtgcttaacctgaccgaactggctgcccttcggcctgaccttgggaaactgaaaaagattctgtattttcacgagaaccagttgatatatcctgtcaagaaatgtcaggagagggatttccaatatggatacaaccaaattctttcatgcctggtggctgatgtggttgtattcaactcagtttttaatatggaatcatttctcacttccatgggaaaatttatgaagctgattcctgatcacagacccaaggatctggaaagcatcatcagacccaagtgccaagttatttactttcccatcaggtttcctgatgtgagcagattcatgcccaagcacaaaacaacccatttaaagaagatgctcggccttaaaggaaatggcggtgcggttctgtccatggcccttccttttcagccagagcagagagattcagaggatttattgaagaattttaattcagagtgtgatacacactgtggccttgatactgcacgacaagaatatttgggtaactcattaagacaggaatcagacttgaaaaaatccacctcgtcagataattcaagctctcatcatggtgaaaataaacaaaatctgactgttgatccctgtgacattttgggtggagttgataatcagcaaagactgctacacattgtctggcctcacaggtgggagcatgataaagatccagaaagcttttttaaggtattaatgcatcttaaagacttaggactcaatttccacgtgtctgtacttggagaaaccttcacagatgtcccagatattttttcagaggccaaaaaggcattgggatcttctgtcttacactggggctacttacccagcaaagatgactatttccaagtactgtgcatggctgatgttgtcatctcaacagctaagcatgaattctttggagtggcaatgttggaagctgtgtactgtgggtgttacccactttgtcctaaagatttggtttatcccgaaatatttccagctgaatatctgtattctacacctgaacagctttcaaaaaggctccagaatttctgcaagagaccagatattataagaaaacatctctataagggtgaaatcgctccgttttcttgggcagccctacatggtaaattcaggtctctgcttacaacagaacctagggaagatttgtgacagatggggctaagtcacaaacttgcagcctaaggcagaatctgaagaactttccagagtgtgcccatatttacctgatcagagagaaaagaaaatctgcagaggaagctgagcctggctgcttgtcatagctgacacagagccatctgccacaaacctgtggcggcttcagatctccaatccctgccaccaccccaactcaaattaaatacagattcctagaga

SEQ ID NO: 138233 - DNA, 2677 bp, Homo sapiens
  Payload ID: 7073
  Gene Symbol: GTDC1
  Gene Name: glycosyltransferase-like domain containing 1
  Uniprot ID: Q4AE62
  ENST ID: ENST00000542155
  CDS Start-End: 265-1641
gcggcggccgcgggggaggggcacggcgtcagcgcgtcgccggctgggccgcgccggtggccaggagggagagacaaggaggaggaggaggaggaggtatctctgcattagccagattggacatatgtaaagggacatcagtatatctggatcatcaggaatcatctttcttccagattgtgcttcaagaagaccatagggaagaacgcattttcatcttgctgcaaaagttgcaatagaagatctgaaggtttgaatgggccaatgagtatcctcatcattgaagcattctatggaggctcccataaacagctggtggatcttcttcaagaagagttaggagactgtgtcgtttatacccttcctgcaaagaaatggcattggagagcccggacatctgctttatatttctctcagaccattcccatcagtgagcattacaggaccctctttgcaagttcagtgcttaacctgaccgaactggctgcccttcggcctgaccttgggaaactgaaaaagattctgtattttcacgagaaccagttgatatatcctgtcaagaaatgtcaggagagggatttccaatatggatacaaccaaattctttcatgcctggtggctgatgtggttgtattcaactcagtttttaatatggaatcatttctcacttccatgggaaaatttatgaagctgattcctgatcacagacccaaggatctggaaagcatcatcagacccaagtgccaagttatttactttcccatcaggtttcctgatgtgagcagattcatgcccaagcacaaaacaacccatttaaagaagatgctcggccttaaaggaaatggcggtgcggttctgtccatggcccttccttttcagccagagcagagagattcagaggatttattgaagaattttaattcagagtgtgatacacactgtggccttgatactgcacgacaagaatatttgggtaactcattaagacaggaatcagacttgaaaaaatccacctcgtcagataattcaagctctcatcatggtgaaaataaacaaaatctgactgttgatccctgtgacattttgggtggagttgataatcagcaaagactgctacacattgtctggcctcacaggtgggagcatgataaagatccagaaagcttttttaaggtattaatgcatcttaaagacttaggactcaatttccacgtgtctgtacttggagaaaccttcacagatgtcccagatattttttcagaggccaaaaaggcattgggatcttctgtcttacactggggctacttacccagcaaagatgactatttccaagtactgtgcatggctgatgttgtcatctcaacagctaagcatgaattctttggagtggcaatgttggaagctgtgtactgtgggtgttacccactttgtcctaaagatttggtttatcccgaaatatttccagctgaatatctgtattctacacctgaacagctttcaaaaaggctccagaatttctgcaagagaccagatattataagaaaacatctctataagggtgaaatcgctccgttttcttgggcagccctacatggtaaattcaggtctctgcttacaacagaacctagggaagatttgtgacagatggggctaagtcacaaacttgcagcctaaggcagaatctgaagaactttccagagtgtgcccatatttacctgatcagagagaaaagaaaatctgcagaggaagctgagcctggctgcttgtcatagctgacacagagccatctgccacaaacctgtggcggcttcagatctccaatccctgccaccaccccaactcaaattaaatacagattcctagagacgttatgatggttacacatgtcctcggcatcacatgtaggagactgttcaaaaaaaatatgtggcctgttgtataaccgcactcatgtatcccatatgtggtgccacattgaatttccggttgaatccgtttttatcctttgtactggatgacatggtgcctgaattctttcttttcgccgacacgatggcagccaaactgcagcttcaaacgctcacacttggctgggtttctacctaggttgccaggttatcatcggagccttcttgtgtcctcaaagggccacgaggcctgaaaggaggatcagaatgctttgggattaattgggcagccatcgcagaattgtttgtgggcaaagggctgctttagcacttttcttttagcaaattaatgactctcaggcacagggggttttaagtgaaggtattaataagaggtctggcaggtattcccatgattcacagagttacatttgcatttaattaatcttaaagttgcaagataaacagctgtaattcggacaaacatgacaaacacagtgaagccaactatcccataaaatgaacactgacatacttgttttaatttttttcccagcgtaaaaatagaaaaatcaaaatactcctaacaaaaccagtgattttgatagaaatatttctccaatatacttgcatccacctacaaatataaccttttcaagataaatcgcttatgatttcaatagtcaaactgctgtgtttgttgatgtaaagatgttttgaatggctagatggtaaaataaattcttaataaagtacccactgcaattttt

SEQ ID NO: 138234 - DNA, 2317 bp, Homo sapiens
  Payload ID: 7073
  Gene Symbol: GTDC1
  Gene Name: glycosyltransferase-like domain containing 1
  Uniprot ID: Q4AE62
  ENST ID: ENST00000618778
  CDS Start-End: 1-1281
atgttgactcttcatgtctggatatggtttggatttatgccttgcccaaatctcatgcagaattataatcaccaatgttgcaggaccctctttgcaagttcagtgcttaacctgaccgaactggctgcccttcggcctgaccttgggaaactgaaaaagattctgtattttcacgagaaccagttgatatatcctgtcaagaaatgtcaggagagggatttccaatatggatacaaccaaattctttcatgcctggtggctgatgtggttgtattcaactcagtttttaatatggaatcatttctcacttccatgggaaaatttatgaagctgattcctgatcacagacccaaggatctggaaagcatcatcagacccaagtgccaagttatttactttcccatcaggtttcctgatgtgagcagattcatgcccaagcacaaaacaacccatttaaagaagatgctcggccttaaaggaaatggcggtgcggttctgtccatggcccttccttttcagccagagcagagagattcagaggatttattgaagaattttaattcagagtgtgatacacactgtggccttgatactgcacgacaagaatatttgggtaactcattaagacaggaatcagacttgaaaaaatccacctcgtcagataattcaagctctcatcatggtgaaaataaacaaaatctgactgttgatccctgtgacattttgggtggagttgataatcagcaaagactgctacacattgtctggcctcacaggtgggagcatgataaagatccagaaagcttttttaaggtattaatgcatcttaaagacttaggactcaatttccacgtgtctgtacttggagaaaccttcacagatgtcccagatattttttcagaggccaaaaaggcattgggatcttctgtcttacactggggctacttacccagcaaagatgactatttccaagtactgtgcatggctgatgttgtcatctcaacagctaagcatgaattctttggagtggcaatgttggaagctgtgtactgtgggtgttacccactttgtcctaaagatttggtttatcccgaaatatttccagctgaatatctgtattctacacctgaacagctttcaaaaaggctccagaatttctgcaagagaccagatattataagaaaacatctctataagggtgaaatcgctccgttttcttgggcagccctacatggtaaattcaggtctctgcttacaacagaacctagggaagatttgtgacagatggggctaagtcacaaacttgcagcctaaggcagaatctgaagaactttccagagtgtgcccatatttacctgatcagagagaaaagaaaatctgcagaggaagctgagcctggctgcttgtcatagctgacacagagccatctgccacaaacctgtggcggcttcagatctccaatccctgccaccaccccaactcaaattaaatacagattcctagagacgttatgatggttacacatgtcctcggcatcacatgtaggagactgttcaaaaaaaatatgtggcctgttgtataaccgcactcatgtatcccatatgtggtgccacattgaatttccggttgaatccgtttttatcctttgtactggatgacatggtgcctgaattctttcttttcgccgacacgatggcagccaaactgcagcttcaaacgctcacacttggctgggtttctacctaggttgccaggttatcatcggagccttcttgtgtcctcaaagggccacgaggcctgaaaggaggatcagaatgctttgggattaattgggcagccatcgcagaattgtttgtgggcaaagggctgctttagcacttttcttttagcaaattaatgactctcaggcacagggggttttaagtgaaggtattaataagaggtctggcaggtattcccatgattcacagagttacatttgcatttaattaatcttaaagttgcaagataaacagctgtaattcggacaaacatgacaaacacagtgaagccaactatcccataaaatgaacactgacatacttgttttaatttttttcccagcgtaaaaatagaaaaatcaaaatactcctaacaaaaccagtgattttgatagaaatatttctccaatatacttgcatccacctacaaatataaccttttcaagataaatcgcttatgatttcaatagtcaaactgctgtgtttgttgatgtaaagatgttttgaatggctagatggtaaaataaattcttaataaagtacccactgcaattttt

SEQ ID NO: 138235 - DNA, 2634 bp, Homo sapiens
  Payload ID: 7074
  Gene Symbol: GARS
  Gene Name: glycyl-tRNA synthetase
  Uniprot ID: P41250
  ENST ID: ENST00000389266
  CDS Start-End: 242-2461
gcaaatctgttcgctcgcaaccctacctacctctctcccgaaccggagaaaaccttcggcggggtccttccgggttttgtgtcgaatctgcggcggcgacccggcgccgcgtcacgcggtggtgaatgtgcggcagcacgcgcgccgcgtcgtttacgcggcgatttcatcatgctccgagccgggcggcgcgcgccgcttccgtcgccaccctctctggacagcccagggccgcaggctcatgccctctccgcgtccagtgctgcttagaggtgctcgcgccgctctgctgctgctgctgccgccccggctcttagcccgaccctcgctcctgctccgccggtccctcagcgcggcctcctgccccccgatctccttgcccgccgccgcctcccggagcagcatggacggcgcgggggctgaggaggtgctggcacctctgaggctagcagtgcgccagcagggagatcttgtgcgaaaactcaaagaagataaagcaccccaagtagacgtagacaaagcagtggctgagctcaaagcccgcaagagggttctggaagcaaaggagctggcgttacagcccaaagatgatattgtagaccgagcaaaaatggaagataccctgaagaggaggtttttctatgatcaagcttttgctatttatggaggtgttagtggtctgtatgactttgggccagttggctgtgctttgaagaacaatattattcagacctggaggcagcactttatccaagaggaacagatcctggagatcgattgcaccatgctcacccctgagccagttttaaagacctctggccatgtagacaaatttgctgacttcatggtgaaagacgtaaaaaatggagaatgttttcgtgctgaccatctattaaaagctcatttacagaaattgatgtctgataagaagtgttctgtcgaaaagaaatcagaaatggaaagtgttttggcccagcttgataactatggacagcaagaacttgcggatctttttgtgaactataatgtaaaatctcccattactggaaatgatctatcccctccagtgtcttttaacttaatgttcaagactttcattgggcctggaggaaacatgcctgggtacttgagaccagaaactgcacaggggattttcttgaatttcaaacgacttttggagttcaaccaaggaaagttgccttttgctgctgcccagattggaaattcttttagaaatgagatctcccctcgatctggactgatcagagtcagagaattcacaatggcagaaattgagcactttgtagatcccagtgagaaagaccaccccaagttccagaatgtggcagaccttcacctttatttgtattcagcaaaagcccaggtcagcggacagtccgctcggaaaatgcgcctgggagatgctgttgaacagggtgtgattaataacacagtattaggctatttcattggccgcatctacctctacctcacgaaggttggaatatctccagataaactccgcttccggcagcacatggagaatgagatggcccattatgcctgtgactgttgggatgcagaatccaaaacatcctacggttggattgagattgttggatgtgctgatcgttcctgttatgacctctcctgtcatgcacgagccaccaaagtcccacttgtagctgagaaacctctgaaagaacccaaaacagtcaatgttgttcagtttgaacccagtaagggagcaattggtaaggcatataagaaggatgcaaaactggtgatggagtatcttgccatttgtgatgagtgctacattacagaaatggagatgctgctgaatgagaaaggggaattcacaattgaaactgaagggaaaacatttcagttaacaaaagacatgatcaatgtgaagagattccagaaaacactatatgtggaagaagttgttccgaatgtaattgaaccttccttcggcctgggtaggatcatgtatacggtatttgaacatacattccatgtacgagaaggagatgaacagagaacattcttcagtttccctgctgtagttgctccattcaaatgttccgtcctcccactgagccaaaaccaggagttcatgccatttgtcaaggaattatcggaagccctgaccaggcatggagtatctcacaaagtagacgattcctctgggtcaatcggaaggcgctatgccaggactgatgagattggcgtggcttttggtgtcaccattgactttgacacagtgaacaagaccccccacactgcaactctgagggaccgtgactcaatgcggcagataagagcagagatctctgagctgcccagcatagtccaagacctagccaatggcaacatcacatgggctgatgtggaggccaggtatcctctgtttgaagggcaagagactggtaaaaaagagacaatcgaggaatgaggacaattttgacaacttttgaccacttgcgctaataaaaaaaaaaaaaaactactcttatgtccactttacaaaagaaaacagcattgtgattactcccagggaccgtattttatcttcagtggctgcctgattttacccccacaattaaagttgaaggaatcctgaacaaa

SEQ ID NO: 138236 - DNA, 814 bp, Homo sapiens
  Payload ID: 7074
  Gene Symbol: GARS
  Gene Name: glycyl-tRNA synthetase
  ENST ID: ENST00000454308
  CDS Start-End: 82-321
gcgatttcatcatgctccgagccgggcggcgcgcgccgcttccgtcgccaccctctctggacagcccagggccgcaggctcatgccctctccgcgtccagtgctgcttagaggtgctcgcgccgctctgctgctgctgctgccgccccggctcttagcccgaccctcgctcctgctccgccggtccctcagcgcggcctcctgccccccgatctccttgcccgccgccgcctcccggagcagcatggacggcgcgggggctgaggaggtgctggcacctctgaggctagcagtgcgccagcaggccgtttggaaccagtgagccctcagatcgtaaacctgggaaactaagtgttgcggagtgaagtcagccatccttagtatggaatattttgacatttgattttcccgaagggagatcttgtgcgaaaactcaaagaagataaagcaccccaagtagacgtagacaaagcagtggctgagctcaaagcccgcaagagggttctggaagcaaaggagctggcgttacagcccaaagatgatattgtagaccgagcaaaaatggaagataccctgaagaggaggtttttctatgatcaagcttttgctatttatggaggtgttagtggtctgtatgactttgggccagttggctgtgctttgaagaacaatattattcagacctggaggcagcactttatccaagaggaacagatcctggagatcgattgcaccatgctcacccctgagccagttttaaagacctctggccatgtagacaaatttgctgacttcatggtgaaagacgtaaaaaa

SEQ ID NO: 138237 - DNA, 619 bp, Homo sapiens
  Payload ID: 7074
  Gene Symbol: GARS
  Gene Name: glycyl-tRNA synthetase
  ENST ID: ENST00000444666
  CDS Start-End: 1-234
gttgttcagtttgaacccagtaagggagcaattggtaaggcatataagaaggatgcaaaactggtgatggagtatcttgccatttgtgatgagtgctacattacagaaatggagatgctgctgaatgagaaaggggaattcacaattgaaactgaagggaaaacatttcagttaacaaaagacatgatcaatgtgaagagattccagaaaacactatatgaacaaattctgtgaattaggcaatgagtaatttggagcacgtatgaaggatgctgaagtttatttgtggctgaattgaaattcctggaaacggagtagtaatgggtgtttgagaagctactgccagtggaaagatggaagaagttgttccgaatgtaattgaaccttccttcggcctgggtaggatcatgtatacggtatttgaacatacattccatgtacgagaaggagatgaacagagaacattcttcagtttccctgctgtagttgctccattcaaatgttccgtcctcccactgagccaaaaccaggagttcatgccatttgtcaaggaattatcggaagccctgaccaggcatggagtatctcacaaagtagacgattcctctgggtcaatcgg

SEQ ID NO: 138238 - DNA, 324 bp, Homo sapiens
  Payload ID: 7074
  Gene Symbol: GARS
  Gene Name: glycyl-tRNA synthetase
  ENST ID: ENST00000627489
  CDS Start-End: 85-324
gcggcgatttcatcatgctccgagccgggcggcgcgcgccgcttccgtcgccaccctctctggacagcccagggccgcaggctcatgccctctccgcgtccagtgctgcttagaggtgctcgcgccgctctgctgctgctgctgccgccccggctcttagcccgaccctcgctcctgctccgccggtccctcagcgcggcctcctgccccccgatctccttgcccgccgccgcctcccggagcagcatggacggcgcgggggctgaggaggtgctggcacctctgaggctagcagtgcgccagcaggccgtttggaaccagtga

SEQ ID NO: 138239 - DNA, 1809 bp, Homo sapiens
  Payload ID: 7075
  Gene Symbol: GLOD4
  Gene Name: glyoxalase domain containing 4
  Uniprot ID: Q9HC38
  ENST ID: ENST00000301328
  CDS Start-End: 25-966
tgacggctgcgtgcggcgggaatcatggctgctcgcagagctctgcacttcgtattcaaagtgggaaaccgcttccagacggcgcgtttctatcgggacgtcctggggatgaaggtggagtcttgctctgtcgccaggctggagtgcagtggcgcgatctcggctcactgctctgactacacccggataacagaagacagtttctcaaagccttatgatgggaaatggagtaaaacaatggtgggatttgggcctgaggatgatcattttgtcgcagaactgacttacaattatggcgtcggagactacaagcttggcaatgactttatgggaatcacgctcgcttctagccaggctgtcagcaacgccaggaagctggagtggccactgacggaagttgcagaaggtgtttttgaaaccgaggccccgggaggatataagttctatttgcagaatcgcagtctgcctcagtcagatcctgtattaaaagtaactctagcagtgtctgatcttcaaaagtccttgaactactggtgtaatctactgggaatgaaaatttatgaaaaagatgaagaaaagcaaagggctttgctgggctatgctgataaccagtgtaagctggagctacagggcgtcaagggtggggtggaccatgcagcagcttttggaagaattgccttctcttgcccccagaaagagttgccagacttagaagacttgatgaaaagggagaaccagaagattctgactcccctggtgagcctggacaccccagggaaagcaacagtacaggtggtcattctggccgaccctgacggacatgaaatttgctttgtcggggatgaagcatttcgagaactttctaagatggatccagagggaagcaaattgttggatgatgcaatggcagcagataaaagtgacgagtggtttgccaaacacaataaacccaaagcttcaggttaacggaagacatgatgcagagcaagcctctgtgattcctgcccagcacctgtgaggcctgacgtgtcagttcccaataaatgctcttctgatttgtttcccgtacaggcaaggaggcttgggtagtgcagatttgtgtatttcaatctttgaaagctctgatgtaatttagaaatgaaatccaatcatgagtccaggtagagaacgcctgctgtaatctacactgttgctgggactgcgcattctgtatataactgtgttggatgagtgacagatgattgtccagactaggacagcggcatgaacatgactttggttgggattgcggatagttagggttacctctgaatcgtgtagcttttatgagagcagctgtgcaagtgaatccacattaatgccttgtcgtggtgccattcccagcgcctgacgatacgctcttctattgtcttattctggcaggttttgacgttttaaattttttaaagaaattttattccttggaccaaaaggtttggttaaccacccccctcttacttgctttcacattttgagtgtccagaggaaacagaaaggaatgagtgtgtgacgttgctgcacgcctgactctgtgcgagcttctttctgtgtatatattttgttttatttttttccgtgtatatttttaatcccgacagaacatcatgtgagatttctttaaaatggattaaacgatttcttcagcctgaaaaaaaaggttttgaaaatgttttcttgtagttttgtttggttctaaacaacaaataggttttaatcactcgaaatggaattatattgtgtattcattgaataaattttttttgaaagtaa

SEQ ID NO: 138240 - DNA, 2059 bp, Homo sapiens
  Payload ID: 7075
  Gene Symbol: GLOD4
  Gene Name: glyoxalase domain containing 4
  Uniprot ID: Q9HC38
  ENST ID: ENST00000301329
  CDS Start-End: 87-983
gtcggcggctagtgacgtcacggcccgtggcgcccttcgtggactgggctgtacggtgcgcgtgacggctgcgtgcggcgggaatcatggctgctcgcagagctctgcacttcgtattcaaagtgggaaaccgcttccagacggcgcgtttctatcgggacgtcctggggatgaaggttctgcggcatgaggaatttgaagaaggctgcaaagctgcctgtaatgggccttatgatgggaaatggagtaaaacaatggtgggatttgggcctgaggatgatcattttgtcgcagaactgacttacaattatggcgtcggagactacaagcttggcaatgactttatgggaatcacgctcgcttctagccaggctgtcagcaacgccaggaagctggagtggccactgacggaagttgcagaaggtgtttttgaaaccgaggccccgggaggatataagttctatttgcagaatcgcagtctgcctcagtcagatcctgtattaaaagtaactctagcagtgtctgatcttcaaaagtccttgaactactggtgtaatctactgggaatgaaaatttatgaaaaagatgaagaaaagcaaagggctttgctgggctatgctgataaccagtgtaagctggagctacagggcgtcaagggtggggtggaccatgcagcagcttttggaagaattgccttctcttgcccccagaaagagttgccagacttagaagacttgatgaaaagggagaaccagaagattctgactcccctggtgagcctggacaccccagggaaagcaacagtacaggtggtcattctggccgaccctgacggacatgaaatttgctttgtcggggatgaagcatttcgagaactttctaagatggatccagagggaagcaaattgttggatgatgcaatggcagcagataaaagtgacgagtggtttgccaaacacaataaacccaaagcttcaggttaacggaagacatgatgcagagcaagcctctgtgattcctgcccagcacctgtgaggcctgacgtgtcagttcccaataaatgctcttctgatttgtttcccgtacaggcaaggaggcttgggtagtgcagatttgtgtatttcaatctttgaaagctctgatgtaatttagaaatgaaatccaatcatgagtccaggtagagaacgcctgctgtaatctacactgttgctgggactgcgcattctgtatataactgtgttggatgagtgacagatgattgtccagactaggacagcggcatgaacatgactttggttgggattgcggatagttagggttacctctgaatcgtgtagcttttatgagagcagctgtgcaagtgaatccacattaatgccttgtcgtggtgccattcccagcgcctgacgatacgctcttctattgtcttattctggcaggttttgacgttttaaattttttaaagaaattttattccttggaccaaaaggtttggttaaccacccccctcttacttgctttcacattttgagtgtccagaggaaacagaaaggaatgagtgtgtgacgttgctgcacgcctgactctgtgcgagcttctttctgtgtatatattttgttttatttttttccgtgtatatttttaatcccgacagaacatcatgtgagatttctttaaaatggattaaacgatttcttcagcctgaaaaaaaaggttttgaaaatgttttcttgtagttttgtttggttctaaacaacaaataggttttaatcactcgaaatggaattatattgtgtattcattgaataaattttttttgaaagtaagcttctgaaatcaagctgtgataccagtctctaagtctcatcatgtaaagtggtggccaggttcagatttttaaaaataaacttaggagattggaagggattgactcagaggatcctggttcccaaagaacacatagagaattacttgtaaatcgtaacctctgctttcctcccttactggcagggcgtagggcatcgaaattttggttgtatttgagcttatcttcttatag

SEQ ID NO: 138241 - DNA, 2497 bp, Homo sapiens
  Payload ID: 7075
  Gene Symbol: GLOD4
  Gene Name: glyoxalase domain containing 4
  ENST ID: ENST00000536578
  CDS Start-End: 126-1634
cactccagcctgggtgacagaacaagacaaaaaaaaaaaaagatacactgggtaatcactaacccattattccttgtggcgttacgaggtcggaccaatccttgatatcctcaaatttcaccttaatgaggctgacacctttcagcttatcgactggcaactcctttaggtattctagacggctaaagaagaacatttttggcacagctccagccttgagagcgtctgaaatgagcctgcgaccttccagcaggatcttcccttgtttttcccgaaatggcctggactttactattgtcattacactgcctcctgtccccgggataagctttatcgtagcgaagcccagactcttcccaggtgctgggagcgcgggatgcggactcctcgagcggttgtttctctcgttgctcctgggcactggcctcagatggtgcttgcggggctgcttcccaggagcgcgcttctgttccaccacctctccggaaggaaacaccactttcactgggctccgccgcagcgcccggacccagcgcctcgcgcaaggtcccaagcctggaccacctgcagcaacggtcgcacgacaaacctcgcgggtctcaccagcgccgccatgttccctgagacccgggctgcgtcacgaaagcgcgccgtcggcggctagtgacgtcacggcccgtggcgcccttcgtggactgggctgtacggtgcgcgtgacggctgcgtgcggcgggaatcatggctgctcgcagagcctgcacttcgtattcaaagtgggaaaccgcttccagacggcgcgtttctatcgggacgtcctggggatgaaggttctgcggcatgaggaatttgaagaaggctgcaaagctgcctgtaatgggccttatgatgggaaatggagtaaaacaatggtgggatttgggcctgaggatgatcattttgtcgcagaactgacttacaattatggcgtcggagactacaagcttggcaatgactttatgggaatcacgctcgcttctagccaggctgtcagcaacgccaggaagctggagtggccactgacggaagttgcagaaggtgtttttgaaaccgaggccccgggaggatataagttctatttgcagaatcgcagtctgcctcagtcagatcctgtattaaaagtaactctagcagtgtctgatcttcaaaagtccttgaactactggtgtaatctactgggaatgaaaatttatgaaaaagatgaagaaaagcaaagggctttgctgggctatgctgataaccagtgtaagctggagctacagggcgtcaagggtggggtggaccatgcagcagcttttggaagaattgccttctcttgcccccagaaagagttgccagacttagaagacttgatgaaaagggagaaccagaagattctgactcccctggtgagcctggacaccccagggaaagcaacagtacaggtggtcattctggccgaccctgacggacatgaaatttgctttgtcggggatgaagcatttcgagaactttctaagatggatccagagggaagcaaattgttggatgatgcaatggcagcagataaaagtgacgagtggtttgccaaacacaataaacccaaagcttcaggttaacggaagacatgatgcagagcaagcctctgtgattcctgcccagcacctgtgaggcctgacgtgtcagttcccaataaatgctcttctgatttgtttcccgtacaggcaaggaggcttgggtagtgcagatttgtgtatttcaatctttgaaagctctgatgtaatttagaaatgaaatccaatcatgagtccaggtagagaacgcctgctgtaatctacactgttgctgggactgcgcattctgtatataactgtgttggatgagtgacagatgattgtccagactaggacagcggcatgaacatgactttggttgggattgcggatagttagggttacctctgaatcgtgtagcttttatgagagcagctgtgcaagtgaatccacattaatgccttgtcgtggtgccattcccagcgcctgacgatacgctcttctattgtcttattctggcaggttttgacgttttaaattttttaaagaaattttattccttggaccaaaaggtttggttaaccacccccctcttacttgctttcacattttgagtgtccagaggaaacagaaaggaatgagtgtgtgacgttgctgcacgcctgactctgtgcgagcttctttctgtgtatatattttgttttatttttttccgtgtatatttttaatcccgacagaacatcatgtgagatttctttaaaatggattaaacgatttcttcagcctgaaaaaaaaggttttgaaaatgttttcttgtagttttgtttggttctaaacaacaaataggttttaatcactcgaaatggaattatattgtgtattcattgaataaattttttttgaaagtaagcttctgaaatcaagctgtg

SEQ ID NO: 138242 - DNA, 853 bp, Homo sapiens
  Payload ID: 7075
  Gene Symbol: GLOD4
  Gene Name: glyoxalase domain containing 4
  ENST ID: ENST00000575790
  CDS Start-End: 37-216
gtacggtgcgcgtgacggctgcgtgcggcgggaatcatggctgctcgcagagctctgcacttcgtattcaaagtgggaaaccgcttccagacggcgcgtttctatcgggacgtcctggggatgaaggttctgcggcatgaggaatttgaagaaggctgcaaagctgcctgtaatgggtatgataccttgtttcttaaaatctcctttaggctctgactacacccggataacagaagacagtttctcaaagccttatgatgggaaatggagtaaaacaatggtgggatttgggcctgaggatgatcattttgtcgcagaactgacttacaattatggcgtcggagactacaagcttggcaatgactttatgggaatcacgctcgcttctagccaggctgtcagcaacgccaggaagctggagtggccactgacggaagttgcagaaggtgtttttgaaaccgaggccccgggaggatataagttctatttgcagaatcgcagtctgcctcagtcagatcctgtattaaaagtaactctagcagtgtctgatcttcaaaagtccttgaactactggtgtaatctactgggaatgaaaatttatgaaaaagatgaagaaaagcaaagggctttgctgggctatgctgataaccagtgtaagctggagctacagggcgtcaagggtggggtggaccatgcagcagcttttggaagaattgccttctcttgcccccagaaagagttgccagacttagaagacttgatgaaaagggagaaccagaagattctgactcccctggtgagcctggacaccccagggaaagcaacagtacaggtggtcattctggccgaccct

SEQ ID NO: 138243 - DNA, 447 bp, Homo sapiens
  Payload ID: 7075
  Gene Symbol: GLOD4
  Gene Name: glyoxalase domain containing 4
  ENST ID: ENST00000573137
  CDS Start-End: 1-347
ggtgtaatctactgggaatgaaaatttatgaaaaagatgaagaaaagcaaagggctttgctgggctatgctgataaccagttgccagacttagaagacttgatgaaaagggagaaccagaagattctgactcccctggtgagcctggacaccccagggaaagcaacagtacaggtggtcattctggccgaccctgacggacatgaaatttgctttgtcggggatgaagcatttcgagaactttctaagatggatccagagggaagcaaattgttggatgatgcaatggcagcagataaaagtgacgagtggtttgccaaacacaataaacccaaagcttcaggttaacggaagacatgatgcagagcaagcctctgtgattcctgcccagcacctgtgaggcctgacgtgtcagttcccaataaatgctcttctgatttgtttcccg

SEQ ID NO: 138244 - DNA, 1314 bp, Homo sapiens
  Payload ID: 7075
  Gene Symbol: GLOD4
  Gene Name: glyoxalase domain containing 4
  ENST ID: ENST00000574554
  CDS Start-End: 13-243
gcggcgggaatcatggctgctcgcagagctctgcacttcgtattcaaagtgggaaaccgcttccagacggcgcgtttctatcgggacgtcctggggatgaaggccctgcgcggtgttcagcttcaggagcgtggcgagttgccgttggggatcataggccttggagaagggcctaacacgattagtccccgcggtgtgcccacgcacgtcctttcatttaagccactcgtaaacgtttattgagccccgcccttgtggagcttaccgtctaccggaaaagacggttctgcggcatgaggaatttgaagaaggctgcaaagctgcctgtaatgggtatgataccttgtttcttaaaatctcctttaggctctgactacacccggataacagaagacagtttctcaaagccttatgatgggaaatggagtaaaacaatggtgggatttgggcctgaggatgatcattttgtcgcagaactgacttacaattatggcgtcggagactacaagcttggcaatgactttatgggaatcacgctcgcttctagccaggctgtcagcaacgccaggaagctggagtggccactgacggaagttgcagaaggtgtttttgaaaccgaggccccgggaggatataagttctatttgcagaatcgcagtctgcctcagtcagatcctgtattaaaagtaactctagcagtgtctgatcttcaaaagtccttgaactactggtgtaatctactgggaatgaaaatttatgaaaaagatgaagaaaagcaaagggctttgctgggctatgctgataaccagtgtaagctggagctacagggcgtcaagggtggggtggaccatgcagcagcttttggaagaattgccttctcttgcccccagaaagagttgccagacttagaagacttgatgaaaagggagaaccagaagattctgactcccctggtgagcctggacaccccagggaaagcaacagtacaggtggtcattctggccgaccctgacggacatgaaatttgctttgtcggggatgaagcatttcgagaactttctaagatggatccagagggaagcaaattgttggatgatgcaatggcagcagataaaagtgacgagtggtttgccaaacacaataaacccaaagcttcaggttaacggaagacatgatgcagagcaagcctctgtgattcctgcccagcacctgtgaggcctgacgtgtcagttcccaataaatgctcttctgatttgtttcccgtacaggcaaggaggcttgggtagtgcagatttgtgtatttcaatctttgaa

SEQ ID NO: 138245 - DNA, 677 bp, Homo sapiens
  Payload ID: 7075
  Gene Symbol: GLOD4
  Gene Name: glyoxalase domain containing 4
  ENST ID: ENST00000574581
  CDS Start-End: 1-159
atggctgctcgcagagctctgcacttcgtattcaaagtgggaaaccgcttccagacggcgcgtttctatcgggacgtcctggggatgaaggtggagtcttgctctgtcgccaggctggagtgcagtggcgcgatctcggctcactgttctgcggcatgaggaatttgaagaaggctgcaaagctgcctgtaatgggccttatgatgggaaatggagtaaaacaatggtgggatttgggcctgaggatgatcattttgtcgcagaactgacttacaattatggcgtcggagactacaagcttggcaatgactttatgggaatcacgctcgcttctagccaggctgtcagcaacgccaggaagctggagtggccactgacggaagttgcagaaggtgtttttgaaaccgaggccccgggaggatataagttctatttgcagaatcgcagtctgcctcagtcagatcctgtattaaaagtaactctagcagtgtctgatcttcaaaagtccttgaactactggtgtaatctactgggaatgaaaatttatgaaaaagatgaagaaaagcaaagggctttgctgggctatgctgataaccagtgtaagctggagctacagggcgtcaagggtggggtggaccatgcagcagcttttggaagaattgccttctcttgccccc

SEQ ID NO: 138246 - DNA, 585 bp, Homo sapiens
  Payload ID: 7075
  Gene Symbol: GLOD4
  Gene Name: glyoxalase domain containing 4
  ENST ID: ENST00000575528
  CDS Start-End: 1-176
ttatgaaaaagatgaagaaaagcaaagggctttgctgggctatgctgataaccagtgtaagctggagctacagggcgtcaagggtggggtggaccatgcagcagcttttggaagaattgccttctcttgcccccagaaagaggactgacgagggccgtgtcctgagtagtgtgtgacccctggctcacgttgcctctgttttcctcaagttgccagacttagaagacttgatgaaaagggagaaccagaagattctgactcccctggtgagcctggacaccccagggaaagcaacagtacaggtggtcattctggccgaccctgacggacatgaaatttgctttgtcggggatgaagcatttcgagaactttctaagatggatccagagggaagcaaattgttggatgatgcaatggcagcagataaaagtgacgagtggtttgccaaacacaataaacccaaagcttcaggttaacggaagacatgatgcagagcaagcctctgtgattcctgcccagcacctgtgaggcctgacgtgtcagttcccaataaatgctcttctgatttgtttcccgtacaggcaa

SEQ ID NO: 138247 - DNA, 705 bp, Homo sapiens
  Payload ID: 7075
  Gene Symbol: GLOD4
  Gene Name: glyoxalase domain containing 4
  ENST ID: ENST00000576419
  CDS Start-End: 25-705
tgacggctgcgtgcggcgggaatcatggctgctcgcagagctctgcacttcgtattcaaagtgggaaaccgcttccagacggcgcgtttctatcgggacgtcctggggatgaaggttctgcggcatgaggaatttgaagaaggctgcaaagctgcctgtaatgggccttatgatgggaaatggagtaaaacaatggtgggatttgggcctgaggatgatcattttgtcgcagaactgacttacaattatggcgtcggagactacaagcttggcaatgactttatgggaatcacgctcgcttctagccaggctgtcagcaacgccaggaagctggagtggccactgacggaagttgcagaaggtgtttttgaaaccgaggccccgggaggatataagttctatttgcagaatcgcagtctgcctcagtcagatcctgtattaaaagtaactctagcagtgtctgatcttcaaaagtccttgaactactggtgtaatctactgggaatgaaaatttatgaaaaagatgaagaaaagcaaagggctttgctgggctatgctgataaccagtgtaagctggagctacagggcgtcaagggtggggtggaccatgcagcagcttttggaagaattgccttctcttgcccccagaaagaggcaatggcagcagataaaagtgacgagtggtttgccaaacacaataaaccc

SEQ ID NO: 138248 - DNA, 1063 bp, Homo sapiens
  Payload ID: 7075
  Gene Symbol: GLOD4
  Gene Name: glyoxalase domain containing 4
  ENST ID: ENST00000575851
  CDS Start-End: 26-136
gtgacggctgcgtgcggcgggaatcatggctgctcgcagagctctgcacttcgtattcaaagtgggaaaccgcttccagacggcgcgtttctatcgggacgtcctggggatgaagtctgtgctaaagacgctgtgagcagtactagcaacacttcacaatttattctaaatctcacaccaggttctgcggcatgaggaatttgaagaaggctgcaaagctgcctgtaatgggccttatgatgggaaatggagtaaaacaatggtgggatttgggcctgaggatgatcattttgtcgcagaactgacttacaattatggcgtcggagactacaagcttggcaatgactttatgggaatcacgctcgcttctagccaggctgtcagcaacgccaggaagctggagtggccactgacggaagttgcagaaggtgtttttgaaaccgaggccccgggaggatataagttctatttgcagaatcgcagtctgcctcagtcagatcctgtattaaaagtaactctagcagtgtctgatcttcaaaagtccttgaactactggtgtaatctactgggaatgaaaatttatgaaaaagatgaagaaaagcaaagggctttgctgggctatgctgataaccagtgtaagctggagctacagggcgtcaagggtggggtggaccatgcagcagcttttggaagaattgccttctcttgcccccagaaagagttgccagacttagaagacttgatgaaaagggagaaccagaagattctgactcccctggtgagcctggacaccccagggaaagcaacagtacaggtggtcattctggccgaccctgacggacatgaaatttgctttgtcggggatgaagcatttcgagaactttctaagatggatccagagggaagcaaattgttggatgatgcaatggcagcagataaaagtgacgagtggtttgccaaacacaataaacccaaagcttcaggttaacggaagacatgatgcagagcaagcctctgtgattcctgcccagcacctgtgaggcctgacgtgtcagttcccaat

SEQ ID NO: 138249 - DNA, 428 bp, Homo sapiens
  Payload ID: 7075
  Gene Symbol: GLOD4
  Gene Name: glyoxalase domain containing 4
  ENST ID: ENST00000572220
  CDS Start-End: 22-132
cggctgcgtgcggcgggaatcatggctgctcgcagagctctgcacttcgtattcaaagtgggaaaccgcttccagacggcgcgtttctatcgggacgtcctggggatgaaggctctgactacacccggataacagaagacagtttctcaaagccttatgatgggaaatggagtaaaacaatggtgggatttgggcctgaggatgatcattttgtcgcagaactgacttacaattatggcgtcggagactacaagcttggcaatgactttatgggaatcacgctcgcttctagccaggctgtcagcaacgccaggaagctggagtggccactgacggaagttgcagaaggtgtttttgaaaccgaggccccgggaggatataagttctatttgcagaatcgcagtctgcctcagtcagatcctgtatta

SEQ ID NO: 138250 - DNA, 562 bp, Homo sapiens
  Payload ID: 7075
  Gene Symbol: GLOD4
  Gene Name: glyoxalase domain containing 4
  ENST ID: ENST00000576670
  CDS Start-End: 1-205
tttctatcgggacgtcctggggatgaaggtgcaggccggggccgacaggggctggcgcgcgaggctggaaccggcgcccgagccggccctggcggagggaggggaaaatgggtgtgtcgtgaacctaagccggagggtgtccgaccttaggccctgcgcggtgttcagcttcaggagcgtggcgagttgccgttggggatcataggccttggagaagggcctaacacgattagtccccgcggtgtgcccacgcacgtcctttcatttaagccactcgtaaacgtttattgagccccgcccttgtggagcttaccgtctaccggaaaagacggttctgcggcatgaggaatttgaagaaggctgcaaagctgcctgtaatgggtatgataccttgtttcttaaaatctcctttaggctctgactacacccggataacagaagacagtttctcaaagccttatgatgggaaatggagtaaaacaatggtgggatttgggcctgaggatgatcattttgtcgcagaactgacttacaattatggcgtcggagactacaagcttgg

SEQ ID NO: 138251 - DNA, 111 bp, Homo sapiens
  Payload ID: 7075
  Gene Symbol: GLOD4
  Gene Name: glyoxalase domain containing 4
  ENST ID: ENST00000628529
  CDS Start-End: 1-111
atggctgctcgcagagctctgcacttcgtattcaaagtgggaaaccgcttccagacggcgcgtttctatcgggacgtcctggggatgaaggctctgactacacccggataa

SEQ ID NO: 138252 - DNA, 111 bp, Homo sapiens
  Payload ID: 7075
  Gene Symbol: GLOD4
  Gene Name: glyoxalase domain containing 4
  ENST ID: ENST00000625892
  CDS Start-End: 1-111
atggctgctcgcagagctctgcacttcgtattcaaagtgggaaaccgcttccagacggcgcgtttctatcgggacgtcctggggatgaagtctgtgctaaagacgctgtga

SEQ ID NO: 138253 - DNA, 735 bp, Homo sapiens
  Payload ID: 7076
  Gene Symbol: GLOD5
  Gene Name: glyoxalase domain containing 5
  Uniprot ID: A6NK44
  ENST ID: ENST00000303227
  CDS Start-End: 42-524
ggattgtcgggaggaccctgggcaaagacgcctaccctgccatgctgcgccatctgccctccaggctgccagtcaagatgtggggcaggactttggagaaacagtcatggagggacagcagtcagacccctcccccatgtcttatccgtagacttgaccacatcgtgatgacggtgaagagcatcaaagacaccaccatgttttattccaagatcctgggcatggaggtcatgacttttaaggaagaccggaaagcactgtgttttggagaccagaaatttaacctccacgaggtgggaaaggaatttgaacccaaagccgctcacccagttcctggctccctggacatatgtctgatcacagaggtgcctttggaggaaatgatccagcacctcaaggcttgtgatgtccctattgaggaggggccagtccccagaacaggggcaaaagggcctatcatgtccatctacttccgagaccccgacagaaatctgattgaggtgtccaactacatctcctcgtgatggaggctggacctcctccattctgtcccccttgatgtcgccctctcctttccttcctgcaaacccccacccaggcccagagatctccaaagactgaggacttaggcacttcacacatcctgctgaggggggacccaagacaggtttgggaccaaacctacatgtctgtatgtcatcaaagttggcctaataaatgcataacctctcaatg

SEQ ID NO: 138254 - DNA, 594 bp, Homo sapiens
  Payload ID: 7076
  Gene Symbol: GLOD5
  Gene Name: glyoxalase domain containing 5
  ENST ID: ENST00000445229
  CDS Start-End: 1-383
ttatccgtagacttgaccacatcgtgatgacggtgaagagcatcaaagacaccaccatgttttattccaagatcctgggcatggaggtcatgacttttaaggaagaccggaaagcactgtgttttggagaccagaaatttaacctccacgaggtgggaaaggaatttgaacccaaagccgctcacccagttcctggctccctggacatatgtctgatcacagaggtgcctttggaggaaatgatccagcacctcaaggcttgtgatgtccctattgaggaggggccagtccccagaacaggggcaaaagggcctatcatgtccatctacttccgagaccccgacagaaatctgattgaggtgtccaactacatctcctcgtgatggaggctggacctcctccattctgtcccccttgatgtcgccctctcctttccttcctgcaaacccccacccaggcccagagatctccaaagactgaggacttaggcacttcacacatcctgctgaggggggacccaagacaggtttgggaccaaacctacatgtctgtatgtcatcaaagttggcctaataaatgcataacctctcaatg

SEQ ID NO: 138255 - DNA, 2012 bp, Homo sapiens
  Payload ID: 7077
  Gene Symbol: GLO1
  Gene Name: glyoxalase I
  Uniprot ID: Q04760
  ENST ID: ENST00000373365
  CDS Start-End: 88-642
ctagttaaggcggcacagggccgaggcgtagtgtgggtgactcctccgttccttgggtcccgtcgtctgtgatactgcagcgcagccatggcagaaccgcagcccccgtccggcggcctcacggacgaggccgccctcagttgctgctccgacgcggaccccagtaccaaggattttctattgcagcagaccatgctacgagtgaaggatcctaagaagtcactggatttttatactagagttcttggaatgacgctaatccaaaaatgtgattttcccattatgaagttttcactctacttcttggcttatgaggataaaaatgacatccctaaagaaaaagatgaaaaaatagcctgggcgctctccagaaaagctacacttgagctgacacacaattggggcactgaagatgatgagacccagagttaccacaatggcaattcagaccctcgaggattcggtcatattggaattgctgttcctgatgtatacagtgcttgtaaaaggtttgaagaactgggagtcaaatttgtgaagaaacctgatgatggtaaaatgaaaggcctggcatttattcaagatcctgatggctactggattgaaattttgaatcctaacaaaatggcaaccttaatgtagtgctgtgagaattctcctttgagatttcagaagaaaggaaacaatgtgattcaagatatttacataccagaagcatctaggactgatggatcactgtcccgattcaaattattcttcagtccatttccccttcctatttcagctgttccttttcacctaactgttcagtcattctggttttcaagcagtgctttatctcatgtccttgaatatagttgtgtaactttattttttaggtaataattagaacagttcccttcagaggctgcatttgccttcttctgccacctaaatattacttcccttcaaatctgcctttgaatcatcatttttaaaaaaaaattaacatgtttttgttgtagttatcttctggggtttcaattcctcagaaacaacttttttcacaacggaaaggaaagaacactagtgttctttcagtaaagtacaaagtgtttattttacaaaagagtaggtactcttgagagcaattcaaatcatgctgacaaggatactgatagaaaaagtgatttcttcttattataaagtacatttaaagttcaaggactaaccttatttatttgggaaaggggaggaggaaggaaatgatatggtacccagacactgggctaggctgcaactttatctcatttaatactcccagctgtcatgtgagaaagaaagcaggctaggcatgtgaaatcactttcatggattattaatggatttaagagggcatcaatcagctcaactcaagatttcataatcatttttagtatttagattgtgcctcaaagttgtagtacctcacaatacctccactggtttcctgttgtaaaaaccttcagtgagtttgaccattgtgctcttggctcttgggctggagtaccgtggtgagggagtaaacactagaagtctttagtacaaaactgctctagggacacctggtgattcctacacaagtgatgtttatatttctcataaagagtcttccctatcccaaggtcttcatgatgccagtagccatatatgataaattatgttcagtgataacttagttatcagaaatcagctcagtggtcttccccgccatgattcacatttgatgagtttttaaaaatcaaagtgattttgaaaatctctaatggctcagaaaataaaaacatccagtttgtggatgactatatttagatttctctagactctagtggaagacctttggaaaggccatgccaaccgtgcttgtactgctagaagcactttatgtttcctttttgggtgaaatggatttatgtgagtgctttaaacaaatagcaatacttatagactgaaataaaatgaaacttcaaataagactatgtttaatttgtaaa

SEQ ID NO: 138256 - DNA, 3772 bp, Homo sapiens
  Payload ID: 7078
  Gene Symbol: GLYR1
  Gene Name: glyoxylate reductase 1 homolog (Arabidopsis)
  Uniprot ID: Q49A26
  ENST ID: ENST00000321919
  CDS Start-End: 78-1739
ggcccactccaatgggcggcgccggggcgacttgctgttcccggcggcccgtgcgtcggcggtggttgggtggtaagatggcggctgtgagtctgcggctcggcgacttggtgtgggggaaactcggccgatatcctccttggccaggaaagattgttaatccaccaaaggacttgaagaaacctcgcggaaagaaatgcttctttgtgaaattttttggaacagaagatcatgcctggatcaaagtggaacagctgaagccatatcatgctcataaagaggaaatgataaaaattaacaagggtaaacgattccagcaagcggtagatgctgtcgaagagttcctcaggagagccaaagggaaagaccagacgtcatcccacaattcttctgatgacaagaatcgacgtaattccagtgaggagagaagtaggccaaactcaggtgatgagaagcgcaaacttagcctgtctgaagggaaggtgaagaagaacatgggagaaggaaagaagagggtgtcttcaggctcttcagagagaggctccaaatcccctctgaaaagagcccaagagcaaagtccccggaagcggggtcggcccccaaaggatgagaaggatctcaccatcccggagtctagtaccgtgaaggggatgatggccggaccgatggccgcgtttaaatggcagccaaccgcaagcgagcctgttaaagatgcagatcctcatttccatcatttcctgctaagccaaacagagaagccagctgtctgttaccaggcaatcacgaagaagttgaaaatatgtgaagaggaaactggctccacctccatccaggcagctgacagcacagccgtgaatggcagcatcacacccacagacaaaaagataggatttttgggccttggtctcatgggaagtggaatcgtctccaacttgctaaaaatgggtcacacagtgactgtctggaaccgcactgcagagaaatgtgatttgttcatccaggagggggcccgtctgggaagaacccccgctgaagtcgtctcaacctgcgacatcactttcgcctgcgtgtcggatcccaaggcggccaaggacctggtgctgggccccagtggtgtgctgcaagggatccgccctgggaagtgctacgtggacatgtcaacagtggacgctgacaccgtcactgagctggcccaggtgattgtgtccaggggggggcgctttctggaagcccccgtctcagggaatcagcagctgtctaatgacgggatgttggtgatcttagcggctggagacaggggcttatatgaggactgcagcagctgcttccaggcgatggggaagacctccttcttcctaggtgaagtgggcaatgcagccaagatgatgctgatcgtgaacatggtccaagggagcttcatggccactattgccgaggggctgaccctggcccaggtgacaggccagtcccagcagacactcttggacatcctcaatcagggacagttggccagcatcttcctggaccagaagtgccaaaatatcctgcaaggaaactttaagcctgatttctacctgaaatacattcagaaggatctccgcttagccattgcgctgggtgatgcggtcaaccatccgactcccatggcagctgcagcaaatgaggtgtacaaaagagccaaggcgctggaccagtctgacaacgatatgtccgccgtgtaccgagcctacatacactaagctgtcgacaccccgccctcacccctccaatcccccctctgaccccctcttcctcacatggggtcgggggcctgggagttcattctggaccagcccacctatctccatttccttttatacagactttgagacttgccatcagcacagcacacagcagcacccttcccctgaggccggtggggaggggacaagtgtcagcaggattggcgtgtgggaaagctcttgagctgggcactggccccccggacgaggtggctgtgtgttcacacacacacacacacacacacacacacacacacacaggctctcgccccaggatagaagctgcccagaaactgctgcctggctttttttcttccgagcttgtcttatctcaaaccccttccagtcaaggaactagaatcagcaacgagagttggaagccttcccacagcttcccccagagcgaagaggctgtagtcatgtccccatcccccactggattccctacaaggagaggccttgggcccagatgagccagtacagactccagacagaggggcccttggggccctccaacctcaggtgatgagctgagaaagatgttcacgtctaagcgtccagtgtgcacccagcgctccatagacgcctttgtgaactgaaaagagactggcagagtcccgagaagatggggccctggctttccagggagtgcagcaagcagccggcctgcaggtgagcatggaggcccggccctcaccgcctcgaagccatgccccagatgccactgccacagcgggcgctcgctcctccctaggctgttttagtatttggatttgcattccatcccttgggagggagtcctcagggccactagtgatgagccaagaggagtgggggttgggggcgctcctttctgtttccgttaggccacagactcttcacctggctctgaagagccactcttacctcggtcccctcccagtggtcccaccttctccaccctgccctgccaagtcccctgcatgcccaccgctctccatcctccctcctctccctcttcctcccgtggagacagtatttctttctgtctgtccctttggcccagacccagcctgaccaacgatgagcatttcttaggctcagctcttgatacggaaacgagtgtcttcactccagccagcatcatggtcttcggtgcttcccgggcccggggtctgtcgggagggaagagaactgggcctgacctacctgaactgactggccctccgaggtgggtctgggacatcctagaggccctacatttgtccttggataggggaccggggggggcttggaatgttgcaaaaaaaaaagttacccaagggatgtcagttttttatccctctgcatgggttggattttccaaaatcataatttgcagaaggaaggccagcatttacgatgcaatatgtaattatatatagggtggccacactagggcggggtccttcccccctcacagctttggcccctttcagagattagaaactgggttagaggattgcagaagacgagtggggggagggcagggaagatgcctgtcgggtttttagcacagttcatttcactgggattttgaagcatttctgtctgaacacaaagcctgttctagtcctggcggaacacactgggggtgggggcgggggaagatgcggtaatgaaaccggttagtcaattttgtcttaatattgttgacaattctgtaaagttcctttttatgaatatttctgtttaagctatttcacctttcttttgaaatccttcccttttaaggagaaaatgtgacacttgtgaaaaagcttgtaagaaagcccctcccttttttctttaaacctttaaatgacaaatctaggtaattaaggttgtgaatttttatttttgctttgtttttaatgaacatttgtctttcagaataggattgtgtgataatgtttaaatggcaaaaacaaaacatgattttgtgcaattaacaaagctactgcaagaaaaataaaacacttcttggtaacaca

SEQ ID NO: 138257 - DNA, 3466 bp, Homo sapiens
  Payload ID: 7078
  Gene Symbol: GLYR1
  Gene Name: glyoxylate reductase 1 homolog (Arabidopsis)
  Uniprot ID: Q49A26
  ENST ID: ENST00000436648
  CDS Start-End: 15-1433
ggttgggtggtaagatggcggctgtgagtctgcggctcggcgacttggtgtgggggaaactcggccgatatcctccttggccaggaaagattgttaatccaccaaaggacttgaagaaacctcgcggaaagaaatgcttctttgtgaaattttttggaacagaagatcatgcctggatcaaagtggaacagctgaagccatatcatgctcataaagaggaaatgataaaaattaacaagggtaaacgattccagcaagcggtagatgctgtcgaagagttcctcaggagagccaaagggaaagaccaggatctcaccatcccggagtctagtaccgtgaaggggatgatggccggaccgatggccgcgtttaaatggcagccaaccgcaagcgagcctgttaaagatgcagatcctcatttccatcatttcctgctaagccaaacagagaagccagctgtctgttaccaggcaatcacgaagaagttgaaaatatgtgaagaggaaactggctccacctccatccaggcagctgacagcacagccgtgaatggcagcatcacacccacagacaaaaagataggatttttgggccttggtctcatgggaagtggaatcgtctccaacttgctaaaaatgggtcacacagtgactgtctggaaccgcactgcagagaaatgtgatttgttcatccaggagggggcccgtctgggaagaacccccgctgaagtcgtctcaacctgcgacatcactttcgcctgcgtgtcggatcccaaggcggccaaggacctggtgctgggccccagtggtgtgctgcaagggatccgccctgggaagtgctacgtggacatgtcaacagtggacgctgacaccgtcactgagctggcccaggtgattgtgtccaggggggggcgctttctggaagcccccgtctcagggaatcagcagctgtctaatgacgggatgttggtgatcttagcggctggagacaggggcttatatgaggactgcagcagctgcttccaggcgatggggaagacctccttcttcctaggtgaagtgggcaatgcagccaagatgatgctgatcgtgaacatggtccaagggagcttcatggccactattgccgaggggctgaccctggcccaggtgacaggccagtcccagcagacactcttggacatcctcaatcagggacagttggccagcatcttcctggaccagaagtgccaaaatatcctgcaaggaaactttaagcctgatttctacctgaaatacattcagaaggatctccgcttagccattgcgctgggtgatgcggtcaaccatccgactcccatggcagctgcagcaaatgaggtgtacaaaagagccaaggcgctggaccagtctgacaacgatatgtccgccgtgtaccgagcctacatacactaagctgtcgacaccccgccctcacccctccaatcccccctctgaccccctcttcctcacatggggtcgggggcctgggagttcattctggaccagcccacctatctccatttccttttatacagactttgagacttgccatcagcacagcacacagcagcacccttcccctgaggccggtggggaggggacaagtgtcagcaggattggcgtgtgggaaagctcttgagctgggcactggccccccggacgaggtggctgtgtgttcacacacacacacacacacacacacacacacacacacaggctctcgccccaggatagaagctgcccagaaactgctgcctggctttttttcttccgagcttgtcttatctcaaaccccttccagtcaaggaactagaatcagcaacgagagttggaagccttcccacagcttcccccagagcgaagaggctgtagtcatgtccccatcccccactggattccctacaaggagaggccttgggcccagatgagccagtacagactccagacagaggggcccttggggccctccaacctcaggtgatgagctgagaaagatgttcacgtctaagcgtccagtgtgcacccagcgctccatagacgcctttgtgaactgaaaagagactggcagagtcccgagaagatggggccctggctttccagggagtgcagcaagcagccggcctgcaggtgagcatggaggcccggccctcaccgcctcgaagccatgccccagatgccactgccacagcgggcgctcgctcctccctaggctgttttagtatttggatttgcattccatcccttgggagggagtcctcagggccactagtgatgagccaagaggagtgggggttgggggcgctcctttctgtttccgttaggccacagactcttcacctggctctgaagagccactcttacctcggtcccctcccagtggtcccaccttctccaccctgccctgccaagtcccctgcatgcccaccgctctccatcctccctcctctccctcttcctcccgtggagacagtatttctttctgtctgtccctttggcccagacccagcctgaccaacgatgagcatttcttaggctcagctcttgatacggaaacgagtgtcttcactccagccagcatcatggtcttcggtgcttcccgggcccggggtctgtcgggagggaagagaactgggcctgacctacctgaactgactggccctccgaggtgggtctgggacatcctagaggccctacatttgtccttggataggggaccggggggggcttggaatgttgcaaaaaaaaaagttacccaagggatgtcagttttttatccctctgcatgggttggattttccaaaatcataatttgcagaaggaaggccagcatttacgatgcaatatgtaattatatatagggtggccacactagggcggggtccttcccccctcacagctttggcccctttcagagattagaaactgggttagaggattgcagaagacgagtggggggagggcagggaagatgcctgtcgggtttttagcacagttcatttcactgggattttgaagcatttctgtctgaacacaaagcctgttctagtcctggcggaacacactgggggtgggggcgggggaagatgcggtaatgaaaccggttagtcaattttgtcttaatattgttgacaattctgtaaagttcctttttatgaatatttctgtttaagctatttcacctttcttttgaaatccttcccttttaaggagaaaatgtgacacttgtgaaaaagcttgtaagaaagcccctcccttttttctttaaacctttaaatgacaaatctaggtaattaaggttgtgaatttttatttttgctttgtttttaatgaacatttgtctttcagaataggattgtgtgataatgtttaaatggcaaaaacaaaacatgattttgtgcaattaacaaagctactgcaagaaaaataaaacacttcttggtaacaca

SEQ ID NO: 138258 - DNA, 897 bp, Homo sapiens
  Payload ID: 7078
  Gene Symbol: GLYR1
  Gene Name: glyoxylate reductase 1 homolog (Arabidopsis)
  ENST ID: ENST00000587936
  CDS Start-End: 1-114
gagggggcccgtctgggaagaacccccgctgaagtcgtctcaacctgcgacatcactttcgcctgcgtgtcggatcccaaggcggccaaggacctgatagaaatcaggaaatgagccaaaacagcagcaggattctgatctgaggtctgtagggctcctgagcatctgcccgggagcctgggctattgcttctcccttgtgtccccacagctggtgctgggccccagtggtgtgctgcaagggatccgccctgggaagtgctacgtggacatgtcaacagtggacgctgacaccgtcactgagctggcccaggtgattgtgtccaggggggggcgctttctggaagcccccgtctcagggaatcagcagctgtctaatgacgggatgttggtgatcttagcggctggagacaggggcttatatgaggactgcagcagctgcttccaggcgatggggaagacctccttcttcctaggtaacacgcctgcacctgtcaggcctggagcctggggccacatctcctctgtttcacactgatgacagcgtcagtcccacacggcctttctgccggggaccctggggaagatgcggtaatgaaaccggttagtcaattttgtcttaatattgttgacaattctgtaaagttcctttttatgaatatttctgtttaagctatttcacctttcttttgaaatccttcccttttaaggagaaaatgtgacacttgtgaaaaagcttgtaagaaagcccctcccttttttctttaaacctttaaatgacaaatctaggtaattaaggttgtgaatttttatttttgctttgtttttaatgaacatttgtctttcagaataggattgtgtgataatgtttaaatggcaaaaacaaaacatgattttg

SEQ ID NO: 138259 - DNA, 3527 bp, Homo sapiens
  Payload ID: 7078
  Gene Symbol: GLYR1
  Gene Name:: glyoxylate reductase 1 homolog (Arabidopsis)
  ENST ID: ENST00000588732
  CDS Start-End: 7-165
ggtaagatggcggctgtgagtctgcggctcggcgacttggtgtgggggaaactcggccgatatcctccttggccaggaaagattgttaatccaccaaaggacttgaagaaacctcgcggaaagaaatgcttctttgtgaaattttttggaacagaagatcaatagacccagccccatttctctatcacaagccagcttagcagcctgtggtggcagtatttcaaggagatcgctggcctggagctgtggagccagagcttctggaagagggaatgttcttagaactccatggatttaaaaagaagatttggccgggcatggtgcctcaggcctgcaatcccagtactttgggaggccaagtgcctggatcaaagtggaacagctgaagccatatcatgctcataaagaggaaatgataaaaattaacaagggtaaacgattccagcaagcggtagatgctgtcgaagagttcctcaggagagccaaagggaaagaccagacgtcatcccacaattcttctgatgacaagaatcgacgtaattccagtgaggagagaagtaggccaaactcaggtgatgagaagcgcaaacttagcctgtctgaagggaaggtgaagaagaacatgggagaaggaaagaagagggtgtcttcaggctcttcagagagaggctccaaatcccctctgaaaagagcccaagagcaaagtccccggaagcggggtcggcccccaaaggatgagaaggatctcaccatcccggagtctagtaccgtgaaggggatgatggccggaccgatggccgcgtttaaatggcagccaaccgcaagcgagcctgttaaagatgcagatcctcatttccatcatttcctgctaagccaaacagagaagccagctgtctgttaccaggcaatcacgaagaagttgaaaatatgtgaagaggaaactggctccacctccatccaggcagctgacagcacagccgtgaatggcagcatcacacccacagacaaaaagataggatttttgggccttggtctcatgggaagtggaatcgtctccaacttgctaaaaatgggtcacacagtgactgtctggaaccgcactgcagagaaatgtgatttgttcatccaggagggggcccgtctgggaagaacccccgctgaagtcgtctcaacctgcgacatcactttcgcctgcgtgtcggatcccaaggcggccaaggacctggtgctgggccccagtggtgtgctgcaagggatccgccctgggaagtgctacgtggacatgtcaacagtggacgctgacaccgtcactgagctggcccaggtgattgtgtccaggggggggcgctttctggaagcccccgtctcagggaatcagcagctgtctaatgacgggatgttggtgatcttagcggctggagacaggggcttatatgaggactgcagcagctgcttccaggcgatggggaagacctccttcttcctaggtgaagtgggcaatgcagccaagatgatgctgatcgtgaacatggtccaagggagcttcatggccactattgccgaggggctgaccctggcccaggtgacaggccagtcccagcagacactcttggacatcctcaatcagggacagttggccagcatcttcctggaccagaagtgccaaaatatcctgcaaggaaactttaagcctgatttctacctgaaatacattcagaaggatctccgcttagccattgcgctgggtgatgcggtcaaccatccgactcccatggcagctgcagcaaatgaggtgtacaaaagagccaaggcgctggaccagtctgacaacgatatgtccgccgtgtaccgagcctacatacactaagctgtcgacaccccgccctcacccctccaatcccccctctgaccccctcttcctcacatggggtcgggggcctgggagttcattctggaccagcccacctatctccatttccttttatacagactttgagacttgccatcagcacagcacacagcagcacccttcccctgaggccggtggggaggggacaagtgtcagcaggattggcgtgtgggaaagctcttgagctgggcactggccccccggacgaggtggctgtgtgttcacacacacacacacacacacacacacacacacacacaggctctcgccccaggatagaagctgcccagaaactgctgcctggctttttttcttccgagcttgtcttatctcaaaccccttccagtcaaggaactagaatcagcaacgagagttggaagccttcccacagcttcccccagagcgaagaggctgtagtcatgtccccatcccccactggattccctacaaggagaggccttgggcccagatgagccagtacagactccagacagaggggcccttggggccctccaacctcaggtgatgagctgagaaagatgttcacgtctaagcgtccagtgtgcacccagcgctccatagacgcctttgtgaactgaaaagagactggcagagtcccgagaagatggggccctggctttccagggagtgcagcaagcagccggcctgcagacccagcctgaccaacgatgagcatttcttaggctcagctcttgatacggaaacgagtgtcttcactccagccagcatcatggtcttcggtgcttcccgggcccggggtctgtcgggagggaagagaactgggcctgacctacctgaactgactggccctccgaggtgggtctgggacatcctagaggccctacatttgtccttggataggggaccggggggggcttggaatgttgcaaaaaaaaaagttacccaagggatgtcagttttttatccctctgcatgggttggattttccaaaatcataatttgcagaaggaaggccagcatttacgatgcaatatgtaattatatatagggtggccacactagggcggggtccttcccccctcacagctttggcccctttcagagattagaaactgggttagaggattgcagaagacgagtggggggagggcagggaagatgcctgtcgggtttttagcacagttcatttcactgggattttgaagcatttctgtctgaacacaaagcctgttctagtcctggcggaacacactgggggtgggggcgggggaagatgcggtaatgaaaccggttagtcaattttgtcttaatattgttgacaattctgtaaagttcctttttatgaatatttctgtttaagctatttcacctttcttttgaaatccttcccttttaaggagaaaatgtgacacttgtgaaaaagcttgtaagaaagcccctcccttttttctttaaacctttaaatgacaaatctaggtaattaaggttgtgaatttttatttttgctttgtttttaatgaacatttgtctttcagaataggattgtgtgataatgtttaaatggcaaaaacaaaacatgattttgtgcaattaacaaagctactgcaagaaaaataaaacacttcttggtaacaca

SEQ ID NO: 138260 - DNA, 3606 bp, Homo sapiens
  Payload ID: 7078
  Gene Symbol: GLYR1
  Gene Name: glyoxylate reductase 1 homolog (Arabidopsis)
  ENST ID: ENST00000589389
  CDS Start-End: 1-1573
ggggaaactcggccgatatcctccttggccaggaaagattgttaatccaccaaaggacttgaagaaacctcgcggaaagaaatgcttctttgtgaaattttttggaacagaagatcatgcctggatcaaagtggaacagctgaagccatatcatgctcataaagaggaaatgataaaaattaacaagggtaaacgattccagcaagcggtagatgctgtcgaagagttcctcaggagagccaaagggaaagaccagacgtcatcccacaattcttctgatgacaagaatcgacgtaattccagtgaggagagaagtaggccaaactcaggtgatgagaagcgcaaacttagcctgtctgaagggaaggtgaagaagaacatgggagaaggaaagaagagggtgtcttcaggctcttcagagagaggctccaaatcccctctgaaaagagcccaagagcaaagtccccggaagcggggtcggcccccaaaggatgagaaggatctcaccatcccggagtctagtaccgtgaaggggatgatggccggaccgatggccgcgtttaaatggcagccaaccgcaagcgagcctgttaaagatgcagatcctcatttccatcatttcctgctaagccaaacagagaaggaaactggctccacctccatccaggcagctgacagcacagccgtgaatggcagcatcacacccacagacaaaaagataggatttttgggccttggtctcatgggaagtggaatcgtctccaacttgctaaaaatgggtcacacagtgactgtctggaaccgcactgcagagaaatgtgatttgttcatccaggagggggcccgtctgggaagaacccccgctgaagtcgtctcaacctgcgacatcactttcgcctgcgtgtcggatcccaaggcggccaaggacctggtgctgggccccagtggtgtgctgcaagggatccgccctgggaagtgctacgtggacatgtcaacagtggacgctgacaccgtcactgagctggcccaggtgattgtgtccaggggggggcgctttctggaagcccccgtctcagggaatcagcagctgtctaatgacgggatgttggtgatcttagcggctggagacaggggcttatatgaggactgcagcagctgcttccaggcgatggggaagacctccttcttcctaggtgaagtgggcaatgcagccaagatgatgctgatcgtgaacatggtccaagggagcttcatggccactattgccgaggggctgaccctggcccaggtgacaggccagtcccagcagacactcttggacatcctcaatcagggacagttggccagcatcttcctggaccagaagtgccaaaatatcctgcaaggaaactttaagcctgatttctacctgaaatacattcagaaggatctccgcttagccattgcgctgggtgatgcggtcaaccatccgactcccatggcagctgcagcaaatgaggtgtacaaaagagccaaggcgctggaccagtctgacaacgatatgtccgccgtgtaccgagcctacatacactaagctgtcgacaccccgccctcacccctccaatcccccctctgaccccctcttcctcacatggggtcgggggcctgggagttcattctggaccagcccacctatctccatttccttttatacagactttgagacttgccatcagcacagcacacagcagcacccttcccctgaggccggtggggaggggacaagtgtcagcaggattggcgtgtgggaaagctcttgagctgggcactggccccccggacgaggtggctgtgtgttcacacacacacacacacacacacacacacacacacacaggctctcgccccaggatagaagctgcccagaaactgctgcctggctttttttcttccgagcttgtcttatctcaaaccccttccagtcaaggaactagaatcagcaacgagagttggaagccttcccacagcttcccccagagcgaagaggctgtagtcatgtccccatcccccactggattccctacaaggagaggccttgggcccagatgagccagtacagactccagacagaggggcccttggggccctccaacctcaggtgatgagctgagaaagatgttcacgtctaagcgtccagtgtgcacccagcgctccatagacgcctttgtgaactgaaaagagactggcagagtcccgagaagatggggccctggctttccagggagtgcagcaagcagccggcctgcaggtgagcatggaggcccggccctcaccgcctcgaagccatgccccagatgccactgccacagcgggcgctcgctcctccctaggctgttttagtatttggatttgcattccatcccttgggagggagtcctcagggccactagtgatgagccaagaggagtgggggttgggggcgctcctttctgtttccgttaggccacagactcttcacctggctctgaagagccactcttacctcggtcccctcccagtggtcccaccttctccaccctgccctgccaagtcccctgcatgcccaccgctctccatcctccctcctctccctcttcctcccgtggagacagtatttctttctgtctgtccctttggcccagacccagcctgaccaacgatgagcatttcttaggctcagctcttgatacggaaacgagtgtcttcactccagccagcatcatggtcttcggtgcttcccgggcccggggtctgtcgggagggaagagaactgggcctgacctacctgaactgactggccctccgaggtgggtctgggacatcctagaggccctacatttgtccttggataggggaccggggggggcttggaatgttgcaaaaaaaaaagttacccaagggatgtcagttttttatccctctgcatgggttggattttccaaaatcataatttgcagaaggaaggccagcatttacgatgcaatatgtaattatatatagggtggccacactagggcggggtccttcccccctcacagctttggcccctttcagagattagaaactgggttagaggattgcagaagacgagtggggggagggcagggaagatgcctgtcgggtttttagcacagttcatttcactgggattttgaagcatttctgtctgaacacaaagcctgttctagtcctggcggaacacactgggggtgggggcgggggaagatgcggtaatgaaaccggttagtcaattttgtcttaatattgttgacaattctgtaaagttcctttttatgaatatttctgtttaagctatttcacctttcttttgaaatccttcccttttaaggagaaaatgtgacacttgtgaaaaagcttgtaagaaagcccctcccttttttctttaaacctttaaatgacaaatctaggtaattaaggttgtgaatttttatttttgctttgtttttaatgaacatttgtctttcagaataggattgtgtgataatgtttaaatggcaaaaacaaaacatgattttgtgcaattaacaaagctactgcaagaaaaataaaacacttcttggtaacaca

SEQ ID NO: 138261 - DNA, 688 bp, Homo sapiens
  Payload ID: 7078
  Gene Symbol: GLYR1
  Gene Name: glyoxylate reductase 1 homolog (Arabidopsis)
  ENST ID: ENST00000587297
  CDS Start-End: 1-516
acgtcatcccacaattcttctgatgacaagaatcgacgtaattccagtgaggagagaagtaggccaaactcaggtgatgagaagcgcaaacttagcctgtctgaagggaaggtgaagaagaacatgggagaaggaaagaagagggtgtcttcaggctcttcagagagaggctccaaatcccctctgaaaagagcccaagagcaaagtccccggaagcggggtcggcccccaaaggatgagaaggatctcaccatcccggagtctagtaccgtgaaggggatgatggccggaccgatggccgcgtttaaatggcagccaaccgcaagcgagcctgttaaagatgcagatcctcatttccatcatttcctgctaagccaaacagagaagccagctgtctgttaccaggcaatcacgaagaagttgaaaatatgtgaagaggaaactggctccacctccatccaggcagctgacagcacagccgtgaatggcagcatcacacccacagacaaaaagtaggacctttgatgaaaaggcctccagtggctctggttctgctgagggtggggagaaggtgaccccaggggggttctttaagggttgtgtcccagccattgctggcattgaatggaaaaggtggggggatgttgtaactcttatcgataaagacaggagtcaaaagctgtgtaaa

SEQ ID NO: 138262 - DNA, 580 bp, Homo sapiens
  Payload ID: 7078
  Gene Symbol: GLYR1
  Gene Name: glyoxylate reductase 1 homolog (Arabidopsis)
  ENST ID: ENST00000588297
  CDS Start-End: 24-580
gtcggcggtggttgggtggtaagatggcggctgtgagtctgcggctcggcgacttggtgtgggggaaactcggccgatatcctccttggccaggaaagattgttaatccaccaaaggacttgaagaaacctcgcggaaagaaatgcttctttgtgaaattttttggaacagaagatcatgcctggatcaaagtggaacagctgaagccatatcatgctcataaagaggaaatgataaaaattaacaagggtaaacgattccagcaagcggtagatgctgtcgaagagttcctcaggagagccaaagggaaagaccaggatctcaccatcccggagtctagtaccgtgaaggggatgatggccggaccgatggccgcgtttaaatggcagccaaccgcaagcgagcctgttaaagatgcagatcctcatttccatcatttcctgctaagccaaacagagaaggaaactggctccacctccatccaggcagctgacagcacagccgtgaatggcagcatcacacccacagacaaaaagataggatttttgggccttggtctcatgggaagtggaatcgtctc

SEQ ID NO: 138263 - DNA, 1831 bp, Homo sapiens
  Payload ID: 7078
  Gene Symbol: GLYR1
  Gene Name: glyoxylate reductase 1 homolog (Arabidopsis)
  Uniprot ID: Q49A26
  ENST ID: ENST00000591451
  CDS Start-End: 1-1644
atggcggctgtgagtctgcggctcggcgacttggtgtgggggaaactcggccgatatcctccttggccaggaaagattgttaatccaccaaaggacttgaagaaacctcgcggaaagaaatgcttctttgtgaaattttttggaacagaagatcatgcctggatcaaagtggaacagctgaagccatatcatgctcataaagaggaaatgataaaaattaacaagggtaaacgattccagcaagcggtagatgctgtcgaagagttcctcaggagagccaaagggaaagaccagacgtcatcccacaattcttctgatgacaagaatcgacgtaattccagtgaggagagaagtaggccaaactcaggtgatgagaagcgcaaacttagcctgtctgaagggaaggtgaagaagaacatgggagaaggaaagaagagggtgtcttcaggctcttcagagagaggctccaaatcccctctgaaaagagcccaagagcaaagtccccggaagcggggtcggcccccaaaggatgagaaggatctcaccatcccggagtctagtaccgtgaaggggatgatggccggaccgatggccgcgtttaaatggcagccaaccgcaagcgagcctgttaaagatgcagatcctcatttccatcatttcctgctaagccaaacagagaagccagctgtctgttaccaggcaatcacgaagaagttgaaaatatgtgaagaggaaactggctccacctccatccaggcagctgacagcacagccgtgaatggcagcatcacacccacagacaaaaagataggatttttgggccttggtctcatgggaagtggaatcgtctccaacttgctaaaaatgggtcacacagtgactgtctggaaccgcactgcagagaaagagggggcccgtctgggaagaacccccgctgaagtcgtctcaacctgcgacatcactttcgcctgcgtgtcggatcccaaggcggccaaggacctggtgctgggccccagtggtgtgctgcaagggatccgccctgggaagtgctacgtggacatgtcaacagtggacgctgacaccgtcactgagctggcccaggtgattgtgtccaggggggggcgctttctggaagcccccgtctcagggaatcagcagctgtctaatgacgggatgttggtgatcttagcggctggagacaggggcttatatgaggactgcagcagctgcttccaggcgatggggaagacctccttcttcctaggtgaagtgggcaatgcagccaagatgatgctgatcgtgaacatggtccaagggagcttcatggccactattgccgaggggctgaccctggcccaggtgacaggccagtcccagcagacactcttggacatcctcaatcagggacagttggccagcatcttcctggaccagaagtgccaaaatatcctgcaaggaaactttaagcctgatttctacctgaaatacattcagaaggatctccgcttagccattgcgctgggtgatgcggtcaaccatccgactcccatggcagctgcagcaaatgaggtgtacaaaagagccaaggcgctggaccagtctgacaacgatatgtccgccgtgtaccgagcctacatacactaagctgtcgacaccccgccctcacccctccaatcccccctctgaccccctcttcctcacatggggtcgggggcctgggagttcattctggaccagcccacctatctccatttccttttatacagactttgagacttgccatcagcacagcacacagcagcacccttcccctgaggccggtggggagggg

SEQ ID NO: 138264 - DNA, 1280 bp, Homo sapiens
  Payload ID: 7079
  Gene Symbol: GRHPR
  Gene Name: glyoxylate reductase/hydroxypyruvate reductase
  Uniprot ID: Q9UBQ7
  ENST ID: ENST00000318158
  CDS Start-End: 86-1072
actccagcctggccccgccccggcccagctacattcccgggccagcttctgtactgccaggtccgggtcggcggctgcactgcggatgagaccggtgcgactcatgaaggtgttcgtcacccgcaggatacccgccgagggtagggtcgcgctcgcccgggcggcagactgtgaggtggagcagtgggactcggatgagcccatccctgccaaggagctagagcgaggtgtggcgggggcccacggcctgctctgcctcctctccgaccacgtggacaagaggatcctggatgctgcaggggccaatctcaaagtcatcagcaccatgtctgtgggcatcgaccacttggctttggatgaaatcaagaagcgtgggatccgagttggctacaccccagatgtcctgacagataccaccgccgaactcgcagtctccctgctacttaccacctgccgccggttgccggaggccatcgaggaagtgaagaatggtggctggacctcgtggaagcccctctggctgtgtggctatggactcacgcagagcactgtcggcatcatcgggctggggcgcataggccaggccattgctcggcgtctgaaaccattcggtgtccagagatttctgtacacagggcgccagcccaggcctgaggaagcagcagaattccaggcagagtttgtgtctacccctgagctggctgcccaatctgatttcatcgtcgtggcctgctccttaacacctgcaaccgagggactctgcaacaaggacttcttccagaagatgaaggaaacagctgtgttcatcaacatcagcaggggcgacgtcgtaaaccaggacgacctgtaccaggccttggccagtggtaagattgcagctgctggactggatgtgacgagcccagaaccactgcctacaaaccaccctctcctgaccctgaagaactgtgtgattctgccccacattggcagtgccacccacagaacccgcaacaccatgtccttgttggcagctaacaacttgctggctggcctgagaggggagccgatgcctagtgaactcaagctgtagccaaacagtagagatggagggccgggaagcaaaccgtgccctggtattgtcagacacacccaggcttgatttggatccacaggcagagccaagggaaggtgtgattctctgaggaaagagtgattctgatatatgtacttgtcacattggtgttggacacatttgcgccaaaagtatggtaattctattattaaataattctctgaga

SEQ ID NO: 138265 - DNA, 1593 bp, Homo sapiens
  Payload ID: 7079
  Gene Symbol: GRHPR
  Gene Name: glyoxylate reductase/hydroxypyruvate reductase
  Uniprot ID: Q9UBQ7
  ENST ID: ENST00000494290
  CDS Start-End: 674-1432
ttctgcagatgaggcagagacacttttcttccagtggcccttatttggagaagcctggcagaagggcgtgagcctagccaagcagctatctattggtggttctctgtcatcctgcctggtgcaggggtgcgggtgagggtggagagtgtggagaacctgtctagccaacgaacagccctgcctctcactagagagttgcttggaggaacccaacagctttggggcacgttctgagcctgaaaatccaactgtacaaatctgtctcagcagcagcttacatgaaaattgtaagtttggggtgagctggcagtttggcagtgccaccaaaaagtcaaatggggtctgagactgcattcacagaagcagagggtccaggacaaaggaggggactgcttgaccaggtgtctcccttgtgaaaacctctccagttctcagaggttaggaaaaacctgagtggctttccagatggcttggaccatgtgaggacagcatcagccagtcacagcctcaggggagctgaggtgctgtctccagatccctggggcagtgtgggctggctgggggctagttacagtggggcagccagccccccacccgctttggaggagacaggagcaggcaactcgggctgtgctgatgaaaagggtctgccctgagggccgctgttccagaaatgctgggtggtgtccctaccctttgcgggactgggaacgagacatggactctccttgctctaggccaggccattgctcggcgtctgaaaccattcggtgtccagagatttctgtacacagggcgccagcccaggcctgaggaagcagcagaattccaggcagagtttgtgtctacccctgagctggctgcccaatctgatttcatcgtcgtggcctgctccttaacacctgcaaccgagggactctgcaacaaggacttcttccagaagatgaaggaaacagctgtgttcatcaacatcagcaggtatcctagggccaccttacccagcaagcctggagaggagccatccccactgctgccatctggagattttcttccccgtgggttgttggtgagaccccaggctgagcttgctggtttccataaaccaaacaaccaactcagaaattcgtgggaatacacgagacctccgtacagggaagaagagccgtcagagtgggcctggcctgtctgcttctcagcagtggcccccacccggcggggcctggcacacagcagcgtggcttcagggagtgttcccagggagcctctgcaggcccattatcctccaccacaaagggctggacttgaggatctgaagggccctctggaggccgcctcccacactgctgagcctggctttgtctggctgtggttcagtgatactttgaaccttatgctcctgggcggacagaccctaaaactcacgtggtcgtagctcctcacactgtccctaggggtgccttcaggccactgggcatgtatggaggtgtgattctctgaggaaagagtgattctgatatatgtacttgtcacattggtgttggacacatttgcgccaaaagtatggtaattctattattaaataattctctgaga

SEQ ID NO: 138266 - DNA, 1704 bp, Homo sapiens
  Payload ID: 7079
  Gene Symbol: GRHPR
  Gene Name: glyoxylate reductase/hydroxypyruvate reductase
  ENST ID: ENST00000607784
  CDS Start-End: 6-1082
tgcggatgagaccggtgcgactcatgaaggtgttcgtcacccgcaggatacccgccgagggtagggtcgcgctcgcccgggcggcagactgtgaggtggagcagtgggactcggatgagcccatccctgccaaggagctagagcgaggtgtggcgggggcccacggcctgctctgcctcctctccgaccacgtggacaagaggatcctggatgctgcaggggccaatctcaaagtcatcagcaccatgtctgtgggcatcgaccacttggctttggatgaaatcaagaagcgtgggatccgagttggctacaccccagatgtcctgacagataccaccgccgaactcgcagtctccctgctacttaccacctgccgccggttgccggaggccatcgaggaagtgaagaatggtggctggacctcgtggaagcccctctggctgtgtggctatggactcacgcagagcactgtcggcatcatcgggctggggcgcataggccaggccattgctcggcgtctgaaaccattcggtgtccagagatttctgtacacagggcgccagcccaggcctgaggaagcagcagaattccaggcagagtttgtgtctacccctgagctggctgcccaatctgatttcatcgtcgtggcctgctccttaacacctgcaaccgagggactctgcaacaaggacttcttccagaagatgaaggaaacagctgtgttcatcaacatcagcaggggcgacgtcgtaaaccaggacgacctgtaccaggccttggccagtggtaagattgcagctgctggactggatgtgacgagcccagaaccactgcctacaaaccaccctctcctgaccctgaagaactgtggtcctggaattcagctcacggcctggggactgcttcaaaaggcaggtcttggtctgaggagagggcagtcagggcatgaagctgcagccgccaccgctgcttctacaaaatctaagcactgggctgcagccatgtcctactgccagcaggaagggaaggatgcaatcatttgtgatgtaaaaagaccatgcagctccaagcaacacagctgatgaccccagtgatccctatggggggagcacggattgaggctgccaaatggagacattaactggaactgcctgtgccttgggggaagggccagcggcccctgtggggaacaattcaagctggacttttcctgcttccactatagtatggagaatgtcaaggggtcagactgtgtagaccaattggggccatgcaggaatgcatgcagaaatacccagatctttgtccccaagaaggtgaggcagaggtagaggaaaagcccgcagaacatgtagaagtagcagctcccactgaggccactgcaaccaaagaggaggaggggtcaagttaatgaaggccataggactccagtccttccaccccttcagagtgacacggaccttttgcaaaatgccatttagtcaccctccaacaaagtgtctttccctctgttgtcctgtaaactgtaatgtacgaaataacatattttgatgatcggggtcttggcctcttgacatatacgctaaaaaaatgggggttgttttatatgtgtcctgtgtaaacctgtcggcaaatatagccaccacttttgaattctcctagatggccctgaattttgccactttgaaataatgtgctactcaa

SEQ ID NO: 138267 - DNA, 3713 bp, Homo sapiens
  Payload ID: 7080
  Gene Symbol: GPC1
  Gene Name: glypican 1
  Uniprot ID: P35052
  ENST ID: ENST00000264039
  CDS Start-End: 249-1925
gggactgcgctagcccgccgcgctctgggctgcccgagcgagcgttcggacctcgcaccccgcgcgccccgcgccgccgccgccgccggcttttgttgtctccgcctcctcggccgccgccgcctctggaccgcgagccgcgcgcgccgggaccttggctctgcccttcgcgggcgggaactgcgcaggacccggccaggatccgagagaggcgcgggcgggtggccgggggcgccgccggccccgccatggagctccgggcccgaggctggtggctgctatgtgcggccgcagcgctggtcgcctgcgcccgcggggacccggccagcaagagccggagctgcggcgaggtccgccagatctacggagccaagggcttcagcctgagcgacgtgccccaggcggagatctcgggtgagcacctgcggatctgtccccagggctacacctgctgcaccagcgagatggaggagaacctggccaaccgcagccatgccgagctggagaccgcgctccgggacagcagccgcgtcctgcaggccatgcttgccacccagctgcgcagcttcgatgaccacttccagcacctgctgaacgactcggagcggacgctgcaggccaccttccccggcgccttcggagagctgtacacgcagaacgcgagggccttccgggacctgtactcagagctgcgcctgtactaccgcggtgccaacctgcacctggaggagacgctggccgagttctgggcccgcctgctcgagcgcctcttcaagcagctgcacccccagctgctgctgcctgatgactacctggactgcctgggcaagcaggccgaggcgctgcggcccttcggggaggccccgagagagctgcgcctgcgggccacccgtgccttcgtggctgctcgctcctttgtgcagggcctgggcgtggccagcgacgtggtccggaaagtggctcaggtccccctgggcccggagtgctcgagagctgtcatgaagctggtctactgtgctcactgcctgggagtccccggcgccaggccctgccctgactattgccgaaatgtgctcaagggctgccttgccaaccaggccgacctggacgccgagtggaggaacctcctggactccatggtgctcatcaccgacaagttctggggtacatcgggtgtggagagtgtcatcggcagcgtgcacacgtggctggcggaggccatcaacgccctccaggacaacagggacacgctcacggccaaggtcatccagggctgcgggaaccccaaggtcaacccccagggccccgggcctgaggagaagcggcgccggggcaagctggccccgcgggagaggccaccttcaggcacgctggagaagctggtctccgaagccaaggcccagctccgcgacgtccaggacttctggatcagcctcccagggacactgtgcagtgagaagatggccctgagcactgccagtgatgaccgctgctggaacgggatggccagaggccggtacctccccgaggtcatgggtgacggcctggccaaccagatcaacaaccccgaggtggaggtggacatcaccaagccggacatgaccatccggcagcagatcatgcagctgaagatcatgaccaaccggctgcgcagcgcctacaacggcaacgacgtggacttccaggacgccagtgacgacggcagcggctcgggcagcggtgatggctgtctggatgacctctgcagccggaaggtcagcaggaagagctccagctcccggacgcccttgacccatgccctcccaggcctgtcagagcaggaaggacagaagacctcggctgccagctgcccccagcccccgaccttcctcctgcccctcctcctcttcctggcccttacagtagccaggccccggtggcggtaactgccccaaggccccagggacagaggccaaggactgactttgccaaaaatacaacacagacgatatttaattcacctcagcctggagaggcctggggtgggacagggagggccggcggctctgagcaggggcaggcgcagaggtcccagccccaggcctggcctcgcctgcctttctgccttttaattttgtatgaggtcctcaggtcagctgggagccagtgtgcccaaaagccatgtatttcagggacctcaggggcacctccggctgcctagccctccccccagctccctgcaccgccgcagaagcagcccctcgaggcctacagaggaggcctcaaagcaacccgctggagcccacagcgagcctgtgccttcctccccgcctcctcccactgggactcccagcagagcccaccagccagccctggcccaccccccagcctccagagaagccccgcacgggctgtctgggtgtccgccatccagggtctggcagagcctctgagatgatgcatgatgccctcccctcagcgcaggctgcagagcccggccccacctccctgcgcccttgaggggccccagcgtctgcagggtgacgcctgagacagcaccactgctgaggagtctgaggactgtcctcccacagacctgcagtgaggggccctccatgcgcagatgaggggccactgacccacctgcgcttctgctggaggaggggaagctgggcccaaaggcccagggaggcagcgtgggctctgccaatgtgggctgcccctcgcacacagggctcacagggcaggccttgctggggtccagggctgttggaggaccccgagggctgaggagcagccaggacccgcctgctcccatcctcacccagatcaggaaccagggcctccctgttcacggtgacacaggtcagggctcagagtgaccctcagctgtcacctgctcacagggatgctggtggctggtgagaccccgcactgcagacgggaatgcctaggtcccttcccgacccagccagctgcagggcacggggacctggatagttaagggcttttccaaacatgcatccatttactgacacttcctgtccttgttcatggagagctgttcgctcctcccagatggcttcggagggccgcagggcccaccttggaccctggtgacctcctgtcactcactgaggccatcagggccctgccccaggcctggacgggccctccttccctcctgtgccccagctgccaggcggccctggggaggggtggtgtggtgttgggaaggggtcctgcagggggaggaggacttggagggtctgggggcagctgtcctgaaccgactgaccctgaggaggccgcttagtgctgctttgcttttcatcaccgtcccgcacagtggacggaggtccccggttgctggtcaggtccccatggcttgttctctggaacctgactttagatgttttgggatcaggagcccccaacacaggcaagtccaccccataataaccctgccagtgccagggtgggctggggactctggcacagtgatgccgggcgccaggacagcagcactcccgctgcacacagacggcctaggggtggcgctcagaccccaccctacgctcatctctggaaggggcagccctgagtggtcactggtcagggcagtggccaagcctgctgtgtccttcctccacaaggtccccccaccgctcagtgtcagcgggtgacgtgtgttcttttgagtccttgtatgaataaaaggctggaaacctaca

SEQ ID NO: 138268 - DNA, 573 bp, Homo sapiens
  Payload ID: 7080
  Gene Symbol: GPC1
  Gene Name: glypican 1
  ENST ID: ENST00000427506
  CDS Start-End: 87-573
agcaaactcagtctgacccaggcattcaacctctgggtgagcacctgcggatctgtccccagggctacacctgctgcaccagcgagatggaggagaacctggccaaccgcagccatgccgagctggagaccgcgctccgggacagcagccgcgtcctgcaggccatgcttgccacccagctgcgcagcttcgatgaccacttccagcacctgctgaacgactcggagcggacgctgcaggccaccttccccggcgccttcggagagctgtacacgcagaacgcgagggccttccgggacctgtactcagagctgcgcctgtactaccgcggtgccaacctgcacctggaggagacgctggccgagttctgggcccgcctgctcgagcgcctcttcaagcagctgcacccccagctgctgctgcctgatgactacctggactgcctgggcaagcaggccgaggcgctgcggcccttcggggaggccccgagagagctgcgcctgcgggccacccgtgccttcgtggctgctcgctcctttgtgcagggcctgggcgtggccagcgacgtggtcc

SEQ ID NO: 138269 - DNA, 841 bp, Homo sapiens
  Payload ID: 7080
  Gene Symbol: GPC1
  Gene Name: glypican 1
  ENST ID: ENST00000455111
  CDS Start-End: 1-841
tgctcactgcctgggagtccccggcgccaggccctgccctgactattgccgaaatgtgctcaagggctgccttgccaaccaggccgacctggacgccgagtggaggaacctcctggactccatggtgctcatcaccgacaagttctggggtacatcgggtgtggagagtgtcatcggcagcgtgcacacgtggctggcggaggccatcaacgccctccaggacaacagggacacgctcacggccaaggaccctgcagtgtctctccaggtcatccagggctgcgggaaccccaaggtcaacccccagggccccgggcctgaggagaagcggcgccggggcaagctggccccgcgggagaggccaccttcaggcacgctggagaagctggtctccgaagccaaggcccagctccgcgacgtccaggacttctggatcagcctcccagggacactgtgcagtgagaagatggccctgagcactgccagtgatgaccgctgctggaacgggatggccagaggccggtacctccccgaggtcatgggtgacggcctggccaaccagatcaacaaccccgaggtggaggtggacatcaccaagccggacatgaccatccggcagcagatcatgcagctgaagatcatgaccaaccggctgcgcagcgcctacaacggcaacgacgtggacttccaggacgccagtgacgacggcagcggctcgggcagcggtgatggctgtctggatgacctctgcagccggaaggtcagcaggaagagctccagctcccggacgcccttgacccatgccctcccaggcctgtcagagcaggaaggacagaagacc

SEQ ID NO: 138270 - DNA, 1085 bp, Homo sapiens
  Payload ID: 7080
  Gene Symbol: GPC1
  Gene Name: glypican 1
  ENST ID: ENST00000425056
  CDS Start-End: 204-1085
ctgtgcctgacctaggccagcaccaggagggccttagaggcgggggacgaggcccagaaggaacagtgtggccccgtcagtgtggagtcctgagcttaggcagccggaaccacttgccccctcactgtatagctgggacgagacctcatccctgtgagcacctgcggatctgtccccagggctacacctgctgcaccagcgagatggaggagaacctggccaaccgcagccatgccgagctggagaccgcgctccgggacagcagccgcgtcctgcaggccatgcttgccacccagctgcgcagcttcgatgaccacttccagcacctgctgaacgactcggagcggacgctgcaggccaccttccccggcgccttcggagagctgtacacgcagaacgcgagggccttccgggacctgtactcagagctgcgcctgtactaccgcggtgccaacctgcacctggaggagacgctggccgagttctgggcccgcctgctcgagcgcctcttcaagcagctgcacccccagctgctgctgcctgatgactacctggactgcctgggcaagcaggccgaggcgctgcggcccttcggggaggccccgagagagctgcgcctgcgggccacccgtgccttcgtggctgctcgctcctttgtgcagggcctgggcgtggccagcgacgtggtccggaaagtggctcaggtccccctgggcccggagtgctcgagagctgtcatgaagctggtctactgtgctcactgcctgggagtccccggcgccaggccctgccctgactattgccgaaatgtgctcaagggctgccttgccaaccaggccgacctggacgccgagtggaggaacctcctggactccatggtgctcatcaccgacaagttctggggtacatcgggtgtggagagtgtcatcggcagcgtgcacacgtggctggcggaggccatcaacgccctccaggacaacagggacacgctcacggccaaggtcatccagggctgcgggaaccccaaggtcaacccccagggccccgggcctgaggagaagcggcgccggggcaagctggccccg

SEQ ID NO: 138271 - DNA, 636 bp, Homo sapiens
  Payload ID: 7080
  Gene Symbol: GPC1
  Gene Name: glypican 1
  ENST ID: ENST00000426280
  CDS Start-End: 168-636
actggtcacgggcagctgccaggctgggtctggacaaatgaggtctgggtccatcattggggatgggggccactgtcaggatgggagtctcgcctaaagctttggggtgaaggtgctgatgaccaagaggaaactgcggggtggggacatgtcagcaggggacgagaatgcatgacctaaaaggtgagcacctgcggatctgtccccagggctacacctgctgcaccagcgagatggaggagaacctggccaaccgcagccatgccgagctggagaccgcgctccgggacagcagccgcgtcctgcaggccatgcttgccacccagctgcgcagcttcgatgaccacttccagcacctgctgaacgactcggagcggacgctgcaggccaccttccccggcgccttcggagagctgtacacgcagaacgcgagggccttccgggacctgtactcagagctgcgcctgtactaccgcggtgccaacctgcacctggaggagacgctggccgagttctgggcccgcctgctcgagcgcctcttcaagcagctgcacccccagctgctgctgcctgatgactacctggactgcctgggcaagcaggccgaggcgctgcggcccttcggggaggccccga

SEQ ID NO: 138272 - DNA, 1835 bp, Homo sapiens
  Payload ID: 7080
  Gene Symbol: GPC1
  Gene Name: glypican 1
  ENST ID: ENST00000420138
  CDS Start-End: 335-1795
cgcgccagtgcggctgcggcgctgcccggggtggctgcggccagagtctcccgcgcgcccggcggaccgcagcccgccctcgtcccccgctggcttttcgcctcctgcgagcccttccgcccggccccgctccgccgcctttccccggcccgagcacctgcacccagagcccgcgcgccgcccggagccgctggagccgccgctgcgaagggggtcccgcgtccgccgccgcgctggaagccaggcccgaggacctctcccgcagcgccaccgtacccgcatccgtgagcacctgcggatctgtccccagggctacacctgctgcaccagcgagatggaggagaacctggccaaccgcagccatgccgagctggagaccgcgctccgggacagcagccgcgtcctgcaggccatgcttgccacccagctgcgcagcttcgatgaccacttccagcacctgctgaacgactcggagcggacgctgcaggccaccttccccggcgccttcggagagctgtacacgcagaacgcgagggccttccgggacctgtactcagagctgcgcctgtactaccgcggtgccaacctgcacctggaggagacgctggccgagttctgggcccgcctgctcgagcgcctcttcaagcagctgcacccccagctgctgctgcctgatgactacctggactgcctgggcaagcaggccgaggcgctgcggcccttcggggaggccccgagagagctgcgcctgcgggccacccgtgccttcgtggctgctcgctcctttgtgcagggcctgggcgtggccagcgacgtggtccggaaagtggctcaggtccccctgggcccggagtgctcgagagctgtcatgaagctggtctactgtgctcactgcctgggagtccccggcgccaggccctgccctgactattgccgaaatgtgctcaagggctgccttgccaaccaggccgacctggacgccgagtggaggaacctcctggactccatggtgctcatcaccgacaagttctggggtacatcgggtgtggagagtgtcatcggcagcgtgcacacgtggctggcggaggccatcaacgccctccaggacaacagggacacgctcacggccaaggtcatccagggctgcgggaaccccaaggtcaacccccagggccccgggcctgaggagaagcggcgccggggcaagctggccccgcgggagaggccaccttcaggcacgctggagaagctggtctccgaagccaaggcccagctccgcgacgtccaggacttctggatcagcctcccagggacactgtgcagtgagaagatggccctgagcactgccagtgatgaccgctgctggaacgggatggccagaggccggtacctccccgaggtcatgggtgacggcctggccaaccagatcaacaaccccgaggtggaggtggacatcaccaagccggacatgaccatccggcagcagatcatgcagctgaagatcatgaccaaccggctgcgcagcgcctacaacggcaacgacgtggacttccaggacgccagtgacgacggcagcggctcgggcagcggtgatggctgtctggatgacctctgcagccggaaggtcagcaggaagagctccagctcccggacgcccttgacccatgccctcccaggcctgtcagagcaggaaggacagaagacctcggctgccagctgcccccagcccccgaccttcctcctgcccctcctcctcttcctggcccttacagtagccaggccccggtggcggtaactgccccaaggccccagggacagaggccaaggactgactt

SEQ ID NO: 138273 - DNA, 2532 bp, Homo sapiens
  Payload ID: 7081
  Gene Symbol: GPC2
  Gene Name: glypican 2
  Uniprot ID: Q8N158
  ENST ID: ENST00000292377
  CDS Start-End: 169-1908
ggcagatgccgcctggtccagctatcgtgctcggtattcagttttccggagcagcgctctttctctggcccgcggagcggtcccgcggccgagtaccggattcccgagtttgggaggctctgctttcctccttaggacccactttgccgtcctggggtggctgcagttatgtccgcgctgcgacctctcctgcttctgctgctgcctctgtgtcccggtcctggtcccggacccgggagcgaggcaaaggtcacccggagttgtgcagagacccggcaggtgctgggggcccggggatatagcttaaacctaatccctcccgccctgatctcaggtgagcacctccgggtctgtccccaggagtacacctgctgttccagtgagacagagcagaggctgatcagggagactgaggccaccttccgaggcctggtggaggacagcggctcctttctggttcacacactggctgccaggcacagaaaatttgatgagttttttctggagatgctctcagtagcccagcactctctgacccagctcttctcccactcctacggccgcctgtatgcccagcacgccctcatattcaatggcctgttctctcggctgcgagacttctatggggaatctggtgaggggttggatgacaccctggcggatttctgggcacagctcctggagagagtgttcccgctgctgcacccacagtacagcttcccccctgactacctgctctgcctctcacgcttggcctcatctaccgatggctctctgcagccctttggggactcaccccgccgcctccgcctgcagataacccggaccctggtggctgcccgagcctttgtgcagggcctggagactggaagaaatgtggtcagcgaagcgcttaaggtgccggtgtctgaaggctgcagccaggctctgatgcgtctcatcggctgtcccctgtgccggggggtcccctcacttatgccctgccagggcttctgcctcaacgtggttcgtggctgtctcagcagcaggggactggagcctgactggggcaactatctggatggtctcctgatcctggctgataagctccagggccccttttcctttgagctgacggccgagtccattggggtgaagatctcggagggtttgatgtacctgcaggaaaacagtgcgaaggtgtccgcccaggtgtttcaggagtgcggcccccccgacccggtgcctgcccgcaaccgtcgagccccgccgccccgggaagaggcgggccggctgtggtcgatggtgaccgaggaggagcggcccacgacggccgcaggcaccaacctgcaccggctggtgtgggagctccgcgagcgtctggcccggatgcggggcttctgggcccggctgtccctgacggtgtgcggagactctcgcatggcagcggacgcctcgctggaggcggcgccctgctggaccggagccgggcggggccggtacttgccgccagtggtcgggggctccccggccgagcaggtcaacaaccccgagctcaaggtggacgcctcgggccccgatgtcccgacacggcggcgtcggctacagctccgggcggccacggccagaatgaaaacggccgcactgggacacgacctggacgggcaggacgcggatgaggatgccagcggctctggagggggacagcagtatgcagatgactggatggctggggctgtggctcccccagcccggcctcctcggcctccataccctcctagaagggatggttctgggggcaaaggaggaggtggcagtgcccgctacaaccagggccggagcaggagtgggggggcatctattggttttcacacccaaaccatcctcattctctccctctcagccctggccctgcttggacctcgataacgggggaggggtgccctagcatcagaagggttcatggccctttcccctcctcccccctcagctgggcctggggaggagtcgaagggggctgcagagagggtagagaagggactttgcaggtgaatggctggggccccaaatccaggagattttcatcagaggtgggtgggtgttcacaatatttattttttcatttggtaatgggaggggggcctgggggtatttatttaggagggagtgtggtttccttagaaggtatagtctctagccctctaaggctggggctggtgatcagccccaacagagaaaatgaggagtttagagttgcagctggggaaggggtttgaaggaagttggaagtggggaggggtgggggcatctggtctcagaaatggaccagctggatgcagggcaggggactgagggtgcttgagtaggatgtgagacttcatgggcctgggttctgttgagttttttcagtatcaatttcttaaaccaaattttaaaaaaaacaaggtgggggggtgctcatctcgtgacctctgccacccacatccttcacaaactccatgtttcagtgtttgagtccatgtttattctgcaaataaatggtaatgtattgga

SEQ ID NO: 138274 - DNA, 767 bp, Homo sapiens
  Payload ID: 7081
  Gene Symbol: GPC2
  Gene Name: glypican 2
  ENST ID: ENST00000480087
  CDS Start-End: 171-575
tcggcagatgccgcctggtccagctatcgtgctcggtattcagttttccggagcagcgctctttctctggcccgcggagcggtcccgcggccgagtaccggattcccgagtttgggaggctctgctttcctccttaggacccactttgccgtcctggggtggctgcagttatgtccgcgctgcgacctctcctgcttctgctgctgcctctgtgtcccggtcctggtcccggacccgggagcgaggcaaaggtcacccggagttgtgcagagacccggcaggtgctgggggcccggggatatagcttaaacctaatccctcccgccctgatctcaggtgagcacctccgggtctgtccccaggagtacacctgctgttccagtgagacagagcagaggctgatcagggagactgaggccaccttccgaggcctggtggaggacagcggctcctttctggttcacacactggctgccaggcacagaaaatttgatgataacccggaccctggtggctgcccgagcctttgtgcagggcctggagactggaagaaatgtggtcagcgaagcgcttaaggtgccggtgtctgaaggctgcagccaggctctgatgcgtctcatcggctgtcccctgtgccggggggtcccctcacttatgccctgccagggcttctgcctcaacgtggttcgtggctgtctcagcagcaggggactggagcctgactggggcaactatctggatggtctcctgatcctggctgataagct

SEQ ID NO: 138275 - DNA, 2568 bp, Homo sapiens
  Payload ID: 7082
  Gene Symbol: GPC3
  Gene Name: glypican 3
  Uniprot ID: P51654
  ENST ID: ENST00000370818
  CDS Start-End: 447-2189
cgccctgtgtagagcggctgcgagcgggcagctgggctcggctgccgggagccaccgcgcgggctccgcaccctcctctcgcactgccttcgcccggtccccgcgccgcggtgccccagtggcccccgccgcgctccacgccgcgcccccgcaccccgccggctaccggccgcacaaccgccaccgccccctggccgcgcggctcgcctcgccccgccccgtccctcctcgccccgccccaccccagtcagccccgccctgccccgcgccgccaagcggttcccgccctcgcccagcgcccaggtagctgcgaggaaacttttgcagcggctgggtagcagcacgtctcttgctcctcagggccactgccaggcttgccgagtcctgggactgctctcgctccggctgccactctcccgcgctctcctagctccctgcgaagcaggatggccgggaccgtgcgcaccgcgtgcttggtggtggcgatgctgctcagcttggacttcccgggacaggcgcagcccccgccgccgccgccggacgccacctgtcaccaagtccgctccttcttccagagactgcagcccggactcaagtgggtgccagaaactcccgtgccaggatcagatttgcaagtatgtctccctaagggcccaacatgctgctcaagaaagatggaagaaaaataccaactaacagcacgattgaacatggaacagctgcttcagtctgcaagtatggagctcaagttcttaattattcagaatgctgcggttttccaagaggcctttgaaattgttgttcgccatgccaagaactacaccaatgccatgttcaagaacaactacccaagcctgactccacaagcttttgagtttgtgggtgaatttttcacagatgtgtctctctacatcttgggttctgacatcaatgtagatgacatggtcaatgaattgtttgacagcctgtttccagtcatctatacccagctaatgaacccaggcctgcctgattcagccttggacatcaatgagtgcctccgaggagcaagacgtgacctgaaagtatttgggaatttccccaagcttattatgacccaggtttccaagtcactgcaagtcactaggatcttccttcaggctctgaatcttggaattgaagtgatcaacacaactgatcacctgaagttcagtaaggactgtggccgaatgctcaccagaatgtggtactgctcttactgccagggactgatgatggttaaaccctgtggcggttactgcaatgtggtcatgcaaggctgtatggcaggtgtggtggagattgacaagtactggagagaatacattctgtcccttgaagaacttgtgaatggcatgtacagaatctatgacatggagaacgtactgcttggtctcttttcaacaatccatgattctatccagtatgtccagaagaatgcaggaaagctgaccaccactattggcaagttatgtgcccattctcaacaacgccaatatagatctgcttattatcctgaagatctctttattgacaagaaagtattaaaagttgctcatgtagaacatgaagaaaccttatccagccgaagaagggaactaattcagaagttgaagtctttcatcagcttctatagtgctttgcctggctacatctgcagccatagccctgtggcggaaaacgacaccctttgctggaatggacaagaactcgtggagagatacagccaaaaggcagcaaggaatggaatgaaaaaccagttcaatctccatgagctgaaaatgaagggccctgagccagtggtcagtcaaattattgacaaactgaagcacattaaccagctcctgagaaccatgtctatgcccaaaggtagagttctggataaaaacctggatgaggaagggtttgaaagtggagactgcggtgatgatgaagatgagtgcattggaggctctggtgatggaatgataaaagtgaagaatcagctccgcttccttgcagaactggcctatgatctggatgtggatgatgcgcctggaaacagtcagcaggcaactccgaaggacaacgagataagcacctttcacaacctcgggaacgttcattccccgctgaagcttctcaccagcatggccatctcggtggtgtgcttcttcttcctggtgcactgactgcctggtgcccagcacatgtgctgccctacagcaccctgtggtcttcctcgataaagggaaccactttcttatttttttctatttttttttttttgttatcctgtatacctcctccagccatgaagtagaggactaaccatgtgttatgttttcgaaaatcaaatggtatcttttggaggaagatacattttagtggtagcatatagattgtccttttgcaaagaaagaaaaaaaaccatcaagttgtgccaaattattctcctatgtttggctgctagaacatggttaccatgtctttctctctcactccctccctttctatcgttctctctttgcatggatttctttgaaaaaaaataaattgctcaaataaaaa

SEQ ID NO: 138276 - DNA, 2379 bp, Homo sapiens
  Payload ID: 7082
  Gene Symbol: GPC3
  Gene Name: glypican 3
  Uniprot ID: P51654
  ENST ID: ENST00000394299
  CDS Start-End: 198-2009
agccccgccctgccccgcgccgccaagcggttcccgccctcgcccagcgcccaggtagctgcgaggaaacttttgcagcggctgggtagcagcacgtctcttgctcctcagggccactgccaggcttgccgagtcctgggactgctctcgctccggctgccactctcccgcgctctcctagctccctgcgaagcaggatggccgggaccgtgcgcaccgcgtgcttggtggtggcgatgctgctcagcttggacttcccgggacaggcgcagcccccgccgccgccgccggacgccacctgtcaccaagtccgctccttcttccagagactgcagcccggactcaagtgggtgccagaaactcccgtgccaggatcagatttgcaagtatgtctccctaagggcccaacatgctgctcaagaaagatggaagaaaaataccaactaacagcacgattgaacatggaacagctgcttcagtctgcaagtatggagctcaagttcttaattattcagaatgctgcggttttccaagaggcctttgaaattgttgttcgccatgccaagaactacaccaatgccatgttcaagaacaactacccaagcctgactccacaagcttttgagtttgtgggtgaatttttcacagatgtgtctctctacatcttgggttctgacatcaatgtagatgacatggtcaatgaattgtttgacagcctgtttccagtcatctatacccagctaatgaacccaggcctgcctgattcagccttggacatcaatgagtgcctccgaggagcaagacgtgacctgaaagtatttgggaatttccccaagcttattatgacccaggtttccaagtcactgcaagtcactaggatcttccttcaggctctgaatcttggaattgaagtgatcaacacaactgatcacctgaagttcagtaaggactgtggccgaatgctcaccagaatgtggtactgctcttactgccagggactgatgatggttaaaccctgtggcggttactgcaatgtggtcatgcaaggctgtatggcaggtgtggtggagattgacaagtactggagagaatacattctgtcccttgaagaacttgtgaatggcatgtacagaatctatgacatggagaacgtactgcttggtctcttttcaacaatccatgattctatccagtatgtccagaagaatgcaggaaagctgaccaccactgaaactgagaagaaaatatggcacttcaaatatcctatcttcttcctgtgtatagggctagacttacagattggcaagttatgtgcccattctcaacaacgccaatatagatctgcttattatcctgaagatctctttattgacaagaaagtattaaaagttgctcatgtagaacatgaagaaaccttatccagccgaagaagggaactaattcagaagttgaagtctttcatcagcttctatagtgctttgcctggctacatctgcagccatagccctgtggcggaaaacgacaccctttgctggaatggacaagaactcgtggagagatacagccaaaaggcagcaaggaatggaatgaaaaaccagttcaatctccatgagctgaaaatgaagggccctgagccagtggtcagtcaaattattgacaaactgaagcacattaaccagctcctgagaaccatgtctatgcccaaaggtagagttctggataaaaacctggatgaggaagggtttgaaagtggagactgcggtgatgatgaagatgagtgcattggaggctctggtgatggaatgataaaagtgaagaatcagctccgcttccttgcagaactggcctatgatctggatgtggatgatgcgcctggaaacagtcagcaggcaactccgaaggacaacgagataagcacctttcacaacctcgggaacgttcattccccgctgaagcttctcaccagcatggccatctcggtggtgtgcttcttcttcctggtgcactgactgcctggtgcccagcacatgtgctgccctacagcaccctgtggtcttcctcgataaagggaaccactttcttatttttttctatttttttttttttgttatcctgtatacctcctccagccatgaagtagaggactaaccatgtgttatgttttcgaaaatcaaatggtatcttttggaggaagatacattttagtggtagcatatagattgtccttttgcaaagaaagaaaaaaaaccatcaagttgtgccaaattattctcctatgtttggctgctagaacatggttaccatgtctttctctctcactccctccctttctatcgttctctctttgcatggatttctttgaaaaaaaataaattgctc

SEQ ID NO: 138277 - DNA, 836 bp, Homo sapiens
  Payload ID: 7082
  Gene Symbol: GPC3
  Gene Name: glypican 3
  ENST ID: ENST00000406757
  CDS Start-End: 1-770
ttaaaccctgtggcggttactgcaatgtggtcatgcaaggctgtatggcaggtgtggtggagattgacaagtactggagagaatacattctgtcccttgaagaacttgtgaatggcatgtacagaatctatgacatggagaacgtactgcttggtctcttttcaacaatccatgattctatccagtatgtccagaagaatgcaggaaagctgaccaccactattggcaagttatgtgcccattctcaacaacgccaatatagatctgcttattatcctgaagatctctttattgacaagaaagtattaaaagttgctcatgtagaacatgaagaaaccttatccagccgaagaagggaactaattcagaagttgaagtctttcatcagcttctatagtgctttgcctggctacatctgcagccatagccctgtggcggaaaacgacaccctttgctggaatggacaagaactcgtggagagatacagccaaaaggcagcaaggaatggaatgaaaaaccagttcaatctccatgagctgaaaatgaagggccctgagccagtggtcagtcaaattattgacaaactgaagcacattaaccagctcctgagaaccatgtctatgcccaaaggtagagttctggataaaaacctggatgaggaagggtttgaaagtggagactgcggtgatgatgaagatgagtgcattggaggctctggtgatggaatgataaaagtgaagaatcagctccgcttccttgcaggtaactgattagtgctgacccaaatgtaatctaaaaatggtgatgctcaggaattaaaaataaattgaacccgc

SEQ ID NO: 138278 - DNA, 1581 bp, Homo sapiens
  Payload ID: 7082
  Gene Symbol: GPC3
  Gene Name: glypican 3
  Uniprot ID: P51654
  ENST ID: ENST00000631057
  CDS Start-End: 1-1581
atggccgggaccgtgcgcaccgcgtgcttggtggtggcgatgctgctcagcttggacttcccgggacaggcgcagcccccgccgccgccgccggacgccacctgtcaccaagtccgctccttcttccagagactgcagcccggactcaagtgggtgccagaaactcccgtgccagaggcctttgaaattgttgttcgccatgccaagaactacaccaatgccatgttcaagaacaactacccaagcctgactccacaagcttttgagtttgtgggtgaatttttcacagatgtgtctctctacatcttgggttctgacatcaatgtagatgacatggtcaatgaattgtttgacagcctgtttccagtcatctatacccagctaatgaacccaggcctgcctgattcagccttggacatcaatgagtgcctccgaggagcaagacgtgacctgaaagtatttgggaatttccccaagcttattatgacccaggtttccaagtcactgcaagtcactaggatcttccttcaggctctgaatcttggaattgaagtgatcaacacaactgatcacctgaagttcagtaaggactgtggccgaatgctcaccagaatgtggtactgctcttactgccagggactgatgatggttaaaccctgtggcggttactgcaatgtggtcatgcaaggctgtatggcaggtgtggtggagattgacaagtactggagagaatacattctgtcccttgaagaacttgtgaatggcatgtacagaatctatgacatggagaacgtactgcttggtctcttttcaacaatccatgattctatccagtatgtccagaagaatgcaggaaagctgaccaccactattggcaagttatgtgcccattctcaacaacgccaatatagatctgcttattatcctgaagatctctttattgacaagaaagtattaaaagttgctcatgtagaacatgaagaaaccttatccagccgaagaagggaactaattcagaagttgaagtctttcatcagcttctatagtgctttgcctggctacatctgcagccatagccctgtggcggaaaacgacaccctttgctggaatggacaagaactcgtggagagatacagccaaaaggcagcaaggaatggaatgaaaaaccagttcaatctccatgagctgaaaatgaagggccctgagccagtggtcagtcaaattattgacaaactgaagcacattaaccagctcctgagaaccatgtctatgcccaaaggtagagttctggataaaaacctggatgaggaagggtttgaaagtggagactgcggtgatgatgaagatgagtgcattggaggctctggtgatggaatgataaaagtgaagaatcagctccgcttccttgcagaactggcctatgatctggatgtggatgatgcgcctggaaacagtcagcaggcaactccgaaggacaacgagataagcacctttcacaacctcgggaacgttcattccccgctgaagcttctcaccagcatggccatctcggtggtgtgcttcttcttcctggtgcactga

SEQ ID NO: 138279 - DNA, 4960 bp, Homo sapiens
  Payload ID: 7083
  Gene Symbol: GPC4
  Gene Name: glypican 4
  Uniprot ID: O75487
  ENST ID: ENST00000370828
  CDS Start-End: 526-2196
cagtcaatcagcggcagagctgagaagggcacagccgcgcggcggagggcagagtcagccgagccgagtccagccggacgagcggaccagcgcagggcagcccaagcagcgcgcagcgaacgcccgccgccgcccacaccctctgcggtccccgcggcgcctgccacccttccctccttccccgcgtccccgcctcgccggccagtcagcttgccgggttcgctgccccgcgaaaccccgaggtcaccagcccgcgcctctgcttccctgggccgcgcgccgcctccacgccctccttctcccctggcccggcgcctggcaccggggaccgttgcctgacgcgaggcccagctctacttttcgccccgcgtctcctccgcctgctcgcctcttccaccaactccaactccttctccctccagctccactcgctagtccccgactccgccagccctcggcccgctgccgtagcgccgcttcccgtccggtcccaaaggtgggaacgcgtccgccccggcccgcaccatggcacggttcggcttgcccgcgcttctctgcaccctggcagtgctcagcgccgcgctgctggctgccgagctcaagtcgaaaagttgctcggaagtgcgacgtctttacgtgtccaaaggcttcaacaagaacgatgcccccctccacgagatcaacggtgatcatttgaagatctgtccccagggttctacctgctgctctcaagagatggaggagaagtacagcctgcaaagtaaagatgatttcaaaagtgtggtcagcgaacagtgcaatcatttgcaagctgtctttgcttcacgttacaagaagtttgatgaattcttcaaagaactacttgaaaatgcagagaaatccctgaatgatatgtttgtgaagacatatggccatttatacatgcaaaattctgagctatttaaagatctcttcgtagagttgaaacgttactacgtggtgggaaatgtgaacctggaagaaatgctaaatgacttctgggctcgcctcctggagcggatgttccgcctggtgaactcccagtaccactttacagatgagtatctggaatgtgtgagcaagtatacggagcagctgaagcccttcggagatgtccctcgcaaattgaagctccaggttactcgtgcttttgtagcagcccgtactttcgctcaaggcttagcggttgcgggagatgtcgtgagcaaggtctccgtggtaaaccccacagcccagtgtacccatgccctgttgaagatgatctactgctcccactgccggggtctcgtgactgtgaagccatgttacaactactgctcaaacatcatgagaggctgtttggccaaccaaggggatctcgattttgaatggaacaatttcatagatgctatgctgatggtggcagagaggctagagggtcctttcaacattgaatcggtcatggatcccatcgatgtgaagatttctgatgctattatgaacatgcaggataatagtgttcaagtgtctcagaaggttttccagggatgtggaccccccaagcccctcccagctggacgaatttctcgttccatctctgaaagtgccttcagtgctcgcttcagaccacatcaccccgaggaacgcccaaccacagcagctggcactagtttggaccgactggttactgatgtcaaggagaaactgaaacaggccaagaaattctggtcctcccttccgagcaacgtttgcaacgatgagaggatggctgcaggaaacggcaatgaggatgactgttggaatgggaaaggcaaaagcaggtacctgtttgcagtgacaggaaatggattagccaaccagggcaacaacccagaggtccaggttgacaccagcaaaccagacatactgatccttcgtcaaatcatggctcttcgagtgatgaccagcaagatgaagaatgcatacaatgggaacgacgtggacttctttgatatcagtgatgaaagtagtggagaaggaagtggaagtggctgtgagtatcagcagtgcccttcagagtttgactacaatgccactgaccatgctgggaagagtgccaatgagaaagccgacagtgctggtgtccgtcctggggcacaggcctacctcctcactgtcttctgcatcttgttcctggttatgcagagagagtggagataattctcaaactctgagaaaaagtgttcatcaaaaagttaaaaggcaccagttatcacttttctaccatcctagtgactttgctttttaaatgaatggacaacaatgtacagtttttactatgtggccactggtttaagaagtgctgactttgttttctcattcagttttgggaggaaaagggactgtgcattgagttggttcctgctcccccaaaccatgttaaacgtggctaacagtgtaggtacagaactatagttagttgtgcatttgtgattttatcactctattatttgtttgtatgtttttttctcatttcgtttgtgggtttttttttccaactgtgatctcgccttgtttcttacaagcaaaccagggtcccttcttggcacgtaacatgtacgtatttctgaaatattaaatagctgtacagaagcaggttttatttatcatgttatcttattaaaagaaaaagcccaaaaagcagtaaaatttccatttctccctgttattttagttgccttatctggagagacgtggaggtgattttcttttttttaaattattattaagacagaatgtgagggcacaagcaggcttctgagccacttgtcagattgtattcaaagcatcaatccaagaaggaggttatgtgtacttcatttattggtgatagttggaagagactgcagactactgctttgaatgagttgaattacataagctaagatcactataggtccatttcttgaacccacttatacataaaatgtaacccatttagaaaaagattctggatatcatcccccttgaaagatagaaagcattcaggatgtcccagttatcacatgttcacacttgggtttaggggtgtttttttttaaaaccaggcaggttagctagcccaccctgtgctagttttcatgttcacactgaccctatttgaattaatatcctttgttagagtggtcgagatttcaaacccaattatgtacagggagctgtctgagagctagccagaactggggtacagcctgggctcagggaatagctgtcaacactcgggcaaagtttttgtctgtgcatgtgtatctccatttgttttgggatcccagtttttgttttaagagagtataaggtgtctcatttgagtctttttcttacctagccccctcttatcagtaaaacaaaggacttgccatggttcacagcaatgtgctacgatccaagatatcagccaaggagcccacttaggggagaactaggtgtccagatttttgtatgtgttgtttttcttgggggatggggtggggtgggagtaggtagagctgagaatactacatcttagtggtgacctttagccacgtgggtgaagtggcaaaggccatggccatatctgttgtcccaggccaaagactaacaactgccttgggaatcccttccttgtgtccttaccaaatgatagctcataaaactctgataatgtaacaaatcactttcaaaggagttcccagaagtcttcagaaagactaaaattctgtctcttcctgctttagacagccattaagatcccaactaattttaccgaacctaaaacccacaaagaggttgtttgtgttattgttcaatcttcagttgtaagagtaattctctatttttatattgaaacataattacttgatagctcagggtctacatttcattcaactttttacaccaaattctgcagagtggtcaaaatggaatattgggggctgttgtaaacagaggcttaattttattagaagtagccagttatttattaaagcatgatgttaataaaataggcatattctggctggtgtgtataagtggttttttttttaaaacaaatcagaagacataaaattgaaaaggcactccatttatatataagggaaaatagattgtaaatagctaaggggccttgtgagaacttggaaaatgtgctgatacttagtaactacctcagttgtgaggaatttcctttttagcttagactgctattacttttacttggtagaaatgaatctggtctccaaaatatggctcagagagttatccccatagaccttgttagattgtttttaatttaaaaccttgaactctgcccagctgttttcttccagtcaaattctctaaaccaataacattttccaaattaagtattcttgaaggttcttctgaactcttactgatttgttttctttctttgcattttttcctgttactcttttattatttaaattgtctcttgcttttgaacttcaactatgaaataaacaaatcatagatttttccattcaggtctgactggataactcttggcttctaagcagctggcaagctcacccccactccccaaaaaagaagaaaggcaagttgaatattttaaaaccttaagagtttggagtatgaagtagaataaaagccttgttaggagaagacctgacttttccaaagttaacagcatgtgaagggcttgtgttttacaaagtcatttataaattatttttctttaaaacacatcacctactctgtaccttaaagattttacaactcttagatttatattttatttcaaaaatcgtaactagcacctgttattttgattaaaagacactgcgaagaattgacgtaaatttctaaagtttagttactgagtgttcaaaacctaacagttcacatgaagtaaaaattgtcatttgtgattacagaatcaaaataaaaataggtatgaatggtgcta

SEQ ID NO: 138280 - DNA, 2957 bp, Homo sapiens
  Payload ID: 7084
  Gene Symbol: GPC5
  Gene Name: glypican 5
  Uniprot ID: P78333
  ENST ID: ENST00000377067
  CDS Start-End: 441-2159
cagcgagcgggcacatcccaggttagctgctgcgagccgagccgggcggcggaggcggcggcggcggcggcagtggcggcagtggcggcagtggcggcagcggcagcagttgcagcagtggtggccagagcggatgcttgcgggctccctgcggctccactagttttcttcgccccgcccagccgcccactcttctcggctagggaagaagaccagagggtgctcagctggaaaactctggtgtctcagcttagggcctcctccgggaagagctaactgctcccaggtgaagccggtgcccgcgggcggtccgtacaccccgcagccggctcgcaccgctcgagagcctcggccgctgtgtcttccacgtctgcagctcagccagggcgcgcagggcgagtggggtccactggcgggtaaaggggaccaggacggcgaggatggacgcacagacctggcccgtgggctttcgctgcctcctccttctggccctggttgggtccgcccgcagcgagggcgtgcagacctgcgaagaagttcggaaacttttccagtggcggctgctgggagctgtcagggggctgccggattcgccgcgggcaggacctgatcttcaggtttgcatatccaaaaagcctacatgttgcaccaggaagatggaggagagatatcagattgcggctcgccaggatatgcagcagtttcttcaaacgtccagctctacattaaagtttctaatatctcgaaatgcggctgcttttcaagaaacccttgaaactctcatcaaacaagcagaaaattacaccagtatacttttttgcagtacctacaggaacatggccttggaggctgctgcttcggttcaggagttcttcactgatgtggggctgtatttatttggtgcggatgttaatcctgaagaatttgtaaacagattttttgacagtctttttcctctggtctacaaccacctcattaaccctggtgtgactgacagttccctggaatactcagaatgcatccggatggctcgccgggatgtgagtccatttggtaatattccccaaagagtaatgggacagatggggaggtccctgctgcccagccgcacttttctgcaggcactcaatctgggcattgaagtcatcaacaccacagactatctgcacttctccaaagagtgcagcagagccctcctgaagatgcaatactgcccgcactgccaaggcctggcgctcactaagccttgtatgggatactgcctcaatgtcatgcgaggctgcctggcgcacatggcggagcttaatccacactggcatgcatatatccggtcgttggaagaactctcggatgcaatgcatggaacatacgacattggacacgtgctgctgaactttcacttgcttgttaatgatgctgtgttacaggctcacctcaatggacaaaaattattggaacaggtaaataggatttgtggccgccctgtaagaacacccacacaaagcccccgttgttcttttgatcagagcaaagagaagcatggaatgaagaccaccacaaggaacagtgaagagacgcttgccaacagaagaaaagaatttatcaacagccttcgactgtacaggtcattctatggaggtctagctgatcagctttgtgctaatgaattagctgctgcagatggacttccctgctggaatggagaagatatagtaaaaagttatactcagcgtgtggttggaaatggaatcaaagcccagtctggaaatcctgaagtcaaagtcaaaggaattgatcctgtgataaatcagattattgataaactgaagcatgttgttcagttgttacagggtagatcacccaaacctgacaagtgggaacttcttcagctgggcagtggtggaggcatggttgaacaagtcagtggggactgtgatgatgaagatggttgcgggggatcaggaagtggagaagtcaagaggacactgaagatcacagactggatgccagatgatatgaacttcagtgatgtaaagcaaatccatcaaacagacactggcagtactttagacacaacaggagcaggatgtgcagtggcgactgaatctatgacattcactctgataagtgtggtgatgttacttcccgggatttggtaactgaactcttctgtcctgacataccttactgaagtctcgatttcttctctctctgcatatgcctggaataagagatcctttttcaatgtaacaattatatttatgaaaagatatgttacactaacttctcagaagccaagctgaaatattcataaagtccctaaaactcaacgtttaaatgacacactttaaaaatatgtcttttttcaatctaactgaaaaccttcttaacttctaatatattaaatctgaagatgtgaagggcacagaagtgactttgaataagaagaatttagtgtatctgtaattttattatcaattccaagccccttcctttctaaattaaaaatgttttcatttgaaagtgtatttgccagacaatgaaaacagtatgcagtatttcttaaagtattgaaattagaatatcatgaaataaatcaaaacatacaatggcaagtagtatgcatgcatattcaagagactcttccatttttgcaagctgtagaaggaaatgtctgaatgtctataagttatggggtagattcttgagaagcatttcatataatttcactgaagaaccttgataattttgacccactgtaacttagccactgatgaaccttaaagctgagtattttattaacacctgatttgtattccattatattcaaaatgcatctttggtattgtgcctctgctcccatctctctctttgcctcatagatttagctatgttgggaagcacatgcttgctctaggaatatctccaataaagctgttaactatttggtggaaaaa

SEQ ID NO: 138281 - DNA, 610 bp, Homo sapiens
  Payload ID: 7084
  Gene Symbol: GPC5
  Gene Name: glypican 5
  ENST ID: ENST00000618283
  CDS Start-End: 1-155
ggatgccagatgatatgaacttcagtgatgtaaagcaaatccatcaaacagacactggcagtactttagacacaacaggagcaggatgtgcagtggcgactgaatctatgacattcactctgataagtgtggtgatgttacttcccgggatttgaacaagctgacagagcataggagcatgttatctgggcctctgtattgcaggagctcgctcagaaaaatgaagaaagacgagaaaatgctctgtcattcagcaagaaagcagatggaagcttagaatcacagcttatttaaaaggacagcttataaatatgatgtgtttataattttactatttcattttcctcatttataaaaaaattaaagaaaatctcatgagaatttcatcacagatggttaactgcaataaatttatattgaataatttgatttacttctattttgactacacatctattatagtatgggtgtgattgaatgcaaatccacagacacatgtacacatttatctatatctatccataaaatatacatattcatgtttattgttgctatgattgtattgatgcttatatttatatttgtataaaatttgcctttatgtcagtta

SEQ ID NO: 138282 - DNA, 960 bp, Homo sapiens
  Payload ID: 7084
  Gene Symbol: GPC5
  Gene Name: glypican 5
  ENST ID: ENST00000618596
  CDS Start-End: 1-960
gaaacccttgaaactctcatcaaacaagcagaaaattacaccagtatacttttttgcagtacctacaggaacatggccttggaggctgctgcttcggttcaggagttcttcactgatgtggggctgtatttatttggtgcggatgttaatcctgaagaatttgtaaacagattttttgacagtctttttcctctggtctacaaccacctcattaaccctggtgtgactgacagttccctggaatactcagaatgcatccggatggctcgccgggatgtgagtccatttggtaatattccccaaagagtaatgggacagatggggaggtccctgctgcccagccgcacttttctgcaggcactcaatctgggcattgaagtcatcaacaccacagactatctgcacttctccaaagagtgcagcagagccctcctgaagatgcaatactgcccgcactgccaaggcctggcgctcactaagccttgtatgggatactgcctcaatgtcatgcgaggctgcctggcgcacatggcggagcttaatccacactggcatgcatatatccggtcgttggaagaactctcggatgcaatgcatggaacatacgacattggacacgtgctgctgaactttcacttgcttgttaatgatgctgtgttacaggctcacctcaatggacaaaaattattggaacaggtaaataggatttgtggccgccctgtaagaacacccacacaaagcccccgttgttcttttgatcagagcaaagagaagcatggaatgaagaccaccacaaggaacagtgaagagacgcttgccaacagaagaaaagaatttatcaacagccttcgactgtacaggtcattctatggaggtctagctgatcagctttgtgctaatgaattagctgctgcagatggacttccctgctggaatggagaagatatagtaaaaaggtat

SEQ ID NO: 138283 - DNA, 6467 bp, Homo sapiens
  Payload ID: 7085
  Gene Symbol: GPC6
  Gene Name: glypican 6
  Uniprot ID: Q9Y625
  ENST ID: ENST00000377047
  CDS Start-End: 616-2283
ccaggatttctctcttcctatttcaggaggactctcacaggctcccacagcctgtgttaagctgaggtttcccctagatctcgtatatccccaacacatacctccacgcacacacatccccaagaacctcgagctcacaccaacagacacacgcgcgcatacacactcgctctcgcttgtccatctccctcccgggggagccggcgcgcgctcccacctttgccgcacactccggcgagccgagcccgcagcgctccaggattctgcggctcggaactcggattgcagctctgaacccccatggtggttttttaaacacttcttttccttctcttcctcgttttgattgcaccgtttccatctgggggctagaggagcaaggcagcagccttcccagccagcccttgttggcttgccatcgtccatctggcttataaaagtttgctgagcgcagtccagagggctgcgctgctcgtcccctcggctggcagaagggggtgacgctgggcagcggcgaggagcgcgccgctgcctctggcgggctttcggcttgaggggcaaggtgaagagcgcaccggccgtggggtttaccgagctggatttgtatgttgcaccatgccttcttggatcggggctgtgattcttcccctcttggggctgctgctctccctccccgccggggcggatgtgaaggctcggagctgcggagaggtccgccaggcgtacggtgccaagggattcagcctggcggacatcccctaccaggagatcgcaggggaacacttaagaatctgtcctcaggaatatacatgctgcaccacagaaatggaagacaagttaagccaacaaagcaaactcgaatttgaaaaccttgtggaagagacaagccattttgtgcgcaccacttttgtgtccaggcataagaaatttgacgaatttttccgagagctcctggagaatgcagaaaagtcactaaatgatatgtttgtacggacctatggcatgctgtacatgcagaattcagaagtcttccaggacctcttcacagagctgaaaaggtactacactgggggtaatgtgaatctggaggaaatgctcaatgacttttgggctcggctcctggaacggatgtttcagctgataaaccctcagtatcacttcagtgaagactacctggaatgtgtgagcaaatacactgaccagctcaagccatttggagacgtgccccggaaactgaagattcaggttacccgcgccttcattgctgccaggacctttgtccaggggctgactgtgggcagagaagttgcaaaccgagtttccaaggtcagcccaaccccagggtgtatccgtgccctcatgaagatgctgtactgcccatactgtcgggggcttcccactgtgaggccctgcaacaactactgtctcaacgtcatgaagggctgcttggcaaatcaggctgacctcgacacagagtggaatctgtttatagatgcaatgctcttggtggcagagcgactggaggggccattcaacattgagtcggtcatggacccgatagatgtcaagatttctgaagccattatgaacatgcaagaaaacagcatgcaggtgtctgcaaaggtctttcagggatgtggtcagcccaaacctgctccagccctcagatctgcccgctcagctcctgaaaattttaatacacgtttcaggccctacaatcctgaggaaagaccaacaactgctgcaggcacaagcttggaccggctggtcacagacataaaagagaaattgaagctctctaaaaaggtctggtcagcattaccctacactatctgcaaggacgagagcgtgacagcgggcacgtccaacgaggaggaatgctggaacgggcacagcaaagccagatacttgcctgagatcatgaatgatgggctcaccaaccagatcaacaatcccgaggtggatgtggacatcactcggcctgacactttcatcagacagcagattatggctctccgtgtgatgaccaacaaactaaaaaacgcctacaatggcaatgatgtcaatttccaggacacaagtgatgaatccagtggctcagggagtggcagtgggtgcatggatgacgtgtgtcccacggagtttgagtttgtcaccacagaggcccccgcagtggatcccgaccggagagaggtggactcttctgcagcccagcgtggccactccctgctctcctggtctctcacctgcattgtcctggcactgcagagactgtgcagataatcttgggtttttggtcagatgaaactgcattttagctatctgaatggccaactcacttcttttcttacactcttggacaatggaccatgccacaaaaacttaccgttttctatgagaagagagcagtaatgcaatctgcctccctttttgttttcccaaagagtaccgggtgccagactgaactgcttcctctttccttcagctatctgtggggaccttgtttattctagagagaattcttactcaaatttttcgtaccaggagattttcttaccttcatttgcttttatgctgcagaagtaaaggaatctcacgttgtgagggttttttttttctcatttaaaataaaaaaggaagaaagaaaataattttccttgtaaaatcgggccaaaccccaagacagctacattttcaacaaaaaagcaaacagagaaaaataaatgaactttaacactgtaagttcagcattgacagccaacttccagtgtaagcttttttgtgacaaatccgggtttaaaaatgcttatggggagaaagcttaaagtttgttctaaatgtagtgaaaatgcactgttgtcttggaggtatcatcttgcactctaaccaaacaacaccaaattaatctggaggtactgatactaaatttggaatcccgtctttaatatgagaacacaaattactacaactcagtacctctgtcttactctgcccaatttcaatttagtaatggcaccattattcttaattcccttaatgtctgtccgctgtatccaattggcacagattttccccttcatcttcaattactagtagctacccccatcaattcaccttcctcaagagtctcaattgaaaataatctttgatgatacaatctctgcttttgccacaggtttgacattaactagacgtttctgcccctgtgctcattaccctcccaaaacaatagtttttttaatgaattgaaacacaattagatccattcctgagttttcatttttaactatttactttgtgtcagttggtttctgcatcacaagggcattctcttacaaaacaactcacaacagaaaaaaaaagtcaagacaaaaaatatatatatatagtattgacatggagatttctttcacttttttagtcttagtatgatcatctatttttatatctatgtatatataaatcacagattttaacttcttaattccaagctcagggttgacacacctttgtaagaaaatgttttgtcaaccagctcttcttgttttgtgctgctcaaagaagggattcctcagtgatcggtgagcaccaagaatcaagaaagagaactttttatgtatctaactgtccatttattaaaaatttgccagggcacacccttctgcatgagtgtgcttcagcctgggtgctccagactacaccaaactcatgggatgagccattggtgtgcagggctttaccggtgatggaaactgtatgtgtaaagaatgttattcatgaaaaaccattgctttcatgtaaaacaccttcggcctaggattcctgcctggcacttggatacattacctaactcaataggccagtttagagccacagcctaacctgttcaccaagtaggccaaagccaggcctttcgctccccctgacagagagaagcaaaataaacccaactgggggctttatgaatacagttggctatccatatgtttcttagtttttatgatgcatctggagtagggaaaagtaatgtttcaagacaccatagtaggccagttacattttaattaactcatcgacagtattgacacgtaaatggtatttttcaatctgttctcatcaaaattaaaattagttattgatttagtcatcacatttaagtagaacacatgtggcacaatagtattaagtatatttgagcacttttgcaagacagaaagtatttacaagcatctattgctactttatgcctaatgaaatataaaatgtaggatgatgagagactttgtggcattctttcatttaaacctttatgaaattaaccatctagttcatcattacatactcctagaaaaccatccatttcactgcccacattttggcttcctaccacaaattccacataagacttctctatgaaggaccagtcatttacattgctcatttcattctgtgttcagaagtcagtattgtctttctccaataattaaggtgcaatacaaattaaatcaaccttgattttccagactatttgaataataacttgcttttatggctttaaactccaggtctttcctttttaaaatatttctgcattctcttttatgaactagatcaggatgccttgtttttcctgtgctttcacccccaaaaggttttgtgcatgtgtatgaatacacataatattagtgaatgtgaacccatgttctatacgcactaaacacacagttaatatataaacgcctgcttcatttgtttcaacaccttcattatcaatatgattcatattgatgagatatagtgatgcataatgagccaggcagagagctgaaatgatatcagttaatgatgtcacagtgttagcaccctgcatggatgtggtcaaaatatcattcaagttgtacttcctagtttttatcatcatactactatgtcatatgattttcagactaatttaacatgagaaatgttttggccctaaaggatttcacttaacctagttaccctatttcagtaagtattttggaattcaaccctcgaattattttttctcatttcagcatagtgataggggatgcaatgaggcttcattattttttatgacctgcccctcatttgctctgatgttccctaaattctgtaatcatatcataacttttgttatgaatagagaggaatgggctcactgaaacctgacactagaaattggtgggtgatgctcataactgcaaacacttagcttattgaagtgcctctatttacatgttctttagttataatatgtatttttctaacagaaatacacgtctgtaattggtatatattatactttgtatgtgtcacaacaaaagctaaacagaggctaaagtctttagcagagaagaatgaattacaaatttaccaataagagctctgtttatggttctgtattgaaggacaaccatgacaaccttctgtcattttcacgaaggccaagttggtactttgattatagccatcgtagaacattagcactagaaatctgtctcccttacaatgacttacctagctagcatcaagtaacttgtatcacctgctttaaatgtaagggatagaaaatactattttgtctacactgaaaaacattattattcattgataagtagtaataattataaaagtaacattctttaaagcaaacacattgaaaatattattacaggcagaaccctgatttttaatttatattccctgctgcagacattagccttctttaattcttttgccattacatacatgtttcggctacagactgaacacgaactaaagtccctaaggaggaaaaaaccttaacatattcctgagatgtgattcttttattacttctttttgcaaagctaattatcaaatgatttgattaaacctagacgcattaggaaatgcaagttttacctaaaacttgcagaaatttaaacacatttccatttacttactaacgaacagacctgatttttatttaaaaacacaatttagctttgccaacagaagagtaaaggaaaccataacttataaatttgtaatgtgttcctccttgttggagacattagccagtgtttagttttagaccaacttatacaaagagagtattgatttgtacacattctggagacttgctatatcatggtttgctatggcacagactcagcttagcatggggacattttgaacttcattcaaagttgagtagttactggaacctttgacattgccttgtaatgaggtacttccaaaaaaagacccctaacaatggcataatagtgaggtctctctgtgcatatacataatatatatgcaggataaatgtgtgcaccaatcaaatctaaaattttatgtgactgtcaaatgaatattatttgggttaagatttttcatttctgatttggatagaaaattgctattaatcttgtattaaaatagtttttaaaaatcta

SEQ ID NO: 138284 - DNA, 792 bp, Homo sapiens
  Payload ID: 7085
  Gene Symbol: GPC6
  Gene Name: glypican 6
  ENST ID: ENST00000617456
  CDS Start-End: 1-792
gatgcaatgctcttggtggcagagcgactggaggggccattcaacattgagtcggtcatggacccgatagatgtcaagatttctgaagccattatgaacatgcaagaaaacagcatgcaggtgtctgcaaaggtctttcagggatgtggtcagcccaaacctgctccagccctcagatctgcccgctcagctcctgaaaattttaatacacgtttcaggccctacaatcctgaggaaagaccaacaactgctgcaggcacaagcttggaccggctggtcacagacataaaagagaaattgaagctctctaaaaaggtctggtcagcattaccctacactatctgcaaggacgagagcgtgacagcgggcacgtccaacgaggaggaatgctggaacgggcacagcaaagccagatacttgcctgagatcatgaatgatgggctcaccaaccagatcaacaatcccgaggtggatgtggacatcactcggcctgacactttcatcagacagcagattatggctctccgtgtgatgaccaacaaactaaaaaacgcctacaatggcaatgatgtcaatttccaggacacaagtgatgaatccagtggctcagggagtggcagtgggtgcatggatgacgtgtgtcccacggagtttgagtttgtcaccacagaggcccccgcagtggatcccgaccggagagaggtggactcttctgcagcccagcgtggccactccctgctctcctggtctctcacctgcattgtcctggcactgcagagactgtgcagataa

SEQ ID NO: 138285 - DNA, 3896 bp, Homo sapiens
  Payload ID: 7086
  Gene Symbol: GM2A
  Gene Name: GM2 ganglioside activator
  Uniprot ID: P17900
  ENST ID: ENST00000357164
  CDS Start-End: 326-907
gtgctaagctcccttccgttccagccgccttcagccccgccgcgctcagttccgcccctttctcttccaactccgcctacgccccagagagggaaggccttgacacctacgctagagagacaggctccaatgaaaagagcgagggggcggagccgggaggaatcggtccaattctcggccgggaagtctctggccgggacggggcagggcgaacctgccagtgactggactcagcttctttgcgtaaccaatactggaaggcatttaaaggcacctctgccgccacagaccttgcagttaactccgccctgacccacccttcccgatgcagtccctgatgcaggctcccctcctgatcgccctgggcttgcttctcgcggcccctgcgcaagcccacctgaaaaagccatcccagctcagtagcttttcctgggataactgtgatgaagggaaggaccctgcggtgatcagaagcctgactctggagcctgaccccatcatcgttcctggaaatgtgaccctcagtgtcatgggcagcaccagtgtccccctgagttctcctctgaaggtggatttagttttggagaaggaggtggctggcctctggatcaagatcccatgcacagactacattggcagctgtacctttgaacacttctgtgatgtgcttgacatgttaattcctactggggagccctgcccagagcccctgcgtacctatgggcttccttgccactgtcccttcaaagaaggaacctactcactgcccaagagcgaattcgttgtgcctgacctggagctgcccagttggctcaccaccgggaactaccgcatagagagcgtcctgagcagcagtgggaagcgtctgggctgcatcaagatcgctgcctctctaaagggcatataacatggcatctgccacagcagaatggagcggtgtgaggaaggtcccttttcctctgttttgtgtttgccaaggccaaactcccactctctgcccccctttaatcccctttctacagtgagtccactaccctcactgaaaatcattttgtaccacttacattttaggctggggcaagcagccctgacctaagggagaatgagttggacagttcttgatagcccagggcatctgctgggctgaccacgttactcatccccgttaacattctctctaaagagcctcgttcatttccaaagcagttaaggaatgggaaccagagtgttttaggacctgaagaatctttatgactctctctctttcactcttttttttttttgtcactaagttaaaagcgaagtgagagtattaacgtttttgttctcctccggccccctgttacaatgaaggggcaaaagtatttgctcttagtctattcctcccttaacttctgtgactaatttttatttcctttctagatttgcccaattaatactagggtgcagtgtatcctggagaggtagggtgtgtgggggaggaatcccttgggggagatattaggagtgctctgttgtttacaaactcaggtacccgcagggcctagcaagagacttaaatgactgataagaaccgtgagaaacatgttgcttccaggcttgatttcgatttttcgctttttttttttttgagacagaatctcactttgtcaccaggctggagtgcagtggtgcaatctcacctcactgcaacctccgcctcctgggttcaagcaattctcctgcctcagcctcccaagtagcttggactacaggccctgccaccacgcccggctaatttgtgtatttttagtagagatggggtttcaccatgttggccaggatggtctcgatctcttgacctcgtgatctgtccaccttggccttgcaaagcgctggattacaggcatgagccactacacccagccgatttttcctttttgattaaagatgctattacaatgtaaatatttcttacacagaaagtcacagcacatgtgcccattgatacaaggctgctgaggcctggtctccagttggaaatataattaagggtggcaaggactggagtcagttggagagtgcatagccagtctgtgaagacaactgccagatactggcaatactccagcctggtgacagagtgagactctgtctcaaaaaaaaagtttcaatgtttactcctagagaagccaaaaatccagatttgtatatgaaatcttaccattttaaaagattggcagctaattatttttttaaaaagctgtgcagtgtgatgtgtcccaaacggactggctcatgggtggccacgtcacaacctctgatctcagaccgtgcatgccttgtcctcttaagacaactcctgtggcaccgtttctccctccacagggccaaagccatagtgtccggtcccaaggacaaggctcttccagtgctaggagaggtatgagcagcctctcacctgtgagctgtggggatcacaaggctgcctgcctcagtcttggagtcctgttgggtgaatgaggcagatgggaaagagcctcaccagcagctgcttttggagcaggggtccaaggaagagagggtggcctcgacatcaaactgcctggatttttctaccaccctgttacatcataacaacttctgaaacacacaccagccctgagttctgggctcatttgaagcctggaatagcaataaatctttttaacttgcggacagtttccccttgccttggctgcatatttcactgatcacatctcaggatttcaaaagcatttttggggtggggctcttttggttggaagggtttgttggaacggtacaggtgagccgaggtgattccagggacggacccttctgcaggagcttgagcttgcttgttgtctctgcttcatcgccatccagctcccttgtttgctattttgctttccatcacatcatgactgcggagagcaaaaatcacctagtgaccattgaacaggtcccagagacaaaatctttttatctgaggaatttaaaagggagcaaagaccacctggtgactatcaggccatgcagaggcaaaacgccttatttggggaaaattaaaagtaattagactttcctattatctaaagcaggcatctggttccagatttcttttccccgaaaaaaaccttagaagtaactaaaatttctgtacatctccggaatgccatgctgaaactcactgcaaccccacggtcccgctttaaggtccataaatatccctaaggaaaaatccaccgtggtacattcagtcctctcaccgaggtgccccatggcagtcttctgcagcattcttctaatacctttcctttttcaaacctatactgttgttggtgaattctttttaccaacccacgagttgaccacttcccaatgccggggatctgacacctcacctggcaatgacctccacagccgtttccctctgttggatcttccagccttattctcaacagttcatttttagttcacattcttgaccgaatctcagtagctcagttaatctttttatgtctgctctgctcttgggtcatatgttccgtgaggtttcttaggggtgggggatgaggagttaaaggtggcatcttcaatcgcaggtcaaagcagactttaataaatggtgctgagccaactggaaagccccttggagaaagttgaagttagacctgtacttcacaccatatgcaagaatgaactccatctggatccaggatccaaatgtaagaaaatgaagccatataaatacagaaggaaacgtggtggaaatatccagtggcaacaaaatattgacacatttgactacatgaagataataaaaatgcttagtaaaaacacaataaaatcaaatgactgggagaaaaatttatccagcctatataatagacaaa

SEQ ID NO: 138286 - DNA, 553 bp, Homo sapiens
  Payload ID: 7086
  Gene Symbol: GM2A
  Gene Name: GM2 ganglioside activator
  ENST ID: ENST00000523466
  CDS Start-End: 116-553
ggtagcaagaaagctgcagaggaggctgccggcagtacaggatgcagggagaacccaggcctggggttgaggccaggagactcaattccagctttactgtgtgcctttagcaggaatgtcatgggtagaagctgctggcgtgtcatctacagccttggaggacaggattgtggccaagcatgaggaggttccagaagtttcagttcagtatgaagaaaaatttcagaaccatcacaaactgccatcccagctcagtagcttttcctgggataactgtgatgaagggaaggaccctgcggtgatcagaagcctgactctggagcctgaccccatcatcgttcctggaaatgtgaccctcagtgtcatgggcagcaccagtgtccccctgagttctcctctgaaggtggatttagttttggagaaggaggtggctggcctctggatcaagatcccatgcacagactacattggcagctgtacctttgaacacttctgtgatgtgcttgacatgttaattcctactggggagccctgcccagagcccctgcgtacc

SEQ ID NO: 138287 - DNA, 643 bp, Homo sapiens
  Payload ID: 7086
  Gene Symbol: GM2A
  Gene Name: GM2 ganglioside activator
  ENST ID: ENST00000523004
  CDS Start-End: 1-313
gaaggaccctgcggtgatcagaagcctgactctggagcctgaccccatcatcgttcctggaaatgtgaccctcagtgtcatgggcagcaccagtgtccccctgagttctcctctgaaggtggatttagttttggagaaggaggtggctggcctctggatcaagatcccatgcacagactacattggcagctgtacctttgaacacttctgtgatgtgcttgacatgttaattcctactggggagccctgcccagagcccctgcgtacctatgggcttccttgccactgtcccttcaaagaagtaagtacttagggaggagagagcgttacccctgtggctaaagagatggggtttggagagaagggtctttgcattctccttctgcagatctgcatgtctctggatttgtaagccagtgtgacctatcaggaatcacttatcttccgggagcctcagttatccatctacgaaatgggagacttgaacttagatgtgatcttcagggccctttatccataataatccatgctctacagtgctatggccgtctctcatcttgtgcggctgttttgagaatgggaagaggggtggtagttcatggctgcaatcctagcagtggctctaggagaaagaccccatcag

SEQ ID NO: 138288 - DNA, 1866 bp, Homo sapiens
  Payload ID: 7087
  Gene Symbol: GNAS
  Gene Name: GNAS complex locus
  Uniprot ID: P63092
  ENST ID: ENST00000265620
  CDS Start-End: 364-1503
gggcggcggcgggggcccggccgaggcaataagagcggcggcggcggcagcggcggcagcagctcccgcagctcctgctctggtccgcctcggcccggcggcggccatcagccccctcggcctcggctcgaggggcggggagctgcgcgcgcccctcggtccgaccgacaccctccccttcccgcccgtccgcgcgccccgcggcccgcggcccgcagtccgccccgcgcgctccttgccgaggagccgagcccgcgcccggcccgcccgcccggcgctgccccggccctcccggcccgcgtgaggccgcccgcgcccgccgccgccgcagcccggccgcgccccgccgccgccgccgccgccatgggctgcctcgggaacagtaagaccgaggaccagcgcaacgaggagaaggcgcagcgtgaggccaacaaaaagatcgagaagcagctgcagaaggacaagcaggtctaccgggccacgcaccgcctgctgctgctgggtgctggagaatctggtaaaagcaccattgtgaagcagatgaggatcctgcatgttaatgggtttaatggagatgagaaggcaaccaaagtgcaggacatcaaaaacaacctgaaagaggcgattgaaaccattgtggccgccatgagcaacctggtgccccccgtggagctggccaaccccgagaaccagttcagagtggactacatcctgagtgtgatgaacgtgcctgactttgacttccctcccgaattctatgagcatgccaaggctctgtgggaggatgaaggagtgcgtgcctgctacgaacgctccaacgagtaccagctgattgactgtgcccagtacttcctggacaagatcgacgtgatcaagcaggctgactatgtgccgagcgatcaggacctgcttcgctgccgtgtcctgacttctggaatctttgagaccaagttccaggtggacaaagtcaacttccacatgtttgacgtgggtggccagcgcgatgaacgccgcaagtggatccagtgcttcaacgatgtgactgccatcatcttcgtggtggccagcagcagctacaacatggtcatccgggaggacaaccagaccaaccgcctgcaggaggctctgaacctcttcaagagcatctggaacaacagatggctgcgcaccatctctgtgatcctgttcctcaacaagcaagatctgctcgctgagaaagtccttgctgggaaatcgaagattgaggactactttccagaatttgctcgctacactactcctgaggatgctactcccgagcccggagaggacccacgcgtgacccgggccaagtacttcattcgagatgagtttctgaggatcagcactgccagtggagatgggcgtcactactgctaccctcatttcacctgcgctgtggacactgagaacatccgccgtgtgttcaacgactgccgtgacatcattcagcgcatgcaccttcgtcagtacgagctgctctaagaagggaacccccaaatttaattaaagccttaagcacaattaattaaaagtgaaacgtaattgtacaagcagttaatcacccaccatagggcatgattaacaaagcaacctttcccttcccccgagtgattttgcgaaacccccttttcccttcagcttgcttagatgttccaaatttagaaagcttaaggcggcctacagaaaaaggaaaaaaggccacaaaagttccctctcactttcagtaaaaataaataaaacagcagcagcaaacaaataaaatgaaataaaagaaacaaatgaaataaatattgtgttgtgcagcattaaaaaaaatcaaaataaaaattaaatgtgagcaaagaa

SEQ ID NO: 138289 - DNA, 581 bp, Homo sapiens
  Payload ID: 7087
  Gene Symbol: GNAS
  Gene Name: GNAS complex locus
  ENST ID: ENST00000349036
  CDS Start-End: 1-581
cccaaagcctcgcgctctctcaaggtcaagaaggtacccctggcggagaagcgcagacagatgcgcaaagaagccctggagaagcgggcccagaagcgcgcagagaagaaacgcagtaagctcatcgacaaacaactccaggacgaaaagatgggctacatgtgtacgcaccgcctgctgcttctaggtgctggagaatctggtaaaagcaccattgtgaagcagatgaggatcctgcatgttaatgggtttaatggagagggcggcgaagaggacccgcaggctgcaaggagcaacagcgatggcagtgagaaggcaaccaaagtgcaggacatcaaaaacaacctgaaagaggcgattgaaaccattgtggccgccatgagcaacctggtgccccccgtggagctggccaaccccgagaaccagttcagagtggactacatcctgagtgtgatgaacgtgcctgactttgacttccctcccgaattctatgagcatgccaaggctctgtgggaggatgaaggagtgcgtgcctgctacgaacgctccaacgagtaccagctgattgactgtgcccagta

SEQ ID NO: 138290 - DNA, 1878 bp, Homo sapiens
  Payload ID: 7087
  Gene Symbol: GNAS
  Gene Name: GNAS complex locus
  Uniprot ID: P84996
  ENST ID: ENST00000306120
  CDS Start-End: 1-1878
atggcgaggcctgtggacccccagaggtctccagacccaactttcaggtcctcaacccggcattcagggaagctggagcccatggaagctacagcccacctcctgaggaagcaatgcccttcgaggctgaacagcccagcttgggaggcttctggcctacactggagcagcctggattccccagtggggtccatgcaggccttgaggccttcggcccagcactcatggagcccggagccttcagtggtgccagaccaggcctgggaggatacagccctccaccagaagaagctatgccctttgagtttgaccagcctgcccagagaggctgcagtcaacttctcttacaggtcccagaccttgctccaggaggcccaggtgctgcaggggtccccggagctcctcccgaggagccccaagccctcaggcctgcaaaggctggctccagaggaggctacagccctccccctgaggagactatgccatttgagcttgatggagaaggatttggggacgacagcccacccccggggctttcccgagttatcgcacaagtcgacggcagcagccagttcgcggcagtcgcggcctcgagtgcggtccgcctcactcccgccgcgaacgcgcctcccctctgggtcccaggcgccatcggcagcccatcccaagaggctgtcagacctccttctaacttcacgggcagcagcccctggatggagatctccggacccccgttcgagattggcagcgcccccgctggggtcgacgacactcccgtcaacatggacagccccccaatcgcgcttgacggcccgcccatcaaggtctccggagccccagataagagagagcgagcagagagacccccagttgaggaggaagcagcagagatggaaggagccgctgatgccgcggagggaggaaaagtaccctctccggggtacggatcccctgccgccggggcagcctcagcggataccgctgccagggcagcccctgcagccccagccgatcctgactccggggcaaccccagaagatcccgactccgggacagcaccagccgatcctgactccggggcattcgcagccgatcccgactccggggcagcccctgccgccccagccgatcccgactccggggcggcccctgacgccccagccgatcccgactccggggcggcccctgacgccccagccgatccagatgccggggcggcccctgaggctcccgccgcccctgcggctgctgagacccgggcagcccatgtcgccccagctgcgccagacgcaggggctcccactgccccagccgcttctgccacccgggcagcccaagtccgccgggcggcctctgcagcccctgcctccggggccagacgcaagatccatctcagaccccccagccccgagatccaggctgccgatccgcctactccgcggcctactcgcgcgtctgcctggcggggcaagtccgagagcagccgcggccgccgcgtgtactacgatgaaggggtggccagcagcgacgatgactccagcggagacgagtccgacgatgggacctccggatgcctccgctggtttcagcatcggcgaaatcgccgccgccgaaagccccagcgcaacttactccgcaactttctcgtgcaagccttcgggggctgcttcggtcgatctgagagtccccagcccaaagcctcgcgctctctcaaggtcaagaaggtacccctggcggagaagcgcagacagatgcgcaaagaagccctggagaagcgggcccagaagcgcgcagagaagaaacgcagtaagctcatcgacaaacaactccaggacgaaaagatgggctacatgtgtacgcaccgcctgctgcttctag

SEQ ID NO: 138291 - DNA, 477 bp, Homo sapiens
  Payload ID: 7087
  Gene Symbol: GNAS
  Gene Name: GNAS complex locus
  ENST ID: ENST00000306090
  CDS Start-End: 1-477
atgggctgcctcgggaacagtaagaccgaggaccagcgcaacgaggagaaggcgcagcgtgaggccaacaaaaagatcgagaagcagctgcaggaggctctgaacctcttcaagagcatctggaacaacagatggctgcgcaccatctctgtgatcctgttcctcaacaagcaagatctgctcgctgagaaagtccttgctgggaaatcgaagattgaggactactttccagaatttgctcgctacactactcctgaggatgctactcccgagcccggagaggacccacgcgtgacccgggccaagtacttcattcgagatgagtttctgaggatcagcactgccagtggagatgggcgtcactactgctaccctcatttcacctgcgctgtggacactgagaacatccgccgtgtgttcaacgactgccgtgacatcattcagcgcatgcaccttcgtcagtacgagctgctctaa

SEQ ID NO: 138292 - DNA, 2578 bp, Homo sapiens
  Payload ID: 7087
  Gene Symbol: GNAS
  Gene Name: GNAS complex locus
  Uniprot ID: O95467
  ENST ID: ENST00000313949
  CDS Start-End: 390-1127
agaacctcactgcccgtccctcctcgcctcagtctcctctgtcctctcccaggcaagaggaccggcggaggcacctctctcgagtcttaggctgcggaatctaagactcagcgagaggagcccgggaggagacagaactttccccttttttcccatcccttcttcttgctcagagaggcaagcaaggcgcggagctttagaaagttcttaagtggtcaggaaggtaggtgcttccctttttctcctcacaaggaggtgaggctgggacctccgggccagcttctcacctcatagggtgtacctttcccggctccagcagccaatgtgcttcggagccactctctgcagagccagagggcaggccggcttctcggtgtgtgcctaagaggatggatcggaggtcccgggctcagcagtggcgccgagctcgccataattacaacgacctgtgcccgcccataggccgccgggcagccaccgcgctcctctggctctcctgctccatcgcgctcctccgcgcccttgccacctccaacgcccgtgcccagcagcgcgcggctgcccaacagcgccggagcttccttaacgcccaccaccgctccggcgcccaggtattccctgagtcccccgaatcggaatctgaccacgagcacgaggaggcagaccttgagctgtccctccccgagtgcctagagtacgaggaagagttcgactacgagaccgagagcgagaccgagtccgaaatcgagtccgagaccgacttcgagaccgagcctgagaccgcccccaccactgagcccgagaccgagcctgaagacgatcgcggcccggtggtgcccaagcactccaccttcggccagtccctcacccagcgtctgcacgctctcaagttgcgaagccccgacgcctccccaagtcgcgcgccgcccagcactcaggagccccagagccccagggaaggggaggagctcaagcccgaggacaaagatccaagggaccccgaagagtcgaaggagcccaaggaggagaagcagcggcgtcgctgcaagccaaagaagcccacccgccgtgacgcgtccccggagtccccttccaaaaagggacccatccccatccggcgtcactaatggaggacgccgtccagattctccttgttttcatggattcaggtgctggagaatctggtaaaagcaccattgtgaagcagatgaggatcctgcatgttaatgggtttaatggagagggcggcgaagaggacccgcaggctgcaaggagcaacagcgatggtgagaaggcaaccaaagtgcaggacatcaaaaacaacctgaaagaggcgattgaaaccattgtggccgccatgagcaacctggtgccccccgtggagctggccaaccccgagaaccagttcagagtggactacatcctgagtgtgatgaacgtgcctgactttgacttccctcccgaattctatgagcatgccaaggctctgtgggaggatgaaggagtgcgtgcctgctacgaacgctccaacgagtaccagctgattgactgtgcccagtacttcctggacaagatcgacgtgatcaagcaggctgactatgtgccgagcgatcaggacctgcttcgctgccgtgtcctgacttctggaatctttgagaccaagttccaggtggacaaagtcaacttccacatgtttgacgtgggtggccagcgcgatgaacgccgcaagtggatccagtgcttcaacgatgtgactgccatcatcttcgtggtggccagcagcagctacaacatggtcatccgggaggacaaccagaccaaccgcctgcaggaggctctgaacctcttcaagagcatctggaacaacagatggctgcgcaccatctctgtgatcctgttcctcaacaagcaagatctgctcgctgagaaagtccttgctgggaaatcgaagattgaggactactttccagaatttgctcgctacactactcctgaggatgctactcccgagcccggagaggacccacgcgtgacccgggccaagtacttcattcgagatgagtttctgaggatcagcactgccagtggagatgggcgtcactactgctaccctcatttcacctgcgctgtggacactgagaacatccgccgtgtgttcaacgactgccgtgacatcattcagcgcatgcaccttcgtcagtacgagctgctctaagaagggaacccccaaatttaattaaagccttaagcacaattaattaaaagtgaaacgtaattgtacaagcagttaatcacccaccatagggcatgattaacaaagcaacctttcccttcccccgagtgattttgcgaaacccccttttcccttcagcttgcttagatgttccaaatttagaaagcttaaggcggcctacagaaaaaggaaaaaaggccacaaaagttccctctcactttcagtaaaaataaataaaacagcagcagcaaacaaataaaatgaaataaaagaaacaaatgaaataaatattgtgttgtgcagcattaaaaaaaatcaaaataaaaattaaatgtgagcaaagaa

SEQ ID NO: 138293 - DNA, 641 bp, Homo sapiens
  Payload ID: 7087
  Gene Symbol: GNAS
  Gene Name: GNAS complex locus
  ENST ID: ENST00000338783
  CDS Start-End: 1-186
cagcgcaacgaggagaaggcgcagcgtgaggccaacaaaaagatcgagaagcagctgcagaaggacaagcaggtctaccgggccacgcaccgcctgctgctgctgggtgctggagaatctggtaaaagcaccattgtgaagcagatgaggatcctgcatgttaatgggtttaatggagaaatataatatccctagatgatggctacagtttctcatcttcccggctatgtcctatcacaatttgcatgctggaattgctcggtcttaggaacttctaataagaatactattctgttatctgaggggggaggggggatggggcccctgctacctgaccttaaacgatgattgaaaaaacgaaaaatgaactgaaatccttaattggcagaaatgtagtatgacaactatccaaaaaggcatctctataagaaatgactaattgacaatctgctgtaccaaaagttggcatttgagcaagatatgacaagtccttagtgagcaacctactgtgtactagatgtcctgctaaacccttgaaccctactaataccttggcctgcacgtctctctcactctgttctgcaagtcaatataagtattaacattcgtgataaataaaaattctctgcatgtttcagcaa

SEQ ID NO: 138294 - DNA, 1975 bp, Homo sapiens
  Payload ID: 7087
  Gene Symbol: GNAS
  Gene Name: GNAS complex locus
  Uniprot ID: P63092
  ENST ID: ENST00000354359
  CDS Start-End: 425-1612
tcgccgccgccgcctcctcctccccccgcctccccccgcccgccgcggcgcttttggctcggggcggcggcgggggcccggccgaggcaataagagcggcggcggcggcagcggcggcagcagctcccgcagctcctgctctggtccgcctcggcccggcggcggccatcagccccctcggcctcggctcgaggggcggggagctgcgcgcgcccctcggtccgaccgacaccctccccttcccgcccgtccgcgcgccccgcggcccgcggcccgcagtccgccccgcgcgctccttgccgaggagccgagcccgcgcccggcccgcccgcccggcgctgccccggccctcccggcccgcgtgaggccgcccgcgcccgccgccgccgcagcccggccgcgccccgccgccgccgccgccgccatgggctgcctcgggaacagtaagaccgaggaccagcgcaacgaggagaaggcgcagcgtgaggccaacaaaaagatcgagaagcagctgcagaaggacaagcaggtctaccgggccacgcaccgcctgctgctgctgggtgctggagaatctggtaaaagcaccattgtgaagcagatgaggatcctgcatgttaatgggtttaatggagagggcggcgaagaggacccgcaggctgcaaggagcaacagcgatggcagtgagaaggcaaccaaagtgcaggacatcaaaaacaacctgaaagaggcgattgaaaccattgtggccgccatgagcaacctggtgccccccgtggagctggccaaccccgagaaccagttcagagtggactacatcctgagtgtgatgaacgtgcctgactttgacttccctcccgaattctatgagcatgccaaggctctgtgggaggatgaaggagtgcgtgcctgctacgaacgctccaacgagtaccagctgattgactgtgcccagtacttcctggacaagatcgacgtgatcaagcaggctgactatgtgccgagcgatcaggacctgcttcgctgccgtgtcctgacttctggaatctttgagaccaagttccaggtggacaaagtcaacttccacatgtttgacgtgggtggccagcgcgatgaacgccgcaagtggatccagtgcttcaacgatgtgactgccatcatcttcgtggtggccagcagcagctacaacatggtcatccgggaggacaaccagaccaaccgcctgcaggaggctctgaacctcttcaagagcatctggaacaacagatggctgcgcaccatctctgtgatcctgttcctcaacaagcaagatctgctcgctgagaaagtccttgctgggaaatcgaagattgaggactactttccagaatttgctcgctacactactcctgaggatgctactcccgagcccggagaggacccacgcgtgacccgggccaagtacttcattcgagatgagtttctgaggatcagcactgccagtggagatgggcgtcactactgctaccctcatttcacctgcgctgtggacactgagaacatccgccgtgtgttcaacgactgccgtgacatcattcagcgcatgcaccttcgtcagtacgagctgctctaagaagggaacccccaaatttaattaaagccttaagcacaattaattaaaagtgaaacgtaattgtacaagcagttaatcacccaccatagggcatgattaacaaagcaacctttcccttcccccgagtgattttgcgaaacccccttttcccttcagcttgcttagatgttccaaatttagaaagcttaaggcggcctacagaaaaaggaaaaaaggccacaaaagttccctctcactttcagtaaaaataaataaaacagcagcagcaaacaaataaaatgaaataaaagaaacaaatgaaataaatattgtgttgtgcagcattaaaaaaaatcaaaataaaaattaaatgtgagcaaagaa

SEQ ID NO: 138295 - DNA, 2551 bp, Homo sapiens
  Payload ID: 7087
  Gene Symbol: GNAS
  Gene Name: GNAS complex locus
  Uniprot ID: O95467
  ENST ID: ENST00000371075
  CDS Start-End: 360-1097
agtctcctctgtcctctcccaggcaagaggaccggcggaggcacctctctcgagtcttaggctgcggaatctaagactcagcgagaggagcccgggaggagacagaactttccccttttttcccatcccttcttcttgctcagagaggcaagcaaggcgcggagctttagaaagttcttaagtggtcaggaaggtaggtgcttccctttttctcctcacaaggaggtgaggctgggacctccgggccagcttctcacctcatagggtgtacctttcccggctccagcagccaatgtgcttcggagccactctctgcagagccagagggcaggccggcttctcggtgtgtgcctaagaggatggatcggaggtcccgggctcagcagtggcgccgagctcgccataattacaacgacctgtgcccgcccataggccgccgggcagccaccgcgctcctctggctctcctgctccatcgcgctcctccgcgcccttgccacctccaacgcccgtgcccagcagcgcgcggctgcccaacagcgccggagcttccttaacgcccaccaccgctccggcgcccaggtattccctgagtcccccgaatcggaatctgaccacgagcacgaggaggcagaccttgagctgtccctccccgagtgcctagagtacgaggaagagttcgactacgagaccgagagcgagaccgagtccgaaatcgagtccgagaccgacttcgagaccgagcctgagaccgcccccaccactgagcccgagaccgagcctgaagacgatcgcggcccggtggtgcccaagcactccaccttcggccagtccctcacccagcgtctgcacgctctcaagttgcgaagccccgacgcctccccaagtcgcgcgccgcccagcactcaggagccccagagccccagggaaggggaggagctcaagcccgaggacaaagatccaagggaccccgaagagtcgaaggagcccaaggaggagaagcagcggcgtcgctgcaagccaaagaagcccacccgccgtgacgcgtccccggagtccccttccaaaaagggacccatccccatccggcgtcactaatggaggacgccgtccagattctccttgttttcatggattcaggtgctggagaatctggtaaaagcaccattgtgaagcagatgaggatcctgcatgttaatgggtttaatggagagggcggcgaagaggacccgcaggctgcaaggagcaacagcgatggcagtgagaaggcaaccaaagtgcaggacatcaaaaacaacctgaaagaggcgattgaaaccattgtggccgccatgagcaacctggtgccccccgtggagctggccaaccccgagaaccagttcagagtggactacatcctgagtgtgatgaacgtgcctgactttgacttccctcccgaattctatgagcatgccaaggctctgtgggaggatgaaggagtgcgtgcctgctacgaacgctccaacgagtaccagctgattgactgtgcccagtacttcctggacaagatcgacgtgatcaagcaggctgactatgtgccgagcgatcaggacctgcttcgctgccgtgtcctgacttctggaatctttgagaccaagttccaggtggacaaagtcaacttccacatgtttgacgtgggtggccagcgcgatgaacgccgcaagtggatccagtgcttcaacgatgtgactgccatcatcttcgtggtggccagcagcagctacaacatggtcatccgggaggacaaccagaccaaccgcctgcaggaggctctgaacctcttcaagagcatctggaacaacagatggctgcgcaccatctctgtgatcctgttcctcaacaagcaagatctgctcgctgagaaagtccttgctgggaaatcgaagattgaggactactttccagaatttgctcgctacactactcctgaggatgctactcccgagcccggagaggacccacgcgtgacccgggccaagtacttcattcgagatgagtttctgaggatcagcactgccagtggagatgggcgtcactactgctaccctcatttcacctgcgctgtggacactgagaacatccgccgtgtgttcaacgactgccgtgacatcattcagcgcatgcaccttcgtcagtacgagctgctctaagaagggaacccccaaatttaattaaagccttaagcacaattaattaaaagtgaaacgtaattgtacaagcagttaatcacccaccatagggcatgattaacaaagcaacctttcccttcccccgagtgattttgcgaaacccccttttcccttcagcttgcttagatgttccaaatttagaaagcttaaggcggcctacagaaaaaggaaaaaaggccacaaaagttccctctcactttcagtaaaaataaataaaacagcagcagcaaacaaataaaatgaaataaaagaaacaaatgaaataaatattgtgttgtgcagcattaaaaaaaatcaaaataaaaattaaatgtgagcaaagaa

SEQ ID NO: 138296 - DNA, 730 bp, Homo sapiens
  Payload ID: 7087
  Gene Symbol: GNAS
  Gene Name: GNAS complex locus
  ENST ID: ENST00000371081
  CDS Start-End: 12-275
ccgccgccgccatgggctgcctcgggaacagtaagaccgaggaccagcgcaacgaggagaaggcgcagcgtgaggccaacaaaaagatcgagaagcagctgcagaaggacaagcaggtctaccgggccacgcaccgcctgctgctgctgggtgctggagaatctggtaaaagcaccattgtgaagcagatgaggatcctgcatgttaatgggtttaatggagagggcggcgaagaggacccgcaggctgcaaggagcaacagcgatggaatataatatccctagatgatggctacagtttctcatcttcccggctatgtcctatcacaatttgcatgctggaattgctcggtcttaggaacttctaataagaatactattctgttatctgaggggggaggggggatggggcccctgctacctgaccttaaacgatgattgaaaaaacgaaaaatgaactgaaatccttaattggcagaaatgtagtatgacaactatccaaaaaggcatctctataagaaatgactaattgacaatctgctgtaccaaaagttggcatttgagcaagatatgacaagtccttagtgagcaacctactgtgtactagatgtcctgctaaacccttgaaccctactaataccttggcctgcacgtctctctcactctgttctgcaagtcaatataagtattaacattcgtgataaataaaaattctctgcatgtttcagcaa

SEQ ID NO: 138297 - DNA, 1972 bp, Homo sapiens
  Payload ID: 7087
  Gene Symbol: GNAS
  Gene Name: GNAS complex locus
  Uniprot ID: P63092
  ENST ID: ENST00000371085
  CDS Start-End: 425-1609
tcgccgccgccgcctcctcctccccccgcctccccccgcccgccgcggcgcttttggctcggggcggcggcgggggcccggccgaggcaataagagcggcggcggcggcagcggcggcagcagctcccgcagctcctgctctggtccgcctcggcccggcggcggccatcagccccctcggcctcggctcgaggggcggggagctgcgcgcgcccctcggtccgaccgacaccctccccttcccgcccgtccgcgcgccccgcggcccgcggcccgcagtccgccccgcgcgctccttgccgaggagccgagcccgcgcccggcccgcccgcccggcgctgccccggccctcccggcccgcgtgaggccgcccgcgcccgccgccgccgcagcccggccgcgccccgccgccgccgccgccgccatgggctgcctcgggaacagtaagaccgaggaccagcgcaacgaggagaaggcgcagcgtgaggccaacaaaaagatcgagaagcagctgcagaaggacaagcaggtctaccgggccacgcaccgcctgctgctgctgggtgctggagaatctggtaaaagcaccattgtgaagcagatgaggatcctgcatgttaatgggtttaatggagagggcggcgaagaggacccgcaggctgcaaggagcaacagcgatggtgagaaggcaaccaaagtgcaggacatcaaaaacaacctgaaagaggcgattgaaaccattgtggccgccatgagcaacctggtgccccccgtggagctggccaaccccgagaaccagttcagagtggactacatcctgagtgtgatgaacgtgcctgactttgacttccctcccgaattctatgagcatgccaaggctctgtgggaggatgaaggagtgcgtgcctgctacgaacgctccaacgagtaccagctgattgactgtgcccagtacttcctggacaagatcgacgtgatcaagcaggctgactatgtgccgagcgatcaggacctgcttcgctgccgtgtcctgacttctggaatctttgagaccaagttccaggtggacaaagtcaacttccacatgtttgacgtgggtggccagcgcgatgaacgccgcaagtggatccagtgcttcaacgatgtgactgccatcatcttcgtggtggccagcagcagctacaacatggtcatccgggaggacaaccagaccaaccgcctgcaggaggctctgaacctcttcaagagcatctggaacaacagatggctgcgcaccatctctgtgatcctgttcctcaacaagcaagatctgctcgctgagaaagtccttgctgggaaatcgaagattgaggactactttccagaatttgctcgctacactactcctgaggatgctactcccgagcccggagaggacccacgcgtgacccgggccaagtacttcattcgagatgagtttctgaggatcagcactgccagtggagatgggcgtcactactgctaccctcatttcacctgcgctgtggacactgagaacatccgccgtgtgttcaacgactgccgtgacatcattcagcgcatgcaccttcgtcagtacgagctgctctaagaagggaacccccaaatttaattaaagccttaagcacaattaattaaaagtgaaacgtaattgtacaagcagttaatcacccaccatagggcatgattaacaaagcaacctttcccttcccccgagtgattttgcgaaacccccttttcccttcagcttgcttagatgttccaaatttagaaagcttaaggcggcctacagaaaaaggaaaaaaggccacaaaagttccctctcactttcagtaaaaataaataaaacagcagcagcaaacaaataaaatgaaataaaagaaacaaatgaaataaatattgtgttgtgcagcattaaaaaaaatcaaaataaaaattaaatgtgagcaaagaa

SEQ ID NO: 138298 - DNA, 1931 bp, Homo sapiens
  Payload ID: 7087
  Gene Symbol: GNAS
  Gene Name: GNAS complex locus
  Uniprot ID: P63092
  ENST ID: ENST00000371095
  CDS Start-End: 426-1568
ctcgccgccgccgcctcctcctccccccgcctccccccgcccgccgcggcgcttttggctcggggcggcggcgggggcccggccgaggcaataagagcggcggcggcggcagcggcggcagcagctcccgcagctcctgctctggtccgcctcggcccggcggcggccatcagccccctcggcctcggctcgaggggcggggagctgcgcgcgcccctcggtccgaccgacaccctccccttcccgcccgtccgcgcgccccgcggcccgcggcccgcagtccgccccgcgcgctccttgccgaggagccgagcccgcgcccggcccgcccgcccggcgctgccccggccctcccggcccgcgtgaggccgcccgcgcccgccgccgccgcagcccggccgcgccccgccgccgccgccgccgccatgggctgcctcgggaacagtaagaccgaggaccagcgcaacgaggagaaggcgcagcgtgaggccaacaaaaagatcgagaagcagctgcagaaggacaagcaggtctaccgggccacgcaccgcctgctgctgctgggtgctggagaatctggtaaaagcaccattgtgaagcagatgaggatcctgcatgttaatgggtttaatggagacagtgagaaggcaaccaaagtgcaggacatcaaaaacaacctgaaagaggcgattgaaaccattgtggccgccatgagcaacctggtgccccccgtggagctggccaaccccgagaaccagttcagagtggactacatcctgagtgtgatgaacgtgcctgactttgacttccctcccgaattctatgagcatgccaaggctctgtgggaggatgaaggagtgcgtgcctgctacgaacgctccaacgagtaccagctgattgactgtgcccagtacttcctggacaagatcgacgtgatcaagcaggctgactatgtgccgagcgatcaggacctgcttcgctgccgtgtcctgacttctggaatctttgagaccaagttccaggtggacaaagtcaacttccacatgtttgacgtgggtggccagcgcgatgaacgccgcaagtggatccagtgcttcaacgatgtgactgccatcatcttcgtggtggccagcagcagctacaacatggtcatccgggaggacaaccagaccaaccgcctgcaggaggctctgaacctcttcaagagcatctggaacaacagatggctgcgcaccatctctgtgatcctgttcctcaacaagcaagatctgctcgctgagaaagtccttgctgggaaatcgaagattgaggactactttccagaatttgctcgctacactactcctgaggatgctactcccgagcccggagaggacccacgcgtgacccgggccaagtacttcattcgagatgagtttctgaggatcagcactgccagtggagatgggcgtcactactgctaccctcatttcacctgcgctgtggacactgagaacatccgccgtgtgttcaacgactgccgtgacatcattcagcgcatgcaccttcgtcagtacgagctgctctaagaagggaacccccaaatttaattaaagccttaagcacaattaattaaaagtgaaacgtaattgtacaagcagttaatcacccaccatagggcatgattaacaaagcaacctttcccttcccccgagtgattttgcgaaacccccttttcccttcagcttgcttagatgttccaaatttagaaagcttaaggcggcctacagaaaaaggaaaaaaggccacaaaagttccctctcactttcagtaaaaataaataaaacagcagcagcaaacaaataaaatgaaataaaagaaacaaatgaaataaatattgtgttgtgcagcattaaaaaaaatcaaaataaaaattaaatgtgagcaaagaa

SEQ ID NO: 138299 - DNA, 1719 bp, Homo sapiens
  Payload ID: 7087
  Gene Symbol: GNAS
  Gene Name: GNAS complex locus
  Uniprot ID: O95467
  ENST ID: ENST00000371098
  CDS Start-End: 360-1097
agtctcctctgtcctctcccaggcaagaggaccggcggaggcacctctctcgagtcttaggctgcggaatctaagactcagcgagaggagcccgggaggagacagaactttccccttttttcccatcccttcttcttgctcagagaggcaagcaaggcgcggagctttagaaagttcttaagtggtcaggaaggtaggtgcttccctttttctcctcacaaggaggtgaggctgggacctccgggccagcttctcacctcatagggtgtacctttcccggctccagcagccaatgtgcttcggagccactctctgcagagccagagggcaggccggcttctcggtgtgtgcctaagaggatggatcggaggtcccgggctcagcagtggcgccgagctcgccataattacaacgacctgtgcccgcccataggccgccgggcagccaccgcgctcctctggctctcctgctccatcgcgctcctccgcgcccttgccacctccaacgcccgtgcccagcagcgcgcggctgcccaacagcgccggagcttccttaacgcccaccaccgctccggcgcccaggtattccctgagtcccccgaatcggaatctgaccacgagcacgaggaggcagaccttgagctgtccctccccgagtgcctagagtacgaggaagagttcgactacgagaccgagagcgagaccgagtccgaaatcgagtccgagaccgacttcgagaccgagcctgagaccgcccccaccactgagcccgagaccgagcctgaagacgatcgcggcccggtggtgcccaagcactccaccttcggccagtccctcacccagcgtctgcacgctctcaagttgcgaagccccgacgcctccccaagtcgcgcgccgcccagcactcaggagccccagagccccagggaaggggaggagctcaagcccgaggacaaagatccaagggaccccgaagagtcgaaggagcccaaggaggagaagcagcggcgtcgctgcaagccaaagaagcccacccgccgtgacgcgtccccggagtccccttccaaaaagggacccatccccatccggcgtcactaatggaggacgccgtccagattctccttgttttcatggattcaggtgctggagaatctggtaaaagcaccattgtgaagcagatgaggatcctgcatgttaatgggtttaatggagagggcggcgaagaggacccgcaggctgcaaggagcaacagcgatggaatataatatccctagatgatggctacagtttctcatcttcccggctatgtcctatcacaatttgcatgctggaattgctcggtcttaggaacttctaataagaatactattctgttatctgaggggggaggggggatggggcccctgctacctgaccttaaacgatgattgaaaaaacgaaaaatgaactgaaatccttaattggcagaaatgtagtatgacaactatccaaaaaggcatctctataagaaatgactaattgacaatctgctgtaccaaaagttggcatttgagcaagatatgacaagtccttagtgagcaacctactgtgtactagatgtcctgctaaacccttgaaccctactaataccttggcctgcacgtctctctcactctgttctgcaagtcaatataagtattaacattcgtgataaataaaaattctctgcatgtttcagcaa

SEQ ID NO: 138300 - DNA, 3709 bp, Homo sapiens
  Payload ID: 7087
  Gene Symbol: GNAS
  Gene Name: GNAS complex locus
  ENST ID: ENST00000371099
  CDS Start-End: 4-2166
gttatgggcgtgcgcaactgcctctacggcaataatatgtcaggacaacgcgatatcccccctgaaatcggggaacagcccgagcaaccacctttggaggccccaggggcagctgcccccggtgctgggcctagcccagccgaagagatggagaccgaaccgcctcacaacgagcccatccccgtcgagaatgatggcgaggcctgtggacccccagaggtctccagacccaactttcaggtcctcaacccggcattcagggaagctggagcccatggaagctacagcccacctcctgaggaagcaatgcccttcgaggctgaacagcccagcttgggaggcttctggcctacactggagcagcctggattccccagtggggtccatgcaggccttgaggccttcggcccagcactcatggagcccggagccttcagtggtgccagaccaggcctgggaggatacagccctccaccagaagaagctatgccctttgagtttgaccagcctgcccagagaggctgcagtcaacttctcttacaggtcccagaccttgctccaggaggcccaggtgctgcaggggtccccggagctcctcccgaggagccccaagccctcaggcctgcaaaggctggctccagaggaggctacagccctccccctgaggagactatgccatttgagcttgatggagaaggatttggggacgacagcccacccccggggctttcccgagttatcgcacaagtcgacggcagcagccagttcgcggcagtcgcggcctcgagtgcggtccgcctcactcccgccgcgaacgcgcctcccctctgggtcccaggcgccatcggcagcccatcccaagaggctgtcagacctccttctaacttcacgggcagcagcccctggatggagatctccggacccccgttcgagattggcagcgcccccgctggggtcgacgacactcccgtcaacatggacagccccccaatcgcgcttgacggcccgcccatcaaggtctccggagccccagataagagagagcgagcagagagacccccagttgaggaggaagcagcagagatggaaggagccgctgatgccgcggagggaggaaaagtaccctctccggggtacggatcccctgccgccggggcagcctcagcggataccgctgccagggcagcccctgcagccccagccgatcctgactccggggcaaccccagaagatcccgactccgggacagcaccagccgatcctgactccggggcattcgcagccgatcccgactccggggcagcccctgccgccccagccgatcccgactccggggcggcccctgacgccccagccgatcccgactccggggcggcccctgacgccccagccgatccagatgccggggcggcccctgaggctcccgccgcccctgcggctgctgagacccgggcagcccatgtcgccccagctgcgccagacgcaggggctcccactgccccagccgcttctgccacccgggcagcccaagtccgccgggcggcctctgcagcccctgcctccggggccagacgcaagatccatctcagaccccccagccccgagatccaggctgccgatccgcctactccgcggcctactcgcgcgtctgcctggcggggcaagtccgagagcagccgcggccgccgcgtgtactacgatgaaggggtggccagcagcgacgatgactccagcggagacgagtccgacgatgggacctccggatgcctccgctggtttcagcatcggcgaaatcgccgccgccgaaagccccagcgcaacttactccgcaactttctcgtgcaagccttcgggggctgcttcggtcgatctgagagtccccagcccaaagcctcgcgctctctcaaggtcaagaaggtacccctggcggagaagcgcagacagatgcgcaaagaagccctggagaagcgggcccagaagcgcgcagagaagaaacgcagtaagctcatcgacaaacaactccaggacgaaaagatgggctacatgtgtacgcaccgcctgctgcttctagggagaaaagtggtgccgagcgacactgagggtcgtttccggctggacaggccagcgccagcaaccgtaagctggacaggcaggggcttcaggtgagccaggaactgccggggaggggccccggggccccgggactcccctggctaggctggtggggtccacggtgggctggggtcattggggaaggcgcgccccgcctcgcctggcacggctgcttggactcagacagcttgtcgttggtgtgtgttggtgtccatattctgtgttcgcctgtgcatgatacgctgaagtgtcccctgttcctatcccggcacccccaaattacccgccgactgtgtacttgtacttgggaacgggctgtgttgtggtttgcgccatggcccgggcaaaaaactttcgctgttcgcacactctggtggtacctgcgcccgggcgctctgcggcaagcggtgcggaggacacgcggggaaggtggcggggcctcccgggaaataagcggggcccttggcctgggggagcggggaatcgcttttcgccggcctccgcgtaaccttgtttctgtatgtctttctctctttttccttttgcgctaagcgtttcctcacttctcattcgttcgccaaaccctcccgcctttacagttgaaaaaccagacacacaggtatctggggcgcccggggctgcacacctcagttcggtattctgcacacacacagctcgcctggtcgggggatgggggaaaggggaaacacaacctgctgtaggcaagtccggatcccaaaccacttgggggctggttccaagggggtgggcgtggctgtgtttaaaaaatatgaaataatttttcttcctagcgaagagcccgaggtaagccaatcatttttacaaagagtacagtaggaggggcttggtttaaaaagatgggggttatgtgttgtgagtggaatgtcacctttgtgtttgaaatgcaactaaaataaaagttttcaaaaaatgctctgagtgtatttgaagtgtgtggacaaagtatggcaaaaccgtgaatatgacttgtgaaaacaagtaaatgtttgcatgtgaattttttcaggcagctttagctgggggcaaagaggcttgtcaaaggtaaggtcttctgcaaattggctctggatacaaaaaatatataaaggtattttgattacagaagttaaaaatcatgatattcttgtcaggagggtattttggtggccttctaccttccccctcctcctctgctcacatttccccacctctcggtgccctcccctctccaggatccccctcctcaccccacagcaagaccctctcctgtatctcccagtctttccctggccattcccagttccccaccctccccccagccccccaagacttcttaacttcaaatctggggcattaaatatttttgccacatttaaacaaagcatcaattagcaatggtctgaatatgtggtttaaatgaaaacttccaaacaaacttcacaagcttaatttttacattttattctctaagactttctctaagaccttccaagggatttcaagatcacagtttttaaggctgcgctacatttgttaaatatgttagaatgtgtgatggttttttattaatggcatt

SEQ ID NO: 138301 - DNA, 4029 bp, Homo sapiens
  Payload ID: 7087
  Gene Symbol: GNAS
  Gene Name: GNAS complex locus
  Uniprot ID: Q5JWF2
  ENST ID: ENST00000371100
  CDS Start-End: 553-3666
aaagactccaaatcagtcagggagaggagtggaaggagccaaaacgtccctgcgaggcctgcgctcaccagcccccttacccaaagtcccgggcccctggcgccaggagcaggctcctggagccggagccagctcggcactggaaccggcgtcctctggtggcagagagagagcgctactggcgattttcggaccgaatcggcacgctcgtcagatccaagcaggcgggactggcctggagcaaaaagaaagagagaggagggcgtaaggatagaccaaggaagaggggctggggggcagcctgggggcatgaaaagtggccaggaaggagccaagactccaccagcaacaattgagttgcttcagcctcagtctagggttccttccaggccttgaaccccccaacctcacaagggttggaaagtgaggccggtgaactttccagctggtactttgattttaaaataataataataattttttcaccctagttcggttgggtgctccatcttacggagccccaaacttattttgagaggccgccaccgtgttatgggcgtgcgcaactgcctctacggcaataatatgtcaggacaacgcgatatcccccctgaaatcggggaacagcccgagcaaccacctttggaggccccaggggcagctgcccccggtgctgggcctagcccagccgaagagatggagaccgaaccgcctcacaacgagcccatccccgtcgagaatgatggcgaggcctgtggacccccagaggtctccagacccaactttcaggtcctcaacccggcattcagggaagctggagcccatggaagctacagcccacctcctgaggaagcaatgcccttcgaggctgaacagcccagcttgggaggcttctggcctacactggagcagcctggattccccagtggggtccatgcaggccttgaggccttcggcccagcactcatggagcccggagccttcagtggtgccagaccaggcctgggaggatacagccctccaccagaagaagctatgccctttgagtttgaccagcctgcccagagaggctgcagtcaacttctcttacaggtcccagaccttgctccaggaggcccaggtgctgcaggggtccccggagctcctcccgaggagccccaagccctcaggcctgcaaaggctggctccagaggaggctacagccctccccctgaggagactatgccatttgagcttgatggagaaggatttggggacgacagcccacccccggggctttcccgagttatcgcacaagtcgacggcagcagccagttcgcggcagtcgcggcctcgagtgcggtccgcctcactcccgccgcgaacgcgcctcccctctgggtcccaggcgccatcggcagcccatcccaagaggctgtcagacctccttctaacttcacgggcagcagcccctggatggagatctccggacccccgttcgagattggcagcgcccccgctggggtcgacgacactcccgtcaacatggacagccccccaatcgcgcttgacggcccgcccatcaaggtctccggagccccagataagagagagcgagcagagagacccccagttgaggaggaagcagcagagatggaaggagccgctgatgccgcggagggaggaaaagtaccctctccggggtacggatcccctgccgccggggcagcctcagcggataccgctgccagggcagcccctgcagccccagccgatcctgactccggggcaaccccagaagatcccgactccgggacagcaccagccgatcctgactccggggcattcgcagccgatcccgactccggggcagcccctgccgccccagccgatcccgactccggggcggcccctgacgccccagccgatcccgactccggggcggcccctgacgccccagccgatccagatgccggggcggcccctgaggctcccgccgcccctgcggctgctgagacccgggcagcccatgtcgccccagctgcgccagacgcaggggctcccactgccccagccgcttctgccacccgggcagcccaagtccgccgggcggcctctgcagcccctgcctccggggccagacgcaagatccatctcagaccccccagccccgagatccaggctgccgatccgcctactccgcggcctactcgcgcgtctgcctggcggggcaagtccgagagcagccgcggccgccgcgtgtactacgatgaaggggtggccagcagcgacgatgactccagcggagacgagtccgacgatgggacctccggatgcctccgctggtttcagcatcggcgaaatcgccgccgccgaaagccccagcgcaacttactccgcaactttctcgtgcaagccttcgggggctgcttcggtcgatctgagagtccccagcccaaagcctcgcgctctctcaaggtcaagaaggtacccctggcggagaagcgcagacagatgcgcaaagaagccctggagaagcgggcccagaagcgcgcagagaagaaacgcagtaagctcatcgacaaacaactccaggacgaaaagatgggctacatgtgtacgcaccgcctgctgcttctaggtgctggagaatctggtaaaagcaccattgtgaagcagatgaggatcctgcatgttaatgggtttaatggagagggcggcgaagaggacccgcaggctgcaaggagcaacagcgatggtgagaaggcaaccaaagtgcaggacatcaaaaacaacctgaaagaggcgattgaaaccattgtggccgccatgagcaacctggtgccccccgtggagctggccaaccccgagaaccagttcagagtggactacatcctgagtgtgatgaacgtgcctgactttgacttccctcccgaattctatgagcatgccaaggctctgtgggaggatgaaggagtgcgtgcctgctacgaacgctccaacgagtaccagctgattgactgtgcccagtacttcctggacaagatcgacgtgatcaagcaggctgactatgtgccgagcgatcaggacctgcttcgctgccgtgtcctgacttctggaatctttgagaccaagttccaggtggacaaagtcaacttccacatgtttgacgtgggtggccagcgcgatgaacgccgcaagtggatccagtgcttcaacgatgtgactgccatcatcttcgtggtggccagcagcagctacaacatggtcatccgggaggacaaccagaccaaccgcctgcaggaggctctgaacctcttcaagagcatctggaacaacagatggctgcgcaccatctctgtgatcctgttcctcaacaagcaagatctgctcgctgagaaagtccttgctgggaaatcgaagattgaggactactttccagaatttgctcgctacactactcctgaggatgctactcccgagcccggagaggacccacgcgtgacccgggccaagtacttcattcgagatgagtttctgaggatcagcactgccagtggagatgggcgtcactactgctaccctcatttcacctgcgctgtggacactgagaacatccgccgtgtgttcaacgactgccgtgacatcattcagcgcatgcaccttcgtcagtacgagctgctctaagaagggaacccccaaatttaattaaagccttaagcacaattaattaaaagtgaaacgtaattgtacaagcagttaatcacccaccatagggcatgattaacaaagcaacctttcccttcccccgagtgattttgcgaaacccccttttcccttcagcttgcttagatgttccaaatttagaaagcttaaggcggcctacagaaaaaggaaaaaaggccacaaaagttccctctcactttcagtaaaaataaataaaacagcagcagcaaacaaataaaatgaaataaaagaaacaaatgaaataaatattgtgttgtgcagcattaaaaaaaatcaaaataaaaattaaatgtgagcaaagaa

SEQ ID NO: 138302 - DNA, 3438 bp, Homo sapiens
  Payload ID: 7087
  Gene Symbol: GNAS
  Gene Name: GNAS complex locus
  Uniprot ID: Q5JWF2
  ENST ID: ENST00000371102
  CDS Start-End: 4-3075
gttatgggcgtgcgcaactgcctctacggcaataatatgtcaggacaacgcgatatcccccctgaaatcggggaacagcccgagcaaccacctttggaggccccaggggcagctgcccccggtgctgggcctagcccagccgaagagatggagaccgaaccgcctcacaacgagcccatccccgtcgagaatgatggcgaggcctgtggacccccagaggtctccagacccaactttcaggtcctcaacccggcattcagggaagctggagcccatggaagctacagcccacctcctgaggaagcaatgcccttcgaggctgaacagcccagcttgggaggcttctggcctacactggagcagcctggattccccagtggggtccatgcaggccttgaggccttcggcccagcactcatggagcccggagccttcagtggtgccagaccaggcctgggaggatacagccctccaccagaagaagctatgccctttgagtttgaccagcctgcccagagaggctgcagtcaacttctcttacaggtcccagaccttgctccaggaggcccaggtgctgcaggggtccccggagctcctcccgaggagccccaagccctcaggcctgcaaaggctggctccagaggaggctacagccctccccctgaggagactatgccatttgagcttgatggagaaggatttggggacgacagcccacccccggggctttcccgagttatcgcacaagtcgacggcagcagccagttcgcggcagtcgcggcctcgagtgcggtccgcctcactcccgccgcgaacgcgcctcccctctgggtcccaggcgccatcggcagcccatcccaagaggctgtcagacctccttctaacttcacgggcagcagcccctggatggagatctccggacccccgttcgagattggcagcgcccccgctggggtcgacgacactcccgtcaacatggacagccccccaatcgcgcttgacggcccgcccatcaaggtctccggagccccagataagagagagcgagcagagagacccccagttgaggaggaagcagcagagatggaaggagccgctgatgccgcggagggaggaaaagtaccctctccggggtacggatcccctgccgccggggcagcctcagcggataccgctgccagggcagcccctgcagccccagccgatcctgactccggggcaaccccagaagatcccgactccgggacagcaccagccgatcctgactccggggcattcgcagccgatcccgactccggggcagcccctgccgccccagccgatcccgactccggggcggcccctgacgccccagccgatcccgactccggggcggcccctgacgccccagccgatccagatgccggggcggcccctgaggctcccgccgcccctgcggctgctgagacccgggcagcccatgtcgccccagctgcgccagacgcaggggctcccactgccccagccgcttctgccacccgggcagcccaagtccgccgggcggcctctgcagcccctgcctccggggccagacgcaagatccatctcagaccccccagccccgagatccaggctgccgatccgcctactccgcggcctactcgcgcgtctgcctggcggggcaagtccgagagcagccgcggccgccgcgtgtactacgatgaaggggtggccagcagcgacgatgactccagcggagacgagtccgacgatgggacctccggatgcctccgctggtttcagcatcggcgaaatcgccgccgccgaaagccccagcgcaacttactccgcaactttctcgtgcaagccttcgggggctgcttcggtcgatctgagagtccccagcccaaagcctcgcgctctctcaaggtcaagaaggtacccctggcggagaagcgcagacagatgcgcaaagaagccctggagaagcgggcccagaagcgcgcagagaagaaacgcagtaagctcatcgacaaacaactccaggacgaaaagatgggctacatgtgtacgcaccgcctgctgcttctaggtgctggagaatctggtaaaagcaccattgtgaagcagatgaggatcctgcatgttaatgggtttaatggagacagtgagaaggcaaccaaagtgcaggacatcaaaaacaacctgaaagaggcgattgaaaccattgtggccgccatgagcaacctggtgccccccgtggagctggccaaccccgagaaccagttcagagtggactacatcctgagtgtgatgaacgtgcctgactttgacttccctcccgaattctatgagcatgccaaggctctgtgggaggatgaaggagtgcgtgcctgctacgaacgctccaacgagtaccagctgattgactgtgcccagtacttcctggacaagatcgacgtgatcaagcaggctgactatgtgccgagcgatcaggacctgcttcgctgccgtgtcctgacttctggaatctttgagaccaagttccaggtggacaaagtcaacttccacatgtttgacgtgggtggccagcgcgatgaacgccgcaagtggatccagtgcttcaacgatgtgactgccatcatcttcgtggtggccagcagcagctacaacatggtcatccgggaggacaaccagaccaaccgcctgcaggaggctctgaacctcttcaagagcatctggaacaacagatggctgcgcaccatctctgtgatcctgttcctcaacaagcaagatctgctcgctgagaaagtccttgctgggaaatcgaagattgaggactactttccagaatttgctcgctacactactcctgaggatgctactcccgagcccggagaggacccacgcgtgacccgggccaagtacttcattcgagatgagtttctgaggatcagcactgccagtggagatgggcgtcactactgctaccctcatttcacctgcgctgtggacactgagaacatccgccgtgtgttcaacgactgccgtgacatcattcagcgcatgcaccttcgtcagtacgagctgctctaagaagggaacccccaaatttaattaaagccttaagcacaattaattaaaagtgaaacgtaattgtacaagcagttaatcacccaccatagggcatgattaacaaagcaacctttcccttcccccgagtgattttgcgaaacccccttttcccttcagcttgcttagatgttccaaatttagaaagcttaaggcggcctacagaaaaaggaaaaaaggccacaaaagttccctctcactttcagtaaaaataaataaaacagcagcagcaaacaaataaaatgaaataaaagaaacaaatgaaataaatattgtgttgtgcagcattaaaaaaaatcaaaataaaaattaaatgtgagcaaagaa

SEQ ID NO: 138303 - DNA, 632 bp, Homo sapiens
  Payload ID: 7087
  Gene Symbol: GNAS
  Gene Name: GNAS complex locus
  ENST ID: ENST00000453292
  CDS Start-End: 1-501
cccgaatcggaatctgaccacgagcacgaggaggcagaccttgagctgtccctccccgagtgcctagagtacgaggaagagttcgactacgagaccgagagcgagaccgagtccgaaatcgagtccgagaccgacttcgagaccgagcctgagaccgcccccaccactgagcccgagaccgagcctgaagacgatcgcggcccggtggtgcccaagcactccaccttcggccagtccctcacccagcgtctgcacgctctcaagttgcgaagccccgacgcctccccaagtcgcgcgccgcccagcactcaggagccccagagccccagggaaggggaggagctcaagcccgaggacaaagatccaagggaccccgaagagtcgaaggagcccaaggaggagaagcagcggcgtcgctgcaagccaaagaagcccacccgccgtgacgcgtccccggagtccccttccaaaaagggacccatccccatccggcgtcactaatggaggacgccgtccagattctccttgttttcatggattcaggtgctggagaatctggtaaaagcaccattgtgaagcagatgaggatcctgcatgttaatgggtttaatggagacagtgagaaggcaacc

SEQ ID NO: 138304 - DNA, 736 bp, Homo sapiens
  Payload ID: 7087
  Gene Symbol: GNAS
  Gene Name: GNAS complex locus
  ENST ID: ENST00000423897
  CDS Start-End: 1-281
aggtacccctggcggagaagcgcagacagatgcgcaaagaagccctggagaagcgggcccagaagcgcgcagagaagaaacgcagtaagctcatcgacaaacaactccaggacgaaaagatgggctacatgtgtacgcaccgcctgctgcttctaggtgctggagaatctggtaaaagcaccattgtgaagcagatgaggatcctgcatgttaatgggtttaatggagagggcggcgaagaggacccgcaggctgcaaggagcaacagcgatggaatataatatccctagatgatggctacagtttctcatcttcccggctatgtcctatcacaatttgcatgctggaattgctcggtcttaggaacttctaataagaatactattctgttatctgaggggggaggggggatggggcccctgctacctgaccttaaacgatgattgaaaaaacgaaaaatgaactgaaatccttaattggcagaaatgtagtatgacaactatccaaaaaggcatctctataagaaatgactaattgacaatctgctgtaccaaaagttggcatttgagcaagatatgacaagtccttagtgagcaacctactgtgtactagatgtcctgctaaacccttgaaccctactaataccttggcctgcacgtctctctcactctgttctgcaagtcaatataagtattaacattcgtgataaataaaaattctctgcatgtttcagcaa

SEQ ID NO: 138305 - DNA, 595 bp, Homo sapiens
  Payload ID: 7087
  Gene Symbol: GNAS
  Gene Name: GNAS complex locus
  ENST ID: ENST00000450130
  CDS Start-End: 1-595
agccttcgggggctgcttcggtcgatctgagagtccccagcccaaagcctcgcgctctctcaaggtcaagaaggtacccctggcggagaagcgcagacagatgcgcaaagaagccctggagaagcgggcccagaagcgcgcagagaagaaacgcagtaagctcatcgacaaacaactccaggacgaaaagatgggctacatgtgtacgcaccgcctgctgcttctaggtgctggagaatctggtaaaagcaccattgtgaagcagatgaggatcctgcatgttaatgggtttaatggagatgagaaggcaaccaaagtgcaggacatcaaaaacaacctgaaagaggcgattgaaaccattgtggccgccatgagcaacctggtgccccccgtggagctggccaaccccgagaaccagttcagagtggactacatcctgagtgtgatgaacgtgcctgactttgacttccctcccgaattctatgagcatgccaaggctctgtgggaggatgaaggagtgcgtgcctgctacgaacgctccaacgagtaccagctgattgactgtgcccagtacttcctggacaagatcgacgtg

SEQ ID NO: 138306 - DNA, 729 bp, Homo sapiens
  Payload ID: 7087
  Gene Symbol: GNAS
  Gene Name: GNAS complex locus
  ENST ID: ENST00000419558
  CDS Start-End: 1-341
ccaccactgagcccgagaccgagcctgaagacgatcgcggcccggtggtgcccaagcactccaccttcggccagtccctcacccagcgtctgcacgctctcaagttgcgaagccccgacgcctccccaagtcgcgcgccgcccagcactcaggagccccagagccccagggaaggggaggagctcaagcccgaggacaaagatccaagggaccccgaagagtcgaaggagcccaaggaggagaagcagcggcgtcgctgcaagccaaagaagcccacccgccgtgacgcgtccccggagtccccttccaaaaagggacccatccccatccggcgtcactaatggaggacgccgtccagattctccttgttttcatggattcaggtgctggagaatctggtaaaagcaccattgtgaagcagatgaggatcctgcatgttaatgggtttaatggagatgagaaggcaaccaaagtgcaggacatcaaaaacaacctgaaagaggcgattgaaaccattgtggccgccatgagcaacctggtgccccccgtggagctggccaaccccgagaaccagttcagagtggactacatcctgagtgtgatgaacgtgcctgactttgacttccctcccgaattctatgagcatgccaaggctctgtgggaggatgaaggagtgcgtgcctgctacgaacgctccaacgagtaccagctgattgactgtgcccagta

SEQ ID NO: 138307 - DNA, 693 bp, Homo sapiens
  Payload ID: 7087
  Gene Symbol: GNAS
  Gene Name: GNAS complex locus
  ENST ID: ENST00000604005
  CDS Start-End: 212-693
gctccccggcggggacactcagtcgcgtcggcaccgcggagcgggctgcgtcaggtggctggccggcgcggcgctcccctgctctctggctccgggctgcggcgcggcggctggagcgagcccctgtcccggcgcggggcggcggcgggcggccggcaggcgctgccttgcgtgtgctggagaatctggtaaaagcaccattgtgaagcagatgaggatcctgcatgttaatgggtttaatggagagggcggcgaagaggacccgcaggctgcaaggagcaacagcgatggtgagaaggcaaccaaagtgcaggacatcaaaaacaacctgaaagaggcgattgaaaccattgtggccgccatgagcaacctggtgccccccgtggagctggccaaccccgagaaccagttcagagtggactacatcctgagtgtgatgaacgtgcctgactttgacttccctcccgaattctatgagcatgccaaggctctgtgggaggatgaaggagtgcgtgcctgctacgaacgctccaacgagtaccagctgattgactgtgcccagtacttcctggacaagatcgacgtgatcaagcaggctgactatgtgccgagcgatcaggacctgcttcgctgccgtgtcctgacttctggaatctttgagaccaagttccaggtggacaaagtcaacttcca

SEQ ID NO: 138308 - DNA, 573 bp, Homo sapiens
  Payload ID: 7087
  Gene Symbol: GNAS
  Gene Name: GNAS complex locus
  ENST ID: ENST00000603546
  CDS Start-End: 213-573
agatttgttgggagagggaaagaggggaagaaaggggcgaggagaggagggggtgacgctggggggcgccgtggtggcggagggggcctcgccaaagggaggctttggcggggagaagtggccgaggagagtgggggggctggtgacatcagcccctcggaaaggatcggagcggtgctggagaatctggtaaaagcaccattgtgaagcagatgaggatcctgcatgttaatgggtttaatggagagggcggcgaagaggacccgcaggctgcaaggagcaacagcgatggtgagaaggcaaccaaagtgcaggacatcaaaaacaacctgaaagaggcgattgaaaccattgtggccgccatgagcaacctggtgccccccgtggagctggccaaccccgagaaccagttcagagtggactacatcctgagtgtgatgaacgtgcctgactttgacttccctcccgaattctatgagcatgccaaggctctgtgggaggatgaaggagtgcgtgcctgctacgaacgctccaacgagtaccagctgattgactgtgcccagtacttcctgg

SEQ ID NO: 138309 - DNA, 1721 bp, Homo sapiens
  Payload ID: 7088
  Gene Symbol:
  Gene Name: GNG4
  ENST ID: ENST00000634574
  CDS Start-End: 217-444
cggtgccacagggacgaggcctggagagcagtcgctcctagaaccggggcgcgaagggcacccccgcctccagcacgcgccctccgccctcccggcctcgctccccccggagtgggggcctcgccggcccctggtccccgtcactcagcaacgtcgggtcagccttcgccgggttagtggcgacgcggccgcgcgaattcgcacaggggcagtagaatgaaagagggcatgtctaataacagcaccactagcatctcccaagccaggaaagctgtggagcagctaaagatggaagcctgtatggacagggtcaaggtctcccaggcagctgcggacctcctggcctactgtgaagctcacgtgcgggaagatcctctcatcattccagtgcctgcatcagaaaacccctttcgcgagaagaagttcttttgtaccattctctaactccgtgtgtgatgaaaacgcctccttttctgaccttcaaagtcccctgtagagaccatgcatgctctaagccttagggagtgagaccaacacccatccctgcccagccaacagtggccggggcttgtcttatgtttccatctgttttcttcgtggcattcaatttcatttttttccttttcattttcatgttattttcattattggcaaagaaaatcaaaatgtttatagccaaataacaaatgtgccatgtaaaagtaagtctggacttaagagtttaaaatttttaaacatcagtttccaagtttatatcatattaatacatttcagtggataatttattttaaaaaaaaaactatgcctaaatatcccttatttgcaatattcagtatcaaattagagcattttgaccaactgaaacatataacgttttcatctcctttcctggagaaagcagctgcagaggttctgtatttcctgcatttccatcatcctagtaaaaagacaacaacccacaggattggaatggttttcttttgttttttttttgttgttgttgttgttttgagatggagtctcgctctgtcacccaggctggagtgcaatggcgtgacctcagctcactgcgacctccacctcctgggttcaagcgattctcctgcctcagcctcctgagtagctgggatcataggcacgcgccaccacacccagctaattttttgtatttttagtaaagacggggtttcaccatgttggtcaggctggtctcaaactcctgacctcgtgatccacccgcctcggcctcccaaagcgctgggattacaggcgtgagccaccacacccggccgtggaatggttttcttagcatatcctcctggggccgtggcgccccggctgtgggccgtggtggatgtcccttgtttcagtggtcctacaaaggtagatggtgggcggacaccgaagtcaacttgactgtaaaagtaccccataccgttgacgcgctgtggcagacctgtgggtgcggtctcccctctccaaatgccacctcttcctgctccctcctcttttggctcctactcagtagttccattgtgggctgcagtaatataaggacctgttctggacacagcactgggcccgctggggttttagtagggcagccccttccctgcaggagtgaggcatggtgacagcagtcccctatgtgcccccaagtcatctgagcattggtgtgcattaaggtactcaatcttccaacaataaataccataagtgca

SEQ ID NO: 138310 - DNA, 4978 bp, Homo sapiens
  Payload ID: 7088
  Gene Symbol:
  Gene Name: GNG4
  ENST ID: ENST00000635595
  CDS Start-End: 329-556
cggtgccacagggacgaggcctggagagcagtcgctcctagaaccggggcgcgaagggcacccccgcctccagcacgcgccctccgccctcccggcctcgctccccccggagtgggggcctcgccggcccctggtccccgtcactcagcaacgtcgggtcagccttcgccgggttagtggcgacgcggccgcgcgaattcgcacaggtgacctcaaagcagaagctctgaattcacctctcatctgacgactgacagctgctgccaccgccagcctctgtcccttgcccaggcctgtcacacggctgcctctcagcaggggcagtagaatgaaagagggcatgtctaataacagcaccactagcatctcccaagccaggaaagctgtggagcagctaaagatggaagcctgtatggacagggtcaaggtctcccaggcagctgcggacctcctggcctactgtgaagctcacgtgcgggaagatcctctcatcattccagtgcctgcatcagaaaacccctttcgcgagaagaagttcttttgtaccattctctaactccgtgtgtgatgaaaacgcctccttttctgaccttcaaagtcccctgtagagaccatgcatgctctaagccttagggagtgagaccaacacccatccctgcccagccaacagtggccggggcttgtcttatgtttccatctgttttcttcgtggcattcaatttcatttttttccttttcattttcatgttattttcattattggcaaagaaaatcaaaatgtttatagccaaataacaaatgtgccatgtaaaagtaagtctggacttaagagtttaaaatttttaaacatcagtttccaagtttatatcatattaatacatttcagtggataatttattttaaaaaaaaaactatgcctaaatatcccttatttgcaatattcagtatcaaattagagcattttgaccaactgaaacatataacgttttcatctcctttcctggagaaagcagctgcagaggttctgtatttcctgcatttccatcatcctagtaaaaagacaacaacccacaggattggaatggttttcttttgttttttttttgttgttgttgttgttttgagatggagtctcgctctgtcacccaggctggagtgcaatggcgtgacctcagctcactgcgacctccacctcctgggttcaagcgattctcctgcctcagcctcctgagtagctgggatcataggcacgcgccaccacacccagctaattttttgtatttttagtaaagacggggtttcaccatgttggtcaggctggtctcaaactcctgacctcgtgatccacccgcctcggcctcccaaagcgctgggattacaggcgtgagccaccacacccggccgtggaatggttttcttagcatatcctcctggggccgtggcgccccggctgtgggccgtggtggatgtcccttgtttcagtggtcctacaaaggtagatggtgggcggacaccgaagtcaacttgactgtaaaagtaccccataccgttgacgcgctgtggcagacctgtgggtgcggtctcccctctccaaatgccacctcttcctgctccctcctcttttggctcctactcagtagttccattgtgggctgcagtaatataaggacctgttctggacacagcactgggcccgctggggttttagtagggcagccccttccctgcaggagtgaggcatggtgacagcagtcccctatgtgcccccaagtcatctgagcattggtgtgcattaaggtactcaatcttccaacaataaataccataagtgcatgtctgttttattttatttatttatctttttgagacagagtcttgctctgtcgcccgggctggaatgcaatggcacaatctcagctcaccgcaacctccactcgcaggttcaagtgatcctcatgtctcagcctccctagtagctgggatgacaagcacacgccaacatgcctggctcatttttgtatttttagtagagacggggtttcaccatgtcggccaggctggtctccaactactggcctcgagtgatctgcccaccttggcctcccaaagtgctgggattgcaggtgtgagccagtgcacccggccgtatgtcttagagtgaggggaaactgaggcacaaagcgtttatgtagtttgcccaaggttacacatggtaagcagaaaaactgggatttgagggcaggcagcccggccccagagttcccttagccccctgaactgtgctaccttccaggtctacctgtttgcaggtagggagacccacaaactatcataactgcacaccgtgaagcaaacacctttgttgcagtaacccgtggcacacttcacttcccacattctccaggaggaagccgtattctggtagtttaaggaaggtgattcatggatgccccaaggaaaggctagacatcgatgaattagctcttggattgtctaagatcaacctgaaggtcctacctaaaccaaactcatatgatcccgatgaaagaggagaatacacagtgggagcagagctctttgtgtaagtttgttctattctgtttatttggaaactgcctctctccctagttctgaaagagacttgctgtgtgatagagaacaggccatttgtgcctgaaatgttctaacctgcaaattgggtttaatggtaattatcctgcctttctgtctgggaggaaacagagatgctacatagatgaaagctctgattatcatttaaaacaaataaatgtactaaatgccgtggtataatatagggaagaatggatgacttcaaagagaccatggttccgttggaggcataaaattgcctgcaaagaggcaaatgtaatttccagaccaattaatgacttgctgccctcgtaaatggatttaggacatctttgttccttgcttcttttgttaaaactcattcttagtttcattatcagctcactaataataccagtgttgttaagatgctcaaactagagcagaattgtatgctggatgtgacgctaggacctcagatcctttgatagtgcagttatgaccaggatctctttattctgtgcttcacgtcaacatcattaacccgatgaagcgaagcacaagtcataaaggcacatcagagaagccgagaaagcggggccgtacagagagcatcaaaatcaggtcagaaaaatgctgctttcctcttccaccaaaccttctccctgttgtttttacatgccccgtccctccagattcagcctccgttttgttctctctccttttccttttcctcctctcttccttaccttcccctgtgagatgcttttctgtccttttactgcacctcttccagacctatggcatttggggacgggtcacccttcctagagtgatcctgaatccagctgcctcttctttttttgtttttgtttttgtttttgagacagagtctctttctgtcgtccaggctggagtgcagtagcgcaatcttggctcactgcaacctctgcctcctgggttcaagcgattcttgtgcctcaacctcacgaggagctgggattgcaggcgcccgccaccacacccggctaatttttgtatttttagtagagacggagtttcaccatgttggccacgctggtcttgaagcccagacctcaagtgatccgcccgccttggcctcccaaagtgctgggattacaggcatgagccaccgcgcctggcctagttccctcttcttagatggagatttctgcacatgagctgtgagatccacagacatgtcactgagctcccccactctgtcagtggaagatgaatggaataaagcctgcttgcattgtggagtgcagctgtggggacagttgtcatttttgtgttttcagcttaactgtccagcatctcccctcccttcctacagcagggacatcatgccttagatataaacttagtggtgtgcagtacccaccgtggaagctgaagaagggaagtatttcctgtctctcaggcacaccccgcttccagccccataccagtcgggaagtggtcattgacctggggtggactacctggacccttgcttggggctatgagcctggagaatgtgacacaaatgaagggatgctgagactcatttcaaggaagccaccgtggtccggggttggtagtcatacagcaaggcaggtgggtagggctggcaggctgcagggatggtgtgtccactggtagcaatgtccagggatggcagcgtcctgggaatgtcatttctgctccactccttggactcgctgagctgtctccgcctccacctatcttcctacagacctcccttctagttttctgtcaattctttgagccagcaaactccatccagtacattctttcttctttcatgaaagagcttgagttggatgtaaatatatatgacctaacaattccacccctaggtgtataccctacagaaatgtgtacatgtgttcatccagagacatgctctaaatcttcacaaaaacactctccataataaccccgaacaggaaagcaccccaatgcccatgttggctggataagcacattagggtatattcacacgatggaatcccagactgcaatgggaatgagctgcaactccacccccaacttggagtgtattcaccaaccctagtgttgaacgagataaggcaaaaatgcaccataggattccatttatataaagtttaaaacccagcaaaattcatccatgcggttgcaagtagagatcagtcctaagaagacagtaaccagaagcgggcatgaggtggtgcttctggggtgttctgtttcttgatctggttgccggttacctgggtgctttccgtttgtgaacattcttggagctgtacacttttgatctgggcacttttctgtgtgtatgttatacttcaataaaaagttgggctttgtgactagc

SEQ ID NO: 138311 - DNA, 5104 bp, Homo sapiens
  Payload ID: 7088
  Gene Symbol:
  Gene Name: GNG4
  ENST ID: ENST00000635006
  CDS Start-End: 455-682
gggggcgagggtcgcagagtcgccggctctcccttccccagtctgggcccccacggcacagggggccgagcagaagcccccagcgtccagggccgggggagggtccgcctgcgcccccaggcccgcgtggtcgggccctgcagggcgggaggcgcggcgcggggcggggccggtgacgggacgcggagaccccgcgggcggcgggaggggcacgaggcgcgcgtttgcacccgagcccggcccgcgccccgatgcggagcgatgccgctcggcctggccgccccccgcgagcaccgcgctgcagacgaagcccgcgcgtgatcccgctccgggtgacctcaaagcagaagctctgaattcacctctcatctgacgactgacagctgctgccaccgccagcctctgtcccttgcccaggcctgtcacacggctgcctctcagcaggggcagtagaatgaaagagggcatgtctaataacagcaccactagcatctcccaagccaggaaagctgtggagcagctaaagatggaagcctgtatggacagggtcaaggtctcccaggcagctgcggacctcctggcctactgtgaagctcacgtgcgggaagatcctctcatcattccagtgcctgcatcagaaaacccctttcgcgagaagaagttcttttgtaccattctctaactccgtgtgtgatgaaaacgcctccttttctgaccttcaaagtcccctgtagagaccatgcatgctctaagccttagggagtgagaccaacacccatccctgcccagccaacagtggccggggcttgtcttatgtttccatctgttttcttcgtggcattcaatttcatttttttccttttcattttcatgttattttcattattggcaaagaaaatcaaaatgtttatagccaaataacaaatgtgccatgtaaaagtaagtctggacttaagagtttaaaatttttaaacatcagtttccaagtttatatcatattaatacatttcagtggataatttattttaaaaaaaaaactatgcctaaatatcccttatttgcaatattcagtatcaaattagagcattttgaccaactgaaacatataacgttttcatctcctttcctggagaaagcagctgcagaggttctgtatttcctgcatttccatcatcctagtaaaaagacaacaacccacaggattggaatggttttcttttgttttttttttgttgttgttgttgttttgagatggagtctcgctctgtcacccaggctggagtgcaatggcgtgacctcagctcactgcgacctccacctcctgggttcaagcgattctcctgcctcagcctcctgagtagctgggatcataggcacgcgccaccacacccagctaattttttgtatttttagtaaagacggggtttcaccatgttggtcaggctggtctcaaactcctgacctcgtgatccacccgcctcggcctcccaaagcgctgggattacaggcgtgagccaccacacccggccgtggaatggttttcttagcatatcctcctggggccgtggcgccccggctgtgggccgtggtggatgtcccttgtttcagtggtcctacaaaggtagatggtgggcggacaccgaagtcaacttgactgtaaaagtaccccataccgttgacgcgctgtggcagacctgtgggtgcggtctcccctctccaaatgccacctcttcctgctccctcctcttttggctcctactcagtagttccattgtgggctgcagtaatataaggacctgttctggacacagcactgggcccgctggggttttagtagggcagccccttccctgcaggagtgaggcatggtgacagcagtcccctatgtgcccccaagtcatctgagcattggtgtgcattaaggtactcaatcttccaacaataaataccataagtgcatgtctgttttattttatttatttatctttttgagacagagtcttgctctgtcgcccgggctggaatgcaatggcacaatctcagctcaccgcaacctccactcgcaggttcaagtgatcctcatgtctcagcctccctagtagctgggatgacaagcacacgccaacatgcctggctcatttttgtatttttagtagagacggggtttcaccatgtcggccaggctggtctccaactactggcctcgagtgatctgcccaccttggcctcccaaagtgctgggattgcaggtgtgagccagtgcacccggccgtatgtcttagagtgaggggaaactgaggcacaaagcgtttatgtagtttgcccaaggttacacatggtaagcagaaaaactgggatttgagggcaggcagcccggccccagagttcccttagccccctgaactgtgctaccttccaggtctacctgtttgcaggtagggagacccacaaactatcataactgcacaccgtgaagcaaacacctttgttgcagtaacccgtggcacacttcacttcccacattctccaggaggaagccgtattctggtagtttaaggaaggtgattcatggatgccccaaggaaaggctagacatcgatgaattagctcttggattgtctaagatcaacctgaaggtcctacctaaaccaaactcatatgatcccgatgaaagaggagaatacacagtgggagcagagctctttgtgtaagtttgttctattctgtttatttggaaactgcctctctccctagttctgaaagagacttgctgtgtgatagagaacaggccatttgtgcctgaaatgttctaacctgcaaattgggtttaatggtaattatcctgcctttctgtctgggaggaaacagagatgctacatagatgaaagctctgattatcatttaaaacaaataaatgtactaaatgccgtggtataatatagggaagaatggatgacttcaaagagaccatggttccgttggaggcataaaattgcctgcaaagaggcaaatgtaatttccagaccaattaatgacttgctgccctcgtaaatggatttaggacatctttgttccttgcttcttttgttaaaactcattcttagtttcattatcagctcactaataataccagtgttgttaagatgctcaaactagagcagaattgtatgctggatgtgacgctaggacctcagatcctttgatagtgcagttatgaccaggatctctttattctgtgcttcacgtcaacatcattaacccgatgaagcgaagcacaagtcataaaggcacatcagagaagccgagaaagcggggccgtacagagagcatcaaaatcaggtcagaaaaatgctgctttcctcttccaccaaaccttctccctgttgtttttacatgccccgtccctccagattcagcctccgttttgttctctctccttttccttttcctcctctcttccttaccttcccctgtgagatgcttttctgtccttttactgcacctcttccagacctatggcatttggggacgggtcacccttcctagagtgatcctgaatccagctgcctcttctttttttgtttttgtttttgtttttgagacagagtctctttctgtcgtccaggctggagtgcagtagcgcaatcttggctcactgcaacctctgcctcctgggttcaagcgattcttgtgcctcaacctcacgaggagctgggattgcaggcgcccgccaccacacccggctaatttttgtatttttagtagagacggagtttcaccatgttggccacgctggtcttgaagcccagacctcaagtgatccgcccgccttggcctcccaaagtgctgggattacaggcatgagccaccgcgcctggcctagttccctcttcttagatggagatttctgcacatgagctgtgagatccacagacatgtcactgagctcccccactctgtcagtggaagatgaatggaataaagcctgcttgcattgtggagtgcagctgtggggacagttgtcatttttgtgttttcagcttaactgtccagcatctcccctcccttcctacagcagggacatcatgccttagatataaacttagtggtgtgcagtacccaccgtggaagctgaagaagggaagtatttcctgtctctcaggcacaccccgcttccagccccataccagtcgggaagtggtcattgacctggggtggactacctggacccttgcttggggctatgagcctggagaatgtgacacaaatgaagggatgctgagactcatttcaaggaagccaccgtggtccggggttggtagtcatacagcaaggcaggtgggtagggctggcaggctgcagggatggtgtgtccactggtagcaatgtccagggatggcagcgtcctgggaatgtcatttctgctccactccttggactcgctgagctgtctccgcctccacctatcttcctacagacctcccttctagttttctgtcaattctttgagccagcaaactccatccagtacattctttcttctttcatgaaagagcttgagttggatgtaaatatatatgacctaacaattccacccctaggtgtataccctacagaaatgtgtacatgtgttcatccagagacatgctctaaatcttcacaaaaacactctccataataaccccgaacaggaaagcaccccaatgcccatgttggctggataagcacattagggtatattcacacgatggaatcccagactgcaatgggaatgagctgcaactccacccccaacttggagtgtattcaccaaccctagtgttgaacgagataaggcaaaaatgcaccataggattccatttatataaagtttaaaacccagcaaaattcatccatgcggttgcaagtagagatcagtcctaagaagacagtaaccagaagcgggcatgaggtggtgcttctggggtgttctgtttcttgatctggttgccggttacctgggtgctttccgtttgtgaacattcttggagctgtacacttttgatctgggcacttttctgtgtgtatgttatacttcaataaaaagttgggctttgtgactagc

SEQ ID NO: 138312 - DNA, 684 bp, Homo sapiens
  Payload ID: 7088
  Gene Symbol:
  Gene Name: GNG4
  ENST ID: ENST00000635387
  CDS Start-End: 102-329
ggccctgccggcagggcagcaagtcgggagcagctgtgggtggtgtcctacaggctctgctgtggaggaagagctgctgccctgagtggaggggcagtagaatgaaagagggcatgtctaataacagcaccactagcatctcccaagccaggaaagctgtggagcagctaaagatggaagcctgtatggacagggtcaaggtctcccaggcagctgcggacctcctggcctactgtgaagctcacgtgcgggaagatcctctcatcattccagtgcctgcatcagaaaacccctttcgcgagaagaagttcttttgtaccattctctaactccgtgtgtgatgaaaacgcctccttttctgaccttcaaagtcccctgtagagaccatgcatgctctaagccttagggagtgagaccaacacccatccctgcccagccaacagtggccggggcttgtcttatgtttccatctgttttcttcgtggcattcaatttcatttttttccttttcattttcatgttattttcattattggcaaagaaaatcaaaatgtttatagccaaataacaaatgtgccatgtaaaagtaagtctggacttaagagtttaaaatttttaaacatcagtttccaagtttatatcatattaatacatttcagtggataatttattttaaaaaaaaaa

SEQ ID NO: 138313 - DNA, 1595 bp, Homo sapiens
  Payload ID: 7088
  Gene Symbol:
  Gene Name: GNG4
  ENST ID: ENST00000635235
  CDS Start-End: 91-318
ctcatctgacgactgacagctgctgccaccgccagcctctgtcccttgcccaggcctgtcacacggctgcctctcagcaggggcagtagaatgaaagagggcatgtctaataacagcaccactagcatctcccaagccaggaaagctgtggagcagctaaagatggaagcctgtatggacagggtcaaggtctcccaggcagctgcggacctcctggcctactgtgaagctcacgtgcgggaagatcctctcatcattccagtgcctgcatcagaaaacccctttcgcgagaagaagttcttttgtaccattctctaactccgtgtgtgatgaaaacgcctccttttctgaccttcaaagtcccctgtagagaccatgcatgctctaagccttagggagtgagaccaacacccatccctgcccagccaacagtggccggggcttgtcttatgtttccatctgttttcttcgtggcattcaatttcatttttttccttttcattttcatgttattttcattattggcaaagaaaatcaaaatgtttatagccaaataacaaatgtgccatgtaaaagtaagtctggacttaagagtttaaaatttttaaacatcagtttccaagtttatatcatattaatacatttcagtggataatttattttaaaaaaaaaactatgcctaaatatcccttatttgcaatattcagtatcaaattagagcattttgaccaactgaaacatataacgttttcatctcctttcctggagaaagcagctgcagaggttctgtatttcctgcatttccatcatcctagtaaaaagacaacaacccacaggattggaatggttttcttttgttttttttttgttgttgttgttgttttgagatggagtctcgctctgtcacccaggctggagtgcaatggcgtgacctcagctcactgcgacctccacctcctgggttcaagcgattctcctgcctcagcctcctgagtagctgggatcataggcacgcgccaccacacccagctaattttttgtatttttagtaaagacggggtttcaccatgttggtcaggctggtctcaaactcctgacctcgtgatccacccgcctcggcctcccaaagcgctgggattacaggcgtgagccaccacacccggccgtggaatggttttcttagcatatcctcctggggccgtggcgccccggctgtgggccgtggtggatgtcccttgtttcagtggtcctacaaaggtagatggtgggcggacaccgaagtcaacttgactgtaaaagtaccccataccgttgacgcgctgtggcagacctgtgggtgcggtctcccctctccaaatgccacctcttcctgctccctcctcttttggctcctactcagtagttccattgtgggctgcagtaatataaggacctgttctggacacagcactgggcccgctggggttttagtagggcagccccttccctgcaggagtgaggcatggtgacagcagtcccctatgtgcccccaagtcatctgagcattggtgtgcattaaggtactcaatcttccaacaataaataccataagtgca

SEQ ID NO: 138314 - DNA, 6403 bp, Homo sapiens
  Payload ID: 7089
  Gene Symbol: GBF1
  Gene Name: golgi brefeldin A resistant guanine nucleotide exchange factor 1
  Uniprot ID: Q92538
  ENST ID: ENST00000369983
  CDS Start-End: 261-5840
agttaccacgtcagtgagctgacagggaaggtacccggctctactgcccgtcccggacgactcatcctggcggactgtgcagtcccaccctgacttcggcctcaatttccaggaaacaggctccttctcttctcccatctgctaccagagccgggagagctgctcggagacgcctccggggtgcgggctggacatgagcagcggctgccggtcctgggactaggccccgccattttggatccgctgacaggtttgccaagatggtggataagaatatttacatcattcaaggggagattaacattgtggttggggccatcaaacgaaatgcccgatggagcacccatacaccactggatgaagaacgggatcctctgctgcatagtttcggtcatctaaaggaggttttaaacagtataacagaactctcagaaattgagcccaatgtattccttcgaccttttctggaagtgattcgctctgaagataccactggccctatcactggactggcactcacctctgtcaacaagttcctgtcctatgcactcatagatcccacccatgagggcacagcagagggcatggagaacatggcagatgctgtcacccatgctcgttttgtgggcacggatcctgccagtgatgaagttgtcctgatgaaaatccttcaggttctacggactctgctgctaaccccagtgggtgcccacctaaccaatgaatctgtgtgtgagattatgcagtcttgcttccggatctgctttgaaatgaggctcagtgagttattgagaaaatccgcagagcacactctcgtagacatggtgcagctgctcttcacaaggttacctcagtttaaagaagaacccaagaactatgtggggaccaacatgaagaagctgaaaatgagagccggaggcatgagtgattcatccaaatggaagaaacagaagagatcccctcggcccccacgccatatgaccaaagtcacaccaggttcagagctgcccactcccaatggaaccaccttatcatctaacctcactggtggcatgcccttcattgatgtgcccactcccatctcctctgcaagttcagaagctgcctcagcagtggtcagtccctctacagacagtggcctggaattctcctcccaaaccacttccaaggaagaccttactgatctagagcaacctggctctccagggtacagcacagctacagagcctggaagcagtgagctaggtgttcccgagcagcctgacctccaggaagggacccatgtggaaaagtcccagtcagcatctgtggagtccatccctgaagtgttagaggagtgcacgtcccctgccgaccactctgactctgcctctgtccatgacatggattacgtcaatccccggggcgtgcgctttacacagtcctcccagaaagaaggcacagctttggtcccctatggtcttccctgcatccgcgagctcttccgcttcctcatctccctcaccaatccacacgaccgccataactcagaggttatgattcacatgggactgcatttgctgacagtggcccttgagtcagcccctgtagcccagtgccagaccctcttgggcctcatcaaggatgagatgtgccgtcacttattccagctactcagcatagagcgactaaacctttatgctgcttccctgcgagtatgcttcctactgtttgagagcatgcgagagcacctcaagttccaaatggagatgtacatcaaaaagcttatggagatcatcactgtggagaaccccaagatgccttatgagatgaaggagatggcactggaggccattgtgcagctctggcgcatccccagctttgtcacagagctctacatcaactatgattgtgactactactgttccaacctctttgaggaactcacaaagctgctgtccaagaatgccttccctgtgtctggtcaactctatacaacacacctactatctcttgatgccctattgacagtgattgacagcaccgaggcccactgccaggctaaagtcctcaacagcctcacccagcaagagaagaaggagacagccagaccaagctgtgagatagtagatggcacccgagaagctagcaatactgagagaactgccagcgatgggaaagctgtaggcatggcctcagacatcccaggcctgcatctgccaggtggagggcggctgccaccagaacatgggaaatcaggatgcagtgatctggaggaagctgttgactctggggctgacaaaaagtttgcccggaagccaccccgattttcctgtctcctgccagatccacgggaactaattgaaattaaaaacaaaaagaagctgctaatcactggcacagagcagttcaatcagaaaccaaagaaggggattcagtttctgcaagagaaaggcctcctcaccatcccaatggacaacacagaggttgctcagtggctccgagagaaccctcggctggacaagaagatgattggagagtttgtgagtgaccgcaaaaacattgacctgttggagagctttgtgagcaccttcagttttcagggtctgcgactggacgaagccctccgcctctacctggaagccttccgtttgcctggggaagcaccagtcatccagaggttgctggaggcattcacagagcgttggatgaattgtaatggctccccatttgccaatagcgatgcctgcttttccctggcctatgctgtcatcatgcttaatactgaccagcacaaccacaatgttcgtaaacagaatgcacccatgaccctggaggagtttcgcaaaaatctgaaaggtgtgaatggaggcaaggactttgagcaagacatcctggaggacatgtaccatgccatcaagaatgaggaaattgtaatgcctgaggagcagacaggcttggttcgggagaactatgtgtggaatgtgctgcttcatcgaggtgccacccctgagggcatattcctgcgtgtgcctactgccagctatgatcttgacctcttcaccatgacctggggccccactattgctgctctctcttatgtctttgacaaaagccttgaggagacaatcatccagaaagccatctcaggcttcaggaagtgcgccatgatctccgcccactatggcctcagcgatgtgtttgacaatctcatcatctctctatgcaaattcacagctctcagcagtgagtctattgagaacctgcccagtgtatttggaagcaaccctaaagcccatattgcagccaagacagtattccatttggcccatcgtcatggtgacatcctgcgggagggctggaagaatatcatggaggccatgctgcagctcttccgagcccaactactgcccaaggctatgatagaggtagaagatttcgtggatcccaatggcaagatctctctacagcgggaagagacaccatcaaaccgaggagagtcaacagtgctgagctttgtgagctggctaacactgagtggtcctgagcagtctagtgttcggggcccatccactgaaaaccaagaggccaagagagtggccttagagtgtataaagcaatgtgacccagaaaaaatgatcacagaaagcaagttcctccagctggagtcactacaggagctcatgaaggctctggtctcagtgacaccagatgaagagacatatgatgaggaagatgctgctttctgcctagagatgctgctaaggattgtgttggagaacagggatcgtgtgggctgtgtgtggcagactgttcgagaccatctataccacctctgtgttcaggcacaagatttctgcttccttgtggagcgggcagtggtggggttgctacgcctggccattcggcttctccggagagaagagatcagtgctcaggtgctgctctccctgcgcattttgctactgatgaagcccagtgtgctatcccgagtcagccaccaggttgcgtatgggctccatgaactcctgaagaccaatgcagccaacatccactcaggtgatgactgggccacactcttcacactgctggagtgcatcggctcaggtgtgaagcctccagctgctctgcaggccacagccagggcagatgcacctgatgccggggcccagtcagatagtgagctcccatcctaccatcagaatgacgtgagcctggatcgagggtacacttccgactcagaggtctacactgaccatggcaggccgggcaagatacaccgatcagccacagatgccgatgtggtcaacagtggttggttagtggttgggaaggatgacgttgataactccaagccagggcccagccgcccaggcccttcacccctgatcaatcaatacagcctaacagtgggactggatttggggccacacgacactaagtctctgcttaagtgtgtggaatcgctgtccttcattgtgcgtgatgctgcccacatcacacctgacaactttgagctctgcgtcaagactctccggatctttgtggaggccagtctgaatggcggatgcaagtcccaggagaaacgtggcaagagtcacaaatatgacagcaaagggaaccgcttcaagaagaaatccaaagagggatcaatgcttcgccggcctcgaacctccagccaacatgcctctcggggcgggcagagtgatgatgatgaggacgaaggcgtgcctgccagctaccatacggtgtctttacaggtcagtcaggacttgctagacctgatgcacaccctgcacacgcgggcagcctctatctacagctcatgggcggaggagcaacgccacctggagacaggtggccagaagattgaagctgattctcgcaccctctgggcccactgctggtgccctttactgcagggtattgcctgcctgtgctgcgatgcccggcgccaggtacggatgcaggcactgacctatctgcagcgagcactacttgtacatgatctgcaaaagctagatgccctggaatgggagtcctgttttaacaaggtgctgtttcctctacttaccaagctcttggagaacatcagccctgcagatgtgggtgggatggaggagacccggatgagggcttccacattgctctctaaggtcttcctgcagcacctgtctccactgctgtcactctctacctttgcggccctctggctcaccatcttggacttcatggacaagtacatgcacgcaggctccagcgacttactgtcagaggcgatccctgagtctctgaagaacatgcttctggtgatggacacagcggagattttccacagtgcagatgcacggggaggcggcccctcggccctctgggagatcacctgggaacgcattgactgttttctccctcacctacgagatgaactcttcaagcagaccgtcatccaggaccccatgcccatggagcctcaaggccaaaagcctctcgcctcagcccacctgacttccgctgctggcgacactaggacacctggccatccaccgcccccagagattccatctgagctgggggcctgtgactttgagaagcccgagagcccccgagccgccagcagcagctccccaggatcaccagtggcctcaagccccagcaggctgagccccacccccgacgggcctccacccttggctcagcccccactgatcctgcagcccttggcctccccactgcaggtgggcgtgccacctatgactctgcccatcatcctcaaccctgcgctcatcgaggccacctcaccagtgcccctcctggccacaccccgccccacagatcccatacccacctctgaggtcaactaaggcaggtcactcagagatcaggaccagtgcttcccaccaggctttccttgaccccacttctggctgtcctgcgggccacaagctcttcaggccaagtcagagctgctgttgctgccacttggatggggacctgaaaaagagaatgttgatagccccagctaagacccccaatcagctgtgggacctttttcctcctctgcgctccattcctgggggttcagcctgagagtgaactcagctgtcatctgcagcctctgcctccagcccggcagctctggggaggcatccgtgtgccggccctgcagtgcctgcccacggtcaggcattgaaaactaagcccaaccactctgcactttgtttcccactcccattagccctgggccacctcctccagttcttcctcttttactaattagttggtcagtttggagagttgactggcaccatggagggtaggcaggtgggggctgggtgggggactgcccacaggagcatgtacatatggaaaaacagaacaacagtggactttttatgatataataaatgtcttagtaccagcatca

SEQ ID NO: 138315 - DNA, 8261 bp, Homo sapiens
  Payload ID: 7090
  Gene Symbol: GLG1
  Gene Name: golgi glycoprotein 1
  Uniprot ID: Q92896
  ENST ID: ENST00000205061
  CDS Start-End: 21-3632
gagctcgccgcggactcaagatggcggcgtgtggacgtgtacggaggatgttccgcttgtcggcggcgctgcatctgctgctgctattcgcggccggggccgagaaactccccggccagggcgtccacagccagggccagggtcccggggccaactttgtgtccttcgtagggcaggccggaggcggcggcccggcgggtcagcagctgccccagctgcctcagtcatcgcagcttcagcagcaacagcagcagcagcaacagcaacagcagcctcagccgccgcagccgcctttcccggcgggtgggcctccggcccggcggggaggagcgggggctggtgggggctggaagctggcggaggaagagtcctgcagggaggacgtgacccgcgtgtgccctaagcacacctggagcaacaacctggcggtgctcgagtgcctgcaggatgtgagggagcctgaaaatgaaatttcttcagactgcaatcatttgttgtggaattataagctgaacctaactacagatcccaaatttgaatctgtggccagagaggtttgcaaatctactataacagagattaaagaatgtgctgatgaaccggttggaaaaggttacatggtttcctgcttggtggatcaccgaggcaacatcactgagtatcagtgtcaccagtacattaccaagatgacggccatcatttttagtgattaccgtttaatctgtggcttcatggatgactgcaaaaatgacatcaacattctgaaatgtggcagtattcggcttggagaaaaggatgcacattcacaaggtgaggtggtatcatgcttggagaaaggcctggtgaaagaagcagaagaaagagaacccaagattcaagtttctgaactctgcaagaaagccattctccgggtggctgagctgtcatcggatgactttcacttagaccggcatttatattttgcttgccgagatgatcgggagcgtttttgtgaaaatacacaagctggtgagggcagagtgtataagtgcctctttaaccataaatttgaagaatccatgagtgaaaagtgtcgagaagcacttacaacccgccaaaagctgattgcccaggattataaagtcagttattcattggccaaatcctgtaaaagtgacttgaagaaataccggtgcaatgtggaaaaccttccgcgatcgcgtgaagccaggctctcctacttgttaatgtgcctggagtcagctgtacacagagggcgacaagtcagcagtgagtgccagggggagatgctggattaccgacgcatgttgatggaagacttttctctgagccctgagatcatcctaagctgtcggggggagattgaacaccattgttccggattacatcgaaaagggcggaccctacactgtctgatgaaagtagttcgaggggagaaggggaaccttggaatgaactgccagcaggcgcttcaaacactgattcaggagactgaccctggtgcagattaccgcattgatcgagctttgaatgaagcttgtgaatctgtaatccagacagcctgcaaacatataagatctggagacccaatgatcttgtcgtgcctgatggaacatttatacacagagaagatggtagaagactgtgaacaccgtctcttagagctgcagtatttcatctcccgggattggaagctggaccctgtcctgtaccgcaagtgccagggagacgcttctcgtctttgccacacccacggttggaatgagaccagtgaatttatgcctcagggagctgtgttctcttgtttatacagacacgcctaccgcactgaggaacagggaaggaggctctcacgggagtgccgagctgaagtccaaaggatcctacaccagcgtgccatggatgtcaagctggatcctgccctccaggataagtgcctgattgatctgggaaaatggtgcagtgagaaaacagagactggacaggagctggagtgccttcaggaccatctggatgacttggtggtggagtgtagagatatagttggcaacctcactgagttagaatcagaggatattcaaatagaagccttgctgatgagagcctgtgagcccataattcagaacttctgccacgatgtggcagataaccagatagactctggggacctgatggagtgtctgatacagaacaaacaccagaaggacatgaacgagaagtgtgccatcggagttacccacttccagctggtgcagatgaaggattttcggttttcttacaagtttaaaatggcctgcaaggaggacgtgttgaagctttgcccaaacataaaaaagaaggtggacgtggtgatctgcctgagcacgaccgtgcgcaatgacactctgcaggaagccaaggagcacagggtgtccctgaagtgccgcaggcagctccgtgtggaggagctggagatgacggaggacatccgcttggagccagatctatacgaagcctgcaagagtgacatcaaaaacttctgttccgctgtgcaatatggcaacgctcagattatcgaatgtctgaaagaaaacaagaagcagctaagcacccgctgccaccaaaaagtatttaagctgcaggagacagagatgatggacccagagctagactacaccctcatgagggtctgcaagcagatgataaagaggttctgtccggaagcagattctaaaaccatgttgcagtgcttgaagcaaaataaaaacagtgaattgatggatcccaaatgcaaacagatgataaccaagcgccagatcacccagaacacagattaccgcttaaaccccatgttaagaaaagcctgtaaagctgacattcctaaattctgtcacggtatcctgactaaggccaaggatgattcagaattagaaggacaagtcatctcttgcctgaagctgagatatgctgaccagcgcctgtcttcagactgtgaagaccagatccgaatcattatccaggagtccgccctggactaccgcctggatcctcagctccagctgcactgctcagacgagatctccagtctatgtgctgaagaagcagcagcccaagagcagacaggtcaggtggaggagtgcctcaaggtcaacctgctcaagatcaaaacagaattgtgtaaaaaggaagtgctaaacatgctgaaggaaagcaaagcagacatctttgttgacccggtacttcatactgcttgtgccctggacattaaacaccactgcgcagccatcacccctggccgcgggcgtcaaatgtcctgtctcatggaagcactggaggataagcgggtgaggttacagcccgagtgcaaaaagcgcctcaatgaccggattgagatgtggagttacgcagcaaaggtggccccagcagatggcttctctgatcttgccatgcaagtaatgacgtctccatctaagaactacattctctctgtgatcagtgggagcatctgtatattgttcctgattggcctgatgtgtggacggatcaccaagcgagtgacacgagagctcaaggacaggctacaatacaggtcagagacaatggcttataaaggtttagtgtggtctcaggatgtgacaggcagtccagcctgacctttctgcacactccagacaaacttcccagacaagctcctttgtgcctctacgtggagagggtgtggaaagttatcacattaaaagatggaggatttgctctgttttttttctttctgtccatttgctgcgtgtacccactctagtaggcattggctaaatgttgtattttggcgattcatcaacctttgcagaatatgggctttatagaagcaatattcttggccatcccgcctcattcctccagtgtggagatgacaagtctgggtgtgagagggaggggtccgggcatcatggttcagcgtggcactcctttggttgagtttggggcatgagatcacagtggctgcacaagagagcagtgtgtacagtaggagagacatttatgtaatatatattttattaacctgttagatgtccacaaagtattataaatcacgtgcctaaaactgtccatgtagaccaaggcctgccctcggcgccccccactcttgcctctgctctgcacagtccacgtgcactgcaggaccggagcgacacatgtcttccctgaagggtgttcagtacaaggcgtgtcagtttgtggatcagttgatccaagttactccttgtctaacctgactgacatatatttgaatactgtggttttctttcttttttttctatttgctgcccttcctggaggcagtgggttccagaagccaactgattgtccccctgccaagtcaccaagggaagctgctaagctgcttagtcccctcggtcctgcttgtagggtcttcctgattgtcaacagctgtctgggatgcttcagtctcctaaaactggaaacgcagggtgcgagcagcacacactgcctcccgccactgccagccggagtgagcggcccgagagtctctgcaggttcccctgggggctgggggccgctgaggcctaatatcaagagccaggaatgtcatgtacatggaggtgcctacggacgtgcctggtgtggtttgcaggtaggatggatgttcactgtttgaccgggtggggtatccttcctctctgcagtctccttcccagtatgcgtaaacacccttatagttctaattgtgttgatatttctgttctttctgaattgagagaaaatcccattcgttgtctgcagatttggaagtttgatgaggaatttggttcttgaaacatctgtctttttttttttttttgagacagagtatctctctgttgcccaggctgcagtgcagtggcgcgatctcagctccctgcaacctccacctcctgggttcaagcaattctctgcctcagcctcctgagtagctgggattccaggcacccgccaccacgcctggcttatttttgtatttttagtagagatggggtttcaccatcttggccaggctggtcttgaactcctgatctcatgatccacccgcctcagcttcccaaagtgctgggattacaggtgtgagccaccctgcctggccaaaacatttgtcatctttataaatggtcagaatagaaaagttagctctgccagtatcttcaattacttattacaagaatgtctttcatcatcttacttggagcattttccaatgactggctcttgagagccccaggcagggccccgagcaagtttttctaagtgccaaggccagcaaagtctgaactggccgcactcattaagtccctcatttggcaaaacaaaacagggcctggggcacccctggttcctggccttataggtcagtcaactggctgagaaatggtcaagaaaagaaacaatgacccttctgtggatgtgagtggatgatggactctggcctgtgtctactctcctgatgtgtagcccaccaacagtaatagaagtagagggtagggggttttgccaaggctaaggcttcaggtacttgctaacagttatagcagctgggtcactgtcatctggacttaccagttcatgccagtgtccctgtgacttatgcatagtgtgcgccacagccctctagaggtacctggagcccggactgccaggctggaggctctggggtactgaaggtgagctgtctgggcaaactattaagaacaagacgaactgttcacaatggagcttctcccacagatggggagctctgtgaggccttcacctgggtgcatgttggacttccattgctgttgctgttgtccctagacaagcccgttagcaagaagcaccggcaggggagccatgcactccataggcttgggatcacccccgggaaagcgatcttccccgggctaccacccccagctgcagttctgtgttagtgcatccttcaaagctaggagaattctagggtgaccagtgagctaatgttgagtgagcaggtattgacttgaacacactgcaggcctttggctgtctcatgctgtccttactcttcttgggaacagtgagtcactcagctggccagggtggggatgcatcctggtgaagagacagctttccctgaagatgctacagaaagttactgtcagatttcatttgtttctgtttcctgagatcaactaacagaagaatctaatggtgagagtgtcttcattcatgttttacgttttatcaaggcacactggaaagggaattatgtggctgacttcccttggccttcccaagagaagattctgttcttatgtcagtgtggcttctggaagtgtctcctatcctcccatcctccaggcctgtggtgtgacttctgccccgaagttcctactatagtgagtcatctggggagaggccactgaaaagaggccttcccttcccatttcctcccctgcctccttagaacacactctaagtcagaacttaatctaagaagaaggaagctggaccaggaaccttggaagtcagccagccctagaacagtcagcctaaattttggccgtaatggcttttttggttttttgttttgtttctgagatggagtctcactccgttgccaggctggagtgctgtggcgctatctcagcttaccgaatcctccgactccctggttcaagcgattgtcctgcctcagcctccggagtagctgggattacaggcatgcaccaccacacccagctaatttttgtatttttagtagagacggggtttcaccgtgttgtccaggatggtctccatctcctgacctcatgatgtgcccacttcggccttccaaagtggccgcaaagtggcccacttcggccaaagtgcacttcggccttccaaagtgcattacaggcgtgagccaccacgcccggcctggccttttttttttttttcttttgagacacagtttcactcgttgcccaggctggagtgcagtggcgcaatctcggctcactgcaacttctgcctcctaggttcaagcagttctcctgcctcagcctcccaagtagttgggattacgggcatgcaccaccatgcctggataattttttcttatttttagtagagacaggatttcatcatgttggccacgctggtttcgaactcctgaccacatgtggtccacccaccttggcctcaattatgtgcattttggtatatttacttgtatttcaacatcttgtgagtttgaaaaacctgaaaggccagaatgcttccttttatttctcaccatttgggcagcacctaagtggttttgtaaaatgcagcatctggtgctgtgggtctctctcaggccttgagggacacttccttcctccccactcgcctcctctccactagactttggttcctagagggcgtggggccgggtctgaggttcttgcctgccttccctcccattggtctttggttgctcatccctctaactgcaccccttcttggtccttcctccacagacttcagataatagataagtcattagcaaaccagaccgaatctttagggtgaagagctccccaaagccatctggtgaggtcattgtggggaccagggactgattatttgtcacctggatcacaaagatgggactgtctgctcaggctggtggtgacaggatcctgacccgtggtcctctcccgctccctctgctccaccaggacacatgtataggacactgtgctgtgtgcagtggagaaatctccctgggccaggggaaagttcagacagtgcctctagattgtgttttgcctcctccaatgtagagttgacatctggaccccagagcccagcagggctttctgtcagacatgctagggtggtagaaatgggccctccaggtccccctgcagtgcactgggcagagacctccggaaagccggcagcgggagcgcttcctgggcagcttcccccagcacagtgttcccaaaccagtccatccggaaaacagtctgtacagcaaatgctgtgtgagatcttaggcttttcactttttttgttttgttttgtttttgaaagaaagaaaaaaatacaattaacaagcctcttttgtaaatgggtttcctttctatgtataaaatcgtggtggtcccttgtttttacatgttcatgctgtgtaattttgagatgttactgagatatgttctgaacataatgtgcatttttttctgtacagatgaaatgggagaatttaataaagagtttgcaggtttttacttgttaaa

SEQ ID NO: 138316 - DNA, 4748 bp, Homo sapiens
  Payload ID: 7090
  Gene Symbol: GLG1
  Gene Name: golgi glycoprotein 1
  Uniprot ID: Q92896
  ENST ID: ENST00000422840
  CDS Start-End: 1-3540
atggcggcgtgtggacgtgtacggaggatgttccgcttgtcggcggcgctgcatctgctgctgctattcgcggccggggccgagaaactccccggccagggcgtccacagccagggccagggtcccggggccaactttgtgtccttcgtagggcaggccggaggcggcggcccggcgggtcagcagctgccccagctgcctcagtcatcgcagcttcagcagcaacagcagcagcagcaacagcaacagcagcctcagccgccgcagccgcctttcccggcgggtgggcctccggcccggcggggaggagcgggggctggtgggggctggaagctggcggaggaagagtcctgcagggaggacgtgacccgcgtgtgccctaagcacacctggagcaacaacctggcggtgctcgagtgcctgcaggatgtgagggagcctgaaaatgaaatttcttcagactgcaatcatttgttgtggaattataagctgaacctaactacagatcccaaatttgaatctgtggccagagaggtttgcaaatctactataacagagattaaagaatgtgctgatgaaccggttggaaaaggttacatggtttcctgcttggtggatcaccgaggcaacatcactgagtatcagtgtcaccagtacattaccaagatgacggccatcatttttagtgattaccgtttaatctgtggcttcatggatgactgcaaaaatgacatcaacattctgaaatgtggcagtattcggcttggagaaaaggatgcacattcacaaggtgaggtggtatcatgcttggagaaaggcctggtgaaagaagcagaagaaagagaacccaagattcaagtttctgaactctgcaagaaagccattctccgggtggctgagctgtcatcggatgactttcacttagaccggcatttatattttgcttgccgagatgatcgggagcgtttttgtgaaaatacacaagctggtgagggcagagtgtataagtgcctctttaaccataaatttgaagaatccatgagtgaaaagtgtcgagaagcacttacaacccgccaaaagctgattgcccaggattataaagtcagttattcattggccaaatcctgtaaaagtgacttgaagaaataccggtgcaatgtggaaaaccttccgcgatcgcgtgaagccaggctctcctacttgttaatgtgcctggagtcagctgtacacagagggcgacaagtcagcagtgagtgccagggggagatgctggattaccgacgcatgttgatggaagacttttctctgagccctgagatcatcctaagctgtcggggggagattgaacaccattgttccggattacatcgaaaagggcggaccctacactgtctgatgaaagtagttcgaggggagaaggggaaccttggaatgaactgccagcaggcgcttcaaacactgattcaggagactgaccctggtgcagattaccgcattgatcgagctttgaatgaagcttgtgaatctgtaatccagacagcctgcaaacatataagatctggagacccaatgatcttgtcgtgcctgatggaacatttatacacagagaagatggtagaagactgtgaacaccgtctcttagagctgcagtatttcatctcccgggattggaagctggaccctgtcctgtaccgcaagtgccagggagacgcttctcgtctttgccacacccacggttggaatgagaccagtgaatttatgcctcagggagctgtgttctcttgtttatacagacacgcctaccgcactgaggaacagggaaggaggctctcacgggagtgccgagctgaagtccaaaggatcctacaccagcgtgccatggatgtcaagctggatcctgccctccaggataagtgcctgattgatctgggaaaatggtgcagtgagaaaacagagactggacaggagctggagtgccttcaggaccatctggatgacttggtggtggagtgtagagatatagttggcaacctcactgagttagaatcagaggatattcaaatagaagccttgctgatgagagcctgtgagcccataattcagaacttctgccacgatgtggcagataaccagatagactctggggacctgatggagtgtctgatacagaacaaacaccagaaggacatgaacgagaagtgtgccatcggagttacccacttccagctggtgcagatgaaggattttcggttttcttacaagtttaaaatggcctgcaaggaggacgtgttgaagctttgcccaaacataaaaaagaaggtggacgtggtgatctgcctgagcacgaccgtgcgcaatgacactctgcaggaagccaaggagcacagggtgtccctgaagtgccgcaggcagctccgtgtggaggagctggagatgacggaggacatccgcttggagccagatctatacgaagcctgcaagagtgacatcaaaaacttctgttccgctgtgcaatatggcaacgctcagattatcgaatgtctgaaagaaaacaagaagcagctaagcacccgctgccaccaaaaagtatttaagctgcaggagacagagatgatggacccagagctagactacaccctcatgagggtctgcaagcagatgataaagaggttctgtccggaagcagattctaaaaccatgttgcagtgcttgaagcaaaataaaaacagtgaattgatggatcccaaatgcaaacagatgataaccaagcgccagatcacccagaacacagattaccgcttaaaccccatgttaagaaaagcctgtaaagctgacattcctaaattctgtcacggtatcctgactaaggccaaggatgattcagaattagaaggacaagtcatctcttgcctgaagctgagatatgctgaccagcgcctgtcttcagactgtgaagaccagatccgaatcattatccaggagtccgccctggactaccgcctggatcctcagctccagctgcactgctcagacgagatctccagtctatgtgctgaagaagcagcagcccaagagcagacaggtcaggtggaggagtgcctcaaggtcaacctgctcaagatcaaaacagaattgtgtaaaaaggaagtgctaaacatgctgaaggaaagcaaagcagacatctttgttgacccggtacttcatactgcttgtgccctggacattaaacaccactgcgcagccatcacccctggccgcgggcgtcaaatgtcctgtctcatggaagcactggaggataagcgggtgaggttacagcccgagtgcaaaaagcgcctcaatgaccggattgagatgtggagttacgcagcaaaggtggccccagcagatggcttctctgatcttgccatgcaagtaatgacgtctccatctaagaactacattctctctgtgatcagtgggagcatctgtatattgttcctgattggcctgatgtgtggacggatcaccaagcgagtgacacgagagctcaaggacaggtagagccaccttgaccaccaaaggaactacctatccagtgcccagtttgtacagccctcttgtatagcatccccactcacctcgctcttctcagaagtgacaccaaccccgtgttagagcattagcagatgtccactgcgttgtcccatccagcctccactcgtgtccatggtgtcctcctcctcctcaccgtgcagcagcagcagctggtcgctggggttactgcctttgtttggcaaacttgggtttacctgcctgtagacaagtctctctcataccaacagaacttccggtacttccagaaccaactcacctgacctgcaactcaaaggcttttttaagaaaaccaccaaaaaaaaaaatttttttaaagaaaaaaatgtatatagtaacgcatctcctccaggcttgatttgggcaatggggttatgtctttcatatgactgtgtaaaacaaagacaggacttggaggggaagcacaccacccagtgtgccatgactgaggtgtctcgttcatctctcagaagcaccttggggcctcgccagggccgtggtcttcaccgaggcgtgggtgggcagccgttccccaggctgtgtggggtcctgctttcttctgctgagacagtgacgctttccagtttccaccctaatcagccactgctggtcacagccccacagccatgggtatttctgtggtctcctcgcttcattgaagcaaagcatgagccttcctagacaagggcagctggggaggggaagggaccggaagtttgtgaagttgaacagtccatccatctgcactgagaggctggatcctgagtcccggggcagcaggatcccaggaaccttcctcctccagggcagcacaggactcagccatgtctggaccggccctgctgaggctacagtcactctggaagctctgcgcttcatcaggaggcaggactgtggcgggaggggtccttgaagatgggtgtggggagcagtgggtcaggaagtgggagccagaggtttgactcactttgctttatttttcaggctacaatacaggtcagagacaatggcttataaaggtttagtgtggtctcaggatgtgacaggcagtccagcctgacctttctgcacactccagacaaacttcccagacaagctcctttgtgcctctacgtggagagggtgtggaaagttatcacattaaaagatggaggatt

SEQ ID NO: 138317 - DNA, 3626 bp, Homo sapiens
  Payload ID: 7090
  Gene Symbol: GLG1
  Gene Name: golgi glycoprotein 1
  Uniprot ID: Q92896
  ENST ID: ENST00000447066
  CDS Start-End: 19-3597
gctcgccgcggactcaagatggcggcgtgtggacgtgtacggaggatgttccgcttgtcggcggcgctgcatctgctgctgctattcgcggccggggccgagaaactccccggccagggcgtccacagccagggccagggtcccggggccaactttgtgtccttcgtagggcaggccggaggcggcggcccggcgggtcagcagctgccccagctgcctcagtcatcgcagcttcagcagcaacagcagcagcagcaacagcaacagcagcctcagccgccgcagccgcctttcccggcgggtgggcctccggcccggcggggaggagcgggggctggtgggggctggaagctggcggaggaagagtcctgcagggaggacgtgacccgcgtgtgccctaagcacacctggagcaacaacctggcggtgctcgagtgcctgcaggatgtgagggagttgttgtggaattataagctgaacctaactacagatcccaaatttgaatctgtggccagagaggtttgcaaatctactataacagagattaaagaatgtgctgatgaaccggttggaaaaggttacatggtttcctgcttggtggatcaccgaggcaacatcactgagtatcagtgtcaccagtacattaccaagatgacggccatcatttttagtgattaccgtttaatctgtggcttcatggatgactgcaaaaatgacatcaacattctgaaatgtggcagtattcggcttggagaaaaggatgcacattcacaaggtgaggtggtatcatgcttggagaaaggcctggtgaaagaagcagaagaaagagaacccaagattcaagtttctgaactctgcaagaaagccattctccgggtggctgagctgtcatcggatgactttcacttagaccggcatttatattttgcttgccgagatgatcgggagcgtttttgtgaaaatacacaagctggtgagggcagagtgtataagtgcctctttaaccataaatttgaagaatccatgagtgaaaagtgtcgagaagcacttacaacccgccaaaagctgattgcccaggattataaagtcagttattcattggccaaatcctgtaaaagtgacttgaagaaataccggtgcaatgtggaaaaccttccgcgatcgcgtgaagccaggctctcctacttgttaatgtgcctggagtcagctgtacacagagggcgacaagtcagcagtgagtgccagggggagatgctggattaccgacgcatgttgatggaagacttttctctgagccctgagatcatcctaagctgtcggggggagattgaacaccattgttccggattacatcgaaaagggcggaccctacactgtctgatgaaagtagttcgaggggagaaggggaaccttggaatgaactgccagcaggcgcttcaaacactgattcaggagactgaccctggtgcagattaccgcattgatcgagctttgaatgaagcttgtgaatctgtaatccagacagcctgcaaacatataagatctggagacccaatgatcttgtcgtgcctgatggaacatttatacacagagaagatggtagaagactgtgaacaccgtctcttagagctgcagtatttcatctcccgggattggaagctggaccctgtcctgtaccgcaagtgccagggagacgcttctcgtctttgccacacccacggttggaatgagaccagtgaatttatgcctcagggagctgtgttctcttgtttatacagacacgcctaccgcactgaggaacagggaaggaggctctcacgggagtgccgagctgaagtccaaaggatcctacaccagcgtgccatggatgtcaagctggatcctgccctccaggataagtgcctgattgatctgggaaaatggtgcagtgagaaaacagagactggacaggagctggagtgccttcaggaccatctggatgacttggtggtggagtgtagagatatagttggcaacctcactgagttagaatcagaggatattcaaatagaagccttgctgatgagagcctgtgagcccataattcagaacttctgccacgatgtggcagataaccagatagactctggggacctgatggagtgtctgatacagaacaaacaccagaaggacatgaacgagaagtgtgccatcggagttacccacttccagctggtgcagatgaaggattttcggttttcttacaagtttaaaatggcctgcaaggaggacgtgttgaagctttgcccaaacataaaaaagaaggtggacgtggtgatctgcctgagcacgaccgtgcgcaatgacactctgcaggaagccaaggagcacagggtgtccctgaagtgccgcaggcagctccgtgtggaggagctggagatgacggaggacatccgcttggagccagatctatacgaagcctgcaagagtgacatcaaaaacttctgttccgctgtgcaatatggcaacgctcagattatcgaatgtctgaaagaaaacaagaagcagctaagcacccgctgccaccaaaaagtatttaagctgcaggagacagagatgatggacccagagctagactacaccctcatgagggtctgcaagcagatgataaagaggttctgtccggaagcagattctaaaaccatgttgcagtgcttgaagcaaaataaaaacagtgaattgatggatcccaaatgcaaacagatgataaccaagcgccagatcacccagaacacagattaccgcttaaaccccatgttaagaaaagcctgtaaagctgacattcctaaattctgtcacggtatcctgactaaggccaaggatgattcagaattagaaggacaagtcatctcttgcctgaagctgagatatgctgaccagcgcctgtcttcagactgtgaagaccagatccgaatcattatccaggagtccgccctggactaccgcctggatcctcagctccagctgcactgctcagacgagatctccagtctatgtgctgaagaagcagcagcccaagagcagacaggtcaggtggaggagtgcctcaaggtcaacctgctcaagatcaaaacagaattgtgtaaaaaggaagtgctaaacatgctgaaggaaagcaaagcagacatctttgttgacccggtacttcatactgcttgtgccctggacattaaacaccactgcgcagccatcacccctggccgcgggcgtcaaatgtcctgtctcatggaagcactggaggataagcgggtgaggttacagcccgagtgcaaaaagcgcctcaatgaccggattgagatgtggagttacgcagcaaaggtggccccagcagatggcttctctgatcttgccatgcaagtaatgacgtctccatctaagaactacattctctctgtgatcagtgggagcatctgtatattgttcctgattggcctgatgtgtggacggatcaccaagcgagtgacacgagagctcaaggacaggctacaatacaggtcagagacaatggcttataaaggtttagtgtggtctcaggatgtgacaggcagtccagcctgacctttctgcacactccagacaaacttccc

SEQ ID NO: 138318 - DNA, 4037 bp, Homo sapiens
  Payload ID: 7090
  Gene Symbol: GLG1
  Gene Name: golgi glycoprotein 1
  ENST ID: ENST00000562090
  CDS Start-End: 12-2108
gcggactcaagatggcggcgtgtggacgtgtacggaggatgttccgcttgtcggcggcgctgcatctgctgctgctattcgcggccggggccgagaaactccccggccagggcgtccacagccagggccagggtcccggggccaactttgtgtccttcgtagggcaggccggaggcggcggcccggcgggtcagcagctgccccagctgcctcagtcatcgcagcttcagcagcaacagcagcagcagcaacagcaacagcagcctcagccgccgcagccgcctttcccggcgggtgggcctccggcccggcggggaggagcgggggctggtgggggctggaagctggcggaggaagagtcctgcagggaggacgtgacccgcgtgtgccctaagcacacctggagcaacaacctggcggtgctcgagtgcctgcaggatgtgagggagcctgaaaatgaaatttcttcagactgcaatcatttgttgtggaattataagctgaacctaactacagatcccaaatttgaatctgtggccagagaggtttgcaaatctactataacagagattaaagaatgtgctgatgaaccggttggaaaaggttacatggtttcctgcttggtggatcaccgaggcaacatcactgagtatcagtgtcaccagtacattaccaagatgacggccatcatttttagtgattaccgtttaatctgtggcttcatggatgactgcaaaaatgacatcaacattctgaaatgtggcagtattcggcttggagaaaaggatgcacattcacaaggtgaggtggtatcatgcttggagaaaggcctggtgaaagaagcagaagaaagagaacccaagattcaagtttctgaactctgcaagaaagccattctccgggtggctgagctgtcatcggatgactttcacttagaccggcatttatattttgcttgccgagatgatcgggagcgtttttgtgaaaatacacaagctggtgagggcagagtgtataagtgcctctttaaccataaatttgaagaatccatgagtgaaaagtgtcgagaagcacttacaacccgccaaaagctgattgcccaggattataaagtcagttattcattggccaaatcctgtaaaagtgacttgaagaaataccggtgcaatgtggaaaaccttccgcgatcgcgtgaagccaggctctcctacttgttaatgtgcctggagtcagctgtacacagagggcgacaagtcagcagtgagtgccagggggagatgctggattaccgacgcatgttgatggaagacttttctctgagccctgagatcatcctaagctgtcggggggagattgaacaccattgttccggattacatcgaaaagggcggaccctacactgtctgatgaaagtagttcgaggggagaaggggaaccttggaatgaactgccagcaggcgcttcaaacactgattcaggagactgaccctggtgcagattaccgcattgatcgagctttgaatgaagcttgtgaatctgtaatccagacagcctgcaaacatataagatctggagacccaatgatcttgtcgtgcctgatggaacatttatacacagagaagatggtagaagactgtgaacaccgtctcttagagctgcagtatttcatctcccgggattggaagctggaccctgtcctgtaccgcaagtgccagggagacgcttctcgtctttgccacacccacggttggaatgagaccagtgaatttatgcctcagggagctgtgttctcttgtttatacagacacgcctaccgcactgaggaacagggaaggaggctctcacgggagtgccgagctgaagtccaaaggatcctacaccagcgtgccatggatgtcaagctggatcctgccctccaggataagtgcctgattgatctgggaaaatggtgcagtgagaaaacagagactggacaggagctggagtgccttcaggaccatctggatgacttggtggtggagtgtagagatatagttggcaacctcactgagttagaatcagaggccgaaagggaatatgtctttaaaaatttgcctttcaaagtataacggaggagcagttctatatttattctggggctatctacttcaaatactagaatcgtttccaaaagatattcaaatagaagccttgctgatgagagcctgtgagcccataattcagaacttctgccacgatgtggcagataaccagatagactctggggacctgatggagtgtctgatacagaacaaacaccagaaggacatgaacgagaagtgtgccatcggagttacccacttccagctggtgcagatgaaggattttcggttttcttacaagtttaaaatggcctgcaaggaggacgtgttgaagctttgcccaaacataaaaaagaaggtggacgtggtgatctgcctgagcacgaccgtgcgcaatgacactctgcaggaagccaaggagcacagggtgtccctgaagtgccgcaggcagctccgtgtggaggagctggagatgacggaggacatccgcttggagccagatctatacgaagcctgcaagagtgacatcaaaaacttctgttccgctgtgcaatatggcaacgctcagattatcgaatgtctgaaagaaaacaagaagcagctaagcacccgctgccaccaaaaagtatttaagctgcaggagacagagatgatggacccagagctagactacaccctcatgagggtctgcaagcagatgataaagaggttctgtccggaagcagattctaaaaccatgttgcagtgcttgaagcaaaataaaaacagtgaattgatggatcccaaatgcaaacagatgataaccaagcgccagatcacccagaacacagattaccgcttaaaccccatgttaagaaaagcctgtaaagctgacattcctaaattctgtcacggtatcctgactaaggccaaggatgattcagaattagaaggacaagtcatctcttgcctgaagctgagatatgctgaccagcgcctgtcttcagactgtgaagaccagatccgaatcattatccaggagtccgccctggactaccgcctggatcctcagctccagctgcactgctcagacgagatctccagtctatgtgctgaagaagcagcagcccaagagcagacaggtcaggtggaggagtgcctcaaggtcaacctgctcaagatcaaaacagaattgtgtaaaaaggaagtgctaaacatgctgaaggaaagcaaagcagacatctttgttgacccggtacttcatactgcttgtgccctggacattaaacaccactgcgcagccatcacccctggccgcgggcgtcaaatgtcctgtctcatggaagcactggaggataagcgggtgaggttacagcccgagtgcaaaaagcgcctcaatgaccggattgagatgtggagttacgcagcaaaggtggccccagcagatggcttctctgatcttgccatgcaagtaatgacgtctccatctaagaactacattctctctgtgatcagtgggagcatctgtatattgttcctgattggcctgatgtgtggacggatcaccaagcgagtgacacgagagctcaaggacaggtagagccaccttgaccaccaaaggaactacctatccagtgcccagtttgtacagccctcttgtatagcatccccactcacctcgctcttctcagaagtgacaccaaccccgtgttagagcattagcagatgtccactgcgttgtcccatccagcctccactcgtgtccatggtgtcctcctcctcctcaccgtgcagcagcagcagctggtcgctggggttactgcctttgtttggcaaacttgggtttacctgcctgtagacaagtctctctcataccaacagaacttccggtacttccagaaccaactcacctgacctgcaactcaaaggcttttttaagaaaaccaccaaaaaaaaaaatttttttaaagaaaaaaa

SEQ ID NO: 138319 - DNA, 601 bp, Homo sapiens
  Payload ID: 7090
  Gene Symbol: GLG1
  Gene Name: golgi glycoprotein 1
  ENST ID: ENST00000565474
  CDS Start-End: 380-601
gatgtaggttaaaaggagtggaccagtgttctctttctgacagaaccattaaaattcctaacccacattggactgtcatctttcatccattaagacataatgctgcctatggataaggttggctgtaaaagttttcacaaataaaagtgtgccccattggtgcaccataagaccccttttctgttgttcatagaggcataaacaaggaaaacattgagagcctgaaaatgaaatttcttcagactgcaatcatttgttgtggaattataagctgaacctaactacagatcccaaatttgaatctgtggccagagaggtttgcaaatctactataacagagattaaagaatgtgctgatgaaccggttggaaaaggttacatggtttcctgcttggtggatcaccgaggcaacatcactgagtatcagtgtcaccagtacattaccaagatgacggccatcatttttagtgattaccgtttaatctgtggcttcatggatgactgcaaaaatgacatcaacattctgaaatgtggcagtattcggcttggagaaaaggatgcacattcacaaggtgaggtggtatcatgcttggagaaaggc

SEQ ID NO: 138320 - DNA, 2918 bp, Homo sapiens
  Payload ID: 7090
  Gene Symbol: GLG1
  Gene Name: golgi glycoprotein 1
  ENST ID: ENST00000567951
  CDS Start-End: 5-922
caagatggcggcgtgtggacgtgtacggaggatgttccgcttgtcggcggcgctgcatctgctgctgctattcgcggccggggccgagaaactccccggccagggcgtccacagccagggccagggtcccggggccaactttgtgtccttcgtagggcaggccggaggcggcggcccggcgggtcagcagctgccccagctgcctcagtcatcgcagcttcagcagcaacagcagcagcagcaacagcaacagcagcctcagccgccgcagccgcctttcccggcgggtgggcctccggcccggcggggaggagcgggggctggtgggggctggaagctggcggaggaagagtcctgcagggaggacgtgacccgcgtgtgccctaagcacacctggagcaacaacctggcggtgctcgagtgcctgcaggatgtgagggagcctgaaaatgaaatttcttcagactgcaatcatttgttgtggaattataagctgaacctaactacagatcccaaatttgaatctgtggccagagaggtttgcaaatctactataacagagattaaagaatgtgctgatgaaccggttggaaaaggttacatggtttcctgcttggtggatcaccgaggcaacatcactgagtatcagtgtcaccagtacattaccaagatgacggccatcatttttagtgattaccgtttaatctgtggcttcatggatgactgcaaaaatgacatcaacattctgaaatgtggcagtattcggcttggagaaaaggatgcacattcacaagacacgcctaccgcactgaggaacagggaaggaggctctcacgggagtgccgagctgaagtccaaaggatcctacaccagcgtgccatggatgtcaagctggatcctgccctccaggataagtgcctgattgatctgggaaaatggtgcagtgagaaaacagagactggacaggagctggagtgccttcaggaccatctggatgacttggtggtggagtgtagagatatagttggcaacctcactgagttagaatcagaggatattcaaatagaagccttgctgatgagagcctgtgagcccataattcagaacttctgccacgatgtggcagataaccagatagactctggggacctgatggagtgtctgatacagaacaaacaccagaaggacatgaacgagaagtgtgccatcggagttacccacttccagctggtgcagatgaaggattttcggttttcttacaagtttaaaatggcctgcaaggaggacgtgttgaagctttgcccaaacataaaaaagaaggtggacgtggtgatctgcctgagcacgaccgtgcgcaatgacactctgcaggaagccaaggagcacagggtgtccctgaagtgccgcaggcagctccgtgtggaggagctggagatgacggaggacatccgcttggagccagatctatacgaagcctgcaagagtgacatcaaaaacttctgttccgctgtgcaatatggcaacgctcagattatcgaatgtctgaaagaaaacaagaagcagctaagcacccgctgccaccaaaaagtatttaagctgcaggagacagagatgatggacccagagctagactacaccctcatgagggtctgcaagcagatgataaagaggttctgtccggaagcagattctaaaaccatgttgcagtgcttgaagcaaaataaaaacagtgaattgatggatcccaaatgcaaacagatgataaccaagcgccagatcacccagaacacagattaccgcttaaaccccatgttaagaaaagcctgtaaagctgacattcctaaattctgtcacggtatcctgactaaggccaaggatgattcagaattagaaggacaagtcatctcttgcctgaagctgagatatgctgaccagcgcctgtcttcagactgtgaagaccagatccgaatcattatccaggagtccgccctggactaccgcctggatcctcagctccagctgcactgctcagacgagatctccagtctatgtgctgaagaagcagcagcccaagagcagacaggtcaggtggaggagtgcctcaaggtcaacctgctcaagatcaaaacagaattgtgtaaaaaggaagtgctaaacatgctgaaggaaagcaaagcagacatctttgttgacccggtacttcatactgcttgtgccctggacattaaacaccactgcgcagccatcacccctggccgcgggcgtcaaatgtcctgtctcatggaagcactggaggataagcgggtgaggttacagcccgagtgcaaaaagcgcctcaatgaccggattgagatgtggagttacgcagcaaaggtggccccagcagatggcttctctgatcttgccatgcaagtaatgacgtctccatctaagaactacattctctctgtgatcagtgggagcatctgtatattgttcctgattggcctgatgtgtggacggatcaccaagcgagtgacacgagagctcaaggacaggtagagccaccttgaccaccaaaggaactacctatccagtgcccagtttgtacagccctcttgtatagcatccccactcacctcgctcttctcagaagtgacaccaaccccgtgttagagcattagcagatgtccactgcgttgtcccatccagcctccactcgtgtccatggtgtcctcctcctcctcaccgtgcagcagcagcagctggtcgctggggttactgcctttgtttggcaaacttgggtttacctgcctgtagacaagtctctctcataccaacagaacttccggtacttccagaaccaactcacctgacctgcaactcaaaggcttttttaagaaaaccaccaaaaaaaaaaatttttttaaagaaaaaaa

SEQ ID NO: 138321 - DNA, 461 bp, Homo sapiens
  Payload ID: 7090
  Gene Symbol: GLG1
  Gene Name: golgi glycoprotein 1
  ENST ID: ENST00000565260
  CDS Start-End: 4-461
aagatggcggcgtgtggacgtgtacggaggatgttccgcttgtcggcggcgctgcatctgctgctgctattcgcggccggggccgagaaactccccggccagggcgtccacagccagggccagggtcccggggccaactttgtgtccttcgtagggcagccgcctttcccggcgggtgggcctccggcccggcggggaggagcgggggctggtgggggctggaagctggcggaggaagagtcctgcagggaggacgtgacccgcgtgtgccctaagcacacctggagcaacaacctggcggtgctcgagtgcctgcaggatgtgagggagcctgaaaatgaaatttcttcagactgcaatcatttgttgtggaattataagctgaacctaactacagatcccaaatttgaatctgtggccagagaggtttgcaaatctactataacagagattaaagaatg

SEQ ID NO: 138322 - DNA, 2147 bp, Homo sapiens
  Payload ID: 7090
  Gene Symbol: GLG1
  Gene Name: golgi glycoprotein 1
  ENST ID: ENST00000627032
  CDS Start-End: 51-2147
atttaaatacgcggcgccggcgagtgcgtcgagctcgccgcggactcaagatggcggcgtgtggacgtgtacggaggatgttccgcttgtcggcggcgctgcatctgctgctgctattcgcggccggggccgagaaactccccggccagggcgtccacagccagggccagggtcccggggccaactttgtgtccttcgtagggcaggccggaggcggcggcccggcgggtcagcagctgccccagctgcctcagtcatcgcagcttcagcagcaacagcagcagcagcaacagcaacagcagcctcagccgccgcagccgcctttcccggcgggtgggcctccggcccggcggggaggagcgggggctggtgggggctggaagctggcggaggaagagtcctgcagggaggacgtgacccgcgtgtgccctaagcacacctggagcaacaacctggcggtgctcgagtgcctgcaggatgtgagggagcctgaaaatgaaatttcttcagactgcaatcatttgttgtggaattataagctgaacctaactacagatcccaaatttgaatctgtggccagagaggtttgcaaatctactataacagagattaaagaatgtgctgatgaaccggttggaaaaggttacatggtttcctgcttggtggatcaccgaggcaacatcactgagtatcagtgtcaccagtacattaccaagatgacggccatcatttttagtgattaccgtttaatctgtggcttcatggatgactgcaaaaatgacatcaacattctgaaatgtggcagtattcggcttggagaaaaggatgcacattcacaaggtgaggtggtatcatgcttggagaaaggcctggtgaaagaagcagaagaaagagaacccaagattcaagtttctgaactctgcaagaaagccattctccgggtggctgagctgtcatcggatgactttcacttagaccggcatttatattttgcttgccgagatgatcgggagcgtttttgtgaaaatacacaagctggtgagggcagagtgtataagtgcctctttaaccataaatttgaagaatccatgagtgaaaagtgtcgagaagcacttacaacccgccaaaagctgattgcccaggattataaagtcagttattcattggccaaatcctgtaaaagtgacttgaagaaataccggtgcaatgtggaaaaccttccgcgatcgcgtgaagccaggctctcctacttgttaatgtgcctggagtcagctgtacacagagggcgacaagtcagcagtgagtgccagggggagatgctggattaccgacgcatgttgatggaagacttttctctgagccctgagatcatcctaagctgtcggggggagattgaacaccattgttccggattacatcgaaaagggcggaccctacactgtctgatgaaagtagttcgaggggagaaggggaaccttggaatgaactgccagcaggcgcttcaaacactgattcaggagactgaccctggtgcagattaccgcattgatcgagctttgaatgaagcttgtgaatctgtaatccagacagcctgcaaacatataagatctggagacccaatgatcttgtcgtgcctgatggaacatttatacacagagaagatggtagaagactgtgaacaccgtctcttagagctgcagtatttcatctcccgggattggaagctggaccctgtcctgtaccgcaagtgccagggagacgcttctcgtctttgccacacccacggttggaatgagaccagtgaatttatgcctcagggagctgtgttctcttgtttatacagacacgcctaccgcactgaggaacagggaaggaggctctcacgggagtgccgagctgaagtccaaaggatcctacaccagcgtgccatggatgtcaagctggatcctgccctccaggataagtgcctgattgatctgggaaaatggtgcagtgagaaaacagagactggacaggagctggagtgccttcaggaccatctggatgacttggtggtggagtgtagagatatagttggcaacctcactgagttagaatcagaggccgaaagggaatatgtctttaaaaatttgcctttcaaagtataa

SEQ ID NO: 138323 - DNA, 2100 bp, Homo sapiens
  Payload ID: 7091
  Gene Symbol: GOLIM4
  Gene Name: golgi integral membrane protein 4
  ENST ID: ENST00000309027
  CDS Start-End: 60-2066
gctcggaccaaggggaggagacggcgggggcggccgcggctttgggtccaggcgggactatgggaaacgggatgtgctcccgaaagcagaagcggattttccagacgctgctgctgctgaccgtcgtgttcggctttctctacggcgcgatgctctactacgagctgcagacgcagctgcggaaagccgaggcggtggcgctcaagtaccagcagcaccaggagtccctctccgcccagttacaagttgtatatgaacacagatcaagattagagaaatccttgcaaaaagaaagacttgaacataaaaaagcaaaggaagattttcttgtttataagttagaagcacaagaaacattaaataaaggaaggcaagattccaatagcagatacagtgcactgaatgtccaacatcagatgttgaaaagccaacacgaggagctaaagaaacagcacagtgacttggaagaggaacatcgcaaacaaggggaagacttcagtagaacatttaatgaccataagcaaaaatacttgcagctccagcaagaaaaagaacaagaactttctaagctaaaagagactgtatacaatttgagagaagagaatagacaactaaggaaagcacaccaagacatacatacacagcttcaagatgtcaagactcaagttgcagaatataaacaactgaaagatactctgaataggattccaagccttcgaaaacctgatccagcagaacagcaaaatgtgacccaggtggcacattctccacaaggttacaacacagcaagggagaagccaacccgagaggtgcaggaggtgtctcgaaataatgatgtgtggcagaaccatgaagcagttcctggaagagcagaagacacaaaactctatgctcccacccataaggaggcagaatttcaggctcccccagagccaatccaacaagaagtggaacgcagagaacctgaggagcatcaggtggaagaggagcacagaaaggccctggaggaggaagaaatggagcaggtcgggcaagcagaacatcttgaggaggaacacgatccatcaccagaggagcaggatcgggagtggaaagagcagcatgagcaacgagaagcagccaacctcctggaagggcacgcgcgtgctgaggtgtacccttcagccaagccaatgatcaaattccaatcaccctatgaggaacagttggaacagcagagactggcagtgcagcaggtggaggaggcccagcagctgcgggaacaccaggaagctttgcaccagcagaggctgcaggggcacttactacggcagcaggaacagcagcagcagcaggtggcaagagagatggccctgcagaggcaggctgagcttgaggagggccggccgcagcaccaggagcagctccggcagcaagctcattatgatgctatggataatgatatcgttcagggagcagaggaccagggaatccaaggagaggaaggagcctatgaaagagacaaccagcaccaagatgaagcagaaggagatccaggtaatagacatgagcctcgtgaacaaggaccccgagaagccgacccagaatctgaggcagatagggcagctgtagaagatataaacccagcagatgaccctaataatcaaggtgaggatgaatttgaagaagccgagcaagtgagagaagaaaatttgccagatgaaaatgaagagcaaaaacaaagtaatcaaaagcaagagaatacagaagtggaggaacatttggtgatggcaggaaatccagaccagcaggaggacaatgttgatgaacagtaccaggaagaggcagaagaggaggttcaggaagatttgactgaagagaaaaaaagggaactggagcataatgctgaagagacctatggtgaaaatgatgaaaatactgatgataaaaataatgatggagaagagcaagaagttcgagatgacaaccgccccaaaggccgagaggaacactacgaggaggaagaagaggaggaagaagacggggctgcagttgctgagaaatcacatcgaagagctgaaatgtagcggcacccaatttctagacaacgctcagccaacg

SEQ ID NO: 138324 - DNA, 4373 bp, Homo sapiens
  Payload ID: 7091
  Gene Symbol: GOLIM4
  Gene Name: golgi integral membrane protein 4
  Uniprot ID: O00461
  ENST ID: ENST00000470487
  CDS Start-End: 691-2781
aatgagcaaggaggccgagtgggacttcctcccggaatcccgttggccagaatagccgggccgtgggtgacacgtaagttgggcaggaggtggcggggcggcagaggcaccagccgacccgtcagtgacaccgctgtgccgtccccaaaaccagccgagacagctggcccccacccttccacccattgggcaggccgcacgggggcgcggcccggagtcctggtccctttgttgggcgcgcaccccctcccttaggtggcaacaaagtcgtgcagtgggagccgccgcgatagggcggggagtggccagggcgggactccaagaactgcccgggggcagcggggccaaaaagtgggaagaaggaaaaaaggcaggaggcatctggggacaggcgcgagggcagccggctctgaagtatgcggagggcctcctcccggccccgggcattcgcggagaacgagcctcgcagaagtttggctgcagctgcccgggcggcgtcgatggctgcgcgccccgcgccgcgcgggggctgagcgggcgccacttcccctccgggccggcttttgtgtctggcatctcctcctcatgctgcgtctggccacctactgcggcggccgctgctgagacgctcgctcggaccaaggggaggagacggcgggggcggccgcggctttgggtccaggcgggactatgggaaacgggatgtgctcccgaaagcagaagcggattttccagacgctgctgctgctgaccgtcgtgttcggctttctctacggcgcgatgctctactacgagctgcagacgcagctgcggaaagccgaggcggtggcgctcaagtaccagcagcaccaggagtccctctccgcccagttacaagttgtatatgaacacagatcaagattagagaaatccttgcaaaaagaaagacttgaacataaaaaagcaaaggaagattttcttgtttataagttagaagcacaagaaacattaaataaaggaaggcaagattccaatagcagatacagtgcactgaatgtccaacatcagatgttgaaaagccaacacgaggagctaaagaaacagcacagtgacttggaagaggaacatcgcaaacaaggggaagacttcagtagaacatttaatgaccataagcaaaaatacttgcagctccagcaagaaaaagaacaagaactttctaagctaaaagagactgtatacaatttgagagaagagaatagacaactaaggaaagcacaccaagacatacatacacagcttcaagatgtcaagcaacagcataagaatttactctccgagcatgaacaacttgtagtgactttggaagaccacaagagtgcactagctgctgcacagactcaagttgcagaatataaacaactgaaagatactctgaataggattccaagccttcgaaaacctgatccagcagaacagcaaaatgtgacccaggtggcacattctccacaaggttacaacacagcaagggagaagccaacccgagaggtgcaggaggtgtctcgaaataatgatgtgtggcagaaccatgaagcagttcctggaagagcagaagacacaaaactctatgctcccacccataaggaggcagaatttcaggctcccccagagccaatccaacaagaagtggaacgcagagaacctgaggagcatcaggtggaagaggagcacagaaaggccctggaggaggaagaaatggagcaggtcgggcaagcagaacatcttgaggaggaacacgatccatcaccagaggagcaggatcgggagtggaaagagcagcatgagcaacgagaagcagccaacctcctggaagggcacgcgcgtgctgaggtgtacccttcagccaagccaatgatcaaattccaatcaccctatgaggaacagttggaacagcagagactggcagtgcagcaggtggaggaggcccagcagctgcgggaacaccaggaagctttgcaccagcagaggctgcaggggcacttactacggcagcaggaacagcagcagcagcaggtggcaagagagatggccctgcagaggcaggctgagcttgaggagggccggccgcagcaccaggagcagctccggcagcaagctcattatgatgctatggataatgatatcgttcagggagcagaggaccagggaatccaaggagaggaaggagcctatgaaagagacaaccagcaccaagatgaagcagaaggagatccaggtaatagacatgagcctcgtgaacaaggaccccgagaagccgacccagaatctgaggcagatagggcagctgtagaagatataaacccagcagatgaccctaataatcaaggtgaggatgaatttgaagaagccgagcaagtgagagaagaaaatttgccagatgaaaatgaagagcaaaaacaaagtaatcaaaagcaagagaatacagaagtggaggaacatttggtgatggcaggaaatccagaccagcaggaggacaatgttgatgaacagtaccaggaagaggcagaagaggaggttcaggaagatttgactgaagagaaaaaaagggaactggagcataatgctgaagagacctatggtgaaaatgatgaaaatactgatgataaaaataatgatggagaagagcaagaagttcgagatgacaaccgccccaaaggccgagaggaacactacgaggaggaagaagaggaggaagaagacggggctgcagttgctgagaaatcacatcgaagagctgaaatgtagcggcacccaatttctagacaacgctcagccaacggattcttttcaagctgctcaaacataaatctgcctactgaactctaggatatttaattacaaaaattaagaacttagacttttttaaaacttttgtattagaaatgcgcatacatttatatgaatatattttgataacgtaggtctagagcttcttttatattcaagctaaacatgaaaaagaagaaaaacaataaagtaaacctgagcccccacgtcccaatttttttaatagattatgtgatgttggaaagctcattgattttgtatatgtttcagcgtgttacctttctggcttccagttcccaggtgttctttgtttgcctttgataaaatacaggatttaagaacagagagtactgcaaaatgccatgcagactttaaagagaatggcctgtttactaattgctgcccttctgatgtctttatgtatagctctgatagaattttcaccagtctatgtatctctggagtgagatctatgtacaaagtgacatacaattggaaatccatttttgttgtaaagacattgtttttcagacttttcagatcaattagaaaaatgtcattgctttaaaatcatagctgttctgtttaagaggaattgaatttaaaaatgagagagtattaaaactcatgtggcagtatcctggtcttaatcaggtattgcagtgttcaaacaaggtatggacacatcaacatattcaccttttggaaggactagtgacttggttaaaaactaatgagtgtttgcgtgtggtgtttctatgcgagcacccattctcaattttttttttttttttttgtttgaagccattgattgatattcttgtttcagtgtctggttccctataagtaatatatatttcctctttaagctctgtgcctcaatatgcaatcactttgataataagtataaatatgaagacataccaaactgcaaataggattatttttcaaaactatatggtgaaacatatggtgatatgatagacttatggtttttctgtttgctgggattgggtctgctttttgcctatgtgtaaggcattttaatcattgtgaatataatagattccttaaaataagaaaattaaaaatcagaaacttcccttggagtagagacatttcagttgcaagcataaagatttttaaatatataacactaggttatataattcatatatgtgtggttttgtattaataatcaaattaataaaaacatttcattttctaccattgtatgaacgtaattttattttttaataaccacactcatagatggttttgattgttccagttgagtgattgtgtatgtacgcataggaatgttttgttcagttgtactttgtatttccaataatcagaaatcttacctttatgtataaaaacccattatgtaatgtaaaatgtataatattgtacataatattcagaatacaattattttggtaaattagcttgtatttttaatgtcccagttgcagtatttaattatttgaaccatactgaaagttggtaatagtcaataaagctaaaaaaaaaaagtggcaaatctt

SEQ ID NO: 138325 - DNA, 3022 bp, Homo sapiens
  Payload ID: 7092
  Gene Symbol: GOLM1
  Gene Name: golgi membrane protein 1
  Uniprot ID: Q8NBJ4
  ENST ID: ENST00000388711
  CDS Start-End: 147-1352
atcttcactttttccgttgctagcagtggaagggtcacagaccaaacactaaggcctgagcggtgacaaccgaggcgagatgatggtcaacagggaatgcctcgtgggagaaaaaagacaattttattctcagcgctgattttgagatgatgggcttgggaaacgggcgtcgcagcatgaagtcgccgcccctcgtgctggccgccctggtggcctgcatcatcgtcttgggcttcaactactggattgcgagctcccggagcgtggacctccagacacggatcatggagctggaaggcagggtccgcagggcggctgcagagagaggcgccgtggagctgaagaagaacgagttccagggagagctggagaagcagcgggagcagcttgacaaaatccagtccagccacaacttccagctggagagcgtcaacaagctgtaccaggacgaaaaggcggttttggtgaataacatcaccacaggtgagaggctcatccgagtgctgcaagaccagttaaagaccctgcagaggaattacggcaggctgcagcaggatgtcctccagtttcagaagaaccagaccaacctggagaggaagttctcctacgacctgagccagtgcatcaatcagatgaaggaggtgaaggaacagtgtgaggagcgaatagaagaggtcaccaaaaaggggaatgaagctgtagcttccagagacctgagtgaaaacaacgaccagagacagcagctccaagccctcagtgagcctcagcccaggctgcaggcagcaggcctgccacacacagaggtgccacaagggaagggaaacgtgcttggtaacagcaagtcccagacaccagcccccagttccgaagtggttttggattcaaagagacaagttgagaaagaggaaaccaatgagatccaggtggtgaatgaggagcctcagagggacaggctgccgcaggagccaggccgggagcaggtggtggaagacagacctgtaggtggaagaggcttcgggggagccggagaactgggccagaccccacaggtgcaggctgccctgtcagtgagccaggaaaatccagagatggagggccctgagcgagaccagcttgtcatccccgacggacaggaggaggagcaggaagctgccggggaagggagaaaccagcagaaactgagaggagaagatgactacaacatggatgaaaatgaagcagaatctgagacagacaagcaagcagccctggcagggaatgacagaaacatagatgtttttaatgttgaagatcagaaaagagacaccataaatttacttgatcagcgtgaaaagcggaatcatacactctgaattgaactggaatcacatatttcacaacagggccgaagagatgactataaaatgttcatgagggactgaatactgaaaactgtgaaatgtactaaataaaatgtacatctgaagatgattattgtgaaattttagtatgcactttgtgtaggaaaaaatggaatggtcttttaaacagcttttggggggtactttggaagtgtctaataaggtgtcacaatttttggtagtaggtatttcgtgagaagttcaacaccaaaactggaacatagttctccttcaagtgttggcgacagcggggcttcctgattctggaatataactttgtgtaaattaacagccacctatagaagagtccatctgctgtgaaggagagacagagaactctgggttccgtcgtcctgtccacgtgctgtaccaagtgctggtgccagcctgttacctgttctcactgaaaagtctggctaatgctcttgtgtagtcacttctgattctgacaatcaatcaatcaatggcctagagcactgactgttaacacaaacgtcactagcaaagtagcaacagctttaagtctaaatacaaagctgttctgtgtgagaattttttaaaaggctacttgtataataacccttgtcatttttaatgtacaaaacgctattaagtggcttagaatttgaacatttgtggtctttatttactttgcttcgtgtgtgggcaaagcaacatcttccctaaatatatattaccaagaaaagcaagaagcagattaggtttttgacaaaacaaacaggccaaaagggggctgacctggagcagagcatggtgagaggcaaggcatgagagggcaagtttgttgtggacagatctgtgcctactttattactggagtaaaagaaaacaaagttcattgatgtcgaaggatatatacagtgttagaaattaggactgtttagaaaaacaggaatacaatggttgtttttatcatagtgtacacatttagcttgtggtaaatgactcacaaaactgattttaaaatcaagttaatgtgaattttgaaaattactacttaatcctaattcacaataacaatggcattaaggtttgacttgagttggttcttagtattatttatggtaaataggctcttaccacttgcaaataactggccacatcattaatgactgacttcccagtaaggctctctaaggggtaagtaggaggatccacaggatttgagatgctaaggccccagagatcgtttgatccaaccctcttattttcagaggggaaaatggggcctagaagttacagagcatctagctggtgcgctggcacccctggcctcacacagactcccgagtagctgggactacaggcacacagtcactgaagcaggccctgtttgcaattcacgttgccacctccaacttaaacattcttcatatgtgatgtccttagtcactaaggttaaactttcccacccagaaaaggcaacttagataaaatcttagagtactttcatactcttctaagtcctcttccagcctcactttgagtcctccttggggttgataggaattttctcttgctttctcaataaagtctctattcatctcatgtttaatttgtacgcatagaattgctgagaaataaaatgttctgttcaactt

SEQ ID NO: 138326 - DNA, 3046 bp, Homo sapiens
  Payload ID: 7092
  Gene Symbol: GOLM1
  Gene Name: golgi membrane protein 1
  Uniprot ID: Q8NBJ4
  ENST ID: ENST00000388712
  CDS Start-End: 170-1375
ggagacgcggcggcgctggacgcggaggcgctgggcgcacggcgcggagccggccggagctcgaggccggcggcggcgggagagcgacccgggcggcctcgtagcggggccccggatccccgagtggcggccggagcctcgaaaagagattctcagcgctgattttgagatgatgggcttgggaaacgggcgtcgcagcatgaagtcgccgcccctcgtgctggccgccctggtggcctgcatcatcgtcttgggcttcaactactggattgcgagctcccggagcgtggacctccagacacggatcatggagctggaaggcagggtccgcagggcggctgcagagagaggcgccgtggagctgaagaagaacgagttccagggagagctggagaagcagcgggagcagcttgacaaaatccagtccagccacaacttccagctggagagcgtcaacaagctgtaccaggacgaaaaggcggttttggtgaataacatcaccacaggtgagaggctcatccgagtgctgcaagaccagttaaagaccctgcagaggaattacggcaggctgcagcaggatgtcctccagtttcagaagaaccagaccaacctggagaggaagttctcctacgacctgagccagtgcatcaatcagatgaaggaggtgaaggaacagtgtgaggagcgaatagaagaggtcaccaaaaaggggaatgaagctgtagcttccagagacctgagtgaaaacaacgaccagagacagcagctccaagccctcagtgagcctcagcccaggctgcaggcagcaggcctgccacacacagaggtgccacaagggaagggaaacgtgcttggtaacagcaagtcccagacaccagcccccagttccgaagtggttttggattcaaagagacaagttgagaaagaggaaaccaatgagatccaggtggtgaatgaggagcctcagagggacaggctgccgcaggagccaggccgggagcaggtggtggaagacagacctgtaggtggaagaggcttcgggggagccggagaactgggccagaccccacaggtgcaggctgccctgtcagtgagccaggaaaatccagagatggagggccctgagcgagaccagcttgtcatccccgacggacaggaggaggagcaggaagctgccggggaagggagaaaccagcagaaactgagaggagaagatgactacaacatggatgaaaatgaagcagaatctgagacagacaagcaagcagccctggcagggaatgacagaaacatagatgtttttaatgttgaagatcagaaaagagacaccataaatttacttgatcagcgtgaaaagcggaatcatacactctgaattgaactggaatcacatatttcacaacagggccgaagagatgactataaaatgttcatgagggactgaatactgaaaactgtgaaatgtactaaataaaatgtacatctgaagatgattattgtgaaattttagtatgcactttgtgtaggaaaaaatggaatggtcttttaaacagcttttggggggtactttggaagtgtctaataaggtgtcacaatttttggtagtaggtatttcgtgagaagttcaacaccaaaactggaacatagttctccttcaagtgttggcgacagcggggcttcctgattctggaatataactttgtgtaaattaacagccacctatagaagagtccatctgctgtgaaggagagacagagaactctgggttccgtcgtcctgtccacgtgctgtaccaagtgctggtgccagcctgttacctgttctcactgaaaagtctggctaatgctcttgtgtagtcacttctgattctgacaatcaatcaatcaatggcctagagcactgactgttaacacaaacgtcactagcaaagtagcaacagctttaagtctaaatacaaagctgttctgtgtgagaattttttaaaaggctacttgtataataacccttgtcatttttaatgtacaaaacgctattaagtggcttagaatttgaacatttgtggtctttatttactttgcttcgtgtgtgggcaaagcaacatcttccctaaatatatattaccaagaaaagcaagaagcagattaggtttttgacaaaacaaacaggccaaaagggggctgacctggagcagagcatggtgagaggcaaggcatgagagggcaagtttgttgtggacagatctgtgcctactttattactggagtaaaagaaaacaaagttcattgatgtcgaaggatatatacagtgttagaaattaggactgtttagaaaaacaggaatacaatggttgtttttatcatagtgtacacatttagcttgtggtaaatgactcacaaaactgattttaaaatcaagttaatgtgaattttgaaaattactacttaatcctaattcacaataacaatggcattaaggtttgacttgagttggttcttagtattatttatggtaaataggctcttaccacttgcaaataactggccacatcattaatgactgacttcccagtaaggctctctaaggggtaagtaggaggatccacaggatttgagatgctaaggccccagagatcgtttgatccaaccctcttattttcagaggggaaaatggggcctagaagttacagagcatctagctggtgcgctggcacccctggcctcacacagactcccgagtagctgggactacaggcacacagtcactgaagcaggccctgtttgcaattcacgttgccacctccaacttaaacattcttcatatgtgatgtccttagtcactaaggttaaactttcccacccagaaaaggcaacttagataaaatcttagagtactttcatactcttctaagtcctcttccagcctcactttgagtcctccttggggttgataggaattttctcttgctttctcaataaagtctctattcatctcatgtttaatttgtacgcatagaattgctgagaaataaaatgttctgttcaactta

SEQ ID NO: 138327 - DNA, 561 bp, Homo sapiens
  Payload ID: 7092
  Gene Symbol: GOLM1
  Gene Name: golgi membrane protein 1
  ENST ID: ENST00000470762
  CDS Start-End: 22-339
attctcagcgctgattttgagatgatgggcttgggaaacgggcgtcgcagcatgaagtcgccgcccctcgtgctggccgccctggtggcctgcatcatcgtcttgggcttcaactactggattgcgagctcccggagcgtggacctccagacacggatcatggagctggaaggcagggtccgcagggcggctgcagagagaggcgccgtggagctgaagaagaacgagttccagggagagctggagaagcagcgggagcagcttgacaaaatccagtccagccacaacttccagctggagagcgtcaacaagctgtaccaggacgaaaagaccagttaaagaccctgcagaggaattacggcaggctgcagcaggatgtcctccagtttcagaagaaccagaccaacctggagaggaagttctcctacgacctgagccagtgcatcaatcagatgaaggaggtgaaggaacagtgtgaggagcgaatagaagaggtcaccaaaaaggggaatgaagctgtagcttccagagacctgagtgaaaacaacgaccagagacagc

SEQ ID NO: 138328 - DNA, 506 bp, Homo sapiens
  Payload ID: 7092
  Gene Symbol: GOLM1
  Gene Name: golgi membrane protein 1
  ENST ID: ENST00000466178
  CDS Start-End: 267-506
atcttcactttttccgttgctagcagtggaagggtcacagaccaaacactaaggcctgagcggtgacaaccgaggcgagatgatggtcaacagggaatgcctcgtgggagaaaaaagacaattttagtctcactctgttgcccccaggctggagtgcagtggcgcgatctcgactcactgcaacctctgcctcccgggttcaagtgattcttctgcctcagcctcccgagtagctaggactacagattctcagcgctgattttgagatgatgggcttgggaaacgggcgtcgcagcatgaagtcgccgcccctcgtgctggccgccctggtggcctgcatcatcgtcttgggcttcaactactggattgcgagctcccggagcgtggacctccagacacggatcatggagctggaaggcagggtccgcagggcggctgcagagagaggcgccgtggagctgaagaagaacgagttccagggagagctggagaagcagcgggagcag

SEQ ID NO: 138329 - DNA, 869 bp, Homo sapiens
  Payload ID: 7092
  Gene Symbol: GOLM1
  Gene Name: golgi membrane protein 1
  ENST ID: ENST00000486130
  CDS Start-End: 506-869
acagatacggtccctaaagtgagaaatgaatgttcgaaagaaggtgctctcgtttggcatggagtgaatgccttgtttccacctcaaatcctaagatggaacacatttttcctggtgacttcaggcagatggcacacctcccacttccgttgtgtgtcatgaaggaggagacacttctatagccagggctgtgcctgaataatgatgtacatgggggggagttcacattcacctccagaatgggtttcctgctttgcttgagaaatgctttaattgggtgtcattagtaatcctgtcaagggtaaaaaaaacctcccttgttaggaatcaaagcaaaaagctctctctgaggagtaatgaggaatatactctttctaatatgatgcggaagcacttaatatttgttattggtgtttacagaaatgattacttctcaaacattgctgcttacagaaatgattaattctcaaactatgccgggaagattctcagcgctgattttgagatgatgggcttgggaaacgggcgtcgcagcatgaagtcgccgcccctcgtgctggccgccctggtggcctgcatcatcgtcttgggcttcaactactggattgcgagctcccggagcgtggacctccagacacggatcatggagctggaaggcagggtccgcagggcggctgcagagagaggcgccgtggagctgaagaagaacgagttccagggagagctggagaagcagcgggagcagcttgacaaaatccagtccagccacaacttccagctggagagcgtcaacaagctgtaccaggacgaaaaggcggttttggtgaataacatcaccacaggtgagaggctcatccgagtgctgcaag

SEQ ID NO: 138330 - DNA, 2721 bp, Homo sapiens
  Payload ID: 7093
  Gene Symbol: GOLPH3
  Gene Name: golgi phosphoprotein 3 (coat-protein)
  Uniprot ID: Q9H4A6
  ENST ID: ENST00000265070
  CDS Start-End: 317-1213
acatcctccggtgacgtcagccggggccgccatattggaaaggcgccgccgccgcctccgccttggagctcggggtgtttcggggactgcggccacaggcaggaaggcgctcctctcctgccccgccgacgcccggccagcccgcttcgccctgacctgtttcctcatgactgcccccggccctgctgccgacggacgtcgccccggcgtccggatttaacacggaaacccggatcggaggccgcgcggggaggaggagggcgacccggtcggtcctgcgaccctctcggcccggctcggcgcctcggcgggagccatgacctcgctgacccagcgcagctccggcctggtgcagcggcgcaccgaggcctcccgcaacgccgccgacaaggagcgggcggcgggcggcggcgccggcagcagcgaggacgacgcgcagagccgccgcgacgagcaggacgacgacgacaagggcgactccaaggaaacgcggctgaccctgatggaggaagtgctcctgctgggcctcaaggaccgcgagggttacacatcattttggaatgactgtatatcatctggattacgtggctgtatgttaattgaattagcattgagaggaaggttacaactagaggcttgtggaatgagacgtaaaagtctattaacaagaaaggtaatctgtaagtcagatgctccaacaggggatgttcttcttgatgaagctctgaagcatgttaaggaaactcagcctccagaaacggtccagaactggattgaattacttagtggtgagacatggaatccattaaaattgcattatcagttaagaaatgtacgggaacgattagctaaaaacctggtggaaaagggtgtattgacaacagagaaacagaacttcctactttttgacatgacaacacatcccctcaccaataacaacattaagcagcgcctcatcaagaaagtacaggaagccgttcttgacaaatgggtgaatgaccctcaccgcatggacaggcgcttgctggccctcatttacctggctcatgcctcggacgtcctggagaatgcttttgctcctcttctggacgagcagtatgatttggctaccaagagagtgcggcagcttctcgacttagaccctgaagtggaatgtctgaaggccaacaccaatgaggttctgtgggcggtggtggcggcgttcaccaagtaactctgctcggggtgaaccattctcctttctctcaagtaaaccagtagtttttcttctgttgacttctggttttctgtaatttgtactttcccacactataattggcttctgttttacaaaatggtgggtggctttttcttttttgtacgtgtacaggattctgctggtacgagaggccttcctctttctgtttttaaaaaaagttttactgccatattggcattccattccctgttgccatcctcactgttacctgttttgggtttctggtctactttgactttcaaagtacctccagcctcctcatacgcacagcttttggatgacctcagcttgagtttctccatatgtgcatgtacatctagcattctgcctacagttcagacagaagtcacaaaaaggccttcaactcaccaaaggtaaatatctgtatctattaggacattttttacatagacttcagttgagatgtatacttagcaaaattatttttaaattgaaacagcacagtaaatacttaatataaaatgtcccttggattttgcttcccatgtaaatctattgtattattacacttgttataattttaactataaaggtccaattgtttcacagagccagtttgggatgggctgcattccatttatgctgtatatagtttgaattatatataaattaccccttcttctggccacccctgctcccatcttagtattttgcaagatctaatcagttgtacacctggtgcccctcgcttgcttcaatcatggttatttgatggcaaaatcgacctcttgtcgctgaaggagagagaaaagatgtgtgtctgattggtcctgggattttttgagctgtgccatttatggtactctttgcctatgcatccccttgttagattttttttaaattttatcttactgtttttataatttctattgggaagaggcttgtgaccagtaccaatcttgagtttctttttctgtccacaagtaaattaatatctgctctgaaatgtcatttatctactcacacattcttggggaaaaaaatcaaatgtcagtcctagcagatgttgcatgtaaattggtagcaagtaatgattacaacccagaggattaagaattttgtaacagaaagctctatgttttaattttttatatacaattaggataattagcattgtcagactataaacctttgctttttaaagtttatttttactatttctttatcactttattgtatcatcaccattggtttcataatgtaaatactatatgttgaacaaattaaatgtcaaaattttttattaccatagtccatgttaatagtggggctttcaggtgtttagagattttttttgttgttgttaacattcattgcaaaagtactagatggtgtataactctagagttgaattttaagggattccctaatatgtatactatctttttatctgaagtaataaataaacaatgatcttgaaagtgcctgaatcagagcaagca

SEQ ID NO: 138331 - DNA, 1074 bp, Homo sapiens
  Payload ID: 7093
  Gene Symbol: GOLPH3
  Gene Name: golgi phosphoprotein 3 (coat-protein)
  ENST ID: ENST00000503610
  CDS Start-End: 269-550
ccgccgcctccgccttggagctcggggtgtttcggggactgcggccacaggcaggaaggcgctcctctcctgccccgccgacgcccggccagcccgcttcgccctgacctgtttcctcatgactgcccccggccctgctgccgacggacgtcgccccggcgtccggatttaacacggaaacccggatcggaggccgcgcggggaggaggagggcgacccggtcggtcctgcgaccctctcggcccggctcggcgcctcggcgggagccatgacctcgctgacccagcgcagctccggcctggtgcagcggcgcaccgaggcctcccgcaacgccgccgacaaggagcgggcggcgggcggcggcgccggcagcagcgaggacgacgcgcagagccgccgcgacgagcaggacgacgacgacaagggcgactccaaggaaacgcggctgaccctgatggaggaagtgctcctgctgggcctcaaggaccgcgaggtgcgggcgcggcgggctgggcggggggcggcggcgcggggcccgggcgccaggtgagctccagggttacacatcattttggaatgactgtatatcatctggattacgtggctgtatgttaattgaattagcattgagaggaaggttacaactagaggcttgtggaatgagacgtaaaagtctattaacaagaaaggtaatctgtaagtcagatgctccaacaggggatgttcttcttgatgaagctctgaagcatgttaaggaaactcagcctccagaaacggtccagaactggattgaattacttagtggtgagacatggaatccattaaaattgcattatcagttaagaaatgtacgggaacgattagctaaaaacctggtggaaaagggtgtattgacaacagagaaacagaacttcctactttttgacatgacaacacatcccctcaccaataacaacattaagcagcgcctcatcaagaaagtacaggaagccgttcttgacaaatgggtgaatgaccctcaccgcatggacaggcgcttgctggccctcatttacctggctcatgcctcggacg

SEQ ID NO: 138332 - DNA, 2999 bp, Homo sapiens
  Payload ID: 7094
  Gene Symbol: GOLPH3L
  Gene Name: golgi phosphoprotein 3-like
  Uniprot ID: Q9H4A5
  ENST ID: ENST00000271732
  CDS Start-End: 46-903
ctgcgtccagccataacccaggagtaacatcagaaacaggtgagaatgaccactttaactcaccgggcccgtcgcactgaaataagcaagaactctgaaaagaagatggaaagtgaggaagacagtaattgggagaaaagtccagacaatgaagattctggagactctaaggatatccgccttactcttatggaagaagtattgcttctgggactaaaagataaagaggggtacacatctttctggaatgactgcatatcatcaggcctgcgagggggcatcctgatagagctggccatgcggggtcgaatctatctggaacccccgaccatgcgtaagaagcgactactagacagaaaggtactgctaaagtcagacagcccaacaggtgatgttttactggatgaaactctgaaacacatcaaagcaactgaacccacagaaactgtccaaacatggatagagctactcactggtgagacctggaaccccttcaaattacagtaccagctgagaaatgtacgagagcgcatcgcaaagaacctagtagagaaaggtattctaaccactgagaagcagaatttcctgctatttgacatgactactcatccagtgaccaatacaacagagaaacagcgactagtgaaaaaacttcaagatagtgtactagagcggtgggtaaatgaccctcagcgtatggacaagcgaacactagcactcctggtgctagcccactcctctgatgtgctagagaatgtcttctcctctctgacagatgacaagtatgatgtggcaatgaatcgagccaaggacttagtagaactggaccctgaagtggaagggacaaagcctagtgccacagaaatgatctgggctgtgctggcagccttcaataaatcttaaagccggcaggtggatttctccttttcccctgctggctggtgactgtcagagaccccatcactgagttttgtgtgatgagatgttttcatcatttttgtttccttttcttgaatcagacttgtgatttggggagagcaacttcagggcttctccatagaccttgaccattataagcagaccttatttctccctacacttccactccataggtaaataaactgggtgaagccacacacacccaatgaacattttctcccatttggtggtttagtttcacccagtgtgcttttggataagcagaaatatctaaatgggattttgagttctccagctatagaatgtgaatgagataaaaagtgaactatctattatatttttctgagtttgttttctatcataaatacatgttttcacagcctttgtctctcagactctgctaaataatgtagcttattgaaataactgtcgctgaataaggagcaatgagaaacaaaactaatttttggagcagatggtctctggaattgcatatcctgctagtgattttctcatctttccttttctaacctaatgagaatgtcccagattcaattacctggatgtcaaagtcctagagccagaaatatattctctcatccctcttagcattctcttgctccctcattcactagggcaaatgtctaaatgaagaaaagtctctctcaacacctcgttcatgcaatcagcattagaatttgtaaggaaggaaggggggtggcatgaaaatttccattcttggggtatatgactgtcctgtttcccccaggccactttttttttttttttcttttgagacagggtcttgctcttgcccaggcaggagtacagtagtgcaatcacagctgactgcagccttgacctccagggctcaaggatcctcctgcctcagtctcccaactaagtgggactacaggcacgtgccaccatactcagcttttttttgtttgttttagacaagagtctcgctttgttgcccaggctggtcttgaattcctgggctcaagcaattcttccacctcagcctcccaaagtgctgagattactggcttgagccactgcacccacccctccagactactttaaatgtctctgctctgactgaattgaaggaattgtaagtttcagttgctgaatatatcagtatatctgaactccagatctttttatttcctatttttggcttcctacataaattaataaagtctgtctatatttaaggtttctgggagtagttttgtctatatttaatccatagatgtgctcctagtcatcagtcttatttcagtaaaaccatctttctggccaaatctctaacacgttttttacttcagtagtgagggcaatgagaagctttattaagaaagatcctatttaaagggctaatttggtattgaaagcatgctgatataaagtccagtatttgaggatataaagaggatgtgcactgagctgtgctgatgttcagcatttattatactttaatgggatagtgcttcttgaccattatagaacaacaaactgtcaaagggttaatacagatgacccagacctgacattaaatcctcttgattagaaataattaaatgaattatttattcatttctctcctctgccaaatctacttagccccacaaaaatgccccagctcagttaacatttttttgtttttcactttaggtatctcttaggcaaatagagatataaattgtaataggaaacagtctctaaatgtgaggctgaatacagcttcagtctggctctctaataggacaaaagccagtccatgtgttgtctctaactgatttagctttttcttttctttgaacaattcggcatgaattgaaaccaggttttcctgtggaaagttatagcttgattgggagatagaagttgaattgagttctttcttgcaactcttagtgtttatttttatatctcagtaagacgaggataccttcagtttgaatctgcataatgttcactgccaaactccttctcatttaatgcttatggccttcacatttctgtataataaagatcaattatcagctctctgg

SEQ ID NO: 138333 - DNA, 973 bp, Homo sapiens
  Payload ID: 7094
  Gene Symbol: GOLPH3L
  Gene Name: golgi phosphoprotein 3-like
  ENST ID: ENST00000427665
  CDS Start-End: 166-973
ttctctgcatcgaaggatcaggaagtttgtgctctctgcgtggctaagtttttcacctactaggacgggggtggggtggggagaacaggtgtccttctaaaatacagcacaagctacagcctgcgtccagccataacccaggagtaacatcagaaacaggtgagaatgaccactttaactcaccgggcccgtcgcactgaaataagcaagaactctgaaaagaagatggaaagtgaggaagacagtaattgggagaaaagtccagacaatgaagattctggagactctaaggatatccgccttactcttatggaagaagtattgcttctgggactaaaagataaagaggcaaatatcaacagttggattacgcggtggctcacgcctgtaatcccagcactttggggagccgaggggtacacatctttctggaatgactgcatatcatcaggcctgcgagggggcatcctgatagagctggccatgcggggtcgaatctatctggaacccccgaccatgcgtaagaagcgactactagacagaaaggtactgctaaagtcagacagcccaacaggtgatgttttactggatgaaactctgaaacacatcaaagcaactgaacccacagaaactgtccaaacatggatagagctactcactggtgagacctggaaccccttcaaattacagtaccagctgagaaatgtacgagagcgcatcgcaaagaacctagtagagaaaggtattctaaccactgagaagcagaatttcctgctatttgacatgactactcatccagtgaccaatacaacagagaaacagcgactagtgaaaaaacttcaagatagtgtactagagcggtgggtaaatgaccctcagcgtatggacaagcgaacactagcactcctggtgctagcccactcctctgatgtgctagagaatgtcttctcctctctgacagatgacaagtatg

SEQ ID NO: 138334 - DNA, 3722 bp, Homo sapiens
  Payload ID: 7095
  Gene Symbol: GORASP1
  Gene Name: golgi reassembly stacking protein 1, 65kDa
  Uniprot ID: Q9BQQ3
  ENST ID: ENST00000319283
  CDS Start-End: 823-2145
agatgggagggaggctgttgcaggctctcaggggggagagatggtgctggttctgggctagaagataaaaagataaaaagaaaacccaggagacatcaaggagctggcatttcttgtagacaggattagaagatgagtatagggaagaggtatgagttaaggctaggagattaaatggtgaagccatcaactggggtgggaggcgcaggcgagagtgagctgggtggaagaagggatgatgacaagaagggataatgatagtgattggatgagctggtttggggtagctcaagaaacggggatgctaatttggggctcagggtgcgcagaagccaccggagaagacgcccttgccagggggagtggggcaagaaaaggcaggaccgcctgatataactgaggacagcgaagggtggcaggagagtagcagggcagacggtctctgggtcaggggcggggagtcacgagggagccctcggacagcgcccgggccacgcaccataagggaggagtcattgctgctcatctcgggccgctcgcggctccgagtccgggtctggtggggcggtgcagagcgggattcccgaggcagggtcgtgggcactctatcgcggcgggcggttgaaggcgttacagtccttggaaaccgagctgctagccggttgctaggagcgtccagtgtctggagtgggaggaacaaaacgcctcacgtcacaaggcgcaggaatcgagcgccgagagagcgagtcggtgctactggcgtcgggtcggtccgggtaggcgcagcgggactggacctgggtgccgagcggagccgctgccatgggcctgggcgtcagcgctgagcagcccgcaggcggcgccgagggcttccacctccacggggtgcaggagaactccccagcccagcaggcgggcctggagccctactttgacttcatcatcaccattgggcactcgaggctgaacaaggagaatgacaccctgaaggcactactgaaagccaatgtggagaagcccgtgaagctggaggtgttcaatatgaagaccatgagggtgcgcgaggtggaggtggtgcccagcaacatgtggggcggccagggcctactgggtgccagtgtgcgcttctgcagcttccgcagggccagtgagcaggtgtggcatgtgctggatgtggaaccatcttcacctgctgcccttgccggcctgcgcccctacacagactatgtggttggttcggaccagattctccaggagtccgaggacttctttacgctcatcgagtctcatgaggggaagcccttgaagctgatggtgtataactccaagtcagactcctgccgggaggtgactgtaactcccaacgcagcctggggtggagagggcagtctgggatgtggcattggctatgggtatctacaccggatcccaactcagccccccagctaccacaagaagccacctggcaccccaccaccttctgctctaccacttggtgccccaccacctgatgctctaccacctggacccacccccgaggactctccttccctggagacaggttccaggcagagtgactacatggaggccctgctgcaggcacctggctcctccatggaggatccccttcctgggcctgggagtcccagccacagtgctccagaccctgatggacttccccatttcatggagactcctcttcagcccccacctccagtgcagcgagttatggacccaggcttcctggacgtgtcgggaatttctctcttggacaacagcaatgccagtgtgtggcccagcctgccctcttccacagaactgaccaccacagctgtctcaacctcagggccagaggacatctgctccagcagcagttctcatgagcggggtggtgaggctacatggtctgggtcagagtttgaggtctccttcctggacagcccaggtgcccaagcccaggcggaccacctgcctcagctgactcttcctgacagtctcacctctgcagcctcaccagaagatgggctgtccgccgagctgcttgaagctcaggctgaggaggaaccagcaagcacagagggcctagatactgggacggaggctgaggggctggacagccaggcccagatctctaccacagaataacaccctgggctgtgacaaggcccatgatgacatttcatgaggcccagatgtgggcaggcagcccgggctgcactatgcggtcaggattccttgctgctttggtgggacatgaggcctcagtgggtggtgagagggggccatgggccttgtgggaggatatcttttggccgtgtaccctcaggtccagtgcttggtcctgctctggtcactggggcttcccaggaggcagcagggtctggtcataatccagtgtgaagatgaggtgaggaaggaaggggttgctgtccagtgttggcctggtcgctttgattcttcctgcacagctcagcccaccccatctgtactggaagggaccctggagccctgggaccaccccctttcaagtcccaaacactgagtcctctgtcatgtgtccttgtccctaggctacaatgctacacttggctcaggctgatcaccatgctagtcacaggagggagagagaggcagtgtacttgcccccatctcctggagggaggtgcgttggaaattctaggcccttcagcagagacccatttgtgcccagaccacaatatttcttcttcctcagggactacatgccacagacctgtatccccagtggcaactcctgttagctcccaaacttaaacagtgatctcttctaaatatacaaggcatctacccagccccaatagtgaataaaagtcacaaatttaagttcaacaccctaagcaatttctcaaagccagtctacctgactaggtctatccacgcacggttcccaaccccaagggggaattaggggattagattaagagtaggtaaagacccttttgttctttcctgttgtaggggaggaagctgttctccccaccccaggtgcctttggaggttaaggctaggttaggccctgcactccacctggggacggcccctcatcacctgaagtcctctgctgtgttgactggaccctcagttcccacactgctaattactatgaaagctgctctggcctcgtcttctagcttgtgcctagttgaaagtctcacctttacaggatcatttgtaatgctggtgtacatgcagggaactcacaagctgtgtcaggtatgcaggacaaggaatgtctgctctggggggcacaggccaactatatggagggagggtcccaaattagcaaacccttcatttaaagcaaacccttgtcaagcctaccagagcagctgatacgtgtgcataacagtgaggcattgtgtcctggatcgtctgggagcccagtgtcaagtctgctggaatgcaggaagtagaacagaatcgccacaggactgttctggggccagcttcccttaactctgtagcctggcagtctgacccaaagttgccctcacccaaaggttctggctcttccctccctcacttttactttcccttcccccataagttggaggataaaatgggtatcaatgctaatatttccagggagaacatgaaaccagaggtttctttctttctctgtaatctgctatgaaagaaaataacaaatgaaaataaatgtgtactacactttgaaatatttt

SEQ ID NO: 138335 - DNA, 2873 bp, Homo sapiens
  Payload ID: 7095
  Gene Symbol: GORASP1
  Gene Name: golgi reassembly stacking protein 1, 65kDa
  ENST ID: ENST00000453680
  CDS Start-End: 29-979
gacctgggtgccgagcggagccgctgccatgggcctgggcgtcagcgctgagcagcccgcaggcggcgccgagggcttccacctccacggggtgcaggagaactccccagcccagcaggcgggcctggagccctactttgacttcatcatcaccattgggcactcgaggctgaacaaggagaatgacaccctgaaggcactactgaaagccaatgtggagaagcccgtgaagctggaggtgttcaatatgaagaccatgagggtgcgcgaggtggaggtggtgcccagcaacatgtggggcggccagggcctactgggtgccagtgtgcgcttctgcagcttccgcagggccagtgagcaggtgtggcatgtgctggatgtggaaccatcttcacctgctgcccttgccggcctgcgcccctacacagactatgtggttggttcggaccagattctccaggagtccgaggacttctttacgctcatcgagtctcatgaggggaagcccttgaagctgatggtgtataactccaagtcagactcctgccgggaggtgactgtaactcccaacgcagcctggggtggagagggcagccccccagctaccacaagaagccacctggcaccccaccaccttctgctctaccacttggtgccccaccacctgatgctctaccacctggacccacccccgaggactctccttccctggagacaggttccaggcagagtgactacatggaggccctgctgcaggcacctggctcctccatggaggatccccttcctgggcctgggagtcccagccacagtgctccagaccctgatggacttccccatttcatggagactcctcttcagcccccacctccagtgcagcgagttatggacccaggcttcctggacgtgtcgggaatttctctcttggacaacagcaatgccagtgtgtggcccagcctgccctcttccacagaactgaccaccacagctgtctcaacctcagggccagaggacatctgctccagcagcagttctcatgagcggggtggtgaggctacatggtctgggtcagagtttgaggtctccttcctggacagcccaggtgcccaagcccaggcggaccacctgcctcagctgactcttcctgacagtctcacctctgcagcctcaccagaagatgggctgtccgccgagctgcttgaagctcaggctgaggaggaaccagcaagcacagagggcctagatactgggacggaggctgaggggctggacagccaggcccagatctctaccacagaataacaccctgggctgtgacaaggcccatgatgacatttcatgaggcccagatgtgggcaggcagcccgggctgcactatgcggtcaggattccttgctgctttggtgggacatgaggcctcagtgggtggtgagagggggccatgggccttgtgggaggatatcttttggccgtgtaccctcaggtccagtgcttggtcctgctctggtcactggggcttcccaggaggcagcagggtctggtcataatccagtgtgaagatgaggtgaggaaggaaggggttgctgtccagtgttggcctggtcgctttgattcttcctgcacagctcagcccaccccatctgtactggaagggaccctggagccctgggaccaccccctttcaagtcccaaacactgagtcctctgtcatgtgtccttgtccctaggctacaatgctacacttggctcaggctgatcaccatgctagtcacaggagggagagagaggcagtgtacttgcccccatctcctggagggaggtgcgttggaaattctaggcccttcagcagagacccatttgtgcccagaccacaatatttcttcttcctcagggactacatgccacagacctgtatccccagtggcaactcctgttagctcccaaacttaaacagtgatctcttctaaatatacaaggcatctacccagccccaatagtgaataaaagtcacaaatttaagttcaacaccctaagcaatttctcaaagccagtctacctgactaggtctatccacgcacggttcccaaccccaagggggaattaggggattagattaagagtaggtaaagacccttttgttctttcctgttgtaggggaggaagctgttctccccaccccaggtgcctttggaggttaaggctaggttaggccctgcactccacctggggacggcccctcatcacctgaagtcctctgctgtgttgactggaccctcagttcccacactgctaattactatgaaagctgctctggcctcgtcttctagcttgtgcctagttgaaagtctcacctttacaggatcatttgtaatgctggtgtacatgcagggaactcacaagctgtgtcaggtatgcaggacaaggaatgtctgctctggggggcacaggccaactatatggagggagggtcccaaattagcaaacccttcatttaaagcaaacccttgtcaagcctaccagagcagctgatacgtgtgcataacagtgaggcattgtgtcctggatcgtctgggagcccagtgtcaagtctgctggaatgcaggaagtagaacagaatcgccacaggactgttctggggccagcttcccttaactctgtagcctggcagtctgacccaaagttgccctcacccaaaggttctggctcttccctccctcacttttactttcccttcccccataagttggaggataaaatgggtatcaatgctaatatttccagggagaacatgaaaccagaggtttctttctttctctgtaatctgctatgaaagaaaataacaaatgaaaataaatgtgtactacactttgaaa

SEQ ID NO: 138336 - DNA, 587 bp, Homo sapiens
  Payload ID: 7095
  Gene Symbol: GORASP1
  Gene Name: golgi reassembly stacking protein 1, 65kDa
  ENST ID: ENST00000437458
  CDS Start-End: 7-587
tgaagaatgcaccactaccagtcgggacgcactcgtgcacttagcacacatttacgctcgcctgccgcgggccgctctccgtgctgggcctgggaagagagtcagccacgccgaggacagtcccgggggccggggttaaccgagtggacgcagctgcgggggagcccgtcggcgcgcgtcctgccagtcgtgcaggagaactccccagcccagcaggcgggcctggagccctactttgacttcatcatcaccattgggcactcgaggctgaacaaggagaatgacaccctgaaggcactactgaaagccaatgtggagaagcccgtgaagctggaggtgttcaatatgaagaccatgagggtgcgcgaggtggaggtggtgcccagcaacatgtggggcggccagggcctactgggtgccagtgtgcgcttctgcagcttccgcagggccagtgagcaggtgtggcatgtgctggatgtggaaccatcttcacctgctgcccttgccggcctgcgcccctacacagactatgtggttggttcggaccagattctccaggagtccgaggacttctttacgctcatcga

SEQ ID NO: 138337 - DNA, 814 bp, Homo sapiens
  Payload ID: 7095
  Gene Symbol: GORASP1
  Gene Name: golgi reassembly stacking protein 1, 65kDa
  ENST ID: ENST00000419156
  CDS Start-End: 1-426
tactttgacttcatcatcaccattgggcactcgaggctgaacaaggagaatgacaccctgaaggcactactgaaagccaatgtggagaagcccgtgaagctggaggtgttcaatatgaagaccatgagggtgcgcgaggtggaggtggtgcccagcaacatgtggggcggccagggcctactgggtgccagtgtgcgcttctgcagcttccgcagggccagtgagcaggtgtggcatgtgctggagtctttagccacatgcctgcagcagaagcagcaatgtagtgggtgctcctgtagccaaggatgtggaaccatcttcacctgctgcccttgccggcctgcgcccctacacagactatgtggttggttcggaccagattctccaggagtccgaggacttctttacgctcatcgagtctcatgaggggaagcccttgaagctgatggtgtataactccaagtcagactcctgccgggaggtgactgtaactcccaacgcagcctggggtggagagggcagtctgggatgtggcattggctatgggtatctacaccggatcccaactcagccccccagctaccacaagaagccacctggcaccccaccaccttctgctctaccacttggtgccccaccacctgatgctctaccacctggacccacccccgaggactctccttccctggagacaggttccaggcagagtgactacatggaggccctgctgcaggcacctggctcctccatggaggatccccttcctgggcctgggagtcccagccacagtgctccagaccctgatggacttccc

SEQ ID NO: 138338 - DNA, 2523 bp, Homo sapiens
  Payload ID: 7095
  Gene Symbol: GORASP1
  Gene Name: golgi reassembly stacking protein 1, 65kDa
  ENST ID: ENST00000422110
  CDS Start-End: 98-955
aatcgagcgccgagagagcgagtcggtgctactggcgtcgggtcggtccgggtaggcgcagcgggactggacctgggtgccgagcggagccgctgccatgggcctgggcgtcagcgctgagcagcccgcaggcggcgccgagggcttccacctccacggggatgtggaaccatcttcacctgctgcccttgccggcctgcgcccctacacagactatgtggttggttcggaccagattctccaggagccccccagctaccacaagaagccacctggcaccccaccaccttctgctctaccacttggtgccccaccacctgatgctctaccacctggacccacccccgaggactctccttccctggagacaggttccaggcagagtgactacatggaggccctgctgcaggcacctggctcctccatggaggatccccttcctgggcctgggagtcccagccacagtgctccagaccctgatggacttccccatttcatggagactcctcttcagcccccacctccagtgcagcgagttatggacccaggcttcctggacgtgtcgggaatttctctcttggacaacagcaatgccagtgtgtggcccagcctgccctcttccacagaactgaccaccacagctgtctcaacctcagggccagaggacatctgctccagcagcagttctcatgagcggggtggtgaggctacatggtctgggtcagagtttgaggtctccttcctggacagcccaggtgcccaagcccaggcggaccacctgcctcagctgactcttcctgacagtctcacctctgcagcctcaccagaagatgggctgtccgccgagctgcttgaagctcaggctgaggaggaaccagcaagcacagagggcctagatactgggacggaggctgaggggctggacagccaggcccagatctctaccacagaataacaccctgggctgtgacaaggcccatgatgacatttcatgaggcccagatgtgggcaggcagcccgggctgcactatgcggtcaggattccttgctgctttggtgggacatgaggcctcagtgggtggtgagagggggccatgggccttgtgggaggatatcttttggccgtgtaccctcaggtccagtgcttggtcctgctctggtcactggggcttcccaggaggcagcagggtctggtcataatccagtgtgaagatgaggtgaggaaggaaggggttgctgtccagtgttggcctggtcgctttgattcttcctgcacagctcagcccaccccatctgtactggaagggaccctggagccctgggaccaccccctttcaagtcccaaacactgagtcctctgtcatgtgtccttgtccctaggctacaatgctacacttggctcaggctgatcaccatgctagtcacaggagggagagagaggcagtgtacttgcccccatctcctggagggaggtgcgttggaaattctaggcccttcagcagagacccatttgtgcccagaccacaatatttcttcttcctcagggactacatgccacagacctgtatccccagtggcaactcctgttagctcccaaacttaaacagtgatctcttctaaatatacaaggcatctacccagccccaatagtgaataaaagtcacaaatttaagttcaacaccctaagcaatttctcaaagccagtctacctgactaggtctatccacgcacggttcccaaccccaagggggaattaggggattagattaagagtaggtaaagacccttttgttctttcctgttgtaggggaggaagctgttctccccaccccaggtgcctttggaggttaaggctaggttaggccctgcactccacctggggacggcccctcatcacctgaagtcctctgctgtgttgactggaccctcagttcccacactgctaattactatgaaagctgctctggcctcgtcttctagcttgtgcctagttgaaagtctcacctttacaggatcatttgtaatgctggtgtacatgcagggaactcacaagctgtgtcaggtatgcaggacaaggaatgtctgctctggggggcacaggccaactatatggagggagggtcccaaattagcaaacccttcatttaaagcaaacccttgtcaagcctaccagagcagctgatacgtgtgcataacagtgaggcattgtgtcctggatcgtctgggagcccagtgtcaagtctgctggaatgcaggaagtagaacagaatcgccacaggactgttctggggccagcttcccttaactctgtagcctggcagtctgacccaaagttgccctcacccaaaggttctggctcttccctccctcacttttactttcccttcccccataagttggaggataaaatgggtatcaatgctaatatttccagggagaacatgaaaccagaggtttctttctttctctgtaatctgctatgaaagaaaataacaaatgaaaataaatgtgtactacactttg

SEQ ID NO: 138339 - DNA, 2933 bp, Homo sapiens
  Payload ID: 7095
  Gene Symbol: GORASP1
  Gene Name: golgi reassembly stacking protein 1, 65kDa
  Uniprot ID: Q9BQQ3
  ENST ID: ENST00000452389
  CDS Start-End: 81-728
gcgagtcggtgctactggcgtcgggtcggtccgggtaggcgcagcgggactggacctgggtgccgagcggagccgctgccatgggcctgggcgtcagcgctgagcagcccgcaggcggcgccgagggcttccacctccacggggtgcaggagaactccccagcccagcaggcgggcctggagccctactttgacttcatcatcaccattgggcactcgaggctgaacaaggagaatgacaccctgaaggcactactgaaagccaatgtggagaagcccgtgaagctggaggtgttcaatatgaagaccatgagggtgcgcgaggtggaggtggtgcccagcaacatgtggggcggccagggcctactgggtgccagtgtgcgcttctgcagcttccgcagggccagtgagcaggtgtggcatgtgctggatgtggaaccatcttcacctgctgcccttgccggcctgcgcccctacacagactatgtggttggttcggaccagattctccaggagtccgaggacttctttacgctcatcgagtctcatgaggggaagcccttgaagctgatggtgtataactccaagtcagactcctgccgggagtctgggatgtggcattggctatgggtatctacaccggatcccaactcagccccccagctaccacaagaagccacctggcaccccaccaccttctgctctaccacttggtgccccaccacctgatgctctaccacctggacccacccccgaggactctccttccctggagacaggttccaggcagagtgactacatggaggccctgctgcaggcacctggctcctccatggaggatccccttcctgggcctgggagtcccagccacagtgctccagaccctgatggacttccccatttcatggagactcctcttcagcccccacctccagtgcagcgagttatggacccaggcttcctggacgtgtcgggaatttctctcttggacaacagcaatgccagtgtgtggcccagcctgccctcttccacagaactgaccaccacagctgtctcaacctcagggccagaggacatctgctccagcagcagttctcatgagcggggtggtgaggctacatggtctgggtcagagtttgaggtctccttcctggacagcccaggtgcccaagcccaggcggaccacctgcctcagctgactcttcctgacagtctcacctctgcagcctcaccagaagatgggctgtccgccgagctgcttgaagctcaggctgaggaggaaccagcaagcacagagggcctagatactgggacggaggctgaggggctggacagccaggcccagatctctaccacagaataacaccctgggctgtgacaaggcccatgatgacatttcatgaggcccagatgtgggcaggcagcccgggctgcactatgcggtcaggattccttgctgctttggtgggacatgaggcctcagtgggtggtgagagggggccatgggccttgtgggaggatatcttttggccgtgtaccctcaggtccagtgcttggtcctgctctggtcactggggcttcccaggaggcagcagggtctggtcataatccagtgtgaagatgaggtgaggaaggaaggggttgctgtccagtgttggcctggtcgctttgattcttcctgcacagctcagcccaccccatctgtactggaagggaccctggagccctgggaccaccccctttcaagtcccaaacactgagtcctctgtcatgtgtccttgtccctaggctacaatgctacacttggctcaggctgatcaccatgctagtcacaggagggagagagaggcagtgtacttgcccccatctcctggagggaggtgcgttggaaattctaggcccttcagcagagacccatttgtgcccagaccacaatatttcttcttcctcagggactacatgccacagacctgtatccccagtggcaactcctgttagctcccaaacttaaacagtgatctcttctaaatatacaaggcatctacccagccccaatagtgaataaaagtcacaaatttaagttcaacaccctaagcaatttctcaaagccagtctacctgactaggtctatccacgcacggttcccaaccccaagggggaattaggggattagattaagagtaggtaaagacccttttgttctttcctgttgtaggggaggaagctgttctccccaccccaggtgcctttggaggttaaggctaggttaggccctgcactccacctggggacggcccctcatcacctgaagtcctctgctgtgttgactggaccctcagttcccacactgctaattactatgaaagctgctctggcctcgtcttctagcttgtgcctagttgaaagtctcacctttacaggatcatttgtaatgctggtgtacatgcagggaactcacaagctgtgtcaggtatgcaggacaaggaatgtctgctctggggggcacaggccaactatatggagggagggtcccaaattagcaaacccttcatttaaagcaaacccttgtcaagcctaccagagcagctgatacgtgtgcataacagtgaggcattgtgtcctggatcgtctgggagcccagtgtcaagtctgctggaatgcaggaagtagaacagaatcgccacaggactgttctggggccagcttcccttaactctgtagcctggcagtctgacccaaagttgccctcacccaaaggttctggctcttccctccctcacttttactttcccttcccccataagttggaggataaaatgggtatcaatgctaatatttccagggagaacatgaaaccagaggtttctttctttctctgtaatctgctatgaaagaaaataacaaatgaaaataaatgtgtactacactttgaaa

SEQ ID NO: 138340 - DNA, 2346 bp, Homo sapiens
  Payload ID: 7095
  Gene Symbol: GORASP1
  Gene Name: golgi reassembly stacking protein 1, 65kDa
  Uniprot ID: Q9BQQ3
  ENST ID: ENST00000431601
  CDS Start-End: 506-1246
cggtgggagcctcctgggagaggcggcctcgcgggactcccggaccctggctagtccgcggccgcggtcgggcccagcgcccgccccaagtgccagcagtgccggaagcggagcgttttcctggtccggccgccgggaatggcgctcctcccgggtgaagaatgcaccactaccagtcgggacgcactcgtgcacttagcacacatttacgctcgcctgccgcgggccgctctccgtgctgggcctgggaagagagtcagccacgccgaggacagtcccgggggccggggttaaccgagtggacgcagctgcgggggagcccgtcggcgcgcgtcctgccagtcgtagggtgcaggagaactccccagcccagcaggcgggcctggagccctactttgacttcatcatcaccattgggcactcgaggctgaacaaggagaatgacaccctgaaggcactactgaaagccaatgtggagaagcccgtgaagctggaggtgttcaatatgaagaccatgagggtgcgcgaggtggaggtggtgcccagcaacatgtggggcggccagggcctactgggtgccagtgtgcgcttctgcagcttccgcagggccagtgagcaggtgtggcatgtgctggatgtggaaccatcttcacctgctgcccttgccggcctgcgcccctacacagactatgtggttggttcggaccagattctccaggagtccgaggacttctttacgctcatcgagtctcatgaggggaagcccttgaagctgatggtgtataactccaagtcagactcctgccgggaggtgactgtaactcccaacgcagcctggggtggagagggcagtctgggatgtggcattggctatgggtatctacaccggatcccaactcagccccccagctaccacaagaagccacctggcaccccaccaccttctgctctaccacttggtgccccaccacctgatgctctaccacctggacccacccccgaggactctccttccctggagacaggttccaggcagagtgactacatggaggccctgctgcaggcacctggctcctccatggaggatccccttcctgggcctgggagtcccagccacagtgctccagaccctgatggacttccccatttcatggagactcctcttcagcccccacctccagtgcagcgagttatggacccagcaatgccagtgtgtggcccagcctgccctcttccacagaactgaccaccacagctgtctcaacctcagggccagaggacatctgctccagcagcagttctcatgagcggggtggtgaggctacatggtctgggtcagagtttgaggtctccttcctggacagcccaggtgcccaagcccaggcggaccacctgcctcagctgactcttcctgacagtctcacctctgcagcctcaccagaagatgggctgtccgccgagctgcttgaagctcaggctgaggaggaaccagcaagcacagagggcctagatactgggacggaggctgaggggctggacagccaggcccagatctctaccacagaataacaccctgggctgtgacaaggcccatgatgacatttcatgaggcccagatgtgggcaggcagcccgggctgcactatgcggtcaggattccttgctgctttggtgggacatgaggcctcagtgggtggtgagagggggccatgggccttgtgggaggatatcttttggccgtgtaccctcaggtccagtgcttggtcctgctctggtcactggggcttcccaggaggcagcagggtctggtcataatccagtgtgaagatgaggtgaggaaggaaggggttgctgtccagtgttggcctggtcgctttgattcttcctgcacagctcagcccaccccatctgtactggaagggaccctggagccctgggaccaccccctttcaagtcccaaacactgagtcctctgtcatgtgtccttgtccctaggctacaatgctacacttggctcaggctgatcaccatgctagtcacaggagggagagagaggcagtgtacttgcccccatctcctggagggaggtgcgttggaaattctaggcccttcagcagagacccatttgtgcccagaccacaatatttcttcttcctcagggactacatgccacagacctgtatccccagtggcaactcctgttagctcccaaacttaaacagtgatctcttctaaatatacaaggcatctacccagccccaatagtgaataaaagtcacaaatttaagttcaacaccctaagcaatttctcaaagccagtctacctgactaggtctatccacgcacg

SEQ ID NO: 138341 - DNA, 537 bp, Homo sapiens
  Payload ID: 7095
  Gene Symbol: GORASP1
  Gene Name: golgi reassembly stacking protein 1, 65kDa
  ENST ID: ENST00000416741
  CDS Start-End: 329-537
tagcacacatttacgctcgcctgccgcgggccgctctccgtgctgggcctgggaagagagtcagccacgccgaggacagtcccgggggccggggttaaccgagtggacgcagctgcgggggagcccgtcggcgcgcgtcctgccagtcgtagggtcgtaagggcttccgagggtgcaggagaactccccagcccagcaggcgggcctggagccctactttgacttcatcatcaccattgggcactcgaggctgaacaaggagaatgacaccctgaaggcactactgaaagccaatgtggagaagcccgtgaagctggaggtgttcaatatgaagaccatgagggtgcgcgaggtggaggtggtgcccagcaacatgtggggcggccagggcctactgggtgccagtgtgcgcttctgcagcttccgcagggccagtgagcaggtgtggcatgtgctggatgtggaaccatcttcacctgctgcccttgccggcctgcgcccctacacagactatgtggttggttcggaccagattct

SEQ ID NO: 138342 - DNA, 588 bp, Homo sapiens
  Payload ID: 7095
  Gene Symbol: GORASP1
  Gene Name: golgi reassembly stacking protein 1, 65kDa
  ENST ID: ENST00000441081
  CDS Start-End: 323-588
ataagggaggagtcattgctgctcatctcgggccgctcgcggctccgagtccgggtctggtggggcggtgcagagcgggattcccgaggcagggtcgtgggcactctatcgcggcgggcggttgaaggcgttacagtccttggaaaccgagctgctagccggttgctaggagcgtccagtgtctggagtgggaggaacaaaacgcctcacgtcacaaggcgcaggaatcgagcgccgagagagcgagtcggtgctactggcgtcgggtcggtccgggtaggcgcagcgggactggacctgggtgccgagcggagccgctgccatgggcctgggcgtcagcgctgagcagcccgcaggcggcgccgagggcttccacctccacggggagaactccccagcccagcaggcgggcctggagccctactttgacttcatcatcaccattgggcactcgaggctgaacaaggagaatgacaccctgaaggcactactgaaagccaatgtggagaagcccgtgaagctggaggtgttcaatatgaagaccatgagggtgcgcgaggtggaggtggtgcccagcaacatgtgggg

SEQ ID NO: 138343 - DNA, 1345 bp, Homo sapiens
  Payload ID: 7095
  Gene Symbol: GORASP1
  Gene Name: golgi reassembly stacking protein 1, 65kDa
  ENST ID: ENST00000479927
  CDS Start-End: 100-1137
ggaatcgagcgccgagagagcgagtcggtgctactggcgtcgggtcggtccgggtaggcgcagcgggactggacctgggtgccgagcggagccgctgccatgggcctgggcgtcagcgctgagcagcccgcaggcggcgccgagggcttccacctccacggggatgtggaaccatcttcacctgctgcccttgccggcctgcgcccctacacagactatgtggttggttcggaccagattctccaggagtccgaggacttctttacgctcatcgagtctcatgaggggaagcccttgaagctgatggtgtataactccaagtcagactcctgccgggaggtgactgtaactcccaacgcagcctggggtggagagggcagtctgggatgtggcattggctatgggtatctacaccggatcccaactcagccccccagctaccacaagaagccacctggcaccccaccaccttctgctctaccacttggtgccccaccacctgatgctctaccacctggacccacccccgaggactctccttccctggagacaggttccaggcagagtgactacatggaggccctgctgcaggcacctggctcctccatggaggatccccttcctgggcctgggagtcccagccacagtgctccagaccctgatggacttccccatttcatggagactcctcttcagcccccacctccagtgcagcgagttatggacccaggcttcctggacgtgtcgggaatttctctcttggacaacagcaatgccagtgtgtggcccagcctgccctcttccacagaactgaccaccacagctgtctcaacctcagggccagaggacatctgctccagcagcagttctcatgagcggggtggtgaggctacatggtctgggtcagagtttgaggtctccttcctggacagcccaggtgcccaagcccaggcggaccacctgcctcagctgactcttcctgacagtctcacctctgcagcctcaccagaagatgggctgtccgccgagctgcttgaagctcaggctgaggaggaaccagcaagcacagagggcctagatactgggacggaggctgaggggctggacagccaggcccagatctctaccacagaataacaccctgggctgtgacaaggcccatgatgacatttcatgaggcccagatgtgggcaggcagcccgggctgcactatgcggtcaggattccttgctgctttggtgggacatgaggcctcagtgggtggtgagagggggccatgggccttgtgggaggatatcttttggccgtgtaccctcaggtccagtgcttggtcctgctctggtca

SEQ ID NO: 138344 - DNA, 3173 bp, Homo sapiens
  Payload ID: 7096
  Gene Symbol: GORASP2
  Gene Name: golgi reassembly stacking protein 2, 55kDa
  Uniprot ID: Q9H8Y8
  ENST ID: ENST00000234160
  CDS Start-End: 816-2174
aataagcatgaatacgacctggctacctgaaggaggtaggacggggaaccgagcagcagcaggtggtggaatgccagggaaatccaaccgtgcttcccacgctggcatcgctctgattatgaccaatcctctaatcttattctcacaattagggaggaagaaaaaaaaacaaacccaaaccaaaaaagaagttggtaggtgactctgtgagactactgttttataaagggagcgtttccttttataaaatttagctgagcagatgctaggcagcccacaggaggccactattcccctcagctgtacagtttgggaaaatacctacacacccggagaacagagagcttggtgtgtgttgagttcgctcctgttcatcagcagccctttccccgcctctggccaccagggggacctgcaaccaagtatgtgttctttcaggcgagcgggaacgcgtctgcataaatctagtccaatccagggccccgtagcaaggcgccaaagctgggggaagcgcatttctgttctctcgcgagcacgacgcggtgcctcccagtcctcctccggccctccctctccgccctcccggcccgcgagcgctcgggccccttccagtggctcgcggcaggtggcgctgtctgcggcgtcgcagcggcccgggctgcagcagagacgatctcccggcgggctgtgcggcccggctctccggcggcagcgagtgccacgtcccaagtgctacgcggaggattagagcaggcggtgcgctgggggcgggagcagcgcggagcccggctcggccacaccgatcgcccgccgccatgggctcctcgcaaagcgtcgagatcccgggcgggggcaccgagggctaccacgttctgcgggtacaagaaaattccccaggacacagagctggtttggagcctttctttgattttattgtttctattaatggttcaagattaaataaagacaatgacactcttaaggatctgctgaaagcaaacgttgaaaagcctgtaaagatgcttatctatagcagcaaaacattggaactgcgagagacctcagtcacaccaagtaacctgtggggcggccagggcttattgggagtgagcattcgtttctgcagctttgatggggcaaatgaaaatgtttggcatgtgctggaggtggaatcaaattctcctgcagcactggcaggtcttagaccacacagtgattatataattggagcagatacagtcatgaatgagtctgaagatctattcagccttatcgaaacacatgaagcaaaaccattgaaactgtatgtgtacaacacagacactgataactgtcgagaagtgattattacaccaaattctgcatggggtggagaaggcagcctaggatgtggcattggatatggttatttgcatcgaatacctacacgcccatttgaggaaggaaagaaaatttctcttccaggacaaatggctggtacacctattacacctcttaaagatgggtttacagaggtccagctgtcctcagttaatcccccgtctttgtcaccaccaggaactacaggaattgaacagagtctgactggactttctattagctcaactccaccagctgtcagtagtgttctcagtacaggtgtaccaacagtaccgttattgccaccacaagtaaaccagtccctcacttctgtgccaccaatgaatccagctactacattaccaggtctgatgcctttaccagcaggactgcccaacctccccaacctcaacctcaacctcccagcaccacacatcatgccaggggttggcttaccagaacttgtaaacccaggtctgccacctcttccttccatgcctccccgaaacttacctggcattgcacctctccccctgccatccgagttcctcccgtcattccccttggttccagagagctcttctgcagcaagctcaggagagctgctgtcttccctcccgcccaccagcaacgcaccctccgaccctgccacaactactgcaaaggcagacgctgcctcctcactcactgtggatgtgacgccccccactgccaaggcccccaccaccgttgaggacagagtcggcgactccaccccagtcagcgagaagcctgtttctgcggctgtggatgccaatgcttctgagtcaccttaactttgaaccattctttggaattggcgtggtatatttaaccacgggagcgtgtctggaaacgcaaactatcattaatttcatactagtttgtaccgtatctgtaggcatcctgtaaataattccaaggggaaaactaaacgaggacgtgggttgtatcctgccaggttgagtggggctcacacgctagggtgagatgtcagaaagcgcttgtattttaaacaaccaaaaagaattgtaagggtggcttgctgccaggcttgcactgccgttcctgggggtgtgcatcttcgggaaaggtggtggcggggcgtccactaggtttcctgtcccctgctgctccttccgtaagaaaatgaaatattctatgcctaatactcacacgcaacatttcttgtactttgtaagtcgtttgcgagaatgcagaccacctcactaaactgtaaacggtaaagagatttttacttttggtctccgtgagtcgcatctctactaaggtttacacaggaattccacctgaagacttgtgttaaagttctacagcgcgcactgttaactgaacgtctttttcttcagcctatacgcggatccttgttttgagctctcagaatcactcagacaacattttgtaactgctgctgttgctttctacatacaccttataaagtgacatttcaaaagaaataaggtgccacagttttaaaccagaaggtggcactctgtggctccttgtagtattatagctatactgggaaagcatagatacagcaataaagtacagtaattttactttttttcttgtgttacatctaaattacaacccttaattgccacgtgtgcacttactactctccagtatgtcttattactctccagtatgtcacgcatctttaacttttcacgtcctatgtttgctttctcccatttttaagagatggtaagttaactggaattgatttactgaatgaaattaaatgcagatatccctgtttttgaaataag

SEQ ID NO: 138345 - DNA, 624 bp, Homo sapiens
  Payload ID: 7096
  Gene Symbol: GORASP2
  Gene Name: golgi reassembly stacking protein 2, 55kDa
  ENST ID: ENST00000454751
  CDS Start-End: 75-296
ggattagagcaggcggtgcgctgggggcgggagcagcgcggagcccggctcggccacaccgatcgcccgccgccatgggctcctcgcaaagcgtcgagatcccgggcgggggcaccgagggctaccacgttctgcggcttccaaagttaggaagggcgcggaggcaacgtctccaaagtggtgactgtgaaggcagcctttgcgctttcctaggagagggatccggacccgcagtccggaggcggggcctgcggcggcaggtgttaaatcacctcggcgccggccgagtggcctgaaagaccagcagggcaggagacggaaaaccaaatggcctggaagtacaagaaaattccccaggacacagagctggtttggagcctttctttgattttattgtttctattaatggttcaagattaaataaagacaatgacactcttaaggatctgctgaaagcaaacgttgaaaagcctgtaaagatgcttatctatagcagcaaaacattggaactgcgagagacctcagtcacaccaagtaacctgtggggcggccagggcttattgggagtgagcattcgtttctgcagctttgatggggcaaatgaaaatgtttggcatgtgctgg

SEQ ID NO: 138346 - DNA, 1976 bp, Homo sapiens
  Payload ID: 7096
  Gene Symbol: GORASP2
  Gene Name: golgi reassembly stacking protein 2, 55kDa
  ENST ID: ENST00000442798
  CDS Start-End: 21-92
cacaccgatcgcccgccgccatgggctcctcgcaaagcgtcgagatcccgggcgggggcaccgagggctaccacgttctgcggcatcaatgagagaaggctcaagcacattgtcagaaataaggaagcttaagccgggcataatggtgtgcacctgtaatcccagctactccaatcaggagactgaggtacaagaaaattccccaggacacagagctggtttggagcctttctttgattttattgtttctattaatggttcaagattaaataaagacaatgacactcttaaggatctgctgaaagcaaacgttgaaaagcctgtaaagatgcttatctatagcagcaaaacattggaactgcgagagacctcagtcacaccaagtaacctgtggggcggccagggcttattgggagtgagcattcgtttctgcagctttgatggggcaaatgaaaatgtttggcatgtgctggaggtggaatcaaattctcctgcagcactggcaggtcttagaccacacagtgattatataattggagcagatacagtcatgaatgagtctgaagatctattcagccttatcgaaacacatgaagcaaaaccattgaaactgtatgtgtacaacacagacactgataactgtcgagaagtgattattacaccaaattctgcatggggtggagaaggcagcctaggatgtggcattggatatggttatttgcatcgaatacctacacgcccatttgaggaaggaaagaaaatttctcttccaggacaaatggctggtacacctattacacctcttaaagatgggtttacagaggtccagctgtcctcagttaatcccccgtctttgtcaccaccaggaactacaggaattgaacagagtctgactggactttctattagctcaactccaccagctgtcagtagtgttctcagtacaggtgtaccaacagtaccgttattgccaccacaagtaaaccagtccctcacttctgtgccaccaatgaatccagctactacattaccaggtctgatgcctttaccagcaggactgcccaacctccccaacctcaacctcaacctcccagcaccacacatcatgccaggggttggcttaccagaacttgtaaacccaggtctgccacctcttccttccatgcctccccgaaacttacctggcattgcacctctccccctgccatccgagttcctcccgtcattccccttggttccagagagctcttctgcagcaagctcaggagagctgctgtcttccctcccgcccaccagcaacgcaccctccgaccctgccacaactactgcaaaggcagacgctgcctcctcactcactgtggatgtgacgccccccactgccaaggcccccaccaccgttgaggacagagtcggcgactccaccccagtcagcgagaagcctgtttctgcggctgtggatgccaatgcttctgagtcaccttaactttgaaccattctttggaattggcgtggtatatttaaccacgggagcgtgtctggaaacgcaaactatcattaatttcatactagtttgtaccgtatctgtaggcatcctgtaaataattccaaggggaaaactaaacgaggacgtgggttgtatcctgccaggttgagtggggctcacacgctagggtgagatgtcagaaagcgcttgtattttaaacaaccaaaaagaattgtaagggtggcttgctgccaggcttgcactgccgttcctgggggtgtgcatcttcgggaaaggtggtggcggggcgtccactaggtttcctgtcccctgctgctccttccgtaagaaaatgaaatattctatgcctaatactcacacgcaacatttcttgtactttgtaagtcgtttgcgagaatgcagaccacctcactaaactgtaaacggtaaagagatttttacttttggtctccgtgagtcgcatctctactaa

SEQ ID NO: 138347 - DNA, 530 bp, Homo sapiens
  Payload ID: 7096
  Gene Symbol: GORASP2
  Gene Name: golgi reassembly stacking protein 2, 55kDa
  ENST ID: ENST00000455067
  CDS Start-End: 85-201
gctacgcggaggattagagcaggcggtgcgctgggggcgggagcagcgcggagcccggctcggccacaccgatcgcccgccgccatgggctcctcgcaaagcgtcgagatcccgggcgggggcaccgagggctaccacgttctgcgggagagggatccggacccgcagtccggaggcggggcctgcggcggcaggtgttaaatcacctcggcgccggccgagtggcctgaaagaccagcagggcaggagacggaaaaccaaatggcctggaagtacaagaaaattccccaggacacagagctggtttggagcctttctttgattttattgtttctattaatggttcaagattaaataaagacaatgacactcttaaggatctgctgaaagcaaacgttgaaaagcctgtaaagatgcttatctatagcagcaaaacattggaactgcgagagacctcagtcacaccaagtaacctgtggggcggccagggcttattgggagtgagcattcgtttctgcagctttgatggg

SEQ ID NO: 138348 - DNA, 568 bp, Homo sapiens
  Payload ID: 7096
  Gene Symbol: GORASP2
  Gene Name: golgi reassembly stacking protein 2, 55kDa
  ENST ID: ENST00000444801
  CDS Start-End: 145-243
gatctcccggcgggctgtgcggcccggctctccggcggcagcgagtgccacgtcccaagtgctacgcggaggattagagcaggcggtgcgctgggggcgggagcagcgcggagcccggctcggccacaccgatcgcccgccgccatgggctcctcgcaaagcgtcgagatcccgggcgggggcaccgagggctaccacgttctgcgggtacaagaaaattccccaggacacagagctgaataaagacaatgacactcttaaggatctgctgaaagcaaacgttgaaaagcctgtaaagatgcttatctatagcagcaaaacattggaactgcgagagacctcagtcacaccaagtaacctgtggggcggccagggcttattgggagtgagcattcgtttctgcagctttgatggggcaaatgaaaatgtttggcatgtgctggaggtggaatcaaattctcctgcagcactggcaggtcttagaccacacagtgattatataattggagcagatacagtcatgaatgagtctgaagatctattcagccttatcgaaacacatgaagca

SEQ ID NO: 138349 - DNA, 6039 bp, Homo sapiens
  Payload ID: 7097
  Gene Symbol: GOSR1
  Gene Name: golgi SNAP receptor complex member 1
  Uniprot ID: O95249
  ENST ID: ENST00000225724
  CDS Start-End: 73-825
acacgcaccatggtgactttccggcctgcatcgcctctgctcccctatcccggctgacgttggacgacaaagatggcggcagggaccagcagttactgggaagatctcaggaaacaggctcgacagctggaaaatgaacttgacctgaaactagtttccttcagcaaactatgtacaagttacagtcatagcagtacccgagatggaagacgcgacaggtatagttctgatacaacaccccttttaaatggatcaagccaagacagaatgtttgagacaatggcgattgagattgaacaacttttggcaaggcttacaggggtaaatgataaaatggcagaatataccaacagtgcaggtgtcccctccttgaatgcagccctgatgcatacattacagcggcatagagacatattgcaggattatacacatgaattccataaaaccaaagcaaactttatggcaatacgggaaagggagaatcttatgggatcagtacgaaaagatattgagtcatataaaagtgggtctggagtaaacaacagaagaactgagctatttttgaaagaacatgaccaccttcgaaactcagatcgtctgatagaagagacaataagcattgctatggcaacaaaagaaaatatgacttcacagagaggaatgttgaagtcaattcacagcaaaatgaacactttggccaatcgttttcctgctgtaaacagcctgatccagaggatcaacctgaggaagcggcgggactcgctcatcctagggggtgttattgggatctgtaccatcctgttgctgctgtatgcgttccattgatgggacatcttcagggactcttgacagccaccgctttcacaccctggtctggaataaggaaacatcggagggagaagttgactgtcttgataattagcctgaccagcaggatgaatgcaagactgacagtgatggactctgtgacatggtcaggttgagctgaagccacagtttctctgtgctgtgttttctaacacatttttctgtttttaattaaaaaaaaaaaaaaaaggttttcagttgcttttgtctccctaggaggcaggtaaaccaatcaaaaacagagttttctgtgtttccatgatagtgttgaagcctaatgacaagccaggtcttacagctgggctcttcagaaaaccaggtttctacatccaaagactgcttttcttttagctgccagattggattgtgaataaaaataattcttccctctccctctccctctccccacggtctccctctttccacggtctccctctgatgccgagccgaagctggactgtactgctgccatctcggctcactgcaacctccctgcctgattctcctgcctcagcctgccgagtgcctgcaattgcaggcgagcgccgccacgcctgactgcctcggcctcccgaggtgccgggattgcagacggagtctcgttcactcagtgctcaatggtgcccaggctggagtgcagtggcgtgatctcggctcactacaacctccacctcccagccacctgccttggcctcccaaagtgccgagattgcagcctctgcccggccgccaccccgtctggaaagtgaggagcgcctctgcccggccgccatcccatctaggaagtgaggagcgcctcttcccagccgccatcccatctaggaagtgaggagcgtctctgcccggccgcccatcgtctgagatgtggggagcgcctctgccccgccgccccgtctgggatgtgaggagctcctctgcccggccgcgaccccgtctgggaggtgaggagcgtctctgtctggccaccccgtctgagaagtgaggagacctccgcccggcagccgccctgtctgagaagtgaggagcccctccgcccggcagccaccccatctgggaagtgaggagcgtctacgcccgggcagctgccccgtccgggagggaggtgggggggtcagccccccgcccggccagccgccccgtccgggagggaggtgggggggatcagccccccgcccggccagccgccccgtccgggagggaggtggggggcgcctctgcccggccgcccctgcccggccgcccctactgggaagtgaggagcccctctgcctggccaccaccccatctgggaggtgtgcccagcagctcattgagaacgggccatgatgacaatggcggttttgtggaatagaaaaggcggaaaggtggggaaaagattgagaaattggatggttgccgtgtctgtgtagaaagaagtagacatgggagacttttcattttgttctgtactaagaaaaattcttctgccttgggatcctgttgatctatgaccttacccccaacctggtgctctctgaaacatgtgctgtgtccactcagggttaaatggattaagggtggtgcaagatgtgctttgttaaacagatgcttgaaggcagcatgctccttaagagtcatcaccactccctaatctcaagtacccagggacacaaacactgcggaaggcggcagggtcctctgcctaggaaaaccagagacctttgttcacttgttgatctgctgaccttccctccactattgtcctatgaccctgccaaatccccctctgcgagaaacacccaagaatgatcaattaaaaaaaaaataatataataataattcttgtcctcttattttacactcataatgagaaatcacaagttctttcttgatgatctgtgctatagatttctactctgtctcctcaactctgttgatatttggggaaaattctgtttttcatagattctttgagatgctgatggaccagcttcagcatgtttgaggttgtctgaaatggagatcactgtaaaactgtctttttcttttaaattacaagtacactggggttaactgtattgctggaaaaacatcaagaatgacagtcttatatttaaggcaccagtcattgtttccattttttttttaattcttcccttggattaatattttctactgaaaagaaatgaaatctcagttccactatgataaaagaaacgaatcaccagtgtctgtcagtgcccccactgctcctcctcataccagcattgacactggtagctgaggaaggggactgctcaatttctaatgtgatctattcaagaagccacatataaaaaggcattgagggctcactgtccagagaattgcttttgtaaatgctccacaacgtatgggcaaaagtttaaggactactgcctgatgtaccaggaatcctgagttctgtgaaaatctgttcattccaaatctgttaagcatttccaaacatccagagaatggtttcactgttgagggtgcatgtggcagaatctgtctctctctgcacctgtcttctgttaccatccctggacagtgacagattttaagccagccaccagaattcttttcgagttaaccatttcttagtttctgtaaattcatgacttgtcttactgaactacagcctggtttgtagacttccaacatctacactgctgctcttcaccattggaattcactgtggtatttatagtattggcttcagtccgagccacaggcaataaaaggatatcagctgtagttctcagctacatcatggtgtatagatgctgttattcaggcgaacttgctcatgggtggactaacacctggtttggtacagagactgagaagtttttcattctggtgtcaaagttttgttacattatgggtgtgaagggcatttgatatatttttcttaactatggggtttatttttctaaatgtgggttgattgactgttaattgattcagggtacccttaaaagaaaagaagttttcccattgtgaaccttaaatgatcagagaagtaagttcattgattaaattctctgttgggagaacaaaacttttctcccttgacactttattatctttgatttttcaaagggccttgattggtggttgtgtctcggttaaaatttatgggactttgctatgtagttggcatttataaaatctgaagtatcataaataaagttatttatttaattatactaccagtcttttttactggtctgattcttttgtgcattcattaaagctgattgtgtgagagtgaactgggacacaagctagtctagctcactgcagccaagcaaaccctgttgatggctgatgggcctttccattagggttttgcttatgtgaagtaatggaattatgttggttattttctttatgaaaataaaccagttcttccaaggaagttaaaaggcttggtatggatgttggtgtcagataggtctgactaacctctccgtgctgcagcctatactaaggtgacccagggccacatgtagacagctaggccagtgctttttcctcttagggtttctttgcagaaagaaacctccagcaagggaagagaggtgtgtgtccacaggaaggggctccgtggggatcccatgaagggatttgagctctttcagctccatgtcatttaacttttttgtttaaccaccttggctttctctccttttttgctgtcctccttacggaccagttaccagattcagaggctaacagttagttacttgttaatgctagtcacagccaggaggtcagaaggaattttctacttctggatccaaatgttacctcttaggggaagttatgccccctcaactattgtcttattataatgaatctttcctttttggtccttttaagtaaccactcaaaacttttcatttcactgaaaaaatatgaaaaaccatgacaatagggctgggtgcagtggctcacgcctgtaatcttagcactttgggagaccaaggcaggcggatcgtttgaggccaggagtttgagaccagcctgggcaatgtagcaagactctgtctctgcaaaaaaaattaaaagatacctgagagctcactttaatatcaaggtatttgcatccattcccaccctgttagctcttaagggaggagggaaatcaattccaaccatactttcctgtgatggaagatgtttcctcttgaaaaaatgccaatacagatttttaaaacctattgttttccaaatgcactttgtaagtttttgcttttaaaatagcttcttggaaccaattttattgtatttgtacttaatttttgttctcatctaaatgtgcattttctgactgtatagaagaagctttggtatgtaatttaataataaattagaaatctaaatgattgcatttgtaattgtttatattgaaacagtaaccatcaaggtagtttggggatagagattatggtatctctggtgttgataagtgtttctcatgatgtcctgaaacccaggatgaaataatacaggtgctgaaaagctgtcacatgtcattcagaaaccatcatatgaacagtccactagtattttagccctagaagtgaaggggaatctcttaacatgaaacttcaggaggcataatgggaatctacaattgtagaattggctgggtgcagtggctaacacctgtaatcccagcagttcgagaggccgaggcaggaggattgcttgagaccagggatttgagaccagtctgggcaacacagcaaagaccttgtctctacaaaaactaaaattagccattcatgatggtgtgcacctatagtcccagctactcggaaggctgaggtaggaggatcatgagcccaggaggtcaaggctgcagtaagcaacgattgtgccactgtactccagcctgggtgacagagaccctgtctcaaaaataaattaattttttaaaaatcgtgtactgctgggctttagtacattagttgtgcaaccagccccactgtctaattttagagctttgcaattaatccagccagtgatcaattcctcttctataaaatggtgataaggatggctaccataattgtgccctgattatattgtcagggttatgtgaggaaatgctcataagcatctcagcaaagccaggggtacagggctcacctgacataa

SEQ ID NO: 138350 - DNA, 1204 bp, Homo sapiens
  Payload ID: 7097
  Gene Symbol: GOSR1
  Gene Name: golgi SNAP receptor complex member 1
  ENST ID: ENST00000427274
  CDS Start-End: 15-539
gttggacgacaaagatggcggcagggaccagcagttactgggaagatctcaggaaacaggctcgacagctggaaaatgaacttgacctgaaactagtttccttcagcaaactatgtacaagttacagtcatagcagtacccgagatggaagacgcgacagttctgatacaacaccccttttaaatggatcaagccaagacagaatgtttgagacaatggcgattgagattgaacaacttttggcaaggcttacaggggtaaatgataaaatggcagaatataccaacagtgcaggtgtcccctccttgaatgcagccctgatgcatacattacagcggcatagagacatattgcaggattatacacatgaattccataaaaccaaagcaaactttatggcaatacgggaaagggagaatcttatgggatcagtacgaaaagatattgagtcatataaaagtgggtctggagtaaacaacagaagaactgagctatttttgaaagaacatgaccaccttcgaaaaggttttcagtggtgaagataaacttgaataaggagataacttacacaagcagaaaaagcctcatctcttctggattcctttaatgccagtggtcatcaccaggtgtagatcagtcaccttttacccaggctgggaccaccaccttctcatctacagctcagatcgtctgatagaagagacaataagcattgctatggcaacaaaagaaaatatgacttcacagagaggaatgttgaagtcaattcacagcaaaatgaacactttggccagtatcctttttgaatgttcgcagtctgtgttttgagggtagaggggagaagtgtctgtgtgtgcttttatagggggcaggttgccatcatcagtagcagtagagcccatcagtaattgcataatatgaatatactgtgcattcctactttgtgaaagtttatgctctttagtaccattcctaaaagactgcacctcagaagtttcttactactagatgtagaagaaaaaaattataaatgtgaatttaaaaattatccaccaatttcttctacattttagaaagcttttaaattcatgttagaactccacactatacattattcttacctaaacatgataaattatatgcctttgttgtttttcccatttagagataagtcagtggcagatgcttggaagggggaaggaag

SEQ ID NO: 138351 - DNA, 1231 bp, Homo sapiens
  Payload ID: 7097
  Gene Symbol: GOSR1
  Gene Name: golgi SNAP receptor complex member 1
  ENST ID: ENST00000451249
  CDS Start-End: 58-804
actttccggcctgcatcgcctctgctcccctatcccggctgacgttggacgacaaagatggcggcagggaccagcagttactgggaagatctcaggaaacaggctcgacagctggaaaatgaacttgacctgaaactagtttccttcagcaaactatgtacaagttacagtcatagcagtacccgagatggaagacgcgacagttctgatacaacaccccttttaaatggatcaagccaagacagaatgtttgagacaatggcgattgagattgaacaacttttggcaaggcttacaggggtaaatgataaaatggcagaatataccaacagtgcaggtgtcccctccttgaatgcagccctgatgcatacattacagcggcatagagacatattgcaggattatacacatgaattccataaaaccaaagcaaactttatggcaatacgggaaagggagaatcttatgggatcagtacgaaaagatattgagtcatataaaagtgggtctggagtaaacaacagaagaactgagctatttttgaaagaacatgaccaccttcgaaactcagatcgtctgatagaagagacaataagcattgctatggcaacaaaagaaaatatgacttcacagagaggaatgttgaagtcaattcacagcaaaatgaacactttggccaatcgttttcctgctgtaaacagcctgatccagaggatcaacctgaggaagcggcgggactcgctcatcctagggggtgttattgggatctgtaccatcctgttgctgctgtatgcgttccattgatgggacatcttcagggactcttgacagccaccgctttcacaccctggtctggaataaggaaacatcggagggagaagttgactgtcttgataattagcctgaccagcaggatgaatgcaagactgacagtgatggactctgtgacatggtcaggttgagctgaagccacagtttctctgtgctgtgttttctaacacatttttctgtttttaattaaaaaaaaaaaaaaaaggttttcagttgcttttgtctccctaggaggcaggtaaaccaatcaaaaacagagttttctgtgtttccatgatagtgttgaagcctaatgacaagccaggtcttacagctgggctcttcagaaaaccaggtttctacatccaaagactgcttttcttttagctgccagattggattgtgaataaaaataattctt

SEQ ID NO: 138352 - DNA, 947 bp, Homo sapiens
  Payload ID: 7097
  Gene Symbol: GOSR1
  Gene Name: golgi SNAP receptor complex member 1
  ENST ID: ENST00000414833
  CDS Start-End: 1-767
agggaccagcagttactgggaaggtgagggcgagaaggcctccggatctcaggaaacaggctcgacagctggaaaatgaacttgacctgaaactagtttccttcagcaaactatgtacaagttacagtcatagcagtacccgagatggaagacgcgacaggtatagttctgatacaacaccccttttaaatggatcaagccaagacagaatgtttgagacaatggcgattgagattgaacaacttttggcaaggcttacaggggtaaatgataaaatggcagaatataccaacagtgcaggtgtcccctccttgaatgcagccctgatgcatacattacagcggcatagagacatattgcaggattatacacatgaattccataaaaccaaagcaaactttatggcaatacgggaaagggagaatcttatgggatcagtacgaaaagatattgagtcatataaaagtgggtctggagtaaacaacagaagaactgagctatttttgaaagaacatgaccaccttcgaaactcagatcgtctgatagaagagacaataagcattgctatggcaacaaaagaaaatatgacttcacagagaggaatgttgaagtcaattcacagcaaaatgaacactttggccaatcgttttcctgctgtaaacagcctgatccagaggatcaacctgaggaagcggcgggactcgctcatcctagggggtgttattgggatctgtaccatcctgttgctgctgtatgcgttccattgatgggacatcttcagggactcttgacagccaccgctttcacaccctggtctggaataaggaaacatcggagggagaagttgactgtcttgataattagcctgaccagcaggatgaatgcaagactgacagtgatggactctgtgacatggtcaggttgagctgaagccacagtttctctgt

SEQ ID NO: 138353 - DNA, 582 bp, Homo sapiens
  Payload ID: 7097
  Gene Symbol: GOSR1
  Gene Name: golgi SNAP receptor complex member 1
  ENST ID: ENST00000537788
  CDS Start-End: 12-257
ggacgacaaagatggcggcagggaccagcagttactgggaagatctcaggaaacaggctcgacagctggaaaatgaacttgacctgaaactagtttccttcagcaaactatgtacaagttacagtcatagcagtacccgagatggaagacgcgacaggtataggaaaaactatcttgaaaacatttcccaagaaattctaccacaaactgaaactggctttgtagaattacttcagcctaactccccttctaaataaaaacctaaggccatgaggatcaggatttgatgtctattctaaagtgtcttgtttgatgcccagttctgatacaacaccccttttaaatggatcaagccaagacagaatgtttgagacaatggcgattgagattgaacaacttttggcaaggcttacaggggtaaatgataaaatggcagaatataccaacagtgcaggtgtcccctccttgaatgcagccctgatgcatacattacagcggcatagagacatattgcaggattatacacatgaattccataaaaccaaagcaaactttatggcaatacgggaaagggagaatctt

SEQ ID NO: 138354 - DNA, 1011 bp, Homo sapiens
  Payload ID: 7097
  Gene Symbol: GOSR1
  Gene Name: golgi SNAP receptor complex member 1
  Uniprot ID: O95249
  ENST ID: ENST00000467337
  CDS Start-End: 223-780
ggacgacaaagatggcggcagggaccagcagttactgggaaggtgagggcgagaaggcctccggatctcaggaaacaggctcgacagctggaaaatgaacttgacctgaaactagtttccttcagcaaactatgtacaagttacagtcatagcagtacccgagatggaagacgcgacagttctgatacaacaccccttttaaatggatcaagccaagacagaatgtttgagacaatggcgattgagattgaacaacttttggcaaggcttacaggggtaaatgataaaatggcagaatataccaacagtgcaggtgtcccctccttgaatgcagccctgatgcatacattacagcggcatagagacatattgcaggattatacacatgaattccataaaaccaaagcaaactttatggcaatacgggaaagggagaatcttatgggatcagtacgaaaagatattgagtcatataaaagtgggtctggagtaaacaacagaagaactgagctatttttgaaagaacatgaccaccttcgaaactcagatcgtctgatagaagagacaataagcattgctatggcaacaaaagaaaatatgacttcacagagaggaatgttgaagtcaattcacagcaaaatgaacactttggccaatcgttttcctgctgtaaacagcctgatccagaggatcaacctgaggaagcggcgggactcgctcatcctagggggtgttattgggatctgtaccatcctgttgctgctgtatgcgttccattgatgggacatcttcagggactcttgacagccaccgctttcacaccctggtctggaataaggaaacatcggagggagaagttgactgtcttgataattagcctgaccagcaggatgaatgcaagactgacagtgatggactctgtgacatggtcaggttgagctgaagccacagtttctctgtgctgtgttttctaacacatttttctgtttttaattaaaaaaaaaaaaaaaa

SEQ ID NO: 138355 - DNA, 756 bp, Homo sapiens
  Payload ID: 7097
  Gene Symbol: GOSR1
  Gene Name: golgi SNAP receptor complex member 1
  ENST ID: ENST00000581721
  CDS Start-End: 8-718
gacaaagatggcggcagggaccagcagttactgggaagatctcaggaaacaggctcgacagctggaaaatgaacttgacctgaaactagtttccttcagcaaactatgtacaagttacagtcatagcagtacccgagatggaagacgcgacaggtatagttctgatacaacaccccttttaaatggatcaagccaagacagaatgtttgagacaatggcgattgagattgaacaacttttggcaaggcttacaggggtaaatgataaaatggcagaatataccaacagtgcaggtgtcccctccttgaatgcagccctgatgcatacattacagcggcatagagacatattgcaggattatacacatgaattccataaaaccaaagcaaactttatggcaatacgggaaagggagaatcttatgggatcagtacgaaaagatattgatgggtctggagtaaacaacagaagaactgagctatttttgaaagaacatgaccaccttcgaaacattgctatggcaacaaaagaaaatatgacttcacagagaggaatgttgaagtcaattcacagcaaaatgaacactttggccaatcgttttcctgctgtaaacagcctgatccagaggatcaacctgaggaagcggcgggactcgctcatcctagggggtgttattgggatctgtaccatcctgttgctgctgtatgcgttccattgatgggacatcttcagggactcttgacagccaccgctttc

SEQ ID NO: 138356 - DNA, 1026 bp, Homo sapiens
  Payload ID: 7097
  Gene Symbol: GOSR1
  Gene Name: golgi SNAP receptor complex member 1
  ENST ID: ENST00000610619
  CDS Start-End: 12-539
ggacgacaaagatggcggcagggaccagcagttactgggaagatctcaggaaacaggctcgacagctggaaaatgaacttgacctgaaactagtttccttcagcaaactatgtacaagttacagtcatagcagtacccgagatggaagacgcgacaggtatagttctgatacaacaccccttttaaatggatcaagccaagacagaatgtttgagacaatggcgattgagattgaacaacttttggcaaggcttacaggggtaaatgataaaatggcagaatataccaacagtgcaggtgtcccctccttgaatgcagccctgatgcatacattacagcggcatagagacatattgcaggtaatatattgggctcgagatgttttcattatcacaggagtttgggtttttttttttaatccctgcattggatatgtgcacatatatttaaaaggacaaagagaaaaatctgagaaaataaatgccatgctaaagggacttgttttacttttttttggggtcaccattataaaattctgaaaatatctaatagctcttgctatttcttggcgaagttgagtaatattcatcactgggtacatatacttccactatgggagacctagctagctagctgtaacagtgaaatagccaatggtcatgtatagacaataacgtggtgggtaagcgtgtactttcagctagctttgaagataatatggagggggaattatttactatacttagtatattgtttaagaaaacagtaaatgtgtatgcaccaataaaactaaataaacttttaaagatttaaatggaggatatgttaaaaatatggtagtacaaatagaaaggactttctaaataagacttgatactggaaaccataacgaatggctaatttgcttactacacagagatataatagaaataagaaaaagacagtaggaaaatggacaaaggatataaaattgcttacaaaaaaatgaatggccaaaactataaaaacattttcagcagtatttcc

SEQ ID NO: 138357 - DNA, 994 bp, Homo sapiens
  Payload ID: 7097
  Gene Symbol: GOSR1
  Gene Name: golgi SNAP receptor complex member 1
  ENST ID: ENST00000620049
  CDS Start-End: 12-779
ggacgacaaagatggcggcagggaccagcagttactgggaaggtgaggcgagaaggcctccggatctcaggaaacaggctcgacagctggaaaatgaacttgacctgaaactagtttccttcagcaaactatgtacaagttacagtcatagcagtacccgagatggaagacgcgacagttctgatacaacaccccttttaaatggatcaagccaagacagaatgtttgagacaatggcgattgagattgaacaacttttggcaaggcttacaggggtaaatgataaaatggcagaatataccaacagtgcaggtgtcccctccttgaatgcagccctgatgcatacattacagcggcatagagacatattgcaggattatacacatgaattccataaaaccaaagcaaactttatggcaatacgggaaagggagaatcttatgggatcagtacgaaaagatattgagtcatataaaagtgggtctggagtaaacaacagaagaactgagctatttttgaaagaacatgaccaccttcgaaactcagatcgtctgatagaagagacaataagcattgctatggcaacaaaagaaaatatgacttcacagagaggaatgttgaagtcaattcacagcaaaatgaacactttggccaatcgttttcctgctgtaaacagcctgatccagaggatcaacctgaggaagcggcgggactcgctcatcctagggggtgttattgggatctgtaccatcctgttgctgctgtatgcgttccattgatgggacatcttcagggactcttgacagccaccgctttcacaccctggtctggaataaggaaacatcggagggagaagttgactgtcttgataattagcctgaccagcaggatgaatgcaagactgacagtgatggactctgtgacatggtcaggttgagctgaagccacagtttctctgtgctgtgttttctaacacatttttctgtttttaatt

SEQ ID NO: 138358 - DNA, 855 bp, Homo sapiens
  Payload ID: 7098
  Gene Symbol: GOSR2
  Gene Name: golgi SNAP receptor complex member 2
  Uniprot ID: O14653
  ENST ID: ENST00000225567
  CDS Start-End: 32-673
agccggagccgtggcctgcggggccggcgacatggatcccctgttccagcaaacgcacaagcaggtccacgagatccagtcttgcatgggacgcctggagacggcagacaagcagtctgtgcacatagtagaaaacgaaatccaagcaagcatagaccagatattcagccgtctagaacgtctggagattttgtccagcaaggagccccctaacaaaaggcaaaatgccagacttcgggttgaccagttaaagtatgatgtccagcacctgcagactgcgctcagaaacttccagcatcggcgccatgcaagggagcagcaggagagacagcgagaagagcttctgtctcgaaccttcaccactaacgactctgacaccaccataccaatggacgaatcactgcagtttaactcctccctccagaaagttcacaacggcatggatgacctcattttagatgggcacaatattttagatggactgaggacccagagactgaccttgaaggggactcagaagaagatccttgacattgccaacatgctgggcttgtccaacacagtgatgcggctcatcgagaagcgggctttccaggacaagtactttatgataggcacccaaggatcctgccagacagcacactttggaggaaggtctgcagggagcagctgagccatttgttcttgaactctgggaggcagaagtccccgcacccatcatgcgtggactgataggacatcttttcgtggtgtgcaccagtgctttccacacttgacagtggttggctttgatgaaccctcatgctgcaccttcagagccagtcctctagtttggaataaaaattgcagaggtgg

SEQ ID NO: 138359 - DNA, 847 bp, Homo sapiens
  Payload ID: 7098
  Gene Symbol: GOSR2
  Gene Name: golgi SNAP receptor complex member 2
  Uniprot ID: O14653
  ENST ID: ENST00000393456
  CDS Start-End: 58-696
gtgaggacgtgttccgaggaagccagagccggagccgtggcctgcggggccggcgacatggatcccctgttccagcaaacgcacaagcaggtccacgagatccagtcttgcatgggacgcctggagacggcagacaagcagtctgtgcacatagtagaaaacgaaatccaagcaagcatagaccagatattcagccgtctagaacgtctggagattttgtccagcaaggagccccctaacaaaaggcaaaatgccagacttcgggttgaccagttaaagtatgatgtccagcacctgcagactgcgctcagaaacttccagcatcggcgccatgcaagggagcagcaggagagacagcgagaagagcttctgtctcgaaccttcaccactaacgactctgacaccaccataccaatggacgaatcactgcagtttaactcctccctccagaaagttcacaacggcatggatgacctcattttagatgggcacaatattttagatggactgaggacccagagactgaccttgaaggggactcagaagaagatccttgacattgccaacatgctgggcttgtccaacacagtgatgcggctcatcgagaagcgggctttccaggacaagtactttatgataggtgggatgctgctgacctgtgtggtcatgttcctcgtggtgcagtacctgacatgagccagccacgctcagtggctgaacagcattcccacagcctgcaagtgtgtgtgtgtgtgaaagagagaggggggcccagaggccgccttttgaaatgtttgcctgtctgaactgtgaagacacttgggagtgattgtggtctaatttccaa

SEQ ID NO: 138360 - DNA, 2202 bp, Homo sapiens
  Payload ID: 7098
  Gene Symbol: GOSR2
  Gene Name: golgi SNAP receptor complex member 2
  Uniprot ID: O14653
  ENST ID: ENST00000415811
  CDS Start-End: 56-643
gaggacgtgttccgaggaagccagagccggagccgtggcctgcggggccggcgacatggatcccctgttccagcaaacgcacaagcaggtccacgagatccagtcttgcatgggacgcctggagacggcagacaagcagtctgtgcacatagtagaaaacgaaatccaagcaagcatagaccagatattcagccgtctagaacgtctggagattttgtccagcaaggagccccctaacaaaaggcaaaatgccagacttcgggttgaccagttaaagtatgatgtccagcacctgcagactgcgctcagaaacttccagcatcggcgccatgcaagggagcagcaggagagacagcgagaagagcttctgtctcgaaccttcaccactaacgactctgacaccaccataccaatggacgaatcactgcagtttaactcctccctccagaaagttcacaacggcatggatgacctcattttagatgggcacaatattttagatggactgaggacccagagactgaccttgaaggtggggtccctgctgggggacagagagaaggcctcttgttttagcctcatccaacagtttagtaactgtgtttatattttgattacgtgtcctcaaattgtgatattttgatgacaagacagagcccttgagtttgggatcctttctgttggagttgagttattgtgagcctgaaagtacccagttcctttgccagtgcttgaaacaaaccatgaagtggcctctcttaggatccaggtcttttcccatttactgaacttatcatgaaagtgagtgctactacgaggggtccaatcacaggctgagaaattgtgttacagaatctactcttggaagaatgaagacgtggctgtcctttggtacctcgctttaaggtggctttcccttaggacccctactgtggactgccttataactaaaaccttttgtattttagtaactgaatccccactgtgcagtgttagggctgcctggttgtttgcagtagattagagctttagaagcttctagagcttctaaagcccgtgctggtgatcccagcgactcttcactccctagccttaggtattcctagaagccctgaccagttggcactgctgagactccagcccctgggagtggtttacagaaacattacacagactctgatgtcagtcatgatgtttcagcctctgcccttttcctgtatcaaccctgatggataatagggcgtgggttctgtctgttatcagggtgtggtcccctgtgaatgaagcactcccagccactgagctgtgagaaacagtcactcggaagtgtgagctttatcttagtttttgttggatcatgttgagtctgtcagctccacaggacttcagtacgtttctgaacagtccctgccatctctacgggggagagggtcaggcaagctgcaagtgacactcacctcctgctgacagttgcagtgtctcagatggcctggaagggtggtctccagcagcctgctgggcgctcccctttcatgagagccacctgcagtgacctgaactgatacatgttgattagtctgccctttctttagaaaactgctactctccttttcatatctcagaaaaacagtagaggccttttaggaccaaactccatgtcacactgatgaagagccagtgggggttagagcgtcctgttaaggcacatgctaacttcccactcaagtctggcagcgctggggcatcagcacacctcttgccacccacactgataccagaggggaaggctgtgaggtggctgggggttgagacttgaggtttctaactttcctctgcacacctgtggctacctggtgtttgtctcttgattccctccacctgcctcacaccctgcctccgtcgggattttccacctacaccattcaaaaggaacataggagagggcatgaaggggctaggctgaagcactctgatgactggggccaatttgtggctgaaaatgaatacattttttgaaatttatggtcattttcaagtgatttagaaggttgatccttagcctcatacagtgatgaaataatctgtgtgttcagagccaagcaggactttagcaagagtctgattgtattgtcactatctcggggaaaaaaaaatacaaatacatttctctgatctctgatggcaatgaagtttgacttgtaa

SEQ ID NO: 138361 - DNA, 597 bp, Homo sapiens
  Payload ID: 7098
  Gene Symbol: GOSR2
  Gene Name: golgi SNAP receptor complex member 2
  ENST ID: ENST00000570879
  CDS Start-End: 1-597
atcccctgttccagcaaacgcacaagcaggtccacgagatccagtcttgcatgggacgcctggagacggcagacaagcagtctgtgcacatagaaaacgaaatccaagcaagcatagaccagatattcagccgtctagaacgtctggagattttgtccagcaaggagccccctaacaaaaggcaaaatgccagacttcgggttgaccagttaaagtatgatgtccagcacctgcagactgcgctcagaaacttccagcatcggcgccatgcaagggagcagcaggagagacagcgagaagagcttctgtctcgaaccttcaccactaacgactctgacaccaccataccaatggacgaatcactgcagtttaactcctccctccagaaagttcacaacggcatggatgacctcattttagatgggcacaatattttagatggactgaggacccagagactgaccttgaaggggactcagaagaagatccttgacattgccaacatgctgggcttgtccaacacagtgatgcggctcatcgagaagcgggctttccaggacaagtactttatgataggtgggatgctgctgacctgtg

SEQ ID NO: 138362 - DNA, 643 bp, Homo sapiens
  Payload ID: 7098
  Gene Symbol: GOSR2
  Gene Name: golgi SNAP receptor complex member 2
  ENST ID: ENST00000575949
  CDS Start-End: 41-472
ggaagccagagccggagccgtggcctgcggggccggcgacatggatcccctgttccagcaaacgcacaagcaggtccacgagatccagtcttgcatgggacgcctggagacggcagacaagcagtctgtgcacatagtagaaaacgaaatccaagcaagcatagaccagatattcagccgtctagaacgtctggagattttgtccagcaaggagccccctaacaaaaggcaaaatgccagacttcgggttgaccagttaaagtatgatgtccagcacctgcagactgcgctcagaaacttccagcatcggcgccatgcaagggagcagcaggagagacagcgagaagagcttctgtctcgaaccttcaccactaacgtaagccaggcccgtggtgagggtcggcctgcacttgacagatcgtgggggctggagttcagatctctgagcgccatctgttttgggggtgtctgaagaagactgatgatgaggaaaccaactggaaatgacaggaactttgtgcattgccacagagactagacctagacagagaatccctttttctaagacaaaaacctgaagaggaagcagttaaattgaaggggaataggcagaggtgaaaattacctggttgggctggtctga

SEQ ID NO: 138363 - DNA, 648 bp, Homo sapiens
  Payload ID: 7098
  Gene Symbol: GOSR2
  Gene Name: golgi SNAP receptor complex member 2
  ENST ID: ENST00000572403
  CDS Start-End: 200-648
gtggcctgcggggccggcgacatggatcccctgttccagcaaacgcacaagttataaaactttgtccagcacttgtcaactcggtgctcctggttggtagacctcgagaggagacacggagtaggagacacggcccctggccgtaggagtgtactgtttaattggagagtcagggcaggtccacgagatccagtcttgcatgggacgcctggagacggcagacaagcagtctgtgcacatagtagaaaacgaaatccaagcaagcatagaccagatattcagccgtctagaacgtctggagattttgtccagcaaggagccccctaacaaaaggcaaaatgccagacttcgggttgaccagttaaagtatgatgtccagcacctgcagactgcgctcagaaacttccagcatcggcgccatgcaagggagcagcaggagagacagcgagaagagcttctgtctcgaaccttcaccactaacgggactcagaagaagatccttgacattgccaacatgctgggcttgtccaacacagtgatgcggctcatcgagaagcgggctttccaggacaagtactttatgatagacaaagaacatatgttcttgacaagggagtgtgccttgttccccacccacagtcaccactg

SEQ ID NO: 138364 - DNA, 1674 bp, Homo sapiens
  Payload ID: 7098
  Gene Symbol: GOSR2
  Gene Name: golgi SNAP receptor complex member 2
  ENST ID: ENST00000576910
  CDS Start-End: 77-574
ggaaaccggaaggggggctgtgaggacgtgttccgaggaagccagagccggagccgtggcctgcggggccggcgacatggatcccctgttccagcaaacgcacaagcaggtccacgagatccagtcttgcatgggacgcctggagacggcagacaagcagtctgtgcacatagtagaaaacgaaatccaagcaagcatagaccagatattcagccgtctagaacgtctggagattttgtccagcaaggagccccctaacaaaaggcaaaatgccagacttcgggttgaccagttaaagtatgatgtccagcacctgcagactgcgctcagaaacttccagcatcggcgccatgcaagggagcagcaggagagacagcgagaagagcttctgtctcgaaccttcaccactaacgggactcagaagaagatccttgacattgccaacatgctgggcttgtccaacacagtgatgcggctcatcgagaagcgggctttccaggacaagtactttatgataggtgggatgctgctgacctgtgtggtcatgttcctcgtggtgcagtacctgacatgagccagccacgctcagtggctgaacagcattcccacagcctgcaagtgtgtgtgtgtgtgaaagagagaggggggcccagaggccgccttttgaaatgtttgcctgtctgaactgtgaagacacttgggagtgattgtggtctaatttccaacctgctctgttttctgtgacatcttggagggggagctagtgccaccaccatgcgcggtgcttaggaaatgaaagaagtcccgggtctgtctctctcactctcgctctcactgggggagggaaagaatggctttggtggctttgttcacatagctgatgcgtgccctgggaaggtgtccacagtgagccctgtgtgcaggactgtccacacggttcacaccttgtcaccatcaggcctttctggctcctgatagggtggagcaaaagtggaaaggaaaggaaagaggccttttctcacagccattatattaaatagtaggtcgattcacatcctcgtgctcctggccaccctcccctgtgcctcagtgacatgtagatgactgactgccaatacttgtcaccattccctggaagcagctacctaggggaaacaagatgtagtgctattgccgataacaagtaagattttccacactacagctgggtgtttctcttttctaaagtgaggccagtgttatttcccgggagtgttcagtcttgaccctagtcactgattttttctagttgttaatagagtggttggcttttaaggttcagagactgtggcttggcacctgcgcccaggctttgtgggcctttgccccttagaaagtagctgtaggcaaagatttgtgattttccaattacagtctcagctctagttttagtatctctaattctttggttcccttctcttccctgaaatatattagcacctgccagccaggccctcattttgcccagccagtgtgggcagatcccaccgtggagacatctgtagtgtgtatgtccttgtaacactctgttttcagggactacaacctttttccttctgtgaccagccccggattcaggctgtactaataccaggtatattgtggaatttagtataaaggccaatctgtcctgaa

SEQ ID NO: 138365 - DNA, 592 bp, Homo sapiens
  Payload ID: 7098
  Gene Symbol: GOSR2
  Gene Name: golgi SNAP receptor complex member 2
  ENST ID: ENST00000573224
  CDS Start-End: 1-297
gggactcagaagaagatccttgacattgccaacatgctgggcttgtccaacacagtgatgcggctcatcgagaagcgggctttccaggacaagtactttatgatagagacaaggtctcaccatgttgcccagaatggacccgaactcctgagctcaagagatcctcctgcatcagcctcccgaagtgctgggattataggtatgagccaccaccctgacctccaaataccttttgaactcaggcttggatttgaactctggttctatcaactattagctgtgatttcagatcagtgacttgagcaatttgtgccttgtttcattaagtggagatgacaatagcacctgccttgcaagaattatttgatgtggccgatgagaaaaatcagaattatgaaaagtgcttcacaccattcctggcatgtgaagagccctctctaaatggccattatgctaattagcaccttaaagggaaatcattttcatgaaattttatttgaatctggctagagaaaatgctcaccttcttccttgtgttttgcttatttgattaaatgtctttgatttctgtgatgtgtgaagtcccttgaaa

SEQ ID NO: 138366 - DNA, 2090 bp, Homo sapiens
  Payload ID: 7099
  Gene Symbol: GET4
  Gene Name: golgi to ER traffic protein 4
  Uniprot ID: Q7L5D6
  ENST ID: ENST00000265857
  CDS Start-End: 95-1078
gtagaagggcgtcgggcggccgtcgggacggaagccgggaggcgctgccgaccgcgcctgcgacagcgtcagccctgcgcggagcgccggcccgatggcggcggcggcggcgatggccgagcaggagagcgcccggaacggcggccgcaaccgcggcggcgtccagcgtgtggagggcaagctgcgcgccagcgtcgagaagggcgactactacgaggcgcaccagatgtaccggaccctgttcttcaggtacatgtcccagagcaagcacacggaggcccgggagctcatgtactcgggagccctgctcttcttcagccatggccagcaaaacagtgcagcagacttgtccatgctggtcctggagtccctggagaaggcggaagtggaggtggctgacgagctgctggaaaatctggctaaagtgttcagcctgatggaccccaactctcctgagcgcgtgacctttgtgtccagagccctgaagtggtccagtgggggctccgggaagctgggccacccccggctgcaccagctgctggccctcaccctgtggaaagaacaaaactattgtgagtcgaggtatcattttctgcactcagcggacggggagggctgtgccaacatgctggtggagtattccacgtcccgcggcttccgcagcgaggtggacatgttcgtggcccaggccgtgctacagtttctctgtttaaaaaacaaaagtagcgcatcggtggtcttcacgacgtacacccagaagcacccgtccatcgaggacgggcctccgtttgtggagccgctgcttaacttcatctggttcctgctgctggctgtggacggtgggaagctgacggtgttcactgtgctgtgtgagcagtaccagccatccctccggcgggaccccatgtacaacgagtacctcgaccgcataggacagctgttcttcggcgtcccgcccaagcagacgtcttcctacgggggcctgctcgggaaccttctgaccagcctcatgggctcctcagagcaggaggatggggaggagagccccagcgacggcagccccatcgagctggactgaactggccaggccacgtggagacaccacggtcgacgacggctggagggacgtttcagaggcgagtcctgggtggctcctcgccttgggggctcctggccctgaggctggcggtggccgcatgccggcgcgtgtctgtttctgtgcggcggctcagggtggcgcggctgctgctcactgtgctgctgggacccaagagtggggcgtcgcccctgctggccgccgcgtcccccgagattgacccacaataaagcacaggccttaccgcggcgtcaccctctcccactcctttgttctgggtcctttcgggagggctgatgggcagcacaggaggcccgtcctcggggggctgcgcacatcacgctccttgccgggcgtccggcacagctgcggtcaccaaagcaggtgctggccctcggacctgagagcccagccagggcccatgtggtctgcaaatgggagcggctgtttttgaacacggggtcattctgcagtcaggacgaaccggtccccgtcgcagacggagtgcacgtgccctgcgccacatcctcacgctcggtggagggacgcgtgcggcgggacggtgcctacgggtacttgcagctgtgtcccatgtggcatcccagagctgcgccctgctggtctctgtgagcgccacgctgctgtgctggaaatgccgctttaaaaagggataccgtgggactctgcccgtctctttcataacgcaatatttatttgtattgggtgatgattgattctttcgacctaacattttgggttttaaccaaataaccggtccaggagtgagcagctccgttctgtcagatgctactccaaatgttaccagaacgatgacaaaaggggagacgctctattttttcacagttaaatgacagttgtagattgatacgcagttgtgcatgggaaggggaaacgcacagctttatttactgtaaagtggaatttcaggaaggcttgtgtgaaccgttgcgcataaataaaccctttctaccgg

SEQ ID NO: 138367 - DNA, 4356 bp, Homo sapiens
  Payload ID: 7099
  Gene Symbol: GET4
  Gene Name: golgi to ER traffic protein 4
  Uniprot ID: Q7L5D6
  ENST ID: ENST00000407192
  CDS Start-End: 2518-3342
tgttttggccggcagagagcaccagcgctcactggctctcagcgcctgtcagcaggcagaagccatttccctatctggaaggcacgtctgggtgtccacatggcacggccaatagtgcgcagcatgcagagccgggccgggagaaggcccggccatgcccagctgccccccactctccccggcctcgggcttgagagggtacctgtcctggcttagtcacctggaaaccaaaatccttcgcagcttccagaattctccagtacaggaggagaagccgtccacgttcagagccgccttagacggtttgcctgtcaccggcattcctggacctggaaacgggtgcccccagccaggccggggaccactgtgtgcccagaattctcctcccgtcctttttccccttgcccggctcccagctgcccagggaagaagggagccggctgcaaggcgcagtccaaaccaggccgggggccgtgaccatcggcagtgccccccagagcaggctcctcgtgcaggaatatgggtcactgccttccagggagtcctttttttcttctggtttctaagtcgccacctcttgctttacctcagatagaagcatccagaacgctgtagtatcggcaaagcagaagctggtgtggtgcttgctcagggtcggtgcatgcggttctgcccgtggccccactggcggcatcgtgaggccaggcgtgtctgggagcttgtttttccagagtgccctgtgccagacggctcccggcctcctctgagtcagtcatgtccctgcaggactggaactaggacggccggtcacagagtcagtggtcctgtcgaggctcctgctgtggtgttggggtgggtctccctccagaaccttcactgtgcggggagcacagcaaaaccggaggcctgccaacggcctgcaggctgacgggggtgcgggggcactttctctcttgggtgcgggcttttccctcctggtgccctgcctctgtgcagcacgaagcggtctcctgtggggggagggcctgtgtgccaggctaatgagatgcccggatgtggcggggctgtctgtgtttggggtccctggctgtggtgccttctgaagaggagcccttttctgtggttaactgagcatccaaccctttgcgttctcggctggccttcccgtcctggcaacaccaaggtcattctggtcctcagtggcgttgctgtggctctttatcacctccactgcaattggtttttgtttgtttgttttggggggatggcgcctcgctctgtcatccgtctaggcagtggtgcaatcatggcttactgcggccttgactacccggactcaagcagtcctcccacctcagcctcccgagtagctgggaccacaggtgcacaccaccatgcccagctaatttctgtgttttttgtagagacagggtctcactatgttgctcaggccagtctcaaactcatgagctcaagcgatcctcccacctcagcctcccaaagggctgagattacaggtgtgagcccccgaatccggtgtgcactgctgtttacttagtatttttctttaactagatttatttttaaacaaggctttgtccaaggacatttggctcgcaggcacagagctgattaactcgttatgtatcttttgataataaggcagcgatcattaagaaaaacgtgtagccaatgaaataacatgttctgggccccaccactggactgggaggtgcagcgcatccaagcagaggctgcctcctgccctccacgcctgctgctctcgcaggcaggggctctgctgcttacagcagtgcggccatctcggcttctctccacatcgtctgtcacgcgctggtccccaccatacctctcgccaccccgtgcctctgtccccgtgcggcctgaggagctccagctttccctgccagcggtgctctgggagtggggacgtgatgcagggcgagcatgatgcaacggggcaccccagacccttccctcccgtggggggaggggtgtggcacgcagaggggcagagggcggggacactggccccgtgggggaagaaggtgctgtcacagccgttactgtcccccgtgggaccccagcctggagccccccatcctttggctcctgcctgtggccactcagctctcaggtggccacatgcacatcccctgctccttccctgcgcacctgccctgcccagtggcctttctggtcccagctactgaaaccggtgagctgctccagggtgaggctgctttctggctcctggtgtatttggacacagataggcccttagtgtccagaggcgccccatgcagccctcatggtcagcaggacacccaggatagaccccctccacgcagcacctgggccctgggagcggctgcttttaggatgccacctgttcctgggcgccttgtttttagcttctgacctgaagatgagcgggggagcgcggtggcgagggcacgtgggcgtggctcacggtctcctctctgtggcaggtacatgtcccagagcaagcacacggaggcccgggagctcatgtactcgggagccctgctcttcttcagccatggccagcaaaacagtgcagcagacttgtccatgctggtcctggagtccctggagaaggcggaagtggaggtggctgacgagctgctggaaaatctggctaaagtgttcagcctgatggaccccaactctcctgagcgcgtgacctttgtgtccagagccctgaagtggtccagtgggggctccgggaagctgggccacccccggctgcaccagctgctggccctcaccctgtggaaagaacaaaactattgtgagtcgaggtatcattttctgcactcagcggacggggagggctgtgccaacatgctggtggagtattccacgtcccgcggcttccgcagcgaggtggacatgttcgtggcccaggccgtgctacagtttctctgtttaaaaaacaaaagtagcgcatcggtggtcttcacgacgtacacccagaagcacccgtccatcgaggacgggcctccgtttgtggagccgctgcttaacttcatctggttcctgctgctggctgtggacggtgggaagctgacggtgttcactgtgctgtgtgagcagtaccagccatccctccggcgggaccccatgtacaacgagtacctcgaccgcataggacagctgttcttcggcgtcccgcccaagcagacgtcttcctacgggggcctgctcgggaaccttctgaccagcctcatgggctcctcagagcaggaggatggggaggagagccccagcgacggcagccccatcgagctggactgaactggccaggccacgtggagacaccacggtcgacgacggctggagggacgtttcagaggcgagtcctgggtggctcctcgccttgggggctcctggccctgaggctggcggtggccgcatgccggcgcgtgtctgtttctgtgcggcggctcagggtggcgcggctgctgctcactgtgctgctgggacccaagagtggggcgtcgcccctgctggccgccgcgtcccccgagattgacccacaataaagcacaggccttaccgcggcgtcaccctctcccactcctttgttctgggtcctttcgggagggctgatgggcagcacaggaggcccgtcctcggggggctgcgcacatcacgctccttgccgggcgtccggcacagctgcggtcaccaaagcaggtgctggccctcggacctgagagcccagccagggcccatgtggtctgcaaatgggagcggctgtttttgaacacggggtcattctgcagtcaggacgaaccggtccccgtcgcagacggagtgcacgtgccctgcgccacatcctcacgctcggtggagggacgcgtgcggcgggacggtgcctacgggtacttgcagctgtgtcccatgtggcatcccagagctgcgccctgctggtctctgtgagcgccacgctgctgtgctggaaatgccgctttaaaaagggataccgtgggactctgcccgtctctttcataacgcaatatttatttgtattgggtgatgattgattctttcgacctaacattttgggttttaaccaaataaccggtccaggagtgagcagctccgttctgtcagatgctactccaaatgttaccagaacgatgacaaaaggggagacgctctattttttcacagttaaatgacagttgtagattgatacgcagttgtgcatgggaaggggaaacgcacagctttatttactgtaaagtggaatttcaggaaggcttgtgtgaaccgttgcgcataaataaaccctttctaccgggc

SEQ ID NO: 138368 - DNA, 682 bp, Homo sapiens
  Payload ID: 7099
  Gene Symbol: GET4
  Gene Name: golgi to ER traffic protein 4
  ENST ID: ENST00000441491
  CDS Start-End: 181-682
cggcagtgccccccagagcaggctcctcgtgcaggaatatgggtcactgccttccagggagtcctttttttcttctggtttctaagtcgccacctcttgctttacctcagatagaagcatccagaacgctgtagtatcggcaaagcagaagctggtgtggtgcttgctcagggtcggtgcatgcggttctgcccgtggccccactggcggcatcgtgaggccaggcgtgtctgggagcttgtttttccagagtgccctgtgccagacggctcccggcctcctctgagtcagtcatgtccctgcaggactggaactaggacggccggtcacagagtcagtggtcctgtcgaggctcctgctgtggtgttggggtacatgtcccagagcaagcacacggaggcccgggagctcatgtactcgggagccctgctcttcttcagccatggccagcaaaacagtgcagcagacttgtccatgctggtcctggagtccctggagaaggcggaagtggaggtggctgacgagctgctggaaaatctggctaaagtgttcagcctgatggaccccaactctcctgagcgcgtgacctttgtgtccagagccctgaagtggtccagtgggggctccgggaagctgggccacccccggctgcaccagctgctggccctcaccctgtggaaag

SEQ ID NO: 138369 - DNA, 502 bp, Homo sapiens
  Payload ID: 7099
  Gene Symbol: GET4
  Gene Name: golgi to ER traffic protein 4
  ENST ID: ENST00000426056
  CDS Start-End: 27-502
actcctagtccctgctgctctgggagatgccccgggccagagccaggtacccagagcggccacagctgttcctggactccagctccccacggcaccttccccagcccccgcctcggccagggcgtccgtccttccttcctcgctgtgctctggggcacatggcgctggaactgcggtgggcagctcagtgtggtggtccacggctcactcagggacgcccagcagaaaatctggctaaagtgttcagcctgatggaccccaactctcctgagcgcgtgacctttgtgtccagagccctgaagtggtccagtgggggctccgggaagctgggccacccccggctgcaccagctgctggccctcaccctgtggaaagaacaaaactattgtgagtcgaggtatcattttctgcactcagcggacggggagggctgtgccaacatgctggtggagtattccacgtcccgcggcttccgcagcgaggtggacatgttcgtggccca

SEQ ID NO: 138370 - DNA, 873 bp, Homo sapiens
  Payload ID: 7099
  Gene Symbol: GET4
  Gene Name: golgi to ER traffic protein 4
  ENST ID: ENST00000412734
  CDS Start-End: 428-873
cttgcctcccccaccttcccccctggcctccacctgttccgcattcccccacctccctgcctccctcctcctggccttcaggttctccagccgggccctacaccgggctccgtaggaagtcgctggcgttcctctcaccgagggtccaggctgagggtgaaaccgcttctctgttgacgccgcccggcctgccgaaccgagtcagccgcctctggacctaggctcggtgacacctgcacggccggtgtagcctggagggcgagcgcgagcagagctggctatgctgggttaactgcacgcccctcgggactgtgaccgcttggaagttccaggctgctgcgtggcttggttgattgtcttcaggactgctctgttccagtatttttgctgtcatacagttactgcagaatgttcagttgttctgtacatgtcccagagcaagcacacggaggcccgggagctcatgtactcgggagccctgctcttcttcagccatggccagcaaaacagtgcagcagacttgtccatgctggtcctggagtccctggagaaggcggaagtggaggtggctgacgagctgctggaaaatctggctaaagtgttcagcctgatggaccccaactctcctgagcgcgtgacctttgtgtccagagccctgaagtggtccagtgggggctccgggaagctgggccacccccggctgcaccagctgctggccctcaccctgtggaaagaacaaaactattgtgagtcgaggtatcattttctgcactcagcggacggggagggctgtgccaacatgctggtggagtattccacgtcccgcggcttccgcagcgaggtggacatgttcgtggcccaggccgtgctaca

SEQ ID NO: 138371 - DNA, 883 bp, Homo sapiens
  Payload ID: 7100
  Gene Symbol: GOLT1A
  Gene Name: golgi transport 1A
  Uniprot ID: Q6ZVE7
  ENST ID: ENST00000308302
  CDS Start-End: 187-585
agtagaagcacctgcgtggtgtgcgggggtggagcgggggctggagggagagttaatgatttgccacaggctcatttcgcaacttaaccaagggtcagcttcccgtgaccatgtaccagctgcgtcctctgggccacgctccacttgcccgcttccacccggaaagccccccaggctgagtgcggcatgatctccatcaccgaatggcagaagattggtgtggggatcaccggtttcggcatcttcttcatcctctttggaacactcctgtactttgattccgtgctcctggcctttggaaacctgctgttcctgacgggcctgtccctcatcattggcctgaggaagaccttttggttcttcttccaacggcacaaactcaagggaaccagcttcctcctggggggtgtggttatcgtgctcctacgctggcccctcctcggcatgttcctggaaacctacggattcttcagcctctttaagggctttttccctgtcgccttcggcttcctgggcaatgtctgcaacatccccttcctgggtgcgctgttccggagacttcaaggcactagctcgatggtctgaaaaacagagatgagctccttgaacttggatcattggttgagggggctagagggagaatgggaaccaccccctcagtcccctgcactgactcactccccgacatatccggacctccccaagtccagaaggaaggaatggagctgagcaactgacgtcaaatccccaagtcgactcaagaggctgccaggaagcagagatgcagaccccaaggagactgggctggggctggtatcacaccctcactctatatttatgggaggaaaagtgaagattaaattcccaagttgtgcgtgtgtct

SEQ ID NO: 138372 - DNA, 3227 bp, Homo sapiens
  Payload ID: 7101
  Gene Symbol: GOLT1B
  Gene Name: golgi transport 1B
  Uniprot ID: Q9Y3E0
  ENST ID: ENST00000229314
  CDS Start-End: 110-526
agacgtggcggctctcgcctgggctgtttcccggcttcatttctcccgactcagcttcccaccctgggctttccgaggtgctgtcgccgctgtccccaccactgcagccatgatctccttaacggacacgcagaaaattggaatgggattaacaggatttggagtgtttttcctgttctttggaatgattctcttttttgacaaagcactactggctattggaaatgttttatttgtagccggcttggcttttgtaattggtttagaaagaacattcagattcttcttccaaaaacataaaatgaaagctacaggtttttttctgggtggtgtatttgtagtccttattggttggcctttgataggcatgatcttcgaaatttatggattttttctcttgttcaggggcttctttcctgtcgttgttggctttattagaagagtgccagtccttggatccctcctaaatttacctggaattagatcatttgtagataaagttggagaaagcaacaatatggtataacaacaagtgaatttgaagactcatttaaaatattgtgttatttataaagtcatttgaagaatattcagcacaaaattaaattacatgaaatagcttgtaatgttctttacaggagtttaaaacgtatagcctacaaagtaccagcagcaaattagcaaagaagcagtgaaaacaggcttctactcaagtgaactaagaagaagtcagcaagcaaactgagagaggtgaaatccatgttaatgatgcttaagaaactcttgaaggctatttgtgttgtttttccacaatgtgcgaaactcagccatccttagagaactgtggtgcctgtttcttttctttttattttgaaggctcaggagcatccataggcatttgctttttagaaatgtccactgcaatggcaaaaatatttccagttgcactgtatctctggaagtgatgcatgaattcgattggattgtgtcattttaaagtattaaaaccaaggaaaccccaattttgatgtatggattacttttttttgtaaacatggttaaaataaaacttttgtggttcttctgaatcttaatatttcaaagccaggtgaaaatctgaactagatattctttgttggaatatgcaaaggtcattctttactaacttttagttactaaattatagctaagttttgtcagcagcatactccggaaagtctcatacttcttgggagtctgccctcctaagtatctgtctatatcattcattacgtgtaagtatttaacaaaaaagcattcttgaccatgaatgaagtagtttgtttcatagcttgtctcattgaatagtattattgaagatactaaatgatgcaaaccaaatggattttttccatgtcatgatgtaatttttctttcttctttcttttttttaaattttagcagtggcttattatttgtttttcataaattaaaataacttttgataatgtttactttaagacatgtaacatgttaaaaggttaaacttatggctatttttaaagggctattcatttaatctgagttttcccttattttcagctttttcctagcatataatagtcattaagcatgacatatccttcatatgatcactcatcttgagttaattagaaaatacctgagttcacgtgctaaagtcatttcactgtaataaactgactgtggtttcttaagaacatgacactaaaaaaaaagtgttttttttccaccgttgctgattattagacagtaggaaatagctgttttctttagttttacaagatgtgacagctttagtggtagatgtagggaaacatttcaacagccatagtactatttgttttaccactgattgcactgttttgtttttttaacagttgcaaagctttttaatgcataaaagtataattgaaatctgtggtatttatttacaaacatgtctacaaaaatagattacagcttattttatttttagttaaatctcttaatacacagagaactcccaatcttgctcatctaaataaggaaagacttggtgtatagtgtgatggtttagtcttaaggattaagacatttttggtacttgcatttgacttacgatgtatctgtgaaaatgggatgatattgacaaatggagactcctacctcaatagttaatggaataataagaggctactgttgtgtctaatgttcttcaaaaaagtaatatcctcacttggagagtgtcaaatacatactttgaggattgactttatataaggtgccctgtagaactctgttacacatatttttgacccatattatttacaatgtcttgataattctacctttttagagcaagaatagtatctgctaatgtaagggacatctgtatttaactcctttgtagacatgaatttctatcaaaatgttctttgcactgtaacagagattccttttttcaataatcttaattcaaaagcattattagacttgaaagggtttgataatctcccagtccttagtaaagattgagagaggctggagcagttttcagttttaaatgagtctgcagttaatatcaaatgtgagtttgggactgcctggcaacatttatatttcttattcagaacccttgatgagactatttttaaacatactagtctgctgatagaaagcactatacatcctattgtttctttctttccaaaatcagccttctgtctgtaacaaaaatgtactttatagagatggaggaaaaggtctaatactacatagccttaagtgtttctgtcattgttcaagtgtattttctgtaacagaaacatatttggaatgtttttcttttccccttataaattgtaattcctgaaatactgctgctttaaaaagtcccactgtcagattatattatctaacaattgaatattgtaaatatacttgtcttacctctcaataaaagggtacttttctattaattggtggtcaagtatatctgtgttatgaagttctaaaagctaatttagcattgcaaaataacctcatttttaaaaaattagccttatatgcagtgttctatttatcaaatgatcttcacatctttcatttccaaattgttgaaatgtactaatgaatacaaatagacttcaagtaagcaaaaatgttcttaattttgaaaactgtaaaataaagtcacttaccttgggcaatatgctattttttaaaaa

SEQ ID NO: 138373 - DNA, 1055 bp, Homo sapiens
  Payload ID: 7101
  Gene Symbol: GOLT1B
  Gene Name: golgi transport 1B
  ENST ID: ENST00000540141
  CDS Start-End: 110-496
agacgtggcggctctcgcctgggctgtttcccggcttcatttctcccgactcagcttcccaccctgggctttccgaggtgctgtcgccgctgtccccaccactgcagccatgatctccttaacggacacgcagaaaattggaatgggattaacaggatttggagtgtttttcctgttctttggaatgattctcttttttgacaaagcactactggctattggaaatgttttatttgtagccggcttggcttttgtaattggtttagaaagaacattcagattcttcttccaaaaacataaaatgaaagctacaggtttttttctgggtggtgtatttgtagtccttattggttggcctttgataggcatgatcttcgaaatttatggattttttctcttgttcaggggcttctttcctgtcgttgttggctttattagaagagtgccagtccttggatccctcctaaatttacctggaattagatcaactacataggcccagaagagatccacagtaatgtttgtagataaagttggagaaagcaacaatatggtataacaacaagtgaatttgaagactcatttaaaatattgtgttatttataaagtcatttgaagaatattcagcacaaaattaaattacatgaaatagcttgtaatgttctttacaggagtttaaaacgtatagcctacaaagtaccagcagcaaattagcaaagaagcagtgaaaacaggcttctactcaagtgaactaagaagaagtcagcaagcaaactgagagaggtgaaatccatgttaatgatgcttaagaaactcttgaaggctatttgtgttgtttttccacaatgtgcgaaactcagccatccttagagaactgtggtgcctgtttcttttctttttattttgaaggctcaggagcatccataggcatttgctttttagaaatgtccactgcaatggcaaaaatatttccagttgcactgtatctctggaagtgatgcatgaattcgattggattgtgtcattttaaagtattaaaaccaaggaaaccccaa

SEQ ID NO: 138374 - DNA, 876 bp, Homo sapiens
  Payload ID: 7101
  Gene Symbol: GOLT1B
  Gene Name: golgi transport 1B
  ENST ID: ENST00000539663
  CDS Start-End: 101-229
ggctctcgcctgggctgtttcccggcttcatttctcccgactcagcttcccaccctgggctttccgaggtgctgtcgccgctgtccccaccactgcagccatgatctccttaacggacacgcagaaaattggaatgggattaacaggatttggagtgtttttcctgttctttggaatgattctcttttttgacaaagcactactggctattggaaataaactcctgtagcctatgatgaatatttcagaaccaagaggaatacccttgggtgacatatttatgggcagctttcctctttatgccttgccaactcatctgcttgactaagccttcctcatccagctaaaactaggaaaactactgcagacacagatgccccttggttttatttgtagccggcttggcttttgtaattggtttagaaagaacattcagattcttcttccaaaaacataaaatgaaagctacaggtttttttctgggtggtgtatttgtagtccttattggttggcctttgataggcatgatcttcgaaatttatggattttttctcttgttcaggggcttctttcctgtcgttgttggctttattagaagagtgccagtccttggatccctcctaaatttacctggaattagatcaactacataggcccagaagagatccacagtaatgtttgtagataaagttggagaaagcaacaatatggtataacaacaagtgaatttgaagactcatttaaaatattgtgttatttataaagtcatttgaagaatattcagcacaaaattaaattacatgaaatagcttgtaatgttctttacaggagtttaaaacgtatagcctacaaagtaccagcagcaaattagcaaag

SEQ ID NO: 138375 - DNA, 562 bp, Homo sapiens
  Payload ID: 7101
  Gene Symbol: GOLT1B
  Gene Name: golgi transport 1B
  ENST ID: ENST00000542194
  CDS Start-End: 72-194
atttctcccgactcagcttcccaccctgggctttccgaggtgctgtcgccgctgtccccaccactgcagccatgatctccttaacggacacgcagaaaattggaatgggattaacaggatttggagtgtttttcctgttctttggaatgattctcttttttgacaaagcactactggctattggaaatgaatgaaacctgtcagctttctgtttaaataaaaggttttatttgtagccggcttggcttttgtaattggtttagaaagaacattcagattcttcttccaaaaacataaaatgaaagctacaggtttttttctgggtggtgtatttgtagtccttattggttggcctttgataggcatgatcttcgaaatttatggattttttctcttgttcaggggcttctttcctgtcgttgttggctttattagaagagtgccagtccttggatccctcctaaatttacctggaattagatcatttgtagataaagttggagaaagcaacaatatggtataacaacaagtgaatttgaagactcatttaaaatattgtgtt

SEQ ID NO: 138376 - DNA, 933 bp, Homo sapiens
  Payload ID: 7101
  Gene Symbol: GOLT1B
  Gene Name: golgi transport 1B
  ENST ID: ENST00000542038
  CDS Start-End: 232-456
agggtggctgcgtgtttccggaagacgtggcggctctcgcctgggctgtttcccggcttcatttctcccgactcagcttcccaccctgggctttccgaggtgctgtcgccgctgtccccaccactgcagccatgatctccttaacggacacgcagagttttatttgtagccggcttggcttttgtaattggtttagaaagaacattcagattcttcttccaaaaacataaaatgaaagctacaggtttttttctgggtggtgtatttgtagtccttattggttggcctttgataggcatgatcttcgaaatttatggattttttctcttgttcaggggcttctttcctgtcgttgttggctttattagaagagtgccagtccttggatccctcctaaatttacctggaattagatcatttgtagataaagttggagaaagcaacaatatggtataacaacaagtgaatttgaagactcatttaaaatattgtgttatttataaagtcatttgaagaatattcagcacaaaattaaattacatgaaatagcttgtaatgttctttacaggagtttaaaacgtatagcctacaaagtaccagcagcaaattagcaaagaagcagtgaaaacaggcttctactcaagtgaactaagaagaagtcagcaagcaaactgagagaggtgaaatccatgttaatgatgcttaagaaactcttgaaggctatttgtgttgtttttccacaatgtgcgaaactcagccatccttagagaactgtggtgcctgtttcttttctttttattttgaaggctcaggagcatccataggcatttgctttttagaaatgtccactgcaatggcaaaaatatttccagttgcactgtatctctggaagtgatgcatgaattcgattggattgtgtcattttaaagtatt

SEQ ID NO: 138377 - DNA, 1210 bp, Homo sapiens
  Payload ID: 7101
  Gene Symbol: GOLT1B
  Gene Name: golgi transport 1B
  ENST ID: ENST00000539025
  CDS Start-End: 96-224
tcgcctgggctgtttcccggcttcatttctcccgactcagcttcccaccctgggctttccgaggtgctgtcgccgctgtccccaccactgcagccatgatctccttaacggacacgcagaaaattggaatgggattaacaggatttggagtgtttttcctgttctttggaatgattctcttttttgacaaagcactactggctattggaaataaactcctgtagcctatgatgaatatttcagaaccaagaggaatacccttgggtgacatatttatgggcagctttcctctttatgccttgccaactcatctgcttgactaagccttcctcatccagctaaaactaggaaaactactgcagacacagatgccccttggttttatttgtagccggcttggcttttgtaattggtttagaaagaacattcagattcttcttccaaaaacataaaatgaaagctacaggtttttttctgggtggtgtatttgtagtccttattggttggcctttgataggcatgatcttcgaaatttatggattttttctcttgttcaggggcttctttcctgtcgttgttggctttattagaagagtgccagtccttggatccctcctaaatttacctggaattagatcatttgtagataaagttggagaaagcaacaatatggtataacaacaagtgaatttgaagactcatttaaaatattgtgttatttataaagtcatttgaagaatattcagcacaaaattaaattacatgaaatagcttgtaatgttctttacaggagtttaaaacgtatagcctacaaagtaccagcagcaaattagcaaagaagcagtgaaaacaggcttctactcaagtgaactaagaagaagtcagcaagcaaactgagagaggtgaaatccatgttaatgatgcttaagaaactcttgaaggctatttgtgttgtttttccacaatgtgcgaaactcagccatccttagagaactgtggtgcctgtttcttttctttttattttgaaggctcaggagcatccataggcatttgctttttagaaatgtccactgcaatggcaaaaatatttccagttgcactgtatctctggaagtgatgcatgaattcgattggattgtgtcattttaaagtattaaaaccaaggaaaccccaattttgatgtatggattacttttttttgtaaacatgg

SEQ ID NO: 138378 - DNA, 223 bp, Homo sapiens
  Payload ID: 7101
  Gene Symbol: GOLT1B
  Gene Name: golgi transport 1B
  ENST ID: ENST00000631252
  CDS Start-End: 95-223
cgcctgggctgtttcccggcttcatttctcccgactcagcttcccaccctgggctttccgaggtgctgtcgccgctgtccccaccactgcagccatgatctccttaacggacacgcagaaaattggaatgggattaacaggatttggagtgtttttcctgttctttggaatgattctcttttttgacaaagcactactggctattggaaataaactcctgtag

SEQ ID NO: 138379 - DNA, 4590 bp, Homo sapiens
  Payload ID: 7102
  Gene Symbol: GOPC
  Gene Name: golgi-associated PDZ and coiled-coil motif containing
  Uniprot ID: Q9HD26
  ENST ID: ENST00000052569
  CDS Start-End: 241-1605
ggggcaggctgggaggtgggactgactgagtcttccgtgtgtcgccgccgttgccgcctcagcttcagcctcgttactcctgcggttctgtgactgtgctgctggcgttaacggcgcgaggtgaagggaggtgacggagtgtgcccgcgcgcgcgggggtcccctcagtcccagcagttcccttcgtgcgcggggggcggcgagggtcttcagcagtcgggagaggcccttgacggcgccatgtcggcgggcggtccatgcccagcagcagccggagggggcccagggggcgcctcctgctccgtgggggcccctggcggggtatccatgttccggtggctggaggtgctggagaaggagttcgacaaagcttttgtggatgtggatctgctcctgggagagatcgatccagaccaagcggacatcacttatgaggggcgacagaagatgaccagcctgagctcctgctttgcacagctttgccacaaagcccagtctgtgtctcaaatcaaccacaagctggaggcacagttggtggatctgaaatctgaactgacagaaacccaagcagagaaagttgttttggagaaagaagtacatgatcagcttttacagctgcactctattcagctgcagcttcatgctaaaactggtcaaagtgctgactctggtaccattaaggcaaaattggaaagagagcttgaggcaaacaaaaaagaaaaaatgaaagaagcacaacttgaagctgaagtgaaattgttgagaaaagagaatgaagcccttcgtagacatatagctgttctccaggctgaagtatatggggcgagactagctgccaagtacttggataaggaactggcaggaagggtccaacagatacaattgctaggacgagatatgaagggacctgctcatgataagctttggaaccaattagaagctgaaatacatttgcatcgtcacaaaactgtgatccgagcctgcagaggacgtaatgacttgaaacgaccaatgcaagcaccaccaggccatgatcaagattccctaaagaaaagccaaggtgttggtccaattagaaaagttctcctccttaaggaagatcatgaaggccttggcatttcaattacaggtgggaaagaacatggtgttccaatcctcatctctgagatccatccggggcaacctgctgatagatgcggagggctgcacgttggggatgctattttggcagtcaacggagttaacctaagggacacaaagcataaagaagctgtaactattctttctcagcagagaggagagattgaatttgaagtagtttatgtggctcctgaagtggattctgatgatgaaaacgtagagtatgaagatgagagtggacatcgttaccgtttgtaccttgatgagttagaaggaggtggtaaccctggtgctagttgcaaagacacaagtggggaaatcaaagtattacaaggatttaataagaaggcagtaactgacacacatgaaaatggagacctgggcactgcaagtgaaactccgctagatgacggtgcttcaaaattagatgatctgcacactctgtatcataaaaaatcttattaaattgaccatatctccagacaagattgttaatcagactattctgaatttggggcactggggaagatggtgacaaagactacaaaatcaggggaggctgtttgttgcctaaatgaaaggcgggtacctcagggcttcatgtgaacaattctcaatgcataaaacaccctgttttctgtggtagaccataattagctattgcatgtaaagcaattttgattttcttgaacttgtaagcaccaaagcatgtgtttcccaaaggggtattactgggctcttaagtaccaaatgaaaccctactgttttacttggttccttttccctttagtaggaggacagtgctaactggaattttataaggagtaccctttaaaatacagagagtaagtgaattcatattttatattctagaatgttaactgtggtatttcagaagacagagcttgactcaatgaattgtagaaatataggcttgacttaatttttgtaactgaaaggctttagacttaaaaaaatttattgtgcatcctaaaatctaaaccaattattaatgatcatttattgtaatgagtttgcatttcagctttattcaatgcagtacaaaatagttttctttaagcagtcttttatcaatcaatgctgcactagaaatagattctcaaaagttactaaacattttactttttttgttttttaaaagaaatgcagatgagtgtaaaacatctgttctcaattatgttgatctgtgtgcgcagtactggagcatttacccattcatgttgagcctcaaatgcttgttttctggggtccacaaaagacagttttatacattttgagttgttcataaagtttgtcttgtgatagtcctggcacttaaagacaaatttttctggtagtaaaagttcagatttattactatgtcatgaaacacagtacattcaaatcaaacggcagttttctttctaagtaaatgatttccagtcatctaaaaggtgggcaagatgagataaagacattttgatacagtaattgttttggttgggttttcatgtcagtttatgtttgactaaagctctcttcatatgcaggtttataaatttgttaggtctgttgtcccatgattaaacatggagtgcctcctctctgatttaatattctgcaggtcattgtaacctgctaggcaaagtcacaacattgcattaaagaggtgatagctttgctaatatcactgttttaaaggacgtacagttaaaggaatattaagtgggagaaagcctacaaggcttttagaatattatcagtatcttcatttctggtattcagatgttatgtgataaaacacattttttttggctttcccagatacactatatatttgttcaagggtaaatctataaaatgtatatactttattttgtggttttgctatttataaatttaatgttttaactgttgctcatttatggtttgttttgggtggtggtgttcatctgtatatcaccatgttaatttgtaatggaagtgcacttcgtagtgtatattgttactgacattaaaatactttatagcattgtctctgagcaaaagctagtatttaattgtacaaatgaataagcaagttacatgttattgtttgctcttgacagggtaggcctcttaaaagaaaaaaaacaacttgttttttctttatgaatcccctatgccaaacacataccttccatgcatgacatgagatctgcaaactggattttagccaccgtatttatttagtcaaaaaaattgtccattgtagcagacccgaaaacctttttgctgtgacatgaaaccatgttattcttatcttcttaaaacacagcctgggatggaatggccatggcatttttttcagagaacatcctttatctgctatgactgaatccttaggaaatgtaagctataaccctttgattttcaagaactaccgaataagtgtatgaagaggtggttttttaaaacttcaagttggaatttttatgaggtcactgtgtaatttgaagaattgtgtgagattgtcatgatataaattccttttaaggactgataaatagaatgaaaagtttccaggtagtttaaaactccacaggtcagtttccttttcattcctgcttcactgtggtttataagcctacgggagagcaccgttgctcagatgctactgtgagcttcctgtccggtgttagaaagtaactagttaaaagttcattttagaatgtatggtttttggggatgaactaagaattagttattagttccaaaggactgagaaccaattttaatattttcacatttataggaaagaaattcatatgtccctgaaacttctaggacaaaaccaaacaagtaaggagggaactgttgcaaagccatttcatcgagaaggggacagaaggagaaatacacacatgtatacacaaacagaatggttgagaaaacgttttaataaaatgtgagggttgtatgtgtgcgtgtatatatttacacttaacctctaaaattctcttctacagtatctctgttatgaatatgatggaaaagcaacattttggtggtgagactattgttaaaataaatttgagaaagacgaaaattttgtgagtcttgataattacaagtcaacagctatcgaaagttagcacagcttgtctgtggtgctgtttttttccccactgcagtggacttatgctgttttcatgtttagaaacaaaaaggtttcatgtgattcatgtgtaagatgcacagtatttgacatcctgattatgtaatccctattccatctatccagtcttacacttatggttggcctcaaatctattgcatttatgataatgtattatatctagttgagtttaatatttttttattagcctgtaaataaagatggcatcttctacattaaaatgatattgatctcatttttttaaataaacattttgtttccttgacgttaaa

SEQ ID NO: 138380 - DNA, 4450 bp, Homo sapiens
  Payload ID: 7102
  Gene Symbol: GOPC
  Gene Name: golgi-associated PDZ and coiled-coil motif containing
  Uniprot ID: Q9HD26
  ENST ID: ENST00000368498
  CDS Start-End: 77-1465
tcagtcccagcagttcccttcgtgcgcggggggcggcgagggtcttcagcagtcgggagaggcccttgacggcgccatgtcggcgggcggtccatgcccagcagcagccggagggggcccagggggcgcctcctgctccgtgggggcccctggcggggtatccatgttccggtggctggaggtgctggagaaggagttcgacaaagcttttgtggatgtggatctgctcctgggagagatcgatccagaccaagcggacatcacttatgaggggcgacagaagatgaccagcctgagctcctgctttgcacagctttgccacaaagcccagtctgtgtctcaaatcaaccacaagctggaggcacagttggtggatctgaaatctgaactgacagaaacccaagcagagaaagttgttttggagaaagaagtacatgatcagcttttacagctgcactctattcagctgcagcttcatgctaaaactggtcaaagtgctgactctggtaccattaaggcaaaattgtctggcccctctgtggaggagctggaaagagagcttgaggcaaacaaaaaagaaaaaatgaaagaagcacaacttgaagctgaagtgaaattgttgagaaaagagaatgaagcccttcgtagacatatagctgttctccaggctgaagtatatggggcgagactagctgccaagtacttggataaggaactggcaggaagggtccaacagatacaattgctaggacgagatatgaagggacctgctcatgataagctttggaaccaattagaagctgaaatacatttgcatcgtcacaaaactgtgatccgagcctgcagaggacgtaatgacttgaaacgaccaatgcaagcaccaccaggccatgatcaagattccctaaagaaaagccaaggtgttggtccaattagaaaagttctcctccttaaggaagatcatgaaggccttggcatttcaattacaggtgggaaagaacatggtgttccaatcctcatctctgagatccatccggggcaacctgctgatagatgcggagggctgcacgttggggatgctattttggcagtcaacggagttaacctaagggacacaaagcataaagaagctgtaactattctttctcagcagagaggagagattgaatttgaagtagtttatgtggctcctgaagtggattctgatgatgaaaacgtagagtatgaagatgagagtggacatcgttaccgtttgtaccttgatgagttagaaggaggtggtaaccctggtgctagttgcaaagacacaagtggggaaatcaaagtattacaaggatttaataagaaggcagtaactgacacacatgaaaatggagacctgggcactgcaagtgaaactccgctagatgacggtgcttcaaaattagatgatctgcacactctgtatcataaaaaatcttattaaattgaccatatctccagacaagattgttaatcagactattctgaatttggggcactggggaagatggtgacaaagactacaaaatcaggggaggctgtttgttgcctaaatgaaaggcgggtacctcagggcttcatgtgaacaattctcaatgcataaaacaccctgttttctgtggtagaccataattagctattgcatgtaaagcaattttgattttcttgaacttgtaagcaccaaagcatgtgtttcccaaaggggtattactgggctcttaagtaccaaatgaaaccctactgttttacttggttccttttccctttagtaggaggacagtgctaactggaattttataaggagtaccctttaaaatacagagagtaagtgaattcatattttatattctagaatgttaactgtggtatttcagaagacagagcttgactcaatgaattgtagaaatataggcttgacttaatttttgtaactgaaaggctttagacttaaaaaaatttattgtgcatcctaaaatctaaaccaattattaatgatcatttattgtaatgagtttgcatttcagctttattcaatgcagtacaaaatagttttctttaagcagtcttttatcaatcaatgctgcactagaaatagattctcaaaagttactaaacattttactttttttgttttttaaaagaaatgcagatgagtgtaaaacatctgttctcaattatgttgatctgtgtgcgcagtactggagcatttacccattcatgttgagcctcaaatgcttgttttctggggtccacaaaagacagttttatacattttgagttgttcataaagtttgtcttgtgatagtcctggcacttaaagacaaatttttctggtagtaaaagttcagatttattactatgtcatgaaacacagtacattcaaatcaaacggcagttttctttctaagtaaatgatttccagtcatctaaaaggtgggcaagatgagataaagacattttgatacagtaattgttttggttgggttttcatgtcagtttatgtttgactaaagctctcttcatatgcaggtttataaatttgttaggtctgttgtcccatgattaaacatggagtgcctcctctctgatttaatattctgcaggtcattgtaacctgctaggcaaagtcacaacattgcattaaagaggtgatagctttgctaatatcactgttttaaaggacgtacagttaaaggaatattaagtgggagaaagcctacaaggcttttagaatattatcagtatcttcatttctggtattcagatgttatgtgataaaacacattttttttggctttcccagatacactatatatttgttcaagggtaaatctataaaatgtatatactttattttgtggttttgctatttataaatttaatgttttaactgttgctcatttatggtttgttttgggtggtggtgttcatctgtatatcaccatgttaatttgtaatggaagtgcacttcgtagtgtatattgttactgacattaaaatactttatagcattgtctctgagcaaaagctagtatttaattgtacaaatgaataagcaagttacatgttattgtttgctcttgacagggtaggcctcttaaaagaaaaaaaacaacttgttttttctttatgaatcccctatgccaaacacataccttccatgcatgacatgagatctgcaaactggattttagccaccgtatttatttagtcaaaaaaattgtccattgtagcagacccgaaaacctttttgctgtgacatgaaaccatgttattcttatcttcttaaaacacagcctgggatggaatggccatggcatttttttcagagaacatcctttatctgctatgactgaatccttaggaaatgtaagctataaccctttgattttcaagaactaccgaataagtgtatgaagaggtggttttttaaaacttcaagttggaatttttatgaggtcactgtgtaatttgaagaattgtgtgagattgtcatgatataaattccttttaaggactgataaatagaatgaaaagtttccaggtagtttaaaactccacaggtcagtttccttttcattcctgcttcactgtggtttataagcctacgggagagcaccgttgctcagatgctactgtgagcttcctgtccggtgttagaaagtaactagttaaaagttcattttagaatgtatggtttttggggatgaactaagaattagttattagttccaaaggactgagaaccaattttaatattttcacatttataggaaagaaattcatatgtccctgaaacttctaggacaaaaccaaacaagtaaggagggaactgttgcaaagccatttcatcgagaaggggacagaaggagaaatacacacatgtatacacaaacagaatggttgagaaaacgttttaataaaatgtgagggttgtatgtgtgcgtgtatatatttacacttaacctctaaaattctcttctacagtatctctgttatgaatatgatggaaaagcaacattttggtggtgagactattgttaaaataaatttgagaaagacgaaaattttgtgagtcttgataattacaagtcaacagctatcgaaagttagcacagcttgtctgtggtgctgtttttttccccactgcagtggacttatgctgttttcatgtttagaaacaaaaaggtttcatgtgattcatgtgtaagatgcacagtatttgacatcctgattatgtaatccctattccatctatccagtcttacacttatggttggcctcaaatctattgcatttatgataatgtattatatctagttgagtttaatatttttttattagcctgtaaataaagatggcatcttctacattaaaatgatattgatctcatttttttaaataaacattttgtttccttgacgttaaa

SEQ ID NO: 138381 - DNA, 4460 bp, Homo sapiens
  Payload ID: 7102
  Gene Symbol: GOPC
  Gene Name: golgi-associated PDZ and coiled-coil motif containing
  ENST ID: ENST00000535237
  CDS Start-End: 255-1478
acgcatgcgcagcgggggcaggctgggaggtgggactgactgagtcttccgtgtgtcgccgccgttgccgcctcagcttcagcctcgttactcctgcggttctgtgactgtgctgctggcgttaacggcgcgaggtgaagggaggtgacggagtgtgcccgcgcgcgcgggggtcccctcagtcccagcagttcccttcgtgcgcggggggcggcgagggtcttcagcagtcgggagaggcccttgacggcgccatgtcggcgggcggtccatgcccagcagcagccggagggggcccagggggcgcctcctgctccgtgggggcccctggcggggtatccatgttccggtggctggaggtgctggagaaggagttcgacaaagcttttgtggatgtggatctgctcctgggagagatcgatccagaccaagcggacatcacttatgaggggcgacagaagatgaccagcctgagctcctgctttgcacagctttgccacaaagcccagtctgtgtctcaaatcaaccacaagctggaggcacagttggtggatctgaaatctgaactgacagaaacccaagcagagaaagttgttttggagaaagaagtacatgatcagcttttacagctgcactctattcagctgcagcttcatgctaaaactggtcaaagtgctgactctggtaccattaaggcaaaattgtctggcccctctgtggaggagctggaaagagagcttgaggcaaacaaaaaagaaaaaatgaaagaagcacaacttgaagctgaagtgaaattgttgagaaaagagaatgaagcccttcgtagacatatagctgttctccaggctgaagtatatggggcgagactagctgccaagtacttggataaggaactggcaggaagggtccaacagatacaattgctaggacgagatatgaagggacctgctcatgataagctttggaaccaattagaagctgaaatacatttgcatcgtcacaaaactgtgatccgagcctgcagaggacgtaatgacttgaaacgaccaatgcaagcaccaccaggccatgatcaagattccctaaagaaaagccaaggtgttggtccaattagaaaagttctcctccttaaggaagatcatgaaggccttggcatttcaattacaagaggagagattgaatttgaagtagtttatgtggctcctgaagtggattctgatgatgaaaacgtagagtatgaagatgagagtggacatcgttaccgtttgtaccttgatgagttagaaggaggtggtaaccctggtgctagttgcaaagacacaagtggggaaatcaaagtattacaaggatttaataagaaggcagtaactgacacacatgaaaatggagacctgggcactgcaagtgaaactccgctagatgacggtgcttcaaaattagatgatctgcacactctgtatcataaaaaatcttattaaattgaccatatctccagacaagattgttaatcagactattctgaatttggggcactggggaagatggtgacaaagactacaaaatcaggggaggctgtttgttgcctaaatgaaaggcgggtacctcagggcttcatgtgaacaattctcaatgcataaaacaccctgttttctgtggtagaccataattagctattgcatgtaaagcaattttgattttcttgaacttgtaagcaccaaagcatgtgtttcccaaaggggtattactgggctcttaagtaccaaatgaaaccctactgttttacttggttccttttccctttagtaggaggacagtgctaactggaattttataaggagtaccctttaaaatacagagagtaagtgaattcatattttatattctagaatgttaactgtggtatttcagaagacagagcttgactcaatgaattgtagaaatataggcttgacttaatttttgtaactgaaaggctttagacttaaaaaaatttattgtgcatcctaaaatctaaaccaattattaatgatcatttattgtaatgagtttgcatttcagctttattcaatgcagtacaaaatagttttctttaagcagtcttttatcaatcaatgctgcactagaaatagattctcaaaagttactaaacattttactttttttgttttttaaaagaaatgcagatgagtgtaaaacatctgttctcaattatgttgatctgtgtgcgcagtactggagcatttacccattcatgttgagcctcaaatgcttgttttctggggtccacaaaagacagttttatacattttgagttgttcataaagtttgtcttgtgatagtcctggcacttaaagacaaatttttctggtagtaaaagttcagatttattactatgtcatgaaacacagtacattcaaatcaaacggcagttttctttctaagtaaatgatttccagtcatctaaaaggtgggcaagatgagataaagacattttgatacagtaattgttttggttgggttttcatgtcagtttatgtttgactaaagctctcttcatatgcaggtttataaatttgttaggtctgttgtcccatgattaaacatggagtgcctcctctctgatttaatattctgcaggtcattgtaacctgctaggcaaagtcacaacattgcattaaagaggtgatagctttgctaatatcactgttttaaaggacgtacagttaaaggaatattaagtgggagaaagcctacaaggcttttagaatattatcagtatcttcatttctggtattcagatgttatgtgataaaacacattttttttggctttcccagatacactatatatttgttcaagggtaaatctataaaatgtatatactttattttgtggttttgctatttataaatttaatgttttaactgttgctcatttatggtttgttttgggtggtggtgttcatctgtatatcaccatgttaatttgtaatggaagtgcacttcgtagtgtatattgttactgacattaaaatactttatagcattgtctctgagcaaaagctagtatttaattgtacaaatgaataagcaagttacatgttattgtttgctcttgacagggtaggcctcttaaaagaaaaaaaacaacttgttttttctttatgaatcccctatgccaaacacataccttccatgcatgacatgagatctgcaaactggattttagccaccgtatttatttagtcaaaaaaattgtccattgtagcagacccgaaaacctttttgctgtgacatgaaaccatgttattcttatcttcttaaaacacagcctgggatggaatggccatggcatttttttcagagaacatcctttatctgctatgactgaatccttaggaaatgtaagctataaccctttgattttcaagaactaccgaataagtgtatgaagaggtggttttttaaaacttcaagttggaatttttatgaggtcactgtgtaatttgaagaattgtgtgagattgtcatgatataaattccttttaaggactgataaatagaatgaaaagtttccaggtagtttaaaactccacaggtcagtttccttttcattcctgcttcactgtggtttataagcctacgggagagcaccgttgctcagatgctactgtgagcttcctgtccggtgttagaaagtaactagttaaaagttcattttagaatgtatggtttttggggatgaactaagaattagttattagttccaaaggactgagaaccaattttaatattttcacatttataggaaagaaattcatatgtccctgaaacttctaggacaaaaccaaacaagtaaggagggaactgttgcaaagccatttcatcgagaaggggacagaaggagaaatacacacatgtatacacaaacagaatggttgagaaaacgttttaataaaatgtgagggttgtatgtgtgcgtgtatatatttacacttaacctctaaaattctcttctacagtatctctgttatgaatatgatggaaaagcaacattttggtggtgagactattgttaaaataaatttgagaaagacgaaaattttgtgagtcttgataattacaagtcaacagctatcgaaagttagcacagcttgtctgtggtgctgtttttttccccactgcagtggacttatgctgttttcatgtttagaaacaaaaaggtttcatgtgattcatgtgtaagatgcacagtatttgacatcctgattatgtaatccctattccatctatccagtcttacacttatggttggcctcaaatctattgcatttatgataatgtattatatctagttgagtttaatatttttttattagcctgtaaataaagatggcatcttctacattaaaatgatattgatctcatttttttaaataaacattttgtttccttgacgtt

SEQ ID NO: 138382 - DNA, 2528 bp, Homo sapiens
  Payload ID: 7103
  Gene Symbol: GGA1
  Gene Name: golgi-associated, gamma adaptin ear containing, ARF binding protein 1
  Uniprot ID: Q9UJY5
  ENST ID: ENST00000325180
  CDS Start-End: 17-1675
tgggggccggtggcggatggagcccgcgatggagccggagactctggaggcgcgaatcaatagagccacgaaccccctgaacaaggagctcgactgggccagcatcaacggcttctgcgagcagctcaacgaggactttgaggggcctccactcgccacccggctgctggcccacaagatccagtccccacaggagtgggaggcgatccaggccttgacggtgctggaaacatgcatgaagagctgcggcaagcggttccacgacgaagtgggcaagttccgctttctcaacgagctcatcaaggtcgtgtctcccaagtatctgggctctcggacatcggagaaggtgaagaacaagatcttggagctcctctacagctggacagtgggcctgcccgaggaggtgaaaatcgcagaggcctaccagatgctaaagaagcaggggattgtaaagtccgaccccaagcttccagatgacactacctttccccttcctcctccacggccgaagaatgtgatctttgaagatgaggagaaatccaagatgctggcccgcctgctgaagagctcccatcccgaagacctccgcgcagccaataagctcatcaaagagatggtgcaggaggaccagaagcggatggagaagatctcgaagagggtgaatgccatcgaggaggtgaacaacaatgtgaaactgctcacggagatggtgatgagccacagccagggcggcgcagcagctggcagcagcgaggacctcatgaaggaactgtaccagcgctgtgagcggatgcggcccacgctcttccgactggcgagtgacacagaggacaatgatgaggccttaggcctcagtgaccccacacccccttcaggcccaagcctggatggtaccggatggaacagcttccagtcgtcggatgccactgagcccccagcccctgctctggcccaggcccccagtatggaaagccgacccccagcgcagacatccctgccagcaagcagcggtctggacgacctagacctcctggggaagaccctcctgcagcagtcgctgcccccggaatcccagcaagtgcggtgggagaagcagcagccaaccccccggctcacactccgggacctgcagaataagagcagcagctgcagctcccccagctccagcgccaccagccttctccacaccgtgtccccagagccccccaggcctccgcagcagcccgtaccaaccgagctctcactggccagcatcactgtgcccctggagtccatcaaacccagcaacatcctgcccgtgactgtgtatgaccagcacggcttccgcatcctcttccattttgcccgggacccactgccagggcgctccgacgtgctggtggtggtggtttccatgctgagcaccgccccccagcccatccgcaacatcgtgttccagtcagctgtccccaaggttatgaaggtgaagctgcagccaccctcgggcacggagctgccagcttttaaccccatcgtccacccctcagcaatcacccaggtcctgctgcttgccaacccccagaaggagaaggttcgcctccgctacaagctcaccttcaccatgggtgaccagacctacaacgagatgggggatgtggaccagttccccccacctgaaacctggggtagcctctagaacagaggggctggggagaggaaggggcagagggaccggtcactgtccagcctggagggaggcattggtggccaaggacaccctttgttgcccatggccattcacccccaggcctggtgcttctccccacacccctgtaggcctcaagtgactcttccccctcctgctccggccccgcccctgctgagccaaacccagtaggaggctgggcctgggtttgtgccgctggggtctccatcaccgggacctggagagggaggggctgtgtagccttggaagaacttgggtcatggggaggaagcacagctgttggggaagggccaggacctcaggcccagccccaaccccagctggggtggggtcttccccacctgtctcttatgccttatgggaaggcccagccataactcgggggccatgctggagctggggaccagcttaggcctcctccataggaacccagtgactggggggtgacgcctacacccccagctatttgcactctggtgtgtggtttgactctgcttttcttccggattggccctgtggtcacagcctcagggggccaggctgggggaacctcacctggcccgtactcctgggggtttccctttgccattgggccccctgagggactgtgggggctcaagggtaatgccagaggcccatggccccagcgaggggctgtggggcacctagagttctcggtgtgtctccttcattcattggcctctgctggggcctcctatgggtgtcttacgtctgtccatccatctgtccgtggtcagaagtggggtcagtgtgtgagtgagagcaggagtatttatgaaaataaaacgtcgtttttcctgga

SEQ ID NO: 138383 - DNA, 3159 bp, Homo sapiens
  Payload ID: 7103
  Gene Symbol: GGA1
  Gene Name: golgi-associated, gamma adaptin ear containing, ARF binding protein 1
  Uniprot ID: Q9UJY5
  ENST ID: ENST00000343632
  CDS Start-End: 387-2306
gaagtggcctcagagcccctcagcaacatgcccgcagagaattcttccggaggcggtcacagacatctccgtgacgcagaacgagttagagcgtcccttggggtttccatggtgctgcccttagcctgcagtatctccacttcctctcccgcctgagcgccgggaacggaaaagcaggcggccggtcccagctgcgacgtagacgccgcgtgggggtggggttgggcgagtaggtgacgctctaggcgagctcgttggcctctctatggtgccgagcgcgcccgttcggacgttgcccctttaatcggcagagggcggtgcccaggaggtcccgcgagagctgcggggggcgggggggcggtgccgaggctgggggccggtggcggatggagcccgcgatggagccggagactctggaggcgcgaatcaatagagccacgaaccccctgaacaaggagctcgactgggccagcatcaacggcttctgcgagcagctcaacgaggactttgaggggcctccactcgccacccggctgctggcccacaagatccagtccccacaggagtgggaggcgatccaggccttgacggtgctggaaacatgcatgaagagctgcggcaagcggttccacgacgaagtgggcaagttccgctttctcaacgagctcatcaaggtcgtgtctcccaagtatctgggctctcggacatcggagaaggtgaagaacaagatcttggagctcctctacagctggacagtgggcctgcccgaggaggtgaaaatcgcagaggcctaccagatgctaaagaagcaggggattgtaaagtccgaccccaagcttccagatgacactacctttccccttcctcctccacggccgaagaatgtgatctttgaagatgaggagaaatccaagatgctggcccgcctgctgaagagctcccatcccgaagacctccgcgcagccaataagctcatcaaagagatggtgcaggaggaccagaagcggatggagaagatctcgaagagggtgaatgccatcgaggaggtgaacaacaatgtgaaactgctcacggagatggtgatgagccacagccagggcggcgcagcagctggcagcagcgaggacctcatgaaggaactgtaccagcgctgtgagcggatgcggcccacgctcttccgactggcgagtgacacagaggacaatgatgaggccttagcggagatcctgcaggccaatgacaacctcacccaggtgatcaacctgtataagcagctggtgcggggtgaggaggtcaacggtgatgccacagccggctccatccctgggagcacctcggccctgctggatctctcaggcctggatctcccgcctgcgggcaccacctacccagctatgcccacccgccctggcgagcaggccagccctgagcagcccagtgcctcagtttccctgcttgacgacgagctcatgtctctgggcctcagtgaccccacacccccttcaggcccaagcctggatggtaccggatggaacagcttccagtcgtcggatgccactgagcccccagcccctgctctggcccaggcccccagtatggaaagccgacccccagcgcagacatccctgccagcaagcagcggtctggacgacctagacctcctggggaagaccctcctgcagcagtcgctgcccccggaatcccagcaagtgcggtgggagaagcagcagccaaccccccggctcacactccgggacctgcagaataagagcagcagctgcagctcccccagctccagcgccaccagccttctccacaccgtgtccccagagccccccaggcctccgcagcagcccgtaccaaccgagctctcactggccagcatcactgtgcccctggagtccatcaaacccagcaacatcctgcccgtgactgtgtatgaccagcacggcttccgcatcctcttccattttgcccgggacccactgccagggcgctccgacgtgctggtggtggtggtttccatgctgagcaccgccccccagcccatccgcaacatcgtgttccagtcagctgtccccaaggttatgaaggtgaagctgcagccaccctcgggcacggagctgccagcttttaaccccatcgtccacccctcagcaatcacccaggtcctgctgcttgccaacccccagaaggagaaggttcgcctccgctacaagctcaccttcaccatgggtgaccagacctacaacgagatgggggatgtggaccagttccccccacctgaaacctggggtagcctctagaacagaggggctggggagaggaaggggcagagggaccggtcactgtccagcctggagggaggcattggtggccaaggacaccctttgttgcccatggccattcacccccaggcctggtgcttctccccacacccctgtaggcctcaagtgactcttccccctcctgctccggccccgcccctgctgagccaaacccagtaggaggctgggcctgggtttgtgccgctggggtctccatcaccgggacctggagagggaggggctgtgtagccttggaagaacttgggtcatggggaggaagcacagctgttggggaagggccaggacctcaggcccagccccaaccccagctggggtggggtcttccccacctgtctcttatgccttatgggaaggcccagccataactcgggggccatgctggagctggggaccagcttaggcctcctccataggaacccagtgactggggggtgacgcctacacccccagctatttgcactctggtgtgtggtttgactctgcttttcttccggattggccctgtggtcacagcctcagggggccaggctgggggaacctcacctggcccgtactcctgggggtttccctttgccattgggccccctgagggactgtgggggctcaagggtaatgccagaggcccatggccccagcgaggggctgtggggcacctagagttctcggtgtgtctccttcattcattggcctctgctggggcctcctatgggtgtcttacgtctgtccatccatctgtccgtggtcagaagtggggtcagtgtgtgagtgagagcaggagtatttatgaaaataaaacgtcgtttttcctgga

SEQ ID NO: 138384 - DNA, 2107 bp, Homo sapiens
  Payload ID: 7103
  Gene Symbol: GGA1
  Gene Name: golgi-associated, gamma adaptin ear containing, ARF binding protein 1
  Uniprot ID: Q9UJY5
  ENST ID: ENST00000381756
  CDS Start-End: 137-2107
ctcgttggcctctctatggtgccgagcgcgcccgttcggacgttgcccctttaatcggcagagggcggtgcccaggaggtcccgcgagagctgcggggggcgggggggcggtgccgaggctgggggccggtggcggatggagcccgcgatggagccggagactctggaggcgcgaatcaatagagccacgaaccccctgaacaaggagctcgactgggccagcatcaacggcttctgcgagcagctcaacgaggactttgaggggcctccactcgccacccggctgctggcccacaagatccagtccccacaggagtgggaggcgatccaggccttgacggtgagaaggggagaggccaccatccgtcccccgccatgtgacgacaccaaggtgctggaaacatgcatgaagagctgcggcaagcggttccacgacgaagtgggcaagttccgctttctcaacgagctcatcaaggtcgtgtctcccaagtatctgggctctcggacatcggagaaggtgaagaacaagatcttggagctcctctacagctggacagtgggcctgcccgaggaggtgaaaatcgcagaggcctaccagatgctaaagaagcaggggattgtaaagtccgaccccaagcttccagatgacactacctttccccttcctcctccacggccgaagaatgtgatctttgaagatgaggagaaatccaagatgctggcccgcctgctgaagagctcccatcccgaagacctccgcgcagccaataagctcatcaaagagatggtgcaggaggaccagaagcggatggagaagatctcgaagagggtgaatgccatcgaggaggtgaacaacaatgtgaaactgctcacggagatggtgatgagccacagccagggcggcgcagcagctggcagcagcgaggacctcatgaaggaactgtaccagcgctgtgagcggatgcggcccacgctcttccgactggcgagtgacacagaggacaatgatgaggccttagcggagatcctgcaggccaatgacaacctcacccaggtgatcaacctgtataagcagctggtgcggggtgaggaggtcaacggtgatgccacagccggctccatccctgggagcacctcggccctgctggatctctcaggcctggatctcccgcctgcgggcaccacctacccagctatgcccacccgccctggcgagcaggccagccctgagcagcccagtgcctcagtttccctgcttgacgacgagctcatgtctctgggcctcagtgaccccacacccccttcaggcccaagcctggatggtaccggatggaacagcttccagtcgtcggatgccactgagcccccagcccctgctctggcccaggcccccagtatggaaagccgacccccagcgcagacatccctgccagcaagcagcggtctggacgacctagacctcctggggaagaccctcctgcagcagtcgctgcccccggaatcccagcaagtgcggtgggagaagcagcagccaaccccccggctcacactccgggacctgcagaataagagcagcagctgcagctcccccagctccagcgccaccagccttctccacaccgtgtccccagagccccccaggcctccgcagcagcccgtaccaaccgagctctcactggccagcatcactgtgcccctggagtccatcaaacccagcaacatcctgcccgtgactgtgtatgaccagcacggcttccgcatcctcttccattttgcccgggacccactgccagggcgctccgacgtgctggtggtggtggtttccatgctgagcaccgccccccagcccatccgcaacatcgtgttccagtcagctgtccccaaggttatgaaggtgaagctgcagccaccctcgggcacggagctgccagcttttaaccccatcgtccacccctcagcaatcacccaggtcctgctgcttgccaacccccagaaggagaaggttcgcctccgctacaagctcaccttcaccatgggtgaccagacctacaacgagatgggggatgtggaccagttccccccacctgaaacctggggtagcctctag

SEQ ID NO: 138385 - DNA, 575 bp, Homo sapiens
  Payload ID: 7103
  Gene Symbol: GGA1
  Gene Name: golgi-associated, gamma adaptin ear containing, ARF binding protein 1
  ENST ID: ENST00000405147
  CDS Start-End: 28-345
ggtgccgaggctgggggccggtggcggatggagcccgcgatggagccggagactctggaggcgcgaatcaatagagccacgaaccccctgaacaaggagctcgactgggccagcatcaacggcttctgcgagcagctcaacgaggactttgaggggcctccactcgccacccggctgctggcccacaagatccagtccccacaggagtgggaggcgatccaggccttgacggtgctggaaacatgcatgaagagctgcggcaagcggttccacgacgaagtgggcaagttccgctttctcaacgagctcatcaaggtcgtgtctcccaaggggactctgctgtgagagccactttccccagcccagtttgctgctaggagacggagagtaggcccagggcctcccagttccaccctcacccctccctgggcagcctggagacctctggctcctctttcctgggatgtcaaggctaagtccccagagccgactatgagcaggcctgtccctcatgtcagttctgcatcctcaccatggtgccatctagcaggtggggaaacagacactgagggctg

SEQ ID NO: 138386 - DNA, 3205 bp, Homo sapiens
  Payload ID: 7103
  Gene Symbol: GGA1
  Gene Name: golgi-associated, gamma adaptin ear containing, ARF binding protein 1
  Uniprot ID: Q9UJY5
  ENST ID: ENST00000406772
  CDS Start-End: 653-2353
agtcggcccctcagaccctggagcgatggaggaccccggccccggcgcggtccagcggtgggagcgggcgccgcccacctgtcggatccctgggccatgacccctgggacggcgagtgagctgcgccgggaacccccgggacggagagagcagcctccaacccccaaggctcacattgcttcacggagtagcggcccggggaaggagcacgcgagcggttccccggggttgcatctcacacccgggagggagggaccctactattttcaggccccgaatcctccactctctggccctgcatggcgttcctggagcccgtgtggacatgagtggctgggatgcagtgccgtagcaggctgggggacacaaaagagaactgacccagcactgctaccctgggcaggagtagaggattagagaaggggacaccggagccactcccaagggaatgaaggctttctgaacctggtgtgatgatagagccacgaaccccctgaacaaggagctcgactgggccagcatcaacggcttctgcgagcagctcaacgaggactttgaggggcctccactcgccacccggctgctggcccacaagatccagtccccacaggagtgggaggcgatccaggccttgacggtgctggaaacatgcatgaagagctgcggcaagcggttccacgacgaagtgggcaagttccgctttctcaacgagctcatcaaggtcgtgtctcccaagtatctgggctctcggacatcggagaaggtgaagaacaagatcttggagctcctctacagctggacagtgggcctgcccgaggaggtgaaaatcgcagaggcctaccagatgctaaagaagcaggggattgtaaagtccgaccccaagcttccagatgacactacctttccccttcctcctccacggccgaagaatgtgatctttgaagatgaggagaaatccaagatgctggcccgcctgctgaagagctcccatcccgaagacctccgcgcagccaataagctcatcaaagagatggtgcaggaggaccagaagcggatggagaagatctcgaagagggtgaatgccatcgaggaggtgaacaacaatgtgaaactgctcacggagatggtgatgagccacagccagggcggcgcagcagctggcagcagcgaggacctcatgaaggaactgtaccagcgctgtgagcggatgcggcccacgctcttccgactggcgagtgacacagaggacaatgatgaggccttagcggagatcctgcaggccaatgacaacctcacccaggtgatcaacctgtataagcagctggtgcggggtgaggaggtcaacggtgatgccacagccggctccatccctgggagcacctcggccctgctggatctctcaggcctggatctcccgcctgcgggcaccacctacccagctatgcccacccgccctggcgagcaggccagccctgagcagcccagtgcctcagtttccctgcttgacgacgagctcatgtctctgggcctcagtgaccccacacccccttcaggcccaagcctggatggtaccggatggaacagcttccagtcgtcggatgccactgagcccccagcccctgctctggcccaggcccccagtatggaaagccgacccccagcgcagacatccctgccagcaagcagcggtctggacgacctagacctcctggggaagaccctcctgcagcagtcgctgcccccggaatcccagcaagtgcggtgggagaagcagcagccaaccccccggctcacactccgggacctgcagaataagagcagcagctgcagctcccccagctccagcgccaccagccttctccacaccgtgtccccagagccccccaggcctccgcagcagcccgtaccaaccgagctctcactggccagcatcactgtgcccctggagtccatcaaacccagcaacatcctgcccgtgactgtgtatgaccagcacggcttccgcatcctcttccattttgcccgggacccactgccagggcgctccgacgtgctggtggtggtggtttccatgctgagcaccgccccccagcccatccgcaacatcgtgttccagtcagctgtccccaaggttatgaaggtgaagctgcagccaccctcgggcacggagctgccagcttttaaccccatcgtccacccctcagcaatcacccaggtcctgctgcttgccaacccccagaaggagaaggttcgcctccgctacaagctcaccttcaccatgggtgaccagacctacaacgagatgggggatgtggaccagttccccccacctgaaacctggggtagcctctagaacagaggggctggggagaggaaggggcagagggaccggtcactgtccagcctggagggaggcattggtggccaaggacaccctttgttgcccatggccattcacccccaggcctggtgcttctccccacacccctgtaggcctcaagtgactcttccccctcctgctccggccccgcccctgctgagccaaacccagtaggaggctgggcctgggtttgtgccgctggggtctccatcaccgggacctggagagggaggggctgtgtagccttggaagaacttgggtcatggggaggaagcacagctgttggggaagggccaggacctcaggcccagccccaaccccagctggggtggggtcttccccacctgtctcttatgccttatgggaaggcccagccataactcgggggccatgctggagctggggaccagcttaggcctcctccataggaacccagtgactggggggtgacgcctacacccccagctatttgcactctggtgtgtggtttgactctgcttttcttccggattggccctgtggtcacagcctcagggggccaggctgggggaacctcacctggcccgtactcctgggggtttccctttgccattgggccccctgagggactgtgggggctcaagggtaatgccagaggcccatggccccagcgaggggctgtggggcacctagagttctcggtgtgtctccttcattcattggcctctgctggggcctcctatgggtgtcttacgtctgtccatccatctgtccgtggtcagaagtggggtcagtgtgtgagtgagagcaggagtatttatgaaaataaaacgtcgtttttcctgg

SEQ ID NO: 138387 - DNA, 927 bp, Homo sapiens
  Payload ID: 7103
  Gene Symbol: GGA1
  Gene Name: golgi-associated, gamma adaptin ear containing, ARF binding protein 1
  ENST ID: ENST00000449944
  CDS Start-End: 189-927
ggggcacgaggcgggccccttcccggcgggggcggggtacgggtcgccccctcctcacgccccgcccccggcccgggaggggcggtgtcctcagtcggcccctcagaccctggagcgatggaggaccccggccccggcgcggtccagcggtgggagcgggcgccgcccacctgtcggatccctgggccatgacccctgggacggcgaatagagccacgaaccccctgaacaaggagctcgactgggccagcatcaacggcttctgcgagcagctcaacgaggactttgaggggcctccactcgccacccggctgctggcccacaagatccagtccccacaggagtgggaggcgatccaggccttgacggtgctggaaacatgcatgaagagctgcggcaagcggttccacgacgaagtgggcaagttccgctttctcaacgagctcatcaaggtcgtgtctcccaagtatctgggctctcggacatcggagaaggtgaagaacaagatcttggagctcctctacagctggacagtgggcctgcccgaggaggtgaaaatcgcagaggcctaccagatgctaaagaagcaggggattgtaaagtccgaccccaagcttccagatgacactacctttccccttcctcctccacggccgaagaatgtgatctttgaagatgaggagaaatccaagatgctggcccgcctgctgaagagctcccatcccgaagacctccgcgcagccaataagctcatcaaagagatggtgcaggaggaccagaagcggatggagaagatctcgaagagggtgaatgccatcgaggaggtgaacaacaatgtgaaactgctcacggagatggtgatgagccacagccagggcggcgcagcagctggcagcagcgaggacctcatgaaggaactgtaccagc

SEQ ID NO: 138388 - DNA, 483 bp, Homo sapiens
  Payload ID: 7103
  Gene Symbol: GGA1
  Gene Name: golgi-associated, gamma adaptin ear containing, ARF binding protein 1
  ENST ID: ENST00000431745
  CDS Start-End: 431-483
gagcgatggaggaccccggccccggcgcggtccagcggtgggagcgggcgccgcccacctgtcggatccctgggccatgacccctgggacggcgagtgtggacatgagtggctgggatgcagtgccgtagcaggctgggggacacaaaagagaactgacccagcactgctaccctgggcaggagtagaggattagagaaggggacaccggagccactcccaagggaatgaaggctttctgaacctggtgtgatgatagagccacgaaccccctgaacaaggagctcgactgggccagcatcaacggcttctgcgagcagctcaacgaggactttgaggggcctccactcgccacccggctgctggcccacaagatccagtccccacaggagtgggaggcgatccaggccttgacggtgctggaaacatgcatgaagagctgcggcaagcggttccacgacgaagtgggcaagttccgctttct

SEQ ID NO: 138389 - DNA, 661 bp, Homo sapiens
  Payload ID: 7103
  Gene Symbol: GGA1
  Gene Name: golgi-associated, gamma adaptin ear containing, ARF binding protein 1
  ENST ID: ENST00000411501
  CDS Start-End: 540-661
gggccccttcccggcgggggcggggtacgggtcgccccctcctcacgccccgcccccggcccgggaggggcggtgtcctcagtcggcccctcagaccctggagcgatggaggaccccggccccggcgcggtccagcggtgggagcgggcgccgcccacctgtcggatccctgggccatgacccctgggacggcgagggagacaggtgtggacatgagtggctgggatgcagtgccgtagcaggctgggggacacaaaagagaactgacccagcactgctaccctgggcaggagtagaggattagagaaggggacaccggagccactcccaagggaatgaaggctttctgaacctggtgtgatgatagagccacgaaccccctgaacaaggagctcgactgggccagcatcaacggcttctgcgagcagctcaacgaggactttgaggggcctccactcgccacccggctgctggcccacaagatccagtccccacaggagtgggaggcgatccaggccttgacggtgctggaaacatgcatgaagagctgcggcaagcggttccacgacgaagtgggcaagttccgctttctcaacgagctcatcaaggtcgtgtctcccaagtatctgggctctcggacatcggagaaggtgaagaacaa

SEQ ID NO: 138390 - DNA, 946 bp, Homo sapiens
  Payload ID: 7103
  Gene Symbol: GGA1
  Gene Name: golgi-associated, gamma adaptin ear containing, ARF binding protein 1
  ENST ID: ENST00000326597
  CDS Start-End: 833-946
ccaaggtgggcggatcacaaggtcaggagattgagaccatcctggctaacatggtgaaaccctgtctctactaaaaatacaaaaaaaaattagccgggcgtggtggcgggtgcctgtagtcccagctactcgggaggctgaggaaggagaatggcatgaacctgggaggcggagcttgcagtgagccgagatcgtgccactgcactccagcctgggcaacagcgtgagactcgtctcaaaaaaaaaaaaaaatccatatttcattccagctttacaagatggggaaatggaggttcagggaagcatgtaagctagattgttgtttaaccagtattgggggttaaaggggtagctgtctggtcgtgtttacaccacttcatgtagacctgttggccctctttccttgccactatccatttctggattcagtcttccccagaacctcaccctttgcctgccctcagctgactgctcattcatttgccaaggggagacaggtgtggacatgagtggctgggatgcagtgccgtagcaggctgggggacacaaaagagaactgacccagcactgctaccctgggcaggagtagaggattagagaaggggacaccggagccactcccaagggaatgaaggctttctgaacctggtgtgatgatagagccacgaaccccctgaacaaggagctcgactgggccagcatcaacggcttctgcgagcagctcaacgaggactttgaggggcctccactcgccacccggctgctggcccacaagatccagtccccacaggagtgggaggcgatccaggccttgacggtgctggaaacatgcatgaagagctgcggcaagcggttccacgacgaagtgggcaagttccgctttctcaacgagctcatcaaggtcgtgtctcccaagtatctgggctctcggacatcggagaaggtg

SEQ ID NO: 138391 - DNA, 566 bp, Homo sapiens
  Payload ID: 7103
  Gene Symbol: GGA1
  Gene Name: golgi-associated, gamma adaptin ear containing, ARF binding protein 1
  ENST ID: ENST00000429218
  CDS Start-End: 242-566
gtgccgaggctgggggccggtggcggatggagcccgcgatggagccggagactctggaggcgcgaatcaagccacgaaccccctgaacaaggagctcgactgggccagcatcaacggcttctgcgagcagctcaacgaggactttgaggggcctccactcgccacccggctgctggcccacaagatccagtccccacaggagtgggaggcgatccaggccttgacggtgctggaaacatgcatgaagagctgcggcaagcggttccacgacgaagtgggcaagttccgctttctcaacgagctcatcaaggtcgtgtctcccaagtatctgggctctcggacatcggagaaggtgaagaacaagatcttggagctcctctacagctggacagtgggcctgcccgaggaggtgaaaatcgcagaggcctaccagatgctaaagaagcaggggattgtaaagtccgaccccaagcttccagatgacactacctttccccttcctcctccacggccgaagaatgtgatctttgaagatgaggagaaatccaagatgctggcccgcctgc

SEQ ID NO: 138392 - DNA, 568 bp, Homo sapiens
  Payload ID: 7103
  Gene Symbol: GGA1
  Gene Name: golgi-associated, gamma adaptin ear containing, ARF binding protein 1
  ENST ID: ENST00000439161
  CDS Start-End: 390-568
ggaaccggaaccgggggcacgaggcgggccccttcccggcgggggcggggggagacaggtgtggacatgagtggctgggatgcagtgccgtagcaggctgggggacacaaaagagaactgacccagcactgctaccctgggcaggagtagaggattagagaaggggacaccggagccactcccaagggaatgaaggctttctgaacctggtgtgatgagccacgaaccccctgaacaaggagctcgactgggccagcatcaacggcttctgcgagcagctcaacgaggactttgaggggcctccactcgccacccggctgctggcccacaagatccagtccccacaggagtgggaggcgatccaggccttgacggtgctggaaacatgcatgaagagctgcggcaagcggttccacgacgaagtgggcaagttccgctttctcaacgagctcatcaaggtcgtgtctcccaagtatctgggctctcggacatcggagaaggtgaagaacaagatcttggagctcctctacagctggacagtgggcctgcccgaggaggtgaaaatcgc

SEQ ID NO: 138393 - DNA, 565 bp, Homo sapiens
  Payload ID: 7103
  Gene Symbol: GGA1
  Gene Name: golgi-associated, gamma adaptin ear containing, ARF binding protein 1
  ENST ID: ENST00000413251
  CDS Start-End: 240-565
ctctaaaagtggggccctttggagggcagctgtgctcatctgtctgtctacacccacaatcagatagagccacgaaccccctgaacaaggagctcgactgggccagcatcaacggcttctgcgagcagctcaacgaggactttgaggggcctccactcgccacccggctgctggcccacaagatccagtccccacaggagtgggaggcgatccaggccttgacggtgctggaaacatgcatgaagagctgcggcaagcggttccacgacgaagtgggcaagttccgctttctcaacgagctcatcaaggtcgtgtctcccaagtatctgggctctcggacatcggagaaggtgaagaacaagatcttggagctcctctacagctggacagtgggcctgcccgaggaggtgaaaatcgcagaggcctaccagatgctaaagaagcaggggattgtaaagtccgaccccaagcttccagatgacactacctttccccttcctcctccacggccgaagaatgtgatctttgaagatgaggagaaatccaagatgctggcccgcctgct

SEQ ID NO: 138394 - DNA, 577 bp, Homo sapiens
  Payload ID: 7103
  Gene Symbol: GGA1
  Gene Name: golgi-associated, gamma adaptin ear containing, ARF binding protein 1
  ENST ID: ENST00000447515
  CDS Start-End: 494-577
agtcggcccctcagaccctggagcgatggaggaccccggccccggcgcggtccagcggtgggagcgggcgccgcccacctgtcggatccctgggccatgacccctgggacggcgagtgagctgcgccgggaacccccgggacggagagagcagcctccaacccccaaggctcacattgcttcacggagtagcggcccggggaaggagcacgcgagcggttccccggggttgcatctcacacccgggagggagggaccctactattttcaggccccgaatcctccactctctggccctgcatggcgttcctggagcccatagagccacgaaccccctgaacaaggagctcgactgggccagcatcaacggcttctgcgagcagctcaacgaggactttgaggggcctccactcgccacccggctgctggcccacaagatccagtccccacaggagtgggaggcgatccaggccttgacggtgctggaaacatgcatgaagagctgcggcaagcggttccacgacgaagtgggcaagttccgctttctcaacgagctcatcaaggtcgtgtctcccaag

SEQ ID NO: 138395 - DNA, 559 bp, Homo sapiens
  Payload ID: 7103
  Gene Symbol: GGA1
  Gene Name: golgi-associated, gamma adaptin ear containing, ARF binding protein 1
  ENST ID: ENST00000423024
  CDS Start-End: 234-559
gtggaagagcaggaatcccactgccgggccacaatgaccccagctctcctcttccagatagagccacgaaccccctgaacaaggagctcgactgggccagcatcaacggcttctgcgagcagctcaacgaggactttgaggggcctccactcgccacccggctgctggcccacaagatccagtccccacaggagtgggaggcgatccaggccttgacggtgctggaaacatgcatgaagagctgcggcaagcggttccacgacgaagtgggcaagttccgctttctcaacgagctcatcaaggtcgtgtctcccaagtatctgggctctcggacatcggagaaggtgaagaacaagatcttggagctcctctacagctggacagtgggcctgcccgaggaggtgaaaatcgcagaggcctaccagatgctaaagaagcaggggattgtaaagtccgaccccaagcttccagatgacactacctttccccttcctcctccacggccgaagaatgtgatctttgaagatgaggagaaatccaagatgctggcccgcctgct

SEQ ID NO: 138396 - DNA, 639 bp, Homo sapiens
  Payload ID: 7103
  Gene Symbol: GGA1
  Gene Name: golgi-associated, gamma adaptin ear containing, ARF binding protein 1
  ENST ID: ENST00000453208
  CDS Start-End: 428-639
gggcggggtacgggtcgccccctcctcacgccccgcccccggcccgggaggggcggtgtcctcagtcggcccctcagaccctggagcgatggaggaccccggccccggcgcggtccagcggtgggagcgggcgccgcccacctgtcggatccctgggccatgacccctgggacggcgagagtagaggattagagaaggggacaccggagccactcccaagggaatgaaggctttctgaacctggtgtgatgatagagccacgaaccccctgaacaaggagctcgactgggccagcatcaacggcttctgcgagcagctcaacgaggactttgaggggcctccactcgccacccggctgctggcccacaagatccagtccccacaggagtgggaggcgatccaggccttgacggtgctggaaacatgcatgaagagctgcggcaagcggttccacgacgaagtgggcaagttccgctttctcaacgagctcatcaaggtcgtgtctcccaagtatctgggctctcggacatcggagaaggtgaagaacaagatcttggagctcctctacagctggacagtgggcctgcccgaggaggtgaaaatcgcagaggcctaccagatgctaaagaagcaggggat

SEQ ID NO: 138397 - DNA, 5973 bp, Homo sapiens
  Payload ID: 7104
  Gene Symbol: GGA2
  Gene Name: golgi-associated, gamma adaptin ear containing, ARF binding protein 2
  Uniprot ID: Q9UJY4
  ENST ID: ENST00000309859
  CDS Start-End: 84-1925
gcagtcagcagaggagagcgccaggacgctacagcggctgaagaggcagtggcgcccgcggccgcagcgtcggggctggagcgatggcggcgaccgcggtggcggcggctgtggcgggaaccgagtcggcccagggtcccccgggcccggcagcgtcgctggagctgtggctcaacaaagccacagacccaagcatgtcggaacaggattggtcagctatccagaatttctgtgagcaggtgaacactgaccccaatggccccacacatgcgccctggctactggcccacaagatccagtctccgcaagagaaggaagctctttatgccttaacggtgctggagatgtgcatgaaccactgtggggagaagttccacagcgaggtggccaaatttcgtttcctgaacgaactgatcaaagtgttgtccccaaagtacctggggtcctgggccacaggaaaagttaaaggaagagtcattgaaatactcttcagttggacagtctggtttccggaagacatcaagattcgagacgcttatcagatgctgaagaaacaaggaattataaaacaagaccctaaactaccagtggataaaatcttacccccaccatctccctggcccaagagctccatctttgatgctgatgaagaaaagtccaagcttctgacaaggcttctaaagagcaaccaccccgaggaccttcaggctgcaaaccggttaatcaagaatttggtcaaggaggaacaagaaaaatcggagaaggtgtccaagagggtcagtgcggtggaggaagtgcgaagccatgtgaaggtgctgcaggagatgctgagcatgtaccgcaggccagggcaggccccgcccgaccaggaggccctgcaggtcgtgtatgagaggtgtgaaaagctgcggcccacgctgttccggttggcgagtgacaccactgatgacgatgatgcactcgcggaaattctccaggcaaatgacctcctcacccaaggagttctgctgtacaaacaggtgatggagggccgggtcacctttggaaacagagtgaccagctcattgggagacatccctgtctccagagtctttcagaatccagcaggctgcatgaagacctgccccctgattgacttggaggtggacaatggacctgcgcagatggggactgtggtgccatctttgcttcatcaggacctggcagccttgggaatcagtgatgctcctgttacaggcatggtttctggtcagaattgctgtgaggaaaagaggaatccctcctccagcacgctgccaggcggtggtgttcagaacccttctgcagacaggaatttgctggacctcctctcagcacagccagctccgtgccctctgaattatgtttcgcagaaaagtgtccccaaggaagtgccaccaggtactaagtcctctccaggttggtcctgggaggctggcccgttggctccttccccatcttcacagaatacacctctggctcaagtgtttgtccctttggagtctgttaagcccagcagcctgccgcctctcattgtgtatgaccggaatggattcagaattctgctccacttctcccagacgggagcccctgggcacccagaggtacaggtgctgctcttgaccatgatgagcacggctccccagcctgtctgggatatcatgtttcaagtggctgtgccaaagtcaatgagagtgaagctgcagccggcatccagctccaagcttcctgcattcagtcctttgatgcctccagctgtgatatctcagatgctgctgcttgacaatccacacaaagaacctatccgcttacggtacaagctgacattcaaccaaggtggacagcctttcagcgaagtaggagaagtgaaagacttcccagacctggctgtcttgggcgcagcctaacttttcacaagatggacccttcatttcaagcttaggctggcgttacttttgctgtctagtcaggactaatcacggtgtttcagtgcggagtgccaagagtcctatcctgacgtcaggctctgggtgtcaacctctgacttattctgcagatgctctgtgtgtgtgtgtgtgtgtgtgtgtgtgtgtgtgtgtgtgtgtgtgttcggggagagggtggtagcacagggcttgggatatcggcagtgtgggaaatgcgaagcatttctcatcatcatcatctctgctacagtcatgtttctgcatgtcagcgagcgacactgtccctgcctcaggttggaggttttatcagccaaagtgtttttttcatgtatcgttcgttccattcatccactctgtgccttgtcagcctttgaaaggcttggttgctcccaggctgctgttctcagggaccttaaaagggacctggttagtcttggggcagagagtatctacttgggcactctcttccaagaaagaccttgtctccattttcattagacaatgcttcttgtgtgtgttctggaagatcttctaaatggaatgcttgttgcactgttcccaggcgagtggctgccatgagacctgaggaccacacttgggggaccaatcatgtccttcaccactgtgccttagaatcgcccctggacagagttcctgggcagaggggaaagcagctcccaggccttactcaggcctcaggtccatgggttgggcagccagtctgggcccttctcaggatcctcatctccatcctcatcctcttccttcacagcatttacttggagctctttgtgacacaccatgtcagtcatgatgaatcggccaacagccagcccttgccagctgacgtcacagtctaagatgggaaactgtggtacagatagacatgaagagagcttagcagtgattgaggtggtgactaaatatacagtcattgaataaataccatgtagcaagtgtactttgtggagtgttgagtaagtggaaaatggaaagccagttgcatttagagatgataggcctaaagggaactgtcttctgtcgagaagtaaaggaaacttcatgaaggatgtagaagcttagctgcctcagagaagagagaacctgaagatctgaggcaagctggacaggagaggtggatatttgttgatggaagaattcaagtttataatcaattcccacttagcacctactgtgtgctaggaacttgaatgtgtatgtttgacaagtcctgcttggcctgatgggtgggagaaggaacctgagcctggctgagatggctaggcggagggctttgaagtccaagcagctgaactggctgggtgggtttctacctttgaaactgcaagacttgtttggagctcttaattacaatatctgatatttttacagtctgatcttttgacttctacatatagtggaaatctgccaatactaattggtggagatgggaactgtaaaagatcaagtatgctaattttaagcaaatgtaaaaactcataaaacaggtaaacagtggggtgatttcatttgccataattcacataagacgaattttaatctaaaagtactttcttgcttgtattctgtgtggcttttttttgttttttgaggccatatctcactctgtcactcaggctggagtgcggtggtataatctcagctcactgcaatctctgcctaccaggttcaagcgattctcgtgcctcagcctctcgagtagctgggactacaggcgtgagccagcacgcccagctaatttttgtatttttagtagagacaggatttcaccatgttggccaggctggtctcgaactcctgacctcaggtgatccgcctgccttggcctcccagagtgctgggattacaggcgtgagccaccgcacccggcctctgtgtagcttttataggctctgttactgttgcgtagtcttgaagaggtacccatcataatgacagcatctccctctgaagggttttggtcaaaatgggtgaatgagacttatacataaagacaggctttctcccctatagttaggaggtgaactcacacatgtgtacctgaacattcttgcttttgaggagacagactcccagtggtactactatgcttaggtgttggacaggataggggtaggaggagaggaggcaggctgctgtcctgaaagtggctgtggtttatggcatcactcccttctaatcagcaagtccagtggccacttagagcccagctcctacctcttcattcacttaacaagtagttattggctgtgcacagtggctcacgcctataatcccagcattttgggaggctgagtgggatgaccgcttgagcccaggatttcaagtccagcctgggctacatagtgagaccgtgtctctgtttttttaaaagctagttgttgaccagctaccctgagccaggcaccaccctgaaggagcttcttttcctctggggagaagcaaattcatgatgtgtgtgctggagatctggcactcatggccagtgctttccagtatcttgaactcttcgggggtcctgttgacccatttcgtgacctacctccgtgactgctctttttcctctgtctcttaagtgtgatggttttccagagtccaatcctcaggactttcccgtccacacacaggcctggtagtcaggtggctctaaaccattaggtgggttgtagacctctctcaagctgccacctccttgctgtcgccagatcgtatttcagtctgtcaggggttatctgtatctggaggttccactgttgcttcagtctcagttacttagaatggaacccagagtcctgcccctttccacctacatgctcttacttgaaagcacctgagacttattgggtccctgattcctgcttcgtctgtatccgcagagtagttgcatgtcatttggcctgttttctaaataatcccacatcatgtcctccctgcacttacattgccactgctctgatttgggcttttttttttttgggacaatgcctctgtcccaattctgagtaacagctctggttcttgccactaccagagttctctagcaaatctgagcatctgacagggtgaaaaattctgaatggcttcctgatgcctgactttatgggatcaaattcaagttgcacgctggcactcagtgcccttctggtatcatctgccaagaccagggcctgcttcaccacagccacaataaagtcctttcaagccctgataatgccatgttttgtcctaaccttttgctgcagttaattactcttcctattatcttccatgaacttaagactgggcaaaaatgtttccttatctgtgagccactctgaacacaaacaggtcatgaagatagtgttgaaaacaataaatgacaaccaaaagaaaagtgaatattacctagtacaaatagtgtaaattgagacagaaaatgttaaagctagaaagcaagggcaatattctagaatacaaatagtgcttgcctactacaatattaatcccaaatcctttaaatatacccattatagaagatgcttacccagcgtcaagagtataaaagtgggtttgtttgttttcttgagacagggctttgctctgttgcccaggctggagtgcagtggcgtgattgtagctcaatgcagccttgaattcctgtgttcaggcgatcctccggcttcagcctctggagtagctgggactacaggtgcatgctgccacgcccagctaatgttgcagtttttcgtaaagactggatctctgtgttacccaggctggtctcctgggctcaagcagtcctcctgccttgacctcccaaagtgctgggattacaggcatgagccaccatgtcctgaccccagtttgttttaaagccaagcgatgcaccaagatgtttgtgtgcacatctgacagtggtaatctttgggtcagggaattatagataaattttctttaaattttttctgagctttctaaaatcagctgaaaataaaaccttattttttta

SEQ ID NO: 138398 - DNA, 1713 bp, Homo sapiens
  Payload ID: 7104
  Gene Symbol: GGA2
  Gene Name: golgi-associated, gamma adaptin ear containing, ARF binding protein 2
  ENST ID: ENST00000567468
  CDS Start-End: 14-685
cggggctggagcgatggcggcgaccgcggtggcggcggctgtggcgggaaccgagtcggcccagggtcccccgggcccggcagcgtcgctggagctgtggctcaacaaagccacagacccaagcatgtcggaacaggattggtcagctatccagaatttctgtgagcaggtgaacactgaccccaatggccccacacatgcgccctggctactggcccacaagatccagtctccgcaagagaaggaagctctttatgccttaacggtgctggagatgtgcatgaaccactgtggggagaagttccacagcgaggtggccaaatttcgtttcctgaacgaactgatcaaagtgttgtccccaaagtacctggggtcctgggccacaggaaaagttaaaggaagagtcattgaaatactcttcagttggacagtctggtttccggaagacatcaagattcgagacgcttatcagatgctgaagaaacaaggaattataaaacaagaccctaaactaccagtggataaaatcttacccccaccatctccctggcccaagagctccatctttgatgctgatgaagaaaagtccaagcttctgacaaggcttctaaagagcaaccaccccgaggaccttcaggctgctgtcctgaaagtggctgtggtttatggcatcactcccttctaatcagcaagtccagtggccacttagagcccagctcctacctcttcattcacttaacaagtagttattggctgtgcacagtggctcacgcctataatcccagcattttgggaggctgagtgggatgaccgcttgagcccaggatttcaagtccagcctgggctacatagtgagaccgtgtctctgtttttttaaaagctagttgttgaccagctaccctgagccaggcaccaccctgaaggagcttcttttcctctggggagaagcaaattcatgatgtgtgtgctggagatctggcactcatggccagtgctttccagtatcttgaactcttcgggggtcctgttgacccatttcgtgacctacctccgtgactgctctttttcctctgtctcttaagtgtgatggttttccagagtccaatcctcaggactttcccgtccacacacaggcctggtagtcaggtggctctaaaccattaggtgggttgtagacctctctcaagctgccacctccttgctgtcgccagatcgtatttcagtctgtcaggggttatctgtatctggaggttccactgttgcttcagtctcagttacttagaatggaacccagagtcctgcccctttccacctacatgctcttacttgaaagcacctgagacttattgggtccctgattcctgcttcgtctgtatccgcagagtagttgcatgtcatttggcctgttttctaaataatcccacatcatgtcctccctgcacttacattgccactgctctgatttgggcttttttttttttgggacaatgcctctgtcccaattctgagtaacagctctggttcttgccactaccagagttctctagcaaatctgagcatctgacagggtgaaaaattctgaatggcttcctgatgcctgactttatgggatcaaattcaagttgcacgctggcactcagtgcccttctggtatcatctgccaagaccagggcctgcttcaccacagccacaataaagtcctttcaagccctg

SEQ ID NO: 138399 - DNA, 563 bp, Homo sapiens
  Payload ID: 7104
  Gene Symbol: GGA2
  Gene Name: golgi-associated, gamma adaptin ear containing, ARF binding protein 2
  ENST ID: ENST00000570111
  CDS Start-End: 54-233
acagcggctgaagaggcagtggcgcccgcggccgcagcgtcggggctggagcgatggcggcgaccgcggtggcggcggctgtggcgggaaccgagtcggcccagggtcccccgggcccggcagcgtcgctggagctgtggctcaacaaagccacagacccaagcatgtcggaacaggattggtcagctatccagaatttctgtgagcaggtgaacactgaccccaatgggtaagccccacacatgcgccctggctactggcccacaagatccagtctccgcaagagaaggaagctctttatgccttaacggtgctggagatgtgcatgaaccactgtggggagaagttccacagcgaggtggccaaatttcgtttcctgaacgaactgatcaaagtgttgtccccaaagtacctggggtcctgggccacaggaaaagttaaaggaagagtcattgaaatactcttcagttggacagtctggtttccggaagacatcaagattcgagacgcttatcagatgctgaagaaacaaggaattataaaacaagaccctaaactaccag

SEQ ID NO: 138400 - DNA, 366 bp, Homo sapiens
  Payload ID: 7104
  Gene Symbol: GGA2
  Gene Name: golgi-associated, gamma adaptin ear containing, ARF binding protein 2
  ENST ID: ENST00000563047
  CDS Start-End: 14-163
cggggctggagcgatggcggcgaccgcggtggcggcggctgtggcgggaaccgagtcggcccagggtcccccgggcccggcagcgtcgctggagctgtggctcagtgaccacagacccaagcatgtcggaacaggattggtcagctatccagaatttctgtgagcaggtgaacactgaccccaatggccccacacatgcgccctggctactggcccacaagatccagtctccgcaagagaaggaagctctttatgccttaacggtgagtgctggagatgtgcatgaaccactgtggggagaagttccacagcgaggtggccaaatttcgtttcctgaacgaactgatcaaagtgttgtccccaaag

SEQ ID NO: 138401 - DNA, 572 bp, Homo sapiens
  Payload ID: 7104
  Gene Symbol: GGA2
  Gene Name: golgi-associated, gamma adaptin ear containing, ARF binding protein 2
  ENST ID: ENST00000569300
  CDS Start-End: 196-572
ttttctgttacagatatggaaaccgaggttctgaaaagttaactaaaacttccgaggttatagtacgaggcaaaaccaagatttaaactcagatctgtgccgatccagagtccaagcttaactctgatctactgagtgttgtcagagcatctgtttctaagacattaagaatggttaaaaggagcttcttggctcatggtcaagctgcctttctctttatctctgcagttggccaacagctgccctagccctgaagacaaagccacagacccaagcatgtcggaacaggattggtcagctatccagaatttctgtgagcaggtgaacactgaccccaatggccccacacatgcgccctggctactggcccacaagatccagtctccgcaagagaaggaagctctttatgccttaacggtgctggagatgtgcatgaaccactgtggggagaagttccacagcgaggtggccaaatttcgtttcctgaacgaactgatcaaagtgttgtccccaaagtacctggggtcctgggccacaggaaaagttaaaggaagagtcattgaaatactctt

SEQ ID NO: 138402 - DNA, 553 bp, Homo sapiens
  Payload ID: 7104
  Gene Symbol: GGA2
  Gene Name: golgi-associated, gamma adaptin ear containing, ARF binding protein 2
  ENST ID: ENST00000563494
  CDS Start-End: 82-261
agtcagcagaggagagcgccaggacgctacagcggctgaagaggcagtggcgcccgcggccgcagcgtcggggctggagcgatggcggcgaccgcggtggcggcggctgtggcgggaaccgagtcggcccagggtcccccgggcccggcagcgtcgctggagctgtggctcaacaaagccacagacccaagcatgtcggaacaggattggtcagctatccagaatttctgtgagcaggtgaacactgaccccaatgggtaagccccacacatgcgccctggctactggcccacaagatccagtctccgcaagagaaggaagctctttatgccttaacggtgctggagatgtgcatgaaccactgtggggagaagttccacagcgaggtggccaaatttcgtttcctgaacgaactgatcaaagtgttgtccccaaagtacctggggtcctgggccacaggaaaagttaaaggaagagtcattgaaatactcttcagttggacagtctggtttccggaagacatcaagattcgagacgcttatcagatgctgaa

SEQ ID NO: 138403 - DNA, 387 bp, Homo sapiens
  Payload ID: 7104
  Gene Symbol: GGA2
  Gene Name: golgi-associated, gamma adaptin ear containing, ARF binding protein 2
  ENST ID: ENST00000562117
  CDS Start-End: 1-387
cggctgtggcgggaaccgagtcggcccagggtcccccgggcccggcagcgtcgctggagctgtggctcaacaaagccacagacccaagcatgtcggaacaggattggtcagctatccagaatttctgtgagcaggtgaacactgaccccaatggccccacacatgcgccctggctactggcccacaagatccagtctccgcaagagaaggaagctctttatgccttaacgtgtcctcataggcttgaggcagggttagccttggttccagcgcagtctccagcaagtgattaccagcctggaggggagcctgggaccactggctttccaccttctcctgggggtcctgtgtctgtgcaggtgctggagatgtgcatgaaccactgtg

SEQ ID NO: 138404 - DNA, 388 bp, Homo sapiens
  Payload ID: 7104
  Gene Symbol: GGA2
  Gene Name: golgi-associated, gamma adaptin ear containing, ARF binding protein 2
  ENST ID: ENST00000562944
  CDS Start-End: 38-388
cagtggcgcccgcggccgcagcgtcggggctggagcgatggcggcgaccgcggtggcggcggctgtggcgggaaccgagtcggcccagggtcccccgggcccggcagcgtcgctggagctgtggctcaacaaagccacagacccaagcatgtcggaacaggattggtcagctatccagaatttctgtgagcaggtgaacactgaccccaatggccccacacatgcgccctggctactggcccacaagatccagtctccgcaagagaaggaagctctttatgccttaacgcctggaggggagcctgggaccactggctttccaccttctcctgggggtcctgtgtctgtgcaggtgctggagatgtgcatgaaccactgtggggagaag

SEQ ID NO: 138405 - DNA, 586 bp, Homo sapiens
  Payload ID: 7104
  Gene Symbol: GGA2
  Gene Name: golgi-associated, gamma adaptin ear containing, ARF binding protein 2
  ENST ID: ENST00000569189
  CDS Start-End: 78-257
agcagaggagagcgccaggacgctacagcggctgaagaggcagtggcgcccgcggccgcagcgtcggggctggagcgatggcggcgaccgcggtggcggcggctgtggcgggaaccgagtcggcccagggtcccccgggcccggcagcgtcgctggagctgtggctcaacaaagccacagacccaagcatgtcggaacaggattggtcagctatccagaatttctgtgagcaggtgaacactgaccccaatgggtaagccccacacatgcgccctggctactggcccacaagatccagtctccgcaagagaaggaagctctttatgccttaacgtgtcctcataggcttgaggcagggttagccttggttccagcgcagtctccagcaagtgattaccagcctggaggggagcctgggaccactggctttccaccttctcctgggggtcctgtgtctgtgcaggtgctggagatgtgcatgaaccactgtggggagaagttccacagcgaggtggccaaatttcgtttcctgaacgaactgatcaaagtgttgtccccaaagtacctggggtcctgggccacagga

SEQ ID NO: 138406 - DNA, 4069 bp, Homo sapiens
  Payload ID: 7105
  Gene Symbol: GGA3
  Gene Name: golgi-associated, gamma adaptin ear containing, ARF binding protein 3
  Uniprot ID: Q9NZ52
  ENST ID: ENST00000537686
  CDS Start-End: 218-2389
gcgtttctctccactgatctggacgttagagtttttcactccggggtccaaaggggagcgccaaaaggaaacccttgccctccctgtatccgtcgcagtctggcgcggccctcggtgacggcactcactcctctcaggaccccatgcaggccccgccccgtctcagctcgtgcagactctcgcgagttttgaagccgcggggccgggcggctgcaatatggcggaggcggaaggggaaagcctggagtcctggctcaataaagccaccaatccttccaaccgccaggaggactgggaatacataattggcttctgtgatcagatcaacaaggagctggaagggccacagatcgccgtccgactgctggcccacaagatccagtccccacaggaatgggaggcgctccaggccctgacggtgctggaggcatgcatgaagaactgtgggaggagatttcataacgaagtggggaagttccgctttttgaatgagttaatcaaagtcgtctctccaaagtacctgggggacagggtgtctgagaaagtgaagaccaaggttattgagctgctgtacagctggaccatggccctgccagaagaagcaaagatcaaagacgcctaccacatgctgaagagacagggcatagtgcagtctgacccaccaattcctgtggataggacgctgatcccctctccaccacctcgtcccaaaaaccctgtttttgatgatgaggagaagtccaagcttttagccaagctgctgaaaagcaaaaacccagatgacctgcaggaggccaacaagctcatcaagtccatggtgaaggaagacgaggcacggatccagaaggtgaccaagcgtctgcacacgttagaggaagttaacaacaacgtgagactgctcagtgagatgctgcttcattacagccaggaggactcttcggacggggacagagagctgatgaaggagctgtttgatcagtgtgagaacaagaggcggactttatttaaactcgccagtgagactgaggacaatgataacagtttgggggacatcctgcaagccagtgacaacctctcccgggtcatcaactcttacaaaacaattattgaagggcaggtcatcaatggcgaggtggctaccttaaccctgcctgactcggaaggaaacagtcagtgcagtaaccaaggcacgctcatcgaccttgcggagctggacacgaccaacagtttgtcctccgtgttggccccagcacctactccaccctcctcaggcatcccaatcctccctccaccaccccaggcctcaggacctccacggagccgctcctctagccaggccgaggccaccctggggcccagcagcacaagcaacgccctctcctggctggacgaggagctactctgcttgggcctcgccgacccagcccctaatgttcctcccaaagagtcagctgggaacagccagtggcacctgctccagagggaacagtccgacctggacttcttcagccccaggccggggaccgctgcctgtggcgcctccgatgctcctctgctccagccctcagccccctcctcaagcagctcccaagctccactgccgcctcccttcccagctcctgtggtcccagccagtgttcctgcccccagtgcgggctcctccttgttttctactggagtggccccagccttggccccaaaagttgagcccgcagtccctgggcaccatggcttggcgttgggcaacagcgcgctgcaccacctggatgccctcgatcagcttctagaagaggccaaagtgacctcgggcttggtgaaacccactacctcccctctcatccccaccaccaccccagccaggcccctcctgcccttctccacggggcccggcagcccgctcttccagccactgagtttccagtcccagggcagccccccgaaggggcctgagctctccctggccagcatccacgtgcccctggaatcgatcaagcctagcagtgcccttcctgtgacagcctacgataaaaacggcttccgcatcctcttccactttgccaaggagtgtcccccaggacgacctgacgtgctggtggtggtggtgtccatgctgaacacggctcccttacctgtcaagagcatcgtgctgcaggctgcagtgcccaagtcaatgaaagtgaagttgcagccaccttctgggacagaactctctccatttagccccatccagccacctgcagccatcacccaggtcatgttgctggccaatccactgaaggagaaggtgcggcttcggtataagctgaccttcgccctgggggagcagctgagcacagaggtgggcgaggtggaccagttccctcctgtggaacagtgggggaacctatgaccccagaggacgctgtgatctccaccttgaagccaggcaggctgccctgagacgaggagggctctggtcccgtcactctccatgccctgacaacagtgcttgtagctttgatgtggaacaggggccctgggcatttctgctgagaaccaaactgctgctgtgataacctctcctttggcccctaaaaggacctgtttttatctacctgtgtgacttgaagtggccatatgctgtcaggggtgcggagtggcccctgacttcactgctgtcccgggaacatggacccccaggcttggcgtaggtgtttgcttccttctactggcattcactgaagccactggggtggggggtggggggtgggagtctctaaagagagactgtcatgggtcattccccacaagagccacatcctcacacctgacagatgcacggcccaaggggctgcagccctgttgcaattccatgcttcccccgccaaccagctcctgctgccatccccagggaggtggcccaggaaggtgcctggcccagaataaggaactggcatactgcaaagtccccagccctgcctctggtggacagcatcgtcctggaatggccacggagtgatgagttgtgtgcttgtccctggcagtggcaggctgtgtcctatggacatcttggcaggacatggaatttggcctcatgacaggcccaactagggataggaaggaaaatgaagagagccagtatttccccttctccagaagcaggtactcagctttctgggaaaagcgtgcctccagccgtggggacaggccatcctactgactacctcttgcttggcatgaaataaactgctatcctccccttggaatctaccgccactctacatcctactgctttggcctccctctcctctcaccagatggcatgtggtgtggcacctgtggctggacacaggaggcctcaggatcacaaatgttacactagacatatgtcctaatgtgctgcccagaaacctcaactgttccccagctactgaggggcactgtcagcgagatgttgggtctggaggtgatgagatcgggccacacttgagctgagtcaccagaccctattgcttcaacagtgcttggcccccgccagcttgtcccagccactctagctgctggatgtgatcctgggacatgtactccaagcctccgtcacaaaaaaaaaatcaccagctgccatagacacgggggaagcttgcggagcccaggtgaacaagctcagcaatcggacatctctggggaaaggaaggtggcacagaccatgttccctggttcctccctgccccttgccaggcttccttattccttactatgggaagaggtcatatcccttccctgcccctcgctgtctttagcaagcaggtttcactgcttcattagaagaggacaagtcaaaagtgaatcatttttcactacttaaggaataaatccaagagctttccagagactggctgctgcagccctgggaatgtctgtggaattactatgtggaaatggaactttgtgttatgctctagacattacagttatttgagtgttactcgttactgttgaggtcagtgcttcgtggcaaatggctgtactggatatcccagctctgctgcccttgttttgctgcatgttaaataaaaccattttcactgta

SEQ ID NO: 138407 - DNA, 3766 bp, Homo sapiens
  Payload ID: 7105
  Gene Symbol: GGA3
  Gene Name: golgi-associated, gamma adaptin ear containing, ARF binding protein 3
  Uniprot ID: Q9NZ52
  ENST ID: ENST00000538886
  CDS Start-End: 14-2086
gggcggctgcaatatggcggaggcggaaggggaaagcctggagtcctggctcaataaagccaccaatccttccaaccgccaggaggactgggaatacataattggcttctgtgatcagatcaacaaggagctggaagggccacagatcgccgtccgactgctggcccacaagatccagtccccacaggaatgggaggcgctccaggccctgacgtacctgggggacagggtgtctgagaaagtgaagaccaaggttattgagctgctgtacagctggaccatggccctgccagaagaagcaaagatcaaagacgcctaccacatgctgaagagacagggcatagtgcagtctgacccaccaattcctgtggataggacgctgatcccctctccaccacctcgtcccaaaaaccctgtttttgatgatgaggagaagtccaagcttttagccaagctgctgaaaagcaaaaacccagatgacctgcaggaggccaacaagctcatcaagtccatggtgaaggaagacgaggcacggatccagaaggtgaccaagcgtctgcacacgttagaggaagttaacaacaacgtgagactgctcagtgagatgctgcttcattacagccaggaggactcttcggacggggacagagagctgatgaaggagctgtttgatcagtgtgagaacaagaggcggactttatttaaactcgccagtgagactgaggacaatgataacagtttgggggacatcctgcaagccagtgacaacctctcccgggtcatcaactcttacaaaacaattattgaagggcaggtcatcaatggcgaggtggctaccttaaccctgcctgactcggaaggaaacagtcagtgcagtaaccaaggcacgctcatcgaccttgcggagctggacacgaccaacagtttgtcctccgtgttggccccagcacctactccaccctcctcaggcatcccaatcctccctccaccaccccaggcctcaggacctccacggagccgctcctctagccaggccgaggccaccctggggcccagcagcacaagcaacgccctctcctggctggacgaggagctactctgcttgggcctcgccgacccagcccctaatgttcctcccaaagagtcagctgggaacagccagtggcacctgctccagagggaacagtccgacctggacttcttcagccccaggccggggaccgctgcctgtggcgcctccgatgctcctctgctccagccctcagccccctcctcaagcagctcccaagctccactgccgcctcccttcccagctcctgtggtcccagccagtgttcctgcccccagtgcgggctcctccttgttttctactggagtggccccagccttggccccaaaagttgagcccgcagtccctgggcaccatggcttggcgttgggcaacagcgcgctgcaccacctggatgccctcgatcagcttctagaagaggccaaagtgacctcgggcttggtgaaacccactacctcccctctcatccccaccaccaccccagccaggcccctcctgcccttctccacggggcccggcagcccgctcttccagccactgagtttccagtcccagggcagccccccgaaggggcctgagctctccctggccagcatccacgtgcccctggaatcgatcaagcctagcagtgcccttcctgtgacagcctacgataaaaacggcttccgcatcctcttccactttgccaaggagtgtcccccaggacgacctgacgtgctggtggtggtggtgtccatgctgaacacggctcccttacctgtcaagagcatcgtgctgcaggctgcagtgcccaagtcaatgaaagtgaagttgcagccaccttctgggacagaactctctccatttagccccatccagccacctgcagccatcacccaggtcatgttgctggccaatccactgaaggagaaggtgcggcttcggtataagctgaccttcgccctgggggagcagctgagcacagaggtgggcgaggtggaccagttccctcctgtggaacagtgggggaacctatgaccccagaggacgctgtgatctccaccttgaagccaggcaggctgccctgagacgaggagggctctggtcccgtcactctccatgccctgacaacagtgcttgtagctttgatgtggaacaggggccctgggcatttctgctgagaaccaaactgctgctgtgataacctctcctttggcccctaaaaggacctgtttttatctacctgtgtgacttgaagtggccatatgctgtcaggggtgcggagtggcccctgacttcactgctgtcccgggaacatggacccccaggcttggcgtaggtgtttgcttccttctactggcattcactgaagccactggggtggggggtggggggtgggagtctctaaagagagactgtcatgggtcattccccacaagagccacatcctcacacctgacagatgcacggcccaaggggctgcagccctgttgcaattccatgcttcccccgccaaccagctcctgctgccatccccagggaggtggcccaggaaggtgcctggcccagaataaggaactggcatactgcaaagtccccagccctgcctctggtggacagcatcgtcctggaatggccacggagtgatgagttgtgtgcttgtccctggcagtggcaggctgtgtcctatggacatcttggcaggacatggaatttggcctcatgacaggcccaactagggataggaaggaaaatgaagagagccagtatttccccttctccagaagcaggtactcagctttctgggaaaagcgtgcctccagccgtggggacaggccatcctactgactacctcttgcttggcatgaaataaactgctatcctccccttggaatctaccgccactctacatcctactgctttggcctccctctcctctcaccagatggcatgtggtgtggcacctgtggctggacacaggaggcctcaggatcacaaatgttacactagacatatgtcctaatgtgctgcccagaaacctcaactgttccccagctactgaggggcactgtcagcgagatgttgggtctggaggtgatgagatcgggccacacttgagctgagtcaccagaccctattgcttcaacagtgcttggcccccgccagcttgtcccagccactctagctgctggatgtgatcctgggacatgtactccaagcctccgtcacaaaaaaaaaatcaccagctgccatagacacgggggaagcttgcggagcccaggtgaacaagctcagcaatcggacatctctggggaaaggaaggtggcacagaccatgttccctggttcctccctgccccttgccaggcttccttattccttactatgggaagaggtcatatcccttccctgcccctcgctgtctttagcaagcaggtttcactgcttcattagaagaggacaagtcaaaagtgaatcatttttcactacttaaggaataaatccaagagctttccagagactggctgctgcagccctgggaatgtctgtggaattactatgtggaaatggaactttgtgttatgctctagacattacagttatttgagtgttactcgttactgttgaggtcagtgcttcgtggcaaatggctgtactggatatcccagctctgctgcccttgttttgctgcatgttaaataaaaccattttcactgta

SEQ ID NO: 138408 - DNA, 547 bp, Homo sapiens
  Payload ID: 7105
  Gene Symbol: GGA3
  Gene Name: golgi-associated, gamma adaptin ear containing, ARF binding protein 3
  ENST ID: ENST00000577435
  CDS Start-End: 31-240
tttgaagccgcggggccgggcggctgcaatatggcggaggcggaaggggaaagcctggagtcctggctcaccacaacagaaacactgccggggaggccgagccccgacctgggaagcagggtgatacactgggtgccacgggccttccctctgcctggcagctgtcgctactcagatccctgcagccctgttgccagtgaaggagctggagtctctgttatgatgtgttcatccagctgataaagccaccaatccttccaaccgccaggaggactgggaatacataattggcttctgtgatcagatcaacaaggagctggaagggccacagatcgccgtccgactgctggcccacaagatccagtccccacaggaatgggaggcgctccaggccctgacgtacctgggggacagggtgtctgagaaagtgaagaccaaggttattgagctgctgtacagctggaccatggccctgccagaagaagcaaagatcaaagacgcctaccacatgctgaagagacaggcttttagccaagctgctgaaaag

SEQ ID NO: 138409 - DNA, 2255 bp, Homo sapiens
  Payload ID: 7105
  Gene Symbol: GGA3
  Gene Name: golgi-associated, gamma adaptin ear containing, ARF binding protein 3
  Uniprot ID: Q9NZ52
  ENST ID: ENST00000582717
  CDS Start-End: 259-2214
acaacaattcaggcccttgtcccaagtaggaggacattccccaagcaggcgggtaaagtctcctcctggtcaagtgctaacgataaagccaccaatccttccaaccgccaggaggactgggaatacataattggcttctgtgatcagatcaacaaggagctggaagggccacagatcgccgtccgactgctggcccacaagatccagtccccacaggaatgggaggcgctccaggccctgacggtgctggaggcatgcatgaagaactgtgggaggagatttcataacgaagtggggaagttccgctttttgaatgagttaatcaaagtcgtctctccaaagtacctgggggacagggtgtctgagaaagtgaagaccaaggttattgagctgctgtacagctggaccatggccctgccagaagaagcaaagatcaaagacgcctaccacatgctgaagagacagggcatagtgcagtctgacccaccaattcctgtggataggacgctgatcccctctccaccacctcgtcccaaaaaccctgtttttgatgatgaggagaagtccaagcttttagccaagctgctgaaaagcaaaaacccagatgacctgcaggaggccaacaagctcatcaagtccatggtgaaggaagacgaggcacggatccagaaggtgaccaagcgtctgcacacgttagaggaagttaacaacaacgtgagactgctcagtgagatgctgcttcattacagccaggaggactcttcggacggggacagagagctgatgaaggagctgtttgatcagtgtgagaacaagaggcggactttatttaaactcgccagtgagactgaggacaatgataacagtttgggggacatcctgcaagccagtgacaacctctcccgggtcatcaactcttacaaaacaattattgaagggcaggtcatcaatggcgaggtggctaccttaaccctgcctgactcggaaggaaacagtcagtgcagtaaccaaggcacgctcatcgaccttgcggagctggacacgaccaacagtttgtcctccgtgttggccccagcacctactccaccctcctcaggcatcccaatcctccctccaccaccccaggcctcaggacctccacggagccgctcctctagccaggccgaggccaccctggggcccagcagcacaagcaacgccctctcctggctggacgaggagctactctgcttgggcctcgccgacccagcccctaatgttcctcccaaagagtcagctgggaacagccagtggcacctgctccagagggaacagtccgacctggacttcttcagccccaggccggggaccgctgcctgtggcgcctccgatgctcctctgctccagccctcagccccctcctcaagcagctcccaagctccactgccgcctcccttcccagctcctgtggtcccagccagtgttcctgcccccagtgcgggctcctccttgttttctactggagtggccccagccttggccccaaaagttgagcccgcagtccctgggcaccatggcttggcgttgggcaacagcgcgctgcaccacctggatgccctcgatcagcttctagaagaggccaaagtgacctcgggcttggtgaaacccactacctcccctctcatccccaccaccaccccagccaggcccctcctgcccttctccacggggcccggcagcccgctcttccagccactgagtttccagtcccagggcagccccccgaaggggcctgagctctccctggccagcatccacgtgcccctggaatcgatcaagcctagcagtgcccttcctgtgacagcctacgataaaaacggcttccgcatcctcttccactttgccaaggagtgtcccccaggacgacctgacgtgctggtggtggtggtgtccatgctgaacacggctcccttacctgtcaagagcatcgtgctgcaggctgcagtgcccaagtcaatgaaagtgaagttgcagccaccttctgggacagaactctctccatttagccccatccagccacctgcagccatcacccaggtcatgttgctggccaatccactgaaggagaaggtgcggcttcggtataagctgaccttcgccctgggggagcagctgagcacagaggtgggcgaggtggaccagttccctcctgtggaacagtgggggaacctatgaccccagaggacgctgtgatctccaccttgaagccaggcagg

SEQ ID NO: 138410 - DNA, 598 bp, Homo sapiens
  Payload ID: 7105
  Gene Symbol: GGA3
  Gene Name: golgi-associated, gamma adaptin ear containing, ARF binding protein 3
  ENST ID: ENST00000584550
  CDS Start-End: 1-194
cctcccctctcatccccaccaccaccccagccaggcccctcctgcccttctccacggggcccggcagcccgctcttccagccactgagtttccagtcccagggcagccccccgaaggggcctgagctctccctggccagcatccacgtgcccctggaatcgatcaagcctagagtgtcccccaggacgacctgacgtgctggtggtggtggtgtccatgctgaacacggctcccttacctgtcaagagcatcgtgctgcaggctgcagtgcccaagtcaatgaaagtgaagttgcagccaccttctgggacagaactctctccatttagccccatccagccacctgcagccatcacccaggtcatgttgctggccaatccactgaaggagaaggtgcggcttcggtataagctgaccttcgccctgggggagcagctgagcacagaggtgggcgaggtggaccagttccctcctgtggaacagtgggggaacctatgaccccagaggacgctgtgatctccaccttgaagccaggcaggctgccctgagacgaggagggctctggtcccgtcactctccatgccctgacaacagtgct

SEQ ID NO: 138411 - DNA, 521 bp, Homo sapiens
  Payload ID: 7105
  Gene Symbol: GGA3
  Gene Name: golgi-associated, gamma adaptin ear containing, ARF binding protein 3
  ENST ID: ENST00000580799
  CDS Start-End: 113-521
tgcaatatggcggaggcggaaggggaaagcctggagtcctggctcatacctgggggacagggtgtctgagaaagtgaagaccaaggttattgagctgctgtacagctggaccatggccctgccagaagaagcaaagatcaaagacgcctaccacatgctgaagagacagggcatagtgcagtctgacccaccaattcctgtggataggacgctgatcccctctccaccacctcgtcccaaaaaccctgtttttgatgatgaggagaagtccaagcttttagccaagctgctgaaaagcaaaaacccagatgacctgcaggaggccaacaagctcatcaagtccatggtgaaggaagacgaggcacggatccagaaggtgaccaagcgtctgcacacgttagaggaagttaacaacaacgtgagactgctcagtgagatgctgcttcattacagccaggaggactcttcggacggggacagagagctgatgaaggagctgtttgatcagtgtgagaacaaga

SEQ ID NO: 138412 - DNA, 2319 bp, Homo sapiens
  Payload ID: 7105
  Gene Symbol: GGA3
  Gene Name: golgi-associated, gamma adaptin ear containing, ARF binding protein 3
  ENST ID: ENST00000582486
  CDS Start-End: 257-2155
aacaattcaggcccttgtcccaagtaggaggacattccccaagcaggcgggtaaagtctcctcctggtcaagtgctaacgataaagccaccaatccttccaaccgccaggaggactgggaatacataattggcttctgtgatcagatcaacaaggagctggaagggccacagatcgccgtccgactgctggcccacaagatccagtccccacaggaatgggaggcgctccaggccctgacggtgctggaggcatgcatgaagaactgtgggaggagatttcataacgaagtggggaagttccgctttttgaatgagttaatcaaagtcgtctctccaaagtacctgggggacagggtgtctgagaaagtgaagaccaaggttattgagctgctgtacagctggaccatggccctgccagaagaagcaaagatcaaagacgcctaccacatgctgaagagacagggcatagtgcagtctgacccaccaattcctgtggataggacgctgatcccctctccaccacctcgtcccaaaaaccctgtttttgatgatgaggagaagtccaagcttttagccaagctgctgaaaagcaaaaacccagatgacctgcaggaggccaacaagctcatcaagtccatggtgaaggaagacgaggcacggatccagaaggtgaccaagcgtctgcacacgttagaggaagttaacaacaacgtgagactgctcagtgagatgctgcttcattacagccaggaggactcttcggacggggacagagagctgatgaaggagctgtttgatcagtgtgagaacaagaggcggactttatttaaactcgccagtgagactgaggacaatgataacagtttgggggacatcctgcaagccagtgacaacctctcccgggtcatcaactcttacaaaacaattattgaagggcaggtcatcaatggcgaggtggctaccttaaccctgcctgactcggaaggaaacagtcagtgcagtaaccaaggcacgctcatcgaccttgcggagctggacacgaccaacagtttgtcctccgtgttggccccagcacctactccaccctcctcaggcatcccaatcctccctccaccaccccaggcctcaggacctccacggagccgctcctctagccaggccgaggccaccctggggcccagcagcacaagcaacgccctctcctggctggacgaggagctactctgcttgggcctcgccgacccagcccctaatgttcctcccaaagagtcagctgggaacagccagtggcacctgctccagagggaacagtccgacctggacttcttcagccccaggccggggaccgctgcctgtggcgcctccgatgctcctctgctccagccctcagccccctcctcaagcagctcccaagctccactgccgcctcccttcccagctcctgtggtcccagccagtgttcctgcccccagtgcgggctcctccttgttttctactggagtggccccagccttggccccaaaagttgagcccgcagtccctgggcaccatggcttggcgttgggcaacagcgcgctgcaccacctggatgccctcgatcagcttctagaagaggccaaagtgacctcgggcttggtgaaacccactacctcccctctcatccccaccaccaccccagccaggcccctcctgcccttctccacggggcccggcagcccgctcttccagccactgagtttccagtcccagggcagccccccgaaggggcctgagctctccctggccagcatccacgtgcccctggaatcgatcaagcctagcagtgcccttcctgtgacagcctacgataaaaacggcttccgcatcctcttccactttgccaaggagtgtcccccaggacgacctgacgtgctggtggtggtggtgtccatgctgaacacggctcccttacctgtcaagagcatcgtgctgcaggctgcagtgcccaagtcaatgaaagtgaagttgcagccaccttctgggacagaactctctccatttagccccatccagccacctgcagccatcacccaggtcatgttgctggccaatccactgaagtggcaggctgtgtcctatggacatcttggcaggacatggaatttggcctcatgacaggcccaactagggataggaaggaaaatgaagagagccagtatttccccttctccagaagcaggtactcagctttctgggaaaagcgtgcctccagccgtggggacaggccatcctactgactacctcttgcttggcatgaaataaactgctatcctcccctt

SEQ ID NO: 138413 - DNA, 550 bp, Homo sapiens
  Payload ID: 7105
  Gene Symbol: GGA3
  Gene Name: golgi-associated, gamma adaptin ear containing, ARF binding protein 3
  ENST ID: ENST00000583282
  CDS Start-End: 1-333
agtgcccttcctgtgacagcctacgataaaaacggcttccgcatcctcttccactttgccaaggagtgtcccccaggacgacctgacgtgctggtggtggtggtgtccatgctgaacacggctcccttacctgtcaagagcatcgtgctgcaggctgcagtgcccaagtcaatgaaagtgaagttgcagccaccttctgggacagaactctctccatttagccccatccagccacctgcagccatcacccaggtcatgttgctggccaatccactgaagctcctgctgccatccccagggaggtggcccaggaaggtgcctggcccagaataaggaactggcatactgcaaagtccccagccctgcctctggtggacagcatcgtcctggaatggccacggagtgatgagttgtgtgcttgtccctggcagtggcaggctgtgtcctatggacatcttggcaggacatggaatttggcctcatgacaggcccaactagggataggaaggaaaatgaagagagccagtatttccccttctccagaagcagg

SEQ ID NO: 138414 - DNA, 2251 bp, Homo sapiens
  Payload ID: 7105
  Gene Symbol: GGA3
  Gene Name: golgi-associated, gamma adaptin ear containing, ARF binding protein 3
  Uniprot ID: Q9NZ52
  ENST ID: ENST00000578348
  CDS Start-End: 308-2086
aacaattcaggcccttgtcccaagtaggaggacattccccaagcaggcgggtaaagtctcctcctggtcaagtgctaacgataaagccaccaatccttccaaccgccaggaggactgggaatacataattggcttctgtgatcagatcaacaaggagctggaagggccacagatcgccgtccgactgctggcccacaagatccagtccccacaggaatgggaggcgctccaggccctgacgtacctgggggacagggtgtctgagaaagtgaagaccaaggttattgagctgctgtacagctggaccatggccctgccagaagaagcaaagatcaaagacgcctaccacatgctgaagagacagggcatagtgcagtctgacccaccaattcctgtggataggacgctgatcccctctccaccacctcgtcccaaaaaccctgtttttgatgatgaggagaagtccaagcttttagccaagctgctgaaaagcaaaaacccagatgacctgcaggaggccaacaagctcatcaagtccatggtgaaggaagacgaggcacggatccagaaggtgaccaagcgtctgcacacgttagaggaagttaacaacaacgtgagactgctcagtgagatgctgcttcattacagccaggaggactcttcggacggggacagagagctgatgaaggagctgtttgatcagtgtgagaacaagaggcggactttatttaaactcgccagtgagactgaggacaatgataacagtttgggggacatcctgcaagccagtgacaacctctcccgggtcatcaactcttacaaaacaattattgaagggcaggtcatcaatggcgaggtggctaccttaaccctgcctgactcggaaggaaacagtcagtgcagtaaccaaggcacgctcatcgaccttgcggagctggacacgaccaacagtttgtcctccgtgttggccccagcacctactccaccctcctcaggcatcccaatcctccctccaccaccccaggcctcaggacctccacggagccgctcctctagccaggccgaggccaccctggggcccagcagcacaagcaacgccctctcctggctggacgaggagctactctgcttgggcctcgccgacccagcccctaatgttcctcccaaagagtcagctgggaacagccagtggcacctgctccagagggaacagtccgacctggacttcttcagccccaggccggggaccgctgcctgtggcgcctccgatgctcctctgctccagccctcagccccctcctcaagcagctcccaagctccactgccgcctcccttcccagctcctgtggtcccagccagtgttcctgcccccagtgcgggctcctccttgttttctactggagtggccccagccttggccccaaaagttgagcccgcagtccctgggcaccatggcttggcgttgggcaacagcgcgctgcaccacctggatgccctcgatcagcttctagaagaggccaaagtgacctcgggcttggtgaaacccactacctcccctctcatccccaccaccaccccagccaggcccctcctgcccttctccacggggcccggcagcccgctcttccagccactgagtttccagtcccagggcagccccccgaaggggcctgagctctccctggccagcatccacgtgcccctggaatcgatcaagcctagcagtgcccttcctgtgacagcctacgataaaaacggcttccgcatcctcttccactttgccaaggagtgtcccccaggacgacctgacgtgctggtggtggtggtgtccatgctgaacacggctcccttacctgtcaagagcatcgtgctgcaggctgcagtgcccaagtcaatgaaagtgaagttgcagccaccttctgggacagaactctctccatttagccccatccagccacctgcagccatcacccaggtcatgttgctggccaatccactgaagaagcaggtactcagctttctgggaaaagcgtgcctccagccgtggggacaggccatcctactgactacctcttgcttggcatgaaataaactgctatcctccccttggaatctaccgccactctacatcctactgctttggcctccctctcctctcaccagatggcatgtggtgtggcacctgtggctggacacaggaggcctcaggatcacaaatgttacactagacatatgtcctaatgtgctgccc

SEQ ID NO: 138415 - DNA, 432 bp, Homo sapiens
  Payload ID: 7105
  Gene Symbol: GGA3
  Gene Name: golgi-associated, gamma adaptin ear containing, ARF binding protein 3
  ENST ID: ENST00000578773
  CDS Start-End: 1-230
ccactacctcccctctcatccccaccaccaccccagccaggcccctcctgcccttctccacggggcccggcagcccgctcttccagccactgagtttccagtcccagggcagccccccgaaggggcctgagctctccctggccagcatccacgtgcccctggaatcgatcaagcctatcaatgaaagtgaagttgcagccaccttctgggacagaactctctccatttagccccatccagccacctgcagccatcacccaggtcatgttgctggccaatccactgaaggagaaggtgcggcttcggtataagctgaccttcgccctgggggagcagctgagcacagaggtgggcgaggtggaccagttccctcctgtggaacagtgggggaacctatgaccccagaggacgctgtgatctccaccttgaagc

SEQ ID NO: 138416 - DNA, 646 bp, Homo sapiens
  Payload ID: 7105
  Gene Symbol: GGA3
  Gene Name: golgi-associated, gamma adaptin ear containing, ARF binding protein 3
  ENST ID: ENST00000584243
  CDS Start-End: 1-457
ggcggaggcggaaggggaaagcctggagtcctggctcaataaagccaccaatccttccaaccgccaggaggactgggaatacataattggcttctgtgatcagatcaacaaggagctggaagggccacagatcgccgtccgactgctggcccacaagatccagtccccacaggaatgggaggcgctccaggccctgacggtgctggaggcatgcatgaagaactgtgggaggagatttcataacgaagtggggaagttccgctttttgaatgagttaatcaaagtcgtctctccaaagtacctgggggacagggtgtctgagaaagtgaagaccaaggttattgagctgctgtacagctggaccatggccctgccagaagaagcaaagatcaaagacgcctaccacatgctgaagagacagggtcttgatcacagggacgtggcccttggtgtatgaggaggggtgacaaggcaaccacagcctgagtgcacgtgctgccatgtcccctttcaggcatagtgcagtctgacccaccaattcctgtggataggacgctgatcccctctccaccacctcgtcccaaaaaccctgtttttgatgatgaggagaagtccaagcttttagccaagctgctgaaaagcaaaa

SEQ ID NO: 138417 - DNA, 551 bp, Homo sapiens
  Payload ID: 7105
  Gene Symbol: GGA3
  Gene Name: golgi-associated, gamma adaptin ear containing, ARF binding protein 3
  ENST ID: ENST00000582376
  CDS Start-End: 7-327
tgcaatatggcggaggcggaaggggaaagcctggagtcctggctcaataaagccaccaatccttccaaccgccaggaggactgggaatacataattggcttctgtgatcagatcaacaaggagctggaagggccacagatcgccgtccgactgctggcccacaagatccagtccccacaggaatgggaggcgctccaggccctgacggtgctggaggcatgcatgaagaactgtgggaggagatttcataacgaagtggggaagttccgctttttgaatgagttaatcaaagtcgtctctccaaagagagctaggccctggaggtaacgggatgaccaaacaggccacagggaccggcagctttttctgaagcgccctcagcccaaatctgacagtacctgggggacagggtgtctgagaaagtgaagaccaaggttattgagctgctgtacagctggaccatggccctgccagaagaagcaaagatcaaagacgcctaccacatgctgaagagacagggcatagtgcagtctgacccaccaattcctgtg

SEQ ID NO: 138418 - DNA, 829 bp, Homo sapiens
  Payload ID: 7105
  Gene Symbol: GGA3
  Gene Name: golgi-associated, gamma adaptin ear containing, ARF binding protein 3
  ENST ID: ENST00000580646
  CDS Start-End: 1-475
tctcatccccaccaccaccccagccaggcccctcctgcccttctccacggggcccggcagcccgctcttccagccactgagtttccagtcccagggcagccccccgaaggggcctgagctctccctggccagcatccacgtgcccctggaatcgatcaagcctagcagtgcccttcctgtgacagcctacgataaaaacggcttccgcatcctcttccactttgccaaggagtgtcccccaggacgacctgacgtgctggtggtggtggtgtccatgctgaacacggctcccttacctgtcaagagcatcgtgctgcaggctgcagtgcccaagtcaatgaaagtgaagttgcagccaccttctgggacagaactctctccatttagccccatccagccacctgcagccatcacccaggtcatgttgctggccaatccactgaaggacctgtttttatctacctgtgtgacttgaagtggccatatgctgtcaggggtgcggagtggcccctgacttcactgctgtcccgggaacatggacccccaggcttggcctcctgctgccatccccagggaggtggcccaggaaggtgcctggcccagaataaggaactggcatactgcaaagtccccagccctgcctctggtggacagcatcgtcctggaatggccacggagtgatgagttgtgtgcttgtccctggcagtggcaggctgtgtcctatggacatcttggcaggacatggaatttggcctcatgacaggcccaactagggataggaaggaaaatgaagagagccagtatttccccttctccagaagcaggtact

SEQ ID NO: 138419 - DNA, 4034 bp, Homo sapiens
  Payload ID: 7105
  Gene Symbol: GGA3
  Gene Name: golgi-associated, gamma adaptin ear containing, ARF binding protein 3
  ENST ID: ENST00000621870
  CDS Start-End: 14-223
gggcggctgcaatatggcggaggcggaaggggaaagcctggagtcctggctcaccacaacagaaacactgccggggaggccgagccccgacctgggaagcagggtgatacactgggtgccacgggccttccctctgcctggcagctgtcgctactcagatccctgcagccctgttgccagtgaaggagctggagtctctgttatgatgtgttcatccagctgataaagccaccaatccttccaaccgccaggaggactgggaatacataattggcttctgtgatcagatcaacaaggagctggaagggccacagatcgccgtccgactgctggcccacaagatccagtccccacaggaatgggaggcgctccaggccctgacggtgctggaggcatgcatgaagaactgtgggaggagatttcataacgaagtggggaagttccgctttttgaatgagttaatcaaagtcgtctctccaaagtacctgggggacagggtgtctgagaaagtgaagaccaaggttattgagctgctgtacagctggaccatggccctgccagaagaagcaaagatcaaagacgcctaccacatgctgaagagacagggcatagtgcagtctgacccaccaattcctgtggataggacgctgatcccctctccaccacctcgtcccaaaaaccctgtttttgatgatgaggagaagtccaagcttttagccaagctgctgaaaagcaaaaacccagatgacctgcaggaggccaacaagctcatcaagtccatggtgaaggaagacgaggcacggatccagaaggtgaccaagcgtctgcacacgttagaggaagttaacaacaacgtgagactgctcagtgagatgctgcttcattacagccaggaggactcttcggacggggacagagagctgatgaaggagctgtttgatcagtgtgagaacaagaggcggactttatttaaactcgccagtgagactgaggacaatgataacagtttgggggacatcctgcaagccagtgacaacctctcccgggtcatcaactcttacaaaacaattattgaagggcaggtcatcaatggcgaggtggctaccttaaccctgcctgactcggaaggaaacagtcagtgcagtaaccaaggcacgctcatcgaccttgcggagctggacacgaccaacagtttgtcctccgtgttggccccagcacctactccaccctcctcaggcatcccaatcctccctccaccaccccaggcctcaggacctccacggagccgctcctctagccaggccgaggccaccctggggcccagcagcacaagcaacgccctctcctggctggacgaggagctactctgcttgggcctcgccgacccagcccctaatgttcctcccaaagagtcagctgggaacagccagtggcacctgctccagagggaacagtccgacctggacttcttcagccccaggccggggaccgctgcctgtggcgcctccgatgctcctctgctccagccctcagccccctcctcaagcagctcccaagctccactgccgcctcccttcccagctcctgtggtcccagccagtgttcctgcccccagtgcgggctcctccttgttttctactggagtggccccagccttggccccaaaagttgagcccgcagtccctgggcaccatggcttggcgttgggcaacagcgcgctgcaccacctggatgccctcgatcagcttctagaagaggccaaagtgacctcgggcttggtgaaacccactacctcccctctcatccccaccaccaccccagccaggcccctcctgcccttctccacggggcccggcagcccgctcttccagccactgagtttccagtcccagggcagccccccgaaggggcctgagctctccctggccagcatccacgtgcccctggaatcgatcaagcctagcagtgcccttcctgtgacagcctacgataaaaacggcttccgcatcctcttccactttgccaaggagtgtcccccaggacgacctgacgtgctggtggtggtggtgtccatgctgaacacggctcccttacctgtcaagagcatcgtgctgcaggctgcagtgcccaagtcaatgaaagtgaagttgcagccaccttctgggacagaactctctccatttagccccatccagccacctgcagccatcacccaggtcatgttgctggccaatccactgaaggagaaggtgcggcttcggtataagctgaccttcgccctgggggagcagctgagcacagaggtgggcgaggtggaccagttccctcctgtggaacagtgggggaacctatgaccccagaggacgctgtgatctccaccttgaagccaggcaggctgccctgagacgaggagggctctggtcccgtcactctccatgccctgacaacagtgcttgtagctttgatgtggaacaggggccctgggcatttctgctgagaaccaaactgctgctgtgataacctctcctttggcccctaaaaggacctgtttttatctacctgtgtgacttgaagtggccatatgctgtcaggggtgcggagtggcccctgacttcactgctgtcccgggaacatggacccccaggcttggcgtaggtgtttgcttccttctactggcattcactgaagccactggggtggggggtggggggtgggagtctctaaagagagactgtcatgggtcattccccacaagagccacatcctcacacctgacagatgcacggcccaaggggctgcagccctgttgcaattccatgcttcccccgccaaccagctcctgctgccatccccagggaggtggcccaggaaggtgcctggcccagaataaggaactggcatactgcaaagtccccagccctgcctctggtggacagcatcgtcctggaatggccacggagtgatgagttgtgtgcttgtccctggcagtggcaggctgtgtcctatggacatcttggcaggacatggaatttggcctcatgacaggcccaactagggataggaaggaaaatgaagagagccagtatttccccttctccagaagcaggtactcagctttctgggaaaagcgtgcctccagccgtggggacaggccatcctactgactacctcttgcttggcatgaaataaactgctatcctccccttggaatctaccgccactctacatcctactgctttggcctccctctcctctcaccagatggcatgtggtgtggcacctgtggctggacacaggaggcctcaggatcacaaatgttacactagacatatgtcctaatgtgctgcccagaaacctcaactgttccccagctactgaggggcactgtcagcgagatgttgggtctggaggtgatgagatcgggccacacttgagctgagtcaccagaccctattgcttcaacagtgcttggcccccgccagcttgtcccagccactctagctgctggatgtgatcctgggacatgtactccaagcctccgtcacaaaaaaaaaatcaccagctgccatagacacgggggaagcttgcggagcccaggtgaacaagctcagcaatcggacatctctggggaaaggaaggtggcacagaccatgttccctggttcctccctgccccttgccaggcttccttattccttactatgggaagaggtcatatcccttccctgcccctcgctgtctttagcaagcaggtttcactgcttcattagaagaggacaagtcaaaagtgaatcatttttcactacttaaggaataaatccaagagctttccagagactggctgctgcagccctgggaatgtctgtggaattactatgtggaaatggaactttgtgttatgctctagacattacagttatttgagtgttactcgttactgttgaggtcagtgcttcgtggcaaatggctgtactggatatcccagctctgctgcccttgttttgctgcatgttaaataaaaccattttcactgta

SEQ ID NO: 138420 - DNA, 560 bp, Homo sapiens
  Payload ID: 7105
  Gene Symbol: GGA3
  Gene Name: golgi-associated, gamma adaptin ear containing, ARF binding protein 3
  ENST ID: ENST00000579743
  CDS Start-End: 423-560
aattcaggcccttgtcccaagtaggaggacattccccaagcaggcgggtaaagtctcctcctggtcaagtgctaacgccacaacagaaacactgccggggaggccgagccccgacctgggaagcagggtgatacactgggtgccacgggccttccctctgcctggcagctgtcgctactcagatccctgcagccctgttgccagtgaaggagctggagtctctgttatgatgtgttcatccagctgataaagccaccaatccttccaaccgccaggaggactgggaatacataattggcttctgtgatcagatcaacaaggagctggaagggccacagatcgccgtccgactgctggcccacaagatccagtccccacaggaatgggaggcgctccaggccctgacggtgctggaggcatgcatgaagaactgtgggaggagatttcataacgaagtggggaagttccgctttttgaatgagttaatcaaagtcgtctctccaaagtacctgggggacagggtgtctgagaaagtgaagaccaaggttattgagctgctg

SEQ ID NO: 138421 - DNA, 4181 bp, Homo sapiens
  Payload ID: 7105
  Gene Symbol: GGA3
  Gene Name: golgi-associated, gamma adaptin ear containing, ARF binding protein 3
  ENST ID: ENST00000621217
  CDS Start-End: 35-496
gagttttgaagccgcggggccgggcggctgcaatatggcggaggcggaaggggaaagcctggagtcctggctcaataaagccaccaatccttccaaccgccaggaggactgggaatacataattggcttctgtgatcagatcaacaaggagctggaagggccacagatcgccgtccgactgctggcccacaagatccagtccccacaggaatgggaggcgctccaggccctgacggtgctggaggcatgcatgaagaactgtgggaggagatttcataacgaagtggggaagttccgctttttgaatgagttaatcaaagtcgtctctccaaagtacctgggggacagggtgtctgagaaagtgaagaccaaggttattgagctgctgtacagctggaccatggccctgccagaagaagcaaagatcaaagacgcctaccacatgctgaagagacaggcttttagccaagctgctgaaaagcaaaaacccagatgacctgcaggaggccaacaagctcatcaagtccatggtgaaggaagacgaggcacggatccagaaggtgaccaagcgtctgcacacgttagaggaagttaacaacaacgtgagactgctcagtgagatgctgcttcattacagccaggaggactcttcggacggggacagagagctgatgaaggagctgtttgatcagtgtgagaacaagaggcggactttatttaaactcgccagtgagactgaggacaatgataacagtttgggggacatcctgcaagccagtgacaacctctcccgggtcatcaactcttacaaaacaattattgaagggcaggtcatcaatggcgaggtggctaccttaaccctgcctgactcggaaggaaacagtcagtgcagtaaccaaggcacgctcatcgaccttgcggagctggacacgaccaacagtttgtcctccgtgttggccccagcacctactccaccctcctcaggcatcccaatcctccctccaccaccccaggcctcaggacctccacggagccgctcctctagccaggccgaggccaccctggggcccagcagcacaagcaacgccctctcctggctggacgaggagctactctgcttgggtgcggcccacagggggcgtcaggggcatcccctgacagggctctgggaggaagggtgtgtggaattaggagccctgagcggggccccagtgtgactgttggggtgggcaaagaaccctgagttggaggtactcagtgaagttcagcgaccctgagggccccagggccatcctcccggtggactctgcctcctgccctgcaccccgccccacaggccccccgcttctgcatcatggactggagcgctccattcccctctggaggctgcctgcagaacagcttctcccggcgccttcacccattgatgtcacttgtcacctgacccctcctcaggcaaggcggggctagggctgcctagctcagagcctcttctcatcctgttttcttctctattgtcaggcctcgccgacccagcccctaatgttcctcccaaagagtcagctgggaacagccagtggcacctgctccagagggaacagtccgacctggacttcttcagccccaggccggggaccgctgcctgtggcgcctccgatgctcctctgctccagccctcagccccctcctcaagcagctcccaagctccactgccgcctcccttcccagctcctgtggtcccagccagtgttcctgcccccagtgcgggctcctccttgttttctactggagtggccccagccttggccccaaaagttgagcccgcagtccctgggcaccatggcttggcgttgggcaacagcgcgctgcaccacctggatgccctcgatcagcttctagaagaggccaaagtgacctcgggcttggtgaaacccactacctcccctctcatccccaccaccaccccagccaggcccctcctgcccttctccacggggcccggcagcccgctcttccagccactgagtttccagtcccagggcagccccccgaaggggcctgagctctccctggccagcatccacgtgcccctggaatcgatcaagcctagcagtgcccttcctgtgacagcctacgataaaaacggcttccgcatcctcttccactttgccaaggagtgtcccccaggacgacctgacgtgctggtggtggtggtgtccatgctgaacacggctcccttacctgtcaagagcatcgtgctgcaggctgcagtgcccaagtcaatgaaagtgaagttgcagccaccttctgggacagaactctctccatttagccccatccagccacctgcagccatcacccaggtcatgttgctggccaatccactgaaggagaaggtgcggcttcggtataagctgaccttcgccctgggggagcagctgagcacagaggtgggcgaggtggaccagttccctcctgtggaacagtgggggaacctatgaccccagaggacgctgtgatctccaccttgaagccaggcaggctgccctgagacgaggagggctctggtcccgtcactctccatgccctgacaacagtgcttgtagctttgatgtggaacaggggccctgggcatttctgctgagaaccaaactgctgctgtgataacctctcctttggcccctaaaaggacctgtttttatctacctgtgtgacttgaagtggccatatgctgtcaggggtgcggagtggcccctgacttcactgctgtcccgggaacatggacccccaggcttggcgtaggtgtttgcttccttctactggcattcactgaagccactggggtggggggtggggggtgggagtctctaaagagagactgtcatgggtcattccccacaagagccacatcctcacacctgacagatgcacggcccaaggggctgcagccctgttgcaattccatgcttcccccgccaaccagctcctgctgccatccccagggaggtggcccaggaaggtgcctggcccagaataaggaactggcatactgcaaagtccccagccctgcctctggtggacagcatcgtcctggaatggccacggagtgatgagttgtgtgcttgtccctggcagtggcaggctgtgtcctatggacatcttggcaggacatggaatttggcctcatgacaggcccaactagggataggaaggaaaatgaagagagccagtatttccccttctccagaagcaggtactcagctttctgggaaaagcgtgcctccagccgtggggacaggccatcctactgactacctcttgcttggcatgaaataaactgctatcctccccttggaatctaccgccactctacatcctactgctttggcctccctctcctctcaccagatggcatgtggtgtggcacctgtggctggacacaggaggcctcaggatcacaaatgttacactagacatatgtcctaatgtgctgcccagaaacctcaactgttccccagctactgaggggcactgtcagcgagatgttgggtctggaggtgatgagatcgggccacacttgagctgagtcaccagaccctattgcttcaacagtgcttggcccccgccagcttgtcccagccactctagctgctggatgtgatcctgggacatgtactccaagcctccgtcacaaaaaaaaaatcaccagctgccatagacacgggggaagcttgcggagcccaggtgaacaagctcagcaatcggacatctctggggaaaggaaggtggcacagaccatgttccctggttcctccctgccccttgccaggcttccttattccttactatgggaagaggtcatatcccttccctgcccctcgctgtctttagcaagcaggtttcactgcttcattagaagaggacaagtcaaaagtgaatcatttttcactacttaaggaataaatccaagagctttccagagactggctgctgcagccctgggaatgtctgtggaattactatgtggaaatggaactttgtgttatgctctagacattacagttatttgagtgttactcgttactgttgaggtcagtgcttcgtggcaaatggctgtactggatatcccagctctgctgcccttgttttgctgcatgttaaataaaaccattttcactgta

SEQ ID NO: 138422 - DNA, 1876 bp, Homo sapiens
  Payload ID: 7106
  Gene Symbol: GFY
  Gene Name: golgi-associated, olfactory signaling regulator
  Uniprot ID: I3L273
  ENST ID: ENST00000576655
  CDS Start-End: 320-1876
aggaacagagacacaaagagaaggacaaagacagagtggccgaggaagaaatagagagaaagaatgggaacgacagaaaaagaaaggaaaaggaagaaaacaagaaaagagagcgaaggagatggaaacgaacagtcagatggagatggaggagggaaagaaaaggctctcagaaagacagacggaaatggaaggacgtcctggtctggaaggagctgcccagagataaatacagcagcgagaggcccagaaagatcgaggctctgcttatctgctgttaccttggacaccagagcagctataggtatctgccagagctatgaaatcattcagccggatcctcttcctcgtcttcctcctcgccggcctgaggtccaaggccgctccctcagcccctctgcctttgggctgtggctttccggacatggcccacccctctgagacttcccctctgaagggtgcttctgaaaattccaaacgagatcgccttaacccagaatttcctgggactccttaccctgagccttccaagctacctcatacggtttccctggaaaccttcccacttgacttcactgagcccctcaaccctgacctccgagaaaccccgcacccagagtctcctgagacccccaaagctgactcactcacaacctcaatatcagaatccctggacatgcccaaaactaacctctccaaaatggcacacccagagtcttctgagacccccacacctggcccaactgaaatgccacacccaggatcccctgagacccccaaacctaacttctccaaaacttcacgcccagaatttcctgagaccccaaacactgaccttatgcaaactacaccccaagaatccccagagattctgcagcttaatgccactgaagtctcacaggcagaactccccgagacctcaaacactaaccctaccaagacccctgaccccaaatccccagaaaagcatgacctcaactccactgagaccccaaactctgaatttctccaagctctccatcctgacccttctaaaaccccccacccagaatcccatgtgacccacaatcccagccccaccgaaatttcccaaacagaattccccacaacctactaccaaaatgcaacagatgtacccaggacctccgaccctcaaatctccactagtctctacccagaaacacctgtgcccttcaaggatgacgccactgctctaaatgagctgtccctgaatcccaaaccaggaacacctgcagccatccagcccgactccccaaaattgcccacttcagattctccaggaatggttgagctgaaggccccccagaactctggccctaaggagtccaacgtccctcctccctcagcccggattgcaggtccccctgctcttccagggcgccccagtcagttggcccctgccactctgcgggcaccccagaggcacagccgaggtgagggagtcaacaccatcatcgtggtggagcgagtgaaggagaccggcgtgactctggtggggcgaccacgtggcgcagcaggcggggccctctgcctgttcttcgcggggaccgcgctgctgatcggcatctttgtgctgctgtggtgtctttaccgccgggcagctagacagcggcccttcgcacatcaccggcttccggacgacggagatgaaccggttctgcatttggacgccccgaaagacccctacgacctctacttttatgctccggatacctgggtcccttcccacatcgccaccaagcagcccccgcccacacctcctctgccaccaaagctgcccccgccgccccgcgggggtcgcccgcagcgtctggaggccctgtcccccgccacgctccccaacaacttcgtgtga

SEQ ID NO: 138423 - DNA, 1557 bp, Homo sapiens
  Payload ID: 7106
  Gene Symbol: GFY
  Gene Name: golgi-associated, olfactory signaling regulator
  Uniprot ID: I3L273
  ENST ID: ENST00000610896
  CDS Start-End: 1-1557
atgaaatcattcagccggatcctcttcctcgtcttcctcctcgccggcctgaggtccaaggccgctccctcagcccctctgcctttgggctgtggctttccggacatggcccacccctctgagacttcccctctgaagggtgcttctgaaaattccaaacgagatcgccttaacccagaatttcctgggactccttaccctgagccttccaagctacctcatacggtttccctggaaaccttcccacttgacttcactgagcccctcaaccctgacctccgagaaaccccgcacccagagtctcctgagacccccaaagctgactcactcacaacctcaatatcagaatccctggacatgcccaaaactaacctctccaaaatggcacacccagagtcttctgagacccccacacctggcccaactgaaatgccacacccaggatcccctgagacccccaaacctaacttctccaaaacttcacgcccagaatttcctgagaccccaaacactgaccttatgcaaactacaccccaagaatccccagagattctgcagcttaatgccactgaagtctcacaggcagaactccccgagacctcaaacactaaccctaccaagacccctgaccccaaatccccagaaaagcatgacctcaactccactgagaccccaaactctgaatttctccaagctctccatcctgacccttctaaaaccccccacccagaatcccatgtgacccacaatcccagccccaccgaaatttcccaaacagaattccccacaacctactaccaaaatgcaacagatgtacccaggacctccgaccctcaaatctccactagtctctacccagaaacacctgtgcccttcaaggatgacgccactgctctaaatgagctgtccctgaatcccaaaccaggaacacctgcagccatccagcccgactccccaaaattgcccacttcagattctccaggaatggttgagctgaaggccccccagaactctggccctaaggagtccaacgtccctcctccctcagcccggattgcaggtccccctgctcttccagggcgccccagtcagttggcccctgccactctgcgggcaccccagaggcacagccgaggtgagggagtcaacaccatcatcgtggtggagcgagtgaaggagaccggcgtgactctggtggggcgaccacgtggcgcagcaggcggggccctctgcctgttcttcgcggggaccgcgctgctgatcggcatctttgtgctgctgtggtgtctttaccgccgggcagctagacagcggcccttcgcacatcaccggcttccggacgacggagatgaaccggttctgcatttggacgccccgaaagacccctacgacctctacttttatgctccggatacctgggtcccttcccacatcgccaccaagcagcccccgcccacacctcctctgccaccaaagctgcccccgccgccccgcgggggtcgcccgcagcgtctggaggccctgtcccccgccacgctccccaacaacttcgtgtga

SEQ ID NO: 138424 - DNA, 4811 bp, Homo sapiens
  Payload ID: 7107
  Gene Symbol: GOLGA1
  Gene Name: golgin A1
  Uniprot ID: Q92805
  ENST ID: ENST00000373555
  CDS Start-End: 335-2638
gcgctgggagacgtgcggttccgggtcgctgctcggctcgccggctgggcggtgggggttggtgacgcgggccggggctcacgagaggcccgggaggcggggctttgctggcttcccagagagaggcaggacagaatgctttgacctccaagctgttttaaatctagtagataagccagatcctgtgttgccataagcccttggcccacatttaagtgggaatgcagctagcttggatgtctgaaactttgtaggcgcctctgtctgaatcctgaacacaggcaccaggactactgagagctcgtcatctgtgcaggatagccacacagcaaacatgtttgcaaaactgaagaagaaaattgcagaagagactgctgttgctcagaggccaggaggtgctactaggatcccacggtctgtgagcaaggaatcagttgcctcaatgggagctgactcaggagatgactttgcttccgatggaagcagctccagagaagatctttcatcccagcttctgagaaggaatgaacagatacggaagttagaggccagactttctgactatgctgaacaggtccgaaacttgcagaagataaaagagaagcttgaaattgcattagaaaaacaccaggattcttccatgcggaaatttcaagagcagaatgagacattccaagccaacagagccaaaatggcagaaggactggctttggcattagccagaaaggaccaggaatggtcagaaaagatggatcagcttgaaaaggagaaaaatattctgacagcccagttacaggaaatgaagaaccagagtatgaatcttttccaaaggagagatgaaatggatgaattagaggggttccagcagcaggaactaagtaaaataaagcacatgcttttaaaaaaagaagaaagtctagggaaaatggaacaagaattggaggcacgaaccagagaacttagtcgtacccaggaggagttgatgaactccaatcagatgtcatcagacttaagccagaagctagaagaattgcagagacactactcaacgctggaagagcagagagatcatgtgatagcttcaaaaacaggtgcagaaagtaagatcacagccctggaacaaaaggaacaagagctccaagcactcattcagcagctttccattgatttgcaaaaggtcactgctgaaactcaagagaaagaagacgttatcacacatttgcaagagaaggttgcatccttggagaagagactagaacagaacttatcaggagaagaacacttgcaagaactcctgaaagagaaaacacttgctgagcagaatttggaggataccagacaacagctcttggcagccagaagcagccaggctaaggccattaacaccctggagactcgggtgagagaactggagcagaccttgcaggcctctgaggagcagctccaacagagcaagggcattgtggctgcccaggaaactcagatacaggagctcgctgccgccaaccaggagagcagccatgtgcagcagcaggcccttgctctggagcagcagttcttggagcgcacccaggcgctagaagcccagatagtggccctggagagaacgcgggcagctgaccagaccaccgcagagcaagggatgagacaactggagcaagaaaatgcagcccttaaagaatgcaggaatgaatatgaacgttctttacaaaatcaccaatttgaactaaagaagctgaaggaagaatggagccaaagagaaattgtgagcgtggccatggctcaagccctggaggaggtgcggaagcaaagggaagagttccagcaacaggcagctaacctgacagccataatagacgagaaggaacagaatctgcgggaaaaaaccgaagtgcttctccagaaagagcaggagattctccagctggagcgaggtcacaactctgccctgctgcagatacaccagctgcaggccgagctggaggccctgaggaccctcaaggcggaggaggctgcagtggtcgcggagcaggaggacctgctgaggctgcggggcccattgcaggccgaagcactctcagtcaatgagtcgcacgtgacctcgagggccatgcaggaccctgtgttccagcttccaactgcaggaagaacaccaaatggtgaggttggggccatggatctcacacagctacagaaggagaaacaggacttggagcagcaacttctggagaaaaataagaccataaagcagatgcagcagcggatgctggagctccggaagactctgcagaaggagctgaaaatcagacccgataatgagctcttcgaagtccgggagaaacctggacctgagatggcaaacatggcgccttccgtcacgaataacactgacctgacagatgcccgcgagatcaactttgagtaccttaaacatgtggttttaaaattcatgtcttgtcgcgaatccgaggcttttcatcttataaaagctgtgtcagtgttgctgaacttttcccaagaggaggagaacatgctcaaggaaactctggaatataagatgtcatggtttgggtccaaaccagctcccaagggcagcatccggccgtctatctcaaaccctcggataccatggtcctagaggggactacccaaggatggagctccgtgggttgacactttttctgtgaaaagaacactgacacaccagtctgggtgggtttttaatcactgtaactgcagtattttgtacaagtgtctaaacattgtttacaagactaaggcccacttccctgcaggctgacctgaacctcagggggtagctgatcctgtcattctggtcaccaaacaggagggtcctggcactacccagatttccacagtgctgctaatatcccagctccagccagcaccccatctgcacctgaatcctctaacttcacggtagcacttacagctgaagccatcagcatctggcaggcacacctgagtcaccatgtagcgctgctactggaggtagagacggccctttgagatggtgcccagcaggccaaacccacctgcctctgccaggaacagccaactccatgggaactctatgggagtggcttttaaaaattcagatgagttagaagctttttatcccttcctctcaagaaaatattctttcaccctgtctctcaaaccacctagaactttagaggatccatctttaagggtcggtgtggatgaatgagaaaatgcacctttctgacagtatctccactttacttaagaaaactagcaaatatatgaaaagacccttagtaccaaatacactcaattgcctttttaatgaatgtacttgtcttggataggttgctggtaaaccattttaaactattttttatagctgaagttcttcactactataaacatgtcttctgtactataaaatccatttaactggtgttcttaaaatcagagcgtccagaggaaattcttcctaaaactaggattcctgttcctttgtcttctcactcgcactctggcactgctccctctgaagtgcagtgggatctcgtgtgctttgtcttgattctgtgctgcgctgccgctgggcgatgcagaccacctgtcttctactgaaggacagtccgctgtctccagtgggggcagcagctgtcccccagcctcgatggagacactggggcagtctgccttgtctgtggagctgctctctctccctcatcccaccccaaatacttaaaatgacactacacccagacggcgcccagctggctgcagcacttgtagcatgcacatgactctggtagtaaccaacaaaaacttgttttatggattcctcgtttactgaggaaagggaacatgctggttctggaaaagccacaatattgaatctaaaaggaaaccgtttattgtttgatgaaagtttcactggttaaataaaaaactaaattaataactggagcctctaaatttattatccattatccagtgatggaaagttgtatttctcaatcatgcttagggccaaaataggtatataaaatgtgtcacagaaaaacacgcatttgcaacgttaacctaacgaaatttccatgaagaaccaagtcagggcagcatctccttagtcccagctcaggctctctgccttccagaggccgcttctccagtgactaacctcctcctctggctcctccttgcagacagttatcccttgtttagaacacgaatttccatttacctggtgggaacacgaaacaggagtctcttctgttctgcaagtttgatgggtaagaggtagccttttttcaaagtaggatttcctttttcaactgttccaggaaagaatctctaagactgggtagctcacagccagccaaaggcagctacatttccacagaagcccatccgctgcctccgtggcttctccagccattgaactggtcccacacgcaccccaggccccactcctcggcagtttcaggtgtagctgtggggcccgttcctaggtctgtactcactttagggaggcttcactgactaggctttcctcctgcatgttgaatttccttcagctttaagaggaagagtggaataaatattctaagtgatttaatgcactttgacttgtataaaactttctgtgttagcgacggtatctatagccctttatacgagcgatggatcttgagctctccttccatgttgtaaatagggattgtattcttgaaaactgctgtagcaaattcatctgtggtgcaatacactttttgattaaagctcttcaatccagatgcaactacaatgga

SEQ ID NO: 138425 - DNA, 589 bp, Homo sapiens
  Payload ID: 7107
  Gene Symbol: GOLGA1
  Gene Name: golgin A1
  ENST ID: ENST00000421514
  CDS Start-End: 252-589
tgagaagcagtttggacccagctgaaaaattttatttatggagacttgtaatcagcctgatatacagagaacactctggactggaaatatagtcagatcctgtgttgccataagcccttggcccacatttaagtgggaatgcagctagcttggatgtctgaaactttgtaggcgcctctgtctgaatcctgaacacaggcaccaggactactgagagctcgtcatctgtgcaggatagccacacagcaaacatgtttgcaaaactgaagaagaaaattgcagaagagactgctgttgctcagaggccaggaggtgctactaggatcccacggtctgtgagcaaggaatcagttgcctcaatgggagctgactcaggagatgactttgcttccgatggaagcagctccagagaagatctttcatcccagcttctgagaaggaatgaacagatacggaagttagaggccagactttctgactatgctgaacaggtccgaaacttgcagaagataaaagagaagcttgaaattgcattagaaaaacaccaggattcttccatgcggaaatttcaagagcagaatgagacatt

SEQ ID NO: 138426 - DNA, 935 bp, Homo sapiens
  Payload ID: 7107
  Gene Symbol: GOLGA1
  Gene Name: golgin A1
  ENST ID: ENST00000485337
  CDS Start-End: 1-456
gacttaagccagaagctagaagaattgcagagacactactcaacgctggaagagcagagagatcatgtgatagcttcaaaaacaggtgcagaaagtaagatcacagccctggaacaaaaggaacaagagctccaagcactcattcagcagctttccattgatttgcaaaaggtcactgctgaaactcaagagaaagaagacgttatcacacatttgcaagagaaggttgcatccttggagaagagactagaacagaacttatcaggagaagaacacttgcaagaactcctgaaagagaaaacacttgctgagcagaatttggaggataccagacaacagctcttggcagccagaagcagccaggctaaggccattaacaccctggagactcgggtgagagaactggagcagaccttgctctggagcagcagttcttggagcgcacccaggcgctagaagcccagatagtggccctggagagaacgcgggcagctgaccagaccaccgcagagcaagggatgagacaactggagcaagaaaatgcagcccttaaagaatgcaggaatgaatatgaacgttctttacaaaatcaccaatttgaactaaagaagctgaaggaagaatggagccaaagagaaattgtgagcgtggccatggctcaagccctggaggaggtgcggaagcaaagggaagagttccagcaacaggcagctaacctgacagccataatagacgagaaggaacagaatctgcgggaaaaaaccgaagtgcttctccagaaagagcaggagattctccagctggagcgaggtcacaactctgccctgctgcagatacaccagctgcaggccgagctggaggccctgaggaccctcaaggcggaggaggctgcagtggtcgcggagcaggaggacctgctgaggctgcggggccca

SEQ ID NO: 138427 - DNA, 4107 bp, Homo sapiens
  Payload ID: 7107
  Gene Symbol: GOLGA1
  Gene Name: golgin A1
  ENST ID: ENST00000475407
  CDS Start-End: 1-505
cttgcagaagataaaagagaagcttgaaattgcattagaaaaacaccaggattcttccatgcggaaatttcaagagcagaatgagacattccaagccaacagagccaaaatggcagaaggactggctttggcattagccagaaaggaccaggaatggtcagaaaagatggatcagcttgaaaaggagaaaaatattctgacagcccagttacaggaaatgaagaaccagagtatgaatcttttccaaaggagagatgaaatggatgaattagaggggttccagcagcaggaactaagtaaaataaagcacatgcttttaaaaaaagaagaaagtctagggaaaatggaacaagaattggaggcacgaaccagagaacttagtcgtacccaggaggagttgatgaactccaatcagatgtcatcagacttaagccagaagctagaagaattgcagagacactactcaacgctggaagagcagaggttcttgcttggtcactgctgaaactcaagagaaagaagacgttatcacacatttgcaagagaaggttgcatccttggagaagagactagaacagaacttatcaggagaagaacacttgcaagaactcctgaaagagaaaacacttgctgagcagaatttggaggataccagacaacagctcttggcagccagaagcagccaggctaaggccattaacaccctggagactcgggtgagagaactggagcagaccttgcaggcctctgaggagcagctccaacagagcaagggcattgtggctgcccaggaaactcagatacaggagctcgctgccgccaaccaggagagcagccatgtgcagcagcaggcccttgctctggagcagcagttcttggagcgcacccaggcgctagaagcccagatagtggccctggagagaacgcgggcagctgaccagaccaccgcagagcaagggatgagacaactggagcaagaaaatgcagcccttaaagaatgcaggaatgaatatgaacgttctttacaaaatcaccaatttgaactaaagaagctgaaggaagaatggagccaaagagaaattgtgagcgtggccatggctcaagccctggaggaggtgcggaagcaaagggaagagttccagcaacaggcagctaacctgacagccataatagacgagaaggaacagaatctgcgggaaaaaaccgaagtgcttctccagaaagagcaggagattctccagctggagcgaggtcacaactctgccctgctgcagatacaccagctgcaggccgagctggaggccctgaggaccctcaaggcggaggaggctgcagtggtcgcggagcaggaggacctgctgaggctgcggggcccattgcaggccgaagcactctcagtcaatgagtcgcacgtgacctcgagggccatgcaggaccctgtgttccagcttccaactgcaggaagaacaccaaatggtgaggttggggccatggatctcacacagctacagaaggagaaacaggacttggagcagcaacttctggagaaaaataagaccataaagcagatgcagcagcggatgctggagctccggaagactctgcagaaggagctgaaaatcagacccgataatgagctcttcgaagtccgggagaaacctggacctgagatggcaaacatggcgccttccgtcacgaataacactgacctgacagatgcccgcgagatcaactttgagtaccttaaacatgtggttttaaaattcatgtcttgtcgcgaatccgaggcttttcatcttataaaagctgtgtcagtgttgctgaacttttcccaagaggaggagaacatgctcaaggaaactctggaatataagatgtcatggtttgggtccaaaccagctcccaagggcagcatccggccgtctatctcaaaccctcggataccatggtcctagaggggactacccaaggatggagctccgtgggttgacactttttctgtgaaaagaacactgacacaccagtctgggtgggtttttaatcactgtaactgcagtattttgtacaagtgtctaaacattgtttacaagactaaggcccacttccctgcaggctgacctgaacctcagggggtagctgatcctgtcattctggtcaccaaacaggagggtcctggcactacccagatttccacagtgctgctaatatcccagctccagccagcaccccatctgcacctgaatcctctaacttcacggtagcacttacagctgaagccatcagcatctggcaggcacacctgagtcaccatgtagcgctgctactggaggtagagacggccctttgagatggtgcccagcaggccaaacccacctgcctctgccaggaacagccaactccatgggaactctatgggagtggcttttaaaaattcagatgagttagaagctttttatcccttcctctcaagaaaatattctttcaccctgtctctcaaaccacctagaactttagaggatccatctttaagggtcggtgtggatgaatgagaaaatgcacctttctgacagtatctccactttacttaagaaaactagcaaatatatgaaaagacccttagtaccaaatacactcaattgcctttttaatgaatgtacttgtcttggataggttgctggtaaaccattttaaactattttttatagctgaagttcttcactactataaacatgtcttctgtactataaaatccatttaactggtgttcttaaaatcagagcgtccagaggaaattcttcctaaaactaggattcctgttcctttgtcttctcactcgcactctggcactgctccctctgaagtgcagtgggatctcgtgtgctttgtcttgattctgtgctgcgctgccgctgggcgatgcagaccacctgtcttctactgaaggacagtccgctgtctccagtgggggcagcagctgtcccccagcctcgatggagacactggggcagtctgccttgtctgtggagctgctctctctccctcatcccaccccaaatacttaaaatgacactacacccagacggcgcccagctggctgcagcacttgtagcatgcacatgactctggtagtaaccaacaaaaacttgttttatggattcctcgtttactgaggaaagggaacatgctggttctggaaaagccacaatattgaatctaaaaggaaaccgtttattgtttgatgaaagtttcactggttaaataaaaaactaaattaataactggagcctctaaatttattatccattatccagtgatggaaagttgtatttctcaatcatgcttagggccaaaataggtatataaaatgtgtcacagaaaaacacgcatttgcaacgttaacctaacgaaatttccatgaagaaccaagtcagggcagcatctccttagtcccagctcaggctctctgccttccagaggccgcttctccagtgactaacctcctcctctggctcctccttgcagacagttatcccttgtttagaacacgaatttccatttacctggtgggaacacgaaacaggagtctcttctgttctgcaagtttgatgggtaagaggtagccttttttcaaagtaggatttcctttttcaactgttccaggaaagaatctctaagactgggtagctcacagccagccaaaggcagctacatttccacagaagcccatccgctgcctccgtggcttctccagccattgaactggtcccacacgcaccccaggccccactcctcggcagtttcaggtgtagctgtggggcccgttcctaggtctgtactcactttagggaggcttcactgactaggctttcctcctgcatgttgaatttccttcagctttaagaggaagagtggaataaatattctaagtgatttaatgcactttgacttgtataaaactttctgtgttagcgacggtatctatagccctttatacgagcgatggatcttgagctctccttccatgttgtaaatagggattgtattcttgaaaactgctgtagcaaattcatctgtggtgcaatacactttttgattaaagctcttcaa

SEQ ID NO: 138428 - DNA, 1439 bp, Homo sapiens
  Payload ID: 7108
  Gene Symbol: GOLGA2
  Gene Name: golgin A2
  ENST ID: ENST00000450617
  CDS Start-End: 20-1439
ggttgccgggatcgcgctgatgtggccccaaccccgcctccctccccgccccgcgatgtcggaagaaacccgacagagcaaattggccgcagcgaagaaaaagttgagagaatatcagcagaggaatagccctggtgttcctacaggagcgaaaaagaagaagaaaataaaaaatggcagtaaccctgagacaaccacttctggtggttgccactcacctgaggatattcaggacattctgaaggtgctggtgtccgaccttaaccgttccaatggggtagcgctccccccattggacaagtggaagacacccaaggacaatgctgctactctacaaccatctgatgacaccgtgttacctggcggtgtcccttcccctggtgccagtctcactagcatggcggcatctcagaatcatgatgctgacaatgtccctaatctcatggatgaaaccaagactttctcatcaaccgagagcctgcgacaactctcccaacagctcaatggtcttgtttgtgagtctgcgacatgtgtcaatggggagggccctgcatcgtctgctaacctgaaggatctggagagccggtaccaacagctagcggtagccctggactccagctatgtaacaaacaaacaactcaatatcacgatagagaaattgaaacaacagaaccaagaaattacggatcagttggaagaagaaaagaaagaatgccaccaaaagcagggagccctaagggagcagttacaggttcacattcagaccatagggatcctcgtatcagagaaagctgagttacagacagccctggctcacactcagcatgctgccaggcagaaagaaggagagtctgaagatctggccagccgcctgcagtattcccggcggcgtgtgggagagttggagcgggctctctctgctgtctccacgcagcagaagaaggcagacaggtacaacaaggagttaaccaaagagagagacgccctcaggctggagttatacaagaacacccaaagcaatgaggacctgaagcaagagaaatcagaattggaagagaagcttcgggtcctagtgactgagaaggctggcatgcagcttaacttggaagaattgcaaaagaagttagagatgacggaactcctgcttcaacagttttcaagccggtgtgaagcccctgatgctaaccagcagttacagcaggccatggaggagcgggcacagctggaagcacacctggggcaggtaatggagtcggttagacaactacaaatggagagagataaatatgcggagaatctcaaaggagagagcgccatgtggcggcagaggatgcagcagatgtcagagcaggtgcacacattgagagaggagaaggaatgtagcatgagtcgggtacaggagctggagacgagcttggctgaactgaggaaccagatgg

SEQ ID NO: 138429 - DNA, 704 bp, Homo sapiens
  Payload ID: 7108
  Gene Symbol: GOLGA2
  Gene Name: golgin A2
  ENST ID: ENST00000458730
  CDS Start-End: 1-704
attcaggacattctgaaggtgctggtgtccgaccttaaccgttccaatggggtagcgctccccccattggacaagtggaagacacccaaggacaatgctgctactctacaaccatctgatgacaccgtgttacctggcggtgtcccttcccctggtgccagtctcactagcatggcggcatctcagaatcatgatgctgacaatgtccctaatctcatggatgaaaccaagactttctcatcaaccgagagcctgcgacaactctcccaacagctcaatggtcttgtttgtgagtctgcgacatgtgtcaatggggagggccctgcatcgtctgctaacctgaaggatctggagaaacaacagaaccaagaaattacggatcagttggaagaagaaaagaaagaatgccaccaaaagcagggagccctaagggagcagttacaggttcacattcagaccatagggatcctcgtatcagagaaagctgagttacagacagccctggctcacactcagcatgctgccaggcagaaagaaggagagtctgaagatctggccagccgcctgcagtattcccggcggcgtgtgggagagttggagcgggctctctctgctgtctccacgcagcagaagaaggcagacaggtacaacaaggagttaaccaaagagagagacgccctcaggctggagttatacaagaacac

SEQ ID NO: 138430 - DNA, 4260 bp, Homo sapiens
  Payload ID: 7108
  Gene Symbol: GOLGA2
  Gene Name: golgin A2
  Uniprot ID: Q08379
  ENST ID: ENST00000421699
  CDS Start-End: 14-3022
cgggatcgcgctgatgtggccccaaccccgcctccctccccgccccgcgatgtcggaagaaacccgacagagcaaattggccgcagcgaagaaaaagttgagagaatatcagcagaggaatagccctggtgttcctacaggagcgaaaaagaagaagaaaataaaaaatggcagtaaccctgagacaaccacttctggtggttgccactcacctgaggatacacccaaggacaatgctgctactctacaaccatctgatgacaccgtgttacctggcggtgtcccttcccctggtgccagtctcactagcatggcggcatctcagaatcatgatgctgacaatgtccctaatctcatggatgaaaccaagactttctcatcaaccgagagcctgcgacaactctcccaacagctcaatggtcttgtttgtgagtctgcgacatgtgtcaatggggagggccctgcatcgtctgctaacctgaaggatctggagagccggtaccaacagctagcggtagccctggactccagctatgtaacaaacaaacaactcaatatcacgatagagaaattgaaacaacagaaccaagaaattacggatcagttggaagaagaaaagaaagaatgccaccaaaagcagggagccctaagggagcagttacaggttcacattcagaccatagggatcctcgtatcagagaaagctgagttacagacagccctggctcacactcagcatgctgccaggcagaaagaaggagagtctgaagatctggccagccgcctgcagtattcccggcggcgtgtgggagagttggagcgggctctctctgctgtctccacgcagcagaagaaggcagacaggtacaacaaggagttaaccaaagagagagacgccctcaggctggagttatacaagaacacccaaagcaatgaggacctgaagcaagagaaatcagaattggaagagaagcttcgggtcctagtgactgagaaggctggcatgcagcttaacttggaagaattgcaaaagaagttagagatgacggaactcctgcttcaacagttttcaagccggtgtgaagcccctgatgctaaccagcagttacagcaggccatggaggagcgggcacagctggaagcacacctggggcaggtaatggagtcggttagacaactacaaatggagagagataaatatgcggagaatctcaaaggagagagcgccatgtggcggcagaggatgcagcagatgtcagagcaggtgcacacattgagagaggagaaggaatgtagcatgagtcgggtacaggagctggagacgagcttggctgaactgaggaaccagatggctgaacccccgcccccagagcccccagcagggccctccgaggtggagcagcagctacaagcggaggctgagcacctgcggaaggagctggagggtctggcaggacagcttcaagcccaggtgcaagacaatgagggcttgagtcgcctgaaccgggagcaggaggagaggctgctggagctggagcgggcggccgagctctggggggagcaggcggaggcgcgcaggcaaatcctggagaccatgcagaacgaccgcactaccatcagccgcgcactctcccagaaccgggagctcaaggagcagctggctgagctgcagagcggatttgtaaagctgactaatgagaacatggagatcaccagcgcactgcagtcggagcagcacgtcaagagggagctgggaaagaagctgggcgagctgcaggagaagctgagcgagctgaaggaaacggtggagctgaagagccaagaggctcaaagtctgcagcagcagcgagaccagtacctgggacacctgcagcagtatgtggccgcctatcagcagctgacctctgagaaggaggtgctgcataatcagctactgctgcagacccagctcgtggaccagctgcagcagcaggaagctcagggcaaagcggtggccgagatggcccgccaagagttgcaggaaacccaggagcgcctggaagctgccacccagcagaatcagcagctacgggcccagttgagcctcatggctcaccctggggaaggagatggactggaccgggaggaggaggaggatgaggaggaggaggaggaggaggcggtggcagtacctcagcccatgccaagcatcccggaggacctggagagccgggaagccatggtggcatttttcaactcagctgtagccagtgccgaggaggagcaggcaaggctacgtgggcagctgaaggagcaaagggtgcgctgccggcgcctggctcacctgctggcctcggcccagaaggagcctgaggcagcagccccagccccagggaccgggggtgattctgtgtgtggggagacccaccgggccctgcagggggccatggagaagctgcagagccgctttatggagctcatgcaggagaaggcagacctgaaggagagggtagaggaactggaacatcgctgcatccagctttctggagagacagacaccattggagagtacattgcactgtaccagagccagagggcagtgctgaaggagcggcaccgggagaaggaggagtacatcagcaggctggcccaagacaaggaggagatgaaggtgaagctgctggagctgcaggagctggtcttacggcttgtgggcgaccgcaacgagtggcatggcagattcctggcagctgcccagaaccctgctgatgagcccacttcaggggccccagccccccaggaacttggggctgccaaccagcagggtgatctttgcgaggtgagcctcgccggcagtgtggagcctgcccaaggagaggccagggagggttctccccgtgacaaccccactgcacagcagatcatgcagctgcttcgtgagatgcagaacccccgggagcgcccaggcttgggcagcaacccctgcattccttttttttaccgggctgacgagaatgatgaggtgaagatcactgtcatctaaaagccggctactgtcagcaaagcctgaagaagtggggctggataccctgcccccaccatatccctaccatcccttctcagtcaaccctttacccttacagtagcaagcatagacccctgtctaacgggggtagacaggtgcagatgaggtgaagatcactgtcatctaaaagctggccactaaattaaaaaaaaattaaaagttatgggattaaaaaaagttatgggataaaaaaggttatgggtaacttatggtataaaagttatgaaaaaaggccaggtgcagtggctcacgcctgtaatcccagcacttttgggaggctgaggttgggagttcaagaccagcctggtcaacatggtgaaactgtgtctctactaaaaatacaaaaattagccaggcatggtggcacgtgcctgtaatcccagctactcgggaggctgaggcaggagaatcgcttgaacctgggaggtggaggttgcagtgggctgagatcacgccattgcactccagcctgggcgacagagtgagactctgtctcaaaaaaaaaaaaaattatgaaaaaagttatgggattaaagaaagtcaggataaaaattttaaaaagcaggccactgtcagcaaagcctggagaagtggggccggaggctccgcccccatcatgtgcctgccaccccttcccagtcatccctttactcttacagtagcaaataagacccctgtctaatggggggagacaaatgtgtagacccttagccaccttggccagggctgactccttaaatttctggatgatgatgattgttatttaatagccagaggctcatataattggcctctttggaagaggcctcatggcctccttactctcaccaaagcaatttttccctcaggggggctcccatcttcttacacagagaggcagctgaggcaggacagtggggctaactgtagaccaggcgagggcacgggctgctggggtggccctgcttccccagtgtacatattgtatctgtgtaacattttgtatattccaggggtagggccgccccctgtatcatacctagcagaggttggagctggcacatggggaggaggttctaataattatttggggctgggaaacttatttattgatagcataggacagaggaaggaggcggggatggggtcgtggcgccctggtgatgcgactcctgtttattttgctttttatttcggaataaatggatttagccata

SEQ ID NO: 138431 - DNA, 428 bp, Homo sapiens
  Payload ID: 7108
  Gene Symbol: GOLGA2
  Gene Name: golgin A2
  ENST ID: ENST00000490628
  CDS Start-End: 12-311
ggatcgcgctgatgtggccccaaccccgcctccctccccgccccgcgatgtcggaagaaacccgacagagcaaattggccgcagcgaagaaaaagttgagagaatatcagcagaggaatagccctggtgttcctacaggagcgaaaaagaagaagaaaataaaaaatggcagtaaccctgagacaaccacttctggtggttgccactcacctgaggatgtgagtcttggatggccaggctcctggggacagggggcccaaggggcagtagagggtaattgttatgattgtggaagaactgttgggtactgattaagagttctgggtttgtatcctacctgtccatctgctagggatgtgatttagggcaaattgcttgagctttttgggcctctcttttcacaactataaagtattgttttacttaca

SEQ ID NO: 138432 - DNA, 2973 bp, Homo sapiens
  Payload ID: 7108
  Gene Symbol: GOLGA2
  Gene Name: golgin A2
  ENST ID: ENST00000609374
  CDS Start-End: 1-2973
atgtcggaagaaacccgacagagcaaattggccgcagcgaagaaaaagttgagagaatatcagcagaggaatagccctggtgttcctacaggagcgaaaaagaagaagaaaataaaaaatggcagtaaccctgagacaaccacttctggtggttgccactcacctgaggatacacccaaggacaatgctgctactctacaaccatctgatgacaccgtgttacctggcggtgtcccttcccctggtgccagtctcactagcatggcggcatctcagaatcatgatgctgacaatgtccctaatctcatggatgaaaccaagactttctcatcaaccgagagcctgcgacaactctcccaacagctcaatggtcttgtttgtgagtctgcgacatgtgtcaatggggagggccctgcatcgtctgctaacctgaaggatctggagagccggtaccaacagctagcggtagccctggactccagctatgtaacaaacaaacaactcaatatcacgatagagaaattgaaacaacagaaccaagaaattacggatcagttggaagaagaaaagaaagaatgccaccaaaagcagggagccctaagggagcagttacaggttcacattcagaccatagggatcctcgtatcagagaaagctgagttacagacagccctggctcacactcagcatgctgccaggcagaaagaaggagagtctgaagatctggccagccgcctgcagtattcccggcggcgtgtgggagagttggagcgggctctctctgctgtctccacgcagcagaagaaggcagacaggtacaacaaggagttaaccaaagagagagacgccctcaggctggagttatacaagaacacccaaagcaatgaggacctgaagcaagagaaatcagaattggaagagaagcttcgggtcctagtgactgagaaggctggcatgcagcttaacttggaagaattgcaaaagaagttagagatgacggaactcctgcttcaacagttttcaagccggtgtgaagcccctgatgctaaccagcagttacagcaggccatggaggagcgggcacagctggaagcacacctggggcaggtaatggagtcggttagacaactacaaatggagagagataaatatgcggagaatctcaaaggagagagcgccatgtggcggcagaggatgcagcagatgtcagagcaggtgcacacattgagagaggagaaggaatgtagcatgagtcgggtacaggagctggagacgagcttggctgaactgaggaaccagatggctgaacccccgcccccagagcccccagcagggccctccgaggtggagcagcagctacaagcggaggctgagcacctgcggaaggagctggagggtctggcaggacagcttcaagcccaggtgcaagacaatgagggcttgagtcgcctgaaccgggagcaggaggagaggctgctggagctggagcgggcggccgagctctggggggagcaggcggaggcgcgcaggcaaatcctggagaccatgcagaacgaccgcactaccatcagccgcgcactctcccagaaccgggagctcaaggagcagctggctgagctgcagagcggatttgtaaagctgactaatgagaacatggagatcaccagcgcactgcagtcggagcagcacgtcaagagggagctgggaaagaagctgggcgagctgcaggagaagctgagcgagctgaaggaaacggtggagctgaagagccaagaggctcaaagtctgcagcagcagcgagaccagtacctgggacacctgcagcagtatgtggccgcctatcagcagctgacctctgagaaggaggtgctgcataatcagctactgctgcagacccagctcgtggaccagctgcagcagcaggaagctcagggcaaagcggtggccgagatggcccgccaagagttgcaggaaacccaggagcgcctggaagctgccacccagcagaatcagcagctacgggcccagttgagcctcatggctcaccctggggaaggagatggactggaccgggaggaggaggaggatgaggaggaggaggaggaggaggcggtggcagtacctcagcccatgccaagcatcccggaggacctggagagccgggaagccatggtggcatttttcaactcagctgtagccagtgccgaggaggagcaggcaaggctacgtgggcagctgaaggagcaaagggtgcgctgccggcgcctggctcacctgctggcctcggcccagaaggagcctgaggcagcagccccagccccagggaccgggggtgattctgtgtgtggggagacccaccgggccctgcagggggccatggagaagctgcagagccgctttatggagctcatgcaggagaaggcagacctgaaggagagggtagaggaactggaacatcgctgcatccagctttctggagagacagacaccattggagagtacattgcactgtaccagagccagagggcagtgctgaaggagcggcaccgggagaaggaggagtacatcagcaggctggcccaagacaaggaggagatgaaggtgaagctgctggagctgcaggagctggtcttacggcttgtgggcgaccgcaacgagtggcatggcagattcctggcagctgcccagaaccctgctgatgagcccacttcaggggccccagccccccaggaacttggggctgccaaccagcagggtgatctttgcgaggtgagcctcgccggcagtgtggagcctgcccaaggagaggccagggagggttctccccgtgacaaccccactgcacagcagatcatgcagctgcttcgtgagatgcagaacccccgggagcgcccaggcttgggcagcaacccctgcattccttttttttaccgggctgacgagaatgatgaggtgaagatcactgtcatctaa

SEQ ID NO: 138433 - DNA, 4259 bp, Homo sapiens
  Payload ID: 7108
  Gene Symbol: GOLGA2
  Gene Name: golgin A2
  Uniprot ID: Q08379
  ENST ID: ENST00000611957
  CDS Start-End: 14-3022
cgggatcgcgctgatgtggccccaaccccgcctccctccccgccccgcgatgtcggaagaaacccgacagagcaaattggccgcagcgaagaaaaagttgagagaatatcagcagaggaatagccctggtgttcctacaggagcgaaaaagaagaagaaaataaaaaatggcagtaaccctgagacaaccacttctggtggttgccactcacctgaggatacacccaaggacaatgctgctactctacaaccatctgatgacaccgtgttacctggcggtgtcccttcccctggtgccagtctcactagcatggcggcatctcagaatcatgatgctgacaatgtccctaatctcatggatgaaaccaagactttctcatcaaccgagagcctgcgacaactctcccaacagctcaatggtcttgtttgtgagtctgcgacatgtgtcaatggggagggccctgcatcgtctgctaacctgaaggatctggagagccggtaccaacagctagcggtagccctggactccagctatgtaacaaacaaacaactcaatatcacgatagagaaattgaaacaacagaaccaagaaattacggatcagttggaagaagaaaagaaagaatgccaccaaaagcagggagccctaagggagcagttacaggttcacattcagaccatagggatcctcgtatcagagaaagctgagttacagacagccctggctcacactcagcatgctgccaggcagaaagaaggagagtctgaagatctggccagccgcctgcagtattcccggcggcgtgtgggagagttggagcgggctctctctgctgtctccacgcagcagaagaaggcagacaggtacaacaaggagttaaccaaagagagagacgccctcaggctggagttatacaagaacacccaaagcaatgaggacctgaagcaagagaaatcagaattggaagagaagcttcgggtcctagtgactgagaaggctggcatgcagcttaacttggaagaattgcaaaagaagttagagatgacggaactcctgcttcaacagttttcaagccggtgtgaagcccctgatgctaaccagcagttacagcaggccatggaggagcgggcacagctggaagcacacctggggcaggtaatggagtcggttagacaactacaaatggagagagataaatatgcggagaatctcaaaggagagagcgccatgtggcggcagaggatgcagcagatgtcagagcaggtgcacacattgagagaggagaaggaatgtagcatgagtcgggtacaggagctggagacgagcttggctgaactgaggaaccagatggctgaacccccgcccccagagcccccagcagggccctccgaggtggagcagcagctacaagcggaggctgagcacctgcggaaggagctggagggtctggcaggacagcttcaagcccaggtgcaagacaatgagggcttgagtcgcctgaaccgggagcaggaggagaggctgctggagctggagcgggcggccgagctctggggggagcaggcggaggcgcgcaggcaaatcctggagaccatgcagaacgaccgcactaccatcagccgcgcactctcccagaaccgggagctcaaggagcagctggctgagctgcagagcggatttgtaaagctgactaatgagaacatggagatcaccagcgcactgcagtcggagcagcacgtcaagagggagctgggaaagaagctgggcgagctgcaggagaagctgagcgagctgaaggaaacggtggagctgaagagccaagaggctcaaagtctgcagcagcagcgagaccagtacctgggacacctgcagcagtatgtggccgcctatcagcagctgacctctgagaaggaggtgctgcataatcagctactgctgcagacccagctcgtggaccagctgcagcagcaggaagctcagggcaaagcggtggccgagatggcccgccaagagttgcaggaaacccaggagcgcctggaagctgccacccagcagaatcagcagctacgggcccagttgagcctcatggctcaccctggggaaggagatggactggaccgggaggaggaggaggatgaggaggaggaggaggaggaggcggtggcagtacctcagcccatgccaagcatcccggaggacctggagagccgggaagccatggtggcatttttcaactcagctgtagccagtgccgaggaggagcaggcaaggctacgtgggcagctgaaggagcaaagggtgcgctgccggcgcctggctcacctgctggcctcggcccagaaggagcctgaggcagcagccccagccccagggaccgggggtgattctgtgtgtggggagacccaccgggccctgcagggggccatggagaagctgcagagccgctttatggagctcatgcaggagaaggcagacctgaaggagagggtagaggaactggaacatcgctgcatccagctttctggagagacagacaccattggagagtacattgcactgtaccagagccagagggcagtgctgaaggagcggcaccgggagaaggaggagtacatcagcaggctggcccaagacaaggaggagatgaaggtgaagctgctggagctgcaggagctggtcttacggcttgtgggcgaccgcaacgagtggcatggcagattcctggcagctgcccagaaccctgctgatgagcccacttcaggggccccagccccccaggaacttggggctgccaaccagcagggtgatctttgcgaggtgagcctcgccggcagtgtggagcctgcccaaggagaggccagggagggttctccccgtgacaaccccactgcacagcagatcatgcagctgcttcgtgagatgcagaacccccgggagcgcccaggcttgggcagcaacccctgcattccttttttttaccgggctgacgagaatgatgaggtgaagatcactgtcatctaaaagccggctactgtcagcaaagcctgaagaagtggggctggataccctgcccccaccatatccctaccatcccttctcagtcaaccctttacccttacagtagcaagcatagacccctgtctaacgggggtagacaggtgcagatgaggtgaagatcactgtcatctaaaagctggccactaaattaaaaaaaaattaaaagttatgggattaaaaaaagttatgggataaaaaaggttatgggtaacttatggtataaaagttatgaaaaaaggccaggtgcagtggctcacgcctgtaatcccagcacttttgggaggctgaggttgggagttcaagaccagcctggtcaacatggtgaaactgtgtctctactaaaaatacaaaaattagccaggcatggtggcacgtgcctgtaatcccagctactcgggaggctgaggcaggagaatcgcttgaacctgggaggtggaggttgcagtgggctgagatcacgccattgcactccagcctgggcgacagagtgagactctgtctcaaaaaaaaaaaaaattatgaaaaaagttatgggattaaagaaagtcaggataaaaattttaaaaagcaggccactgtcagcaaagcctggagaagtggggccggaggctccgcccccatcatgtgcctgccaccccttcccagtcatccctttactcttacagtagcaaataagacccctgtctaatggggggagacaaatgtgtagacccttagccaccttggccagggctgactccttaaatttctggatgatgatgattgttatttaatagccagaggctcatataattggcctctttggaagaggcctcatggcctccttactctcaccaaagcaatttttccctcaggggggctcccatcttcttacacagagaggcagctgaggcaggacagtggggctaactgtagaccaggcgagggcacgggctgctggggtggccctgcttccccagtgtacatattgtatctgtgtaacattttgtatattccaggggtagggccgccccctgtatcatacctagcagaggttggagctggcacatggggaggaggttctaataattatttggggctgggaaacttatttattgatagcataggacagaggaaggaggcggggatggggtcgtggcgccctggtgatgcgactcctgtttattttgctttttatttcggaataaatggatttagccat

SEQ ID NO: 138434 - DNA, 2212 bp, Homo sapiens
  Payload ID: 7108
  Gene Symbol: GOLGA2
  Gene Name: golgin A2
  ENST ID: ENST00000610329
  CDS Start-End: 117-977
gtcggaagaaacccgacagagcaaattggccgcagcgaagaaaaagttgagagaatatcagcagaggaatagccctggtgttcctacaggagcgaaaaagaagaagaaaataaaaaatggcagtacctcagcccatgccaagcatcccggaggacctggagagccgggaagccatggtggcatttttcaactcagctgtagccagtgccgaggaggagcaggcaaggctacgtgggcagctgaaggagcaaagggtgcgctgccggcgcctggctcacctgctggcctcggcccagaaggagcctgaggcagcagccccagccccagggaccgggggtgattctgtgtgtggggagacccaccgggccctgcagggggccatggagaagctgcagagccgctttatggagctcatgcaggagaaggcagacctgaaggagagggtagaggaactggaacatcgctgcatccagctttctggagagacagacaccattggagagtacattgcactgtaccagagccagagggcagtgctgaaggagcggcaccgggagaaggaggagtacatcagcaggctggcccaagacaaggaggagatgaaggtgaagctgctggagctgcaggagctggtcttacggcttgtgggcgaccgcaacgagtggcatggcagattcctggcagctgcccagaaccctgctgatgagcccacttcaggggccccagccccccaggaacttggggctgccaaccagcagggtgatctttgcgaggtgagcctcgccggcagtgtggagcctgcccaaggagaggccagggagggttctccccgtgacaaccccactgcacagcagatcatgcagctgcttcgtgagatgcagaacccccgggagcgcccaggcttgggcagcaacccctgcattccttttttttaccgggctgacgagaatgatgaggtgaagatcactgtcatctaaaagccggctactgtcagcaaagcctgaagaagtggggctggataccctgcccccaccatatccctaccatcccttctcagtcaaccctttacccttacagtagcaagcatagacccctgtctaacgggggtagacaggtgcagatgaggtgaagatcactgtcatctaaaagctggccactaaattaaaaaaaaattaaaagttatgggattaaaaaaagttatgggataaaaaaggttatgggtaacttatggtataaaagttatgaaaaaaggccaggtgcagtggctcacgcctgtaatcccagcacttttgggaggctgaggttgggagttcaagaccagcctggtcaacatggtgaaactgtgtctctactaaaaatacaaaaattagccaggcatggtggcacgtgcctgtaatcccagctactcgggaggctgaggcaggagaatcgcttgaacctgggaggtggaggttgcagtgggctgagatcacgccattgcactccagcctgggcgacagagtgagactctgtctcaaaaaaaaaaaaaattatgaaaaaagttatgggattaaagaaagtcaggataaaaattttaaaaagcaggccactgtcagcaaagcctggagaagtggggccggaggctccgcccccatcatgtgcctgccaccccttcccagtcatccctttactcttacagtagcaaataagacccctgtctaatggggggagacaaatgtgtagacccttagccaccttggccagggctgactccttaaatttctggatgatgatgattgttatttaatagccagaggctcatataattggcctctttggaagaggcctcatggcctccttactctcaccaaagcaatttttccctcaggggggctcccatcttcttacacagagaggcagctgaggcaggacagtggggctaactgtagaccaggcgagggcacgggctgctggggtggccctgcttccccagtgtacatattgtatctgtgtaacattttgtatattccaggggtagggccgccccctgtatcatacctagcagaggttggagctggcacatggggaggaggttctaataattatttggggctgggaaacttatttattgatagcataggacagaggaaggaggcggggatggggtcgtggcgccctggtgatgcgactcctgtttattttgctttttatttcggaataaatggatttagcc

SEQ ID NO: 138435 - DNA, 9252 bp, Homo sapiens
  Payload ID: 7109
  Gene Symbol: GOLGA3
  Gene Name: golgin A3
  Uniprot ID: Q08378
  ENST ID: ENST00000204726
  CDS Start-End: 560-5056
ggcctgggcgcgtccctgcagcgtggcgggacggccccgttccagtcacccccgcctcgctgcggtggcctcgggcctgggcgcccgccttcagctgcggcggagctggctctgtaaatgccggtgcccgcgagccctcctgaatgcttgtctgcgcccgacgagcgcggcctgtcccgaagctgtccactgccaccactcgggcagtgcttgctttagcctggccctttgcagctgaaaggcgtgacatggtgtcgggtggttcgtgggaagtcggggtttcaggagtccgtgtacttccttgtttgtctttgtcgctggccgacttgtcttcattccaggtggccagagcgagtggggccgggcgttgtcacgggtatcatgatattagctggtttgacatcaagtcatttgtgagtcatcagatcttctcctgaaaatgggagacacagtagggcccctcccaggagctcttggctgttgctgatggcagaagccaagcttgtccaaggttcacttgtagcccctcagcgtcagctcagctggtgtcgtcctgaccatggacggcgcgtcggccgagcaagatggcctccaggaggacagatcccacagtggcccctcgtctctccccgaggccccactgaagcccccgggcccactggtgccacctgaccagcaggacaaagtccagtgtgccgaggtaaacagagcatccacggaaggggaaagcccggatggacctggccagggaggcctctgtcagaacgggccaacgccacccttcccagaccctccgtcgtctctcgatcccaccacaagcccagtgggccctgatgcctctccaggtgtggctggtttccatgacaacctaaggaagtctcagggaactagtgctgagggcagtgttagaaaagaagctttgcagtctctcagactcagtcttcctatgcaagaaacgcaactgtgctctacagattctcccctgcccctggagaaggaggagcaggtccgacttcaggctcggaagtggctggaagagcagctcaaacagtacagggtgaagcgccagcaggagaggtccagtcaacctgcaaccaaaacgagactttttagcacgcttgatcctgagctcatgttaaacccagaaaacttaccaagggccagtaccctggctatgacaaaagaatattccttcctgcgcaccagtgtccctcgggggcctaaggtgggcagcctggggcttccggcacatcctagggagaaaaaaacttccaaatcaagcaaaatccggtctctggccgattacagaactgaagattcaaatgcggggaattctgggggaaatgtcccggctcccgattctaccaagggttccctgaagcagaacagaagcagtgcggcgtccgttgtgtctgagatcagcctgtcccccgacactgacgaccgtctggagaacacctccctggctggagacagcgtgtctgaggtggatggaaatgacagcgacagctcatcgtacagcagcgcctccacccgagggacctatggcattctgtcgaagacagtgggcacgcaggacaccccctatatggtcaacggccaggagattcctgcggataccctgggccagttcccctccattaaggacgtcctccaggccgcagccgctgagcaccaagaccaggggcaggaggtcaacggggaggtgcggagtcggagagacagcatctgcagcagcgtgtccttggagagctctgcagcagaaacacaggaggagatgctgcaggtgctcaaagagaaaatgcgactcgaaggacagctggaagccttgtcactggaggcgagtcaggcacttaaagagaaggctgagctgcaggcccagctggccgccctcagcacgaagctgcaggcgcaggtggagtgcagccacagcagccagcagcggcaggattcgctgagctcggaggtggacaccctgaagcagtcgtgctgggacctggagcgagccatgactgacctgcagaacatgctggaggcaaaaaatgccagcctggcgtcgtccaacaacgacttgcaggtggccgaggagcagtaccagaggcttatggccaaggtagaggacatgcagaggagcatgctcagcaaggacaacacagtgcacgacctgcgacagcagatgacagccttgcagagccagcttcagcaggtgcagctggagcggacgacgctgaccagcaagctgaaggcgtcgcaggcggagatctcgtccctgcagagtgtccggcagtggtaccagcagcagctcgccctggcacaggaggcccgcgtcaggctgcagggtgagatggcccacatccaggttggacagatgacccaggcaggtctcctggagcacctgaaactcgagaatgtgtccctgtcccagcagctgacggaaactcagcacaggtccatgaaggagaaggggcgcatcgcggcacagctgcagggcattgaggctgacatgttggatcaggaagcagccttcatgcagattcaggaggcaaagacgatggtggaggaggaccttcagaggaggctggaagagtttgaaggtgagagggagcggctgcagaggatggcggactcggcggcatccctggagcagcagctggagcaggtgaagttgactttactccagcgagaccagcagcttgaggctttgcagcaggagcacctggacctgatgaaacagctcaccttgactcaggaggctctgcagagcagggagcagtccctcgatgccctgcagacacactacgatgagctgcaggccaggctgggggagctgcagggcgaggccgcctccagggaggacacgatctgcctcctgcagaacgagaagatcatcttggaggcggctttgcaggcggccaagagtggcaaggaggagcttgacagaggagcaagacgcttggaagaaggtaccgaggaaacgtcggaaactttagagaagttaagagaagaattagctatcaaatccggccaggtggaacacctgcagcaggagactgctgctctgaaaaagcaaatgcaaaaaataaaggaacagtttctccaacaaaaggtgatggtggaggcctaccggcgcgacgccacctccaaagaccagctcatcagtgagctgaaagccaccaggaagaggctggactcggagctgaaggagctgcggcaggagctgatgcaagtgcacggggagaagcggactgccgaggcggagctctcgcgcctgcacagagaggtggcccaggtccgtcagcacatggcggaccttgaagggcatctccagtcggcgcagaaggagcgagacgagatggaaacacacttgcagtcgttgcagttcgataaggagcagatggtcgcggtcacagaggccaatgaggcgctgaagaaacaaatcgaagagttgcagcaagaggcccggaaggccatcacggaacagaagcagaagatgaggcggctgggctcagacttgaccagcgcccagaaggagatgaagaccaaacataaggcctacgagaacgccgtgggcatcctcagccgccgcctgcaggaggccctcgcggccaaggaggctgcggacgcggagctgggccagctccgagcccagggtggcagcagtgacagcagcctggctctacatgaaaggatccaggccctggaggcggagctgcaggctgtcagtcatagcaagacgctgctggaaaaggaactgcaggaggtcatagcgctgaccagccaggagctggaggagtcccgggagaaggtgctggagctggaggacgagcttcaagaatccagaggctttaggaagaagataaaacgccttgaggagtcaaacaagaagttggctcttgaattagagcacgagaaagggaagcttacgggcctcggtcagtccaacgcagctctgcgggaacacaacagcatcctagaaacagctttggccaagagggaggcagacctagtccagttgaaccttcaggtgcaggcagttttgcagcgcaaagaagaggaggatcgccagatgaagcatcttgtccaggccctgcaggcctcactagagaaggagaaggagaaggtgaacagcctcaaggagcaggtggctgctgccaaggtggaagccgggcataaccgccgccacttcaaggcggcctccttggagctgagtgaggtgaagaaggagctgcaggccaaggaacacctggtgcagaagctgcaggccgaggccgacgaccttcagattcgggaggggaaacattcccaggagatagcacagttccaagcagagctggccgaggcccgggcacagctccagctcctgcagaagcagctggacgagcagctcagcaaacagcccgtgggaaaccaagagatggaaaatctcaaatgggaggtggatcagaaagaaagagaaatccagtccttgaagcagcagctggacttgacggagcagcagggcaggaaggaactggaagggctacagcagctgctgcagaacgtcaagtctgagttggagatggcccaggaagacctgtccatgacccagaaggataaatttatgctccaggcaaaagtgtcggagctgaagaacaacatgaagaccctgctccagcagaaccagcagctcaagctggacctacgccgcggcgcggccaagacgagaaaggagccgaaaggcgaggccagctcttccaaccctgccacgcccatcaagatcccggactgcccagttcccgcctcgctgctggaggagctgctgagaccaccgcccgccgtgagcaaggagcccctcaagaacctgaacagctgcctccagcagctcaagcaggagatggacagcctgcagcgccagatggaggagcacgccctgacggtgcacgagtctctgtcctcgtggacgccgctggagccagccactgccagccctgtgcccccggggggtcacgccggcccacgcggcgacccacagagacacagtcagagcagggcttccaaagaagggccgggagagtgactgctgtggactcgcctccgtgcgccgctgccccagaaggctcttatcaatgttatttatttgattgtgtggtcgatgtttttctaagacatgaaatttaagttttgttttgcctttaacaagaagtaaaatatatagcagaatgagagccaaggactagaaaaacattcgaagatcacaattagcttttcacatggaatgaccaactcttaaaagcctgataggctctcggcgaggagctttgaacgtgtctgaagggttacttgtaggtcgtggcttctgagcggccaccgatgctgctctctgcgggtgacagggagaggctgcgtaactgggagcagctgtgtgacagggtctgcggcaccgcgcctggccaggccggctgcagtttctcacttccctgttccattcagtaagagctttacttttccgcagaaatgaaattttatctgtacctttggctttttacttgtttttttggatagccatcccaccataggatgtgtacatagatactgaatatcataatccaatctttgttttttttttttttttttttttgagacagagtctcgctttgttgcccaggctggagtgcagtggcacactctccgctcactgcaagctccgcctcccaggttcatgcgattctcctgcctcagcctctcgagtagctgggattacaggcgtgcgccactatgccaggctaatgtttgtatttttagtagcaatggggtttcaccatgttggccaggatggtctcgatctcctgacctcaagtgatctgcccatctcagcctcccaaagtgctgggattacaggcgtgagcccctgcgcccggcctgtcacccagtctttaagaagcatatgctcatgttattgaagaagaacctacttattattgattgccttttgaaaatttgttgggaataatttacctgcaggatttagggatagtcagaaaattctaagaaatataattattttatttaccttctaaagccaaatattcttacacagaaaggtcctctgttgttctggttttactttgttgctgaggatctttccttcctgctggtctcttcctctcaggccactggccctgtgtgattccaccgtggctggccactgggaaggggcagcttggacccttggtcaggcctgacggccatcaggaggcacaaggacactgaggccccatatctgatctgacctttgggggggcacagggagaggccggtggaggaggaggaggagagcagaccaggggctccctgcagcgactcccgcggtttcccctggagtcagccaggtgtaggtcgcaggcggtaacaaacctcacactcctgttccccaagtgaaaatctttaccattgtctgtgggagcgcctgtactcgtgtgtaggagcacctgtacttctgcagtcatcgagaagtcctggatcttttgtggttacaccagcatcatgtggcaagcagaggcgacttccggaagagacaggcaggcaccgtgaggaaggtggctgtgctctcccaggtgtctcagagacagatgccttatttaaaatcagcacgacatgtgtgagatcttctgtttcctaccccaaatcctgaaaccctgcagacactggctgactgggagaggtggggtctgtaagttgtcccctagtttgctaagaaaatctaaaataatatttattatatgagttaggagagagagaatgggtccgcgtggcctcctctgcagatgtactggtctgaaatgaggttctgagtcactggccaggccagatgtgctcatgtcggtgtctggtgtctgttttgtggagaaaacagtatggtgtgttttaagctatttgtgttctgttgtaatatacttttagaaggttaattggtaaggttaaggtagcattaaccacaaagatgtttggtatttaaaaaatattctctagcaaatattggaatttccaaaatatatcatttgtacagggttaattttgaaataatacttgaaaatttcattataaatatatcctactttttatcttaagttgaagatgttatttactaaattgttcttgtaccattagaaaaaaaaatacggcaatttacgttcttatttattttggctgtactacccctttgttttaattttaaaatcaagaaatcgggccgggcgcggtggctcatgcctgtaatcccagcactttgggaggccgaggcgggtggatcacctgaggtcaagaggtccagaccatcctggccaacatggcaaaaccccgtctttactaaacatacaaaaattagccgggtgtcgtagtgcgcacctataatcccagctacttgggaggctgaggcaggagaatcacttgaacccaggaggcggagcttgcagtgagccgagatcgcgccactgccctccagcctgggcaacagagcgagactccgtctcaaaaataaataaatgattttaaaaaatctaaaatcgagaaatcacacattcagtggggagcgacttctccttgcttatgggaagtcctcaagtgagtgatgttcaccatgtatttttttttctcttaggacagactaattctgaaaataccgaaggaaaagtagctctatgttctcaccccggttttcctgcgtgtgtgcccttgggtgcgatgcctcccccagcgctctgtggtcgccggtgccagggccccctctggtttggcagggcctggctgcctttgctccctgcagtgagtcttttggtgttttcatgcacggcttgtgcttctggatctgaggcctctcgtgttcacgcggacacttccttccttaagaagacgcctaaaagaggaagttggaattttttttttttttttttgagacagagtctcgctctgtcgcccaggctggagtgcagtggcgtgatctctgctcactgcaagctccgccatctgggttcaagcgattctcctgcctcattctccccagtagctgggattacaggtgcccgccaccacaccagcctaatttttgtatttttagaggggtggagttccaccatgttggccaggctggtcttgaactcttgacctcaggtgatcctgagcctcagcctcccaaagtgctggaattataggcgtgaaccaccgcccccggctgcagttggatttttaaattgcttttttttattgttgaggtttttttatctccaagggactctcccggcacttctaccttccagagttacttcagtgcataaagtttgaattattttgttcttgtgggcagaagtgggaatgatggaatatcctcacggaaaaggcagtgaagttgggagtactgcttacaaaacagggtcaccagtgcattatgtggcgtgttcatccccacgccgtgtgtcacgggctagggcggcgtgttcatccccacaccgtgtgtcacaacaggctagggcacttcacgatgtcactacttgtttttctgatgttccaaaaacaacgtaacttggttttcatgtgtttttccgtggtatatgtgagattgatgctacgggtcttacggactcacacccgttcccactctctgcaatatggatcaggcagtgtttctgataggatgtgaaatggactctcctcgggtgggtccagcaggggccctgcccaccagaacacagtccgtgctgtgctgcgctaaggagctggccctcaactctccttggtgcagggttcccacaaccgagttctagttccctgaggtctttaaaaacaaaaacagaatgttgtacgtgaagattctaggaggggagggaccagcaaatctgagagaaccgtcctggggcctcccttcgaggagccctctgatgtgaggagggacttgagttgagtgacgctgtggtgtgaggtgttctgagctcactgaccggaaggtccaggtgaatctcgtcataagtgatctcaggctctcacaggatccggagggaaatgtgttagagggtctggaaaattcagtgcttttgagttacttgtttttattaaaaatttcctcacaaaagagagtcctcaagttgtggctgttcttgggaaaggggtcaccgtgtctgacaaagtgtaactttaaaaagcacgttgattttttacaaatgtaagtgtgcttgggaattccttaaattttgtgcaataaactattttttggtaaagattttc

SEQ ID NO: 138436 - DNA, 5496 bp, Homo sapiens
  Payload ID: 7109
  Gene Symbol: GOLGA3
  Gene Name: golgin A3
  Uniprot ID: Q08378
  ENST ID: ENST00000456883
  CDS Start-End: 711-4883
tccgccggagcatccgggccgggcggcctccggggctgccagagcagcagggtgaggggctcggaggccgcggcgcctcggggctcgggctcccgctcccgctcccgctcccgcagtgcatgggcgggggaggctcgaggggcggcggcggggcctgggcgcgtccctgcagcgtggcgggacggccccgttccagtcacccccgcctcgctgcggtggcctcgggcctgggcgcccgccttcagctgcggcggagctggctctgtaaatgccggtgcccgcgagccctcctgaatgcttgtctgcgcccgacgagcgcggcctgtcccgaagctgtccactgccaccactcgggcagtgcttgctttagcctggccctttgcagctgaaaggcgtgacatggtgtcgggtggttcgtgggaagtcggggtttcaggagtccgtgtacttccttgtttgtctttgtcgctggccgacttgtcttcattccaggtggccagagcgagtggggccgggcgttgtcacgggtatcatgatattagctggtttgacatcaagtcatttgtgagtcatcagatcttctcctgaaaatgggagacacagtagggcccctcccaggagctcttggctgttgctgatggcagaagccaagcttgtccaaggttcacttgtagcccctcagcgtcagctcagctggtgtcgtcctgaccatggacggcgcgtcggccgagcaagatggcctccaggaggacagatcccacagtggcccctcgtctctccccgaggccccactgaagcccccgggcccactggtgccacctgaccagcaggacaaagtccagtgtgccgaggtaaacagagcatccacggaaggggaaagcccggatggacctggccagggaggcctctgtcagaacgggccaacgccacccttcccagaccctccgtcgtctctcgatcccaccacaagcccagtgggccctgatgcctctccaggtgtggctggtttccatgacaacctaaggaagtctcagggaactagtgctgagggcagtgttagaaaagaagctttgcagtctctcagactcagtcttcctatgcaagaaacgcaactgtgctctacagattctcccctgcccctggagaaggaggagcaggtccgacttcaggctcggaagtggctggaagagcagctcaaacagtacagggtgaagcgccagcaggagaggtccagtcaacctgcaaccaaaacgagactttttagcacgcttgatcctgagctcatgttaaacccagaaaacttaccaagggccagtaccctggctatgacaaaagaatattccttcctgcgcaccagtgtccctcgggggcctaaggtgggcagcctggggcttccggcacatcctagggagaaaaaaacttccaaatcaagcaaaatccggtctctggccgattacagaactgaagattcaaatgcggggaattctgggggaaatgtcccggctcccgattctaccaagggttccctgaagcagaacagaagcagtgcggcgtccgttgtgtctgagatcagcctgtcccccgacactgacgaccgtctggagaacacctccctggctggagacagcgtgtctgaggtggatggaaatgacagcgacagctcatcgtacagcagcgcctccacccgagggacctatggcattctgtcgaagacagtgggcacgcaggacaccccctatatggtcaacggccaggagattcctgcggataccctgggccagttcccctccattaaggacgtcctccaggccgcagccgctgagcaccaagaccaggggcaggaggtcaacggggaggtgcggagtcggagagacagcatctgcagcagcgtgtccttggagagctctgcagcagaaacacaggaggagatgctgcaggtgctcaaagagaaaatgcgactcgaaggacagctggaagccttgtcactggaggcgagtcaggcacttaaagagaaggctgagctgcaggcccagctggccgccctcagcacgaagctgcaggcgcaggtggagtgcagccacagcagccagcagcggcaggattcgctgagctcggaggtggacaccctgaagcagtcgtgctgggacctggagcgagccatgactgacctgcagaacatgctggaggcaaaaaatgccagcctggcgtcgtccaacaacgacttgcaggtggccgaggagcagtaccagaggcttatggccaaggtagaggacatgcagaggagcatgctcagcaaggacaacacagtgcacgacctgcgacagcagatgacagccttgcagagccagcttcagcaggtgcagctggagcggacgacgctgaccagcaagctgaaggcgtcgcaggcggagatctcgtccctgcagagtgtccggcagtggtaccagcagcagctcgccctggcacaggaggcccgcgtcaggctgcagggtgagatggcccacatccaggttggacagatgacccaggcaggtctcctggagcacctgaaactcgagaatgtgtccctgtcccagcagctgacggaaactcagcacaggtccatgaaggagaaggggcgcatcgcggcacagctgcagggcattgaggctgacatgttggatcaggaagcagccttcatgcagattcaggaggcaaagacgatggtggaggaggaccttcagaggaggctggaagagtttgaaggtgagagggagcggctgcagaggatggcggactcggcggcatccctggagcagcagctggagcaggtgaagttgactttactccagcgagaccagcagcttgaggctttgcagcaggagcacctggacctgatgaaacagctcaccttgactcaggaggctctgcagagcagggagcagtccctcgatgccctgcagacacactacgatgagctgcaggccaggctgggggagctgcagggcgaggccgcctccagggaggacacgatctgcctcctgcagaacgagaagatcatcttggaggcggctttgcaggcggccaagagtggcaaggaggagcttgacagaggagcaagacgcttggaagaaggtaccgaggaaacgtcggaaactttagagaagttaagagaagaattagctatcaaatccggccaggtggaacacctgcagcaggagactgctgctctgaaaaagcaaatgcaaaaaataaaggaacagtttctccaacaaaaggtgatggtggaggcctaccggcgcgacgccacctccaaagaccagctcatcagtgagctgaaagccaccaggaagaggctggactcggagctgaaggagctgcggcaggagctgatgcaagtgcacggggagaagcggactgccgaggcggagctctcgcgcctgcacagagaggtggcccaggtccgtcagcacatggcggaccttgaagggcatctccagtcggcgcagaaggagcgagacgagatggaaacacacttgcagtcgttgcagttcgataaggagcagatggtcgcggtcacagaggccaatgaggcgctgaagaaacaaatcgaagagttgcagcaagaggcccggaaggccatcacggaacagaagcagaagatgaggcggctgggctcagacttgaccagcgcccagaaggagatgaagaccaaacataaggcctacgagaacgccgtgggcatcctcagccgccgcctgcaggaggccctcgcggccaaggaggctgcggacgcggagctgggccagctccgagcccagggtggcagcagtgacagcagcctggctctacatgaaaggatccaggccctggaggcggagctgcaggctgtcagtcatagcaagacgctgctggaaaaggaactgcaggaggtcatagcgctgaccagccaggagctggaggagtcccgggagaaggtgctggagctggaggacgagcttcaagaatccagaggctttaggaagaagataaaacgccttgaggagtcaaacaagaagttggctcttgaattagagcacgagaaagggaagcttacgggcctcggtcagtccaacgcagctctgcgggaacacaacagcatcctagaaacagctttggccaagagggaggcagacctagtccagttgaaccttcaggtgcaggcagttttgcagcgcaaagaagaggaggatcgccagatgaagcatcttgtccaggccctgcaggcctcactagagaaggagaaggagaaggtgaacagcctcaaggagcaggtggctgctgccaaggtggaagccgggcataaccgccgccacttcaaggcggcctccttggagctgagtgaggtgaagaaggagctgcaggccaaggaacacctggtgcagaagctgcaggccgaggccgacgaccttcagattcgggaggggaaacattcccaggagatagcacagttccaagcagagctggccgaggcccgggcacagctccagctcctgcagaagcagctggacgagcagctcagcaaacagcccgtgggaaaccaagagatggaaaatctcaaatgggaggtggatcagaaagaaagagaaatccagtccttgaagcagcagctggacttgacggagcagcagggcaggaaggaactggaagggctacagcagctgctgcagaacgtcaagtctgagttggagatggcccaggaagacctgtccatgacccagaaggataaatttatgctccaggcaaaagtgtcggagctgaagaacaacatgaagaccctgctccagcagaaccagcagctcaagctggacctacgccgcggcgcggccaagacggtactcaggcccgcgtccctcccggggtagccgacgtgcgctgtagatgctctcggacaggaggctggcagacgtgttagtcattcagacataaacggatttgttgagcccacactgagcagctgctgtgtagtcagtggtaatggggtgacagatgaaatcatttcattctggtttcattcatccaacagtgttttcctcgttctgtgaattcaaataccactttgttgtaatgtgctttgtaaagcagatgagcggtggtctgtgactcggcagtccctgctgtgtgtgaagggctggggcccgggagctgtgcccaggcgcccggcggttttctgtgctcggtccacatccatgttttccaggaggcaggtgggagggcagcgctcggattgagaggccgtttagcgtcgtgtgcttatctgtggaaaaagtttgaagtcccagaaaagggagcctaagctggaaaacttacttaatttcttacggaaattccacatcaaggtcttgagtatctgatgggagaagcgtctgggagagctgtagtctgtggctcggccccgtcctgccgcagacccaggacttaggttgtctctgctttgctctggttttgtgccttaggaataaaggtgtttcctcagcc

SEQ ID NO: 138437 - DNA, 8870 bp, Homo sapiens
  Payload ID: 7109
  Gene Symbol: GOLGA3
  Gene Name: golgin A3
  Uniprot ID: Q08378
  ENST ID: ENST00000450791
  CDS Start-End: 184-4680
gtatcatgatattagctggtttgacatcaagtcatttgtgagtcatcagatcttctcctgaaaatgggagacacagtagggcccctcccaggagctcttggctgttgctgatggcagaagccaagcttgtccaaggttcacttgtagcccctcagcgtcagctcagctggtgtcgtcctgaccatggacggcgcgtcggccgagcaagatggcctccaggaggacagatcccacagtggcccctcgtctctccccgaggccccactgaagcccccgggcccactggtgccacctgaccagcaggacaaagtccagtgtgccgaggtaaacagagcatccacggaaggggaaagcccggatggacctggccagggaggcctctgtcagaacgggccaacgccacccttcccagaccctccgtcgtctctcgatcccaccacaagcccagtgggccctgatgcctctccaggtgtggctggtttccatgacaacctaaggaagtctcagggaactagtgctgagggcagtgttagaaaagaagctttgcagtctctcagactcagtcttcctatgcaagaaacgcaactgtgctctacagattctcccctgcccctggagaaggaggagcaggtccgacttcaggctcggaagtggctggaagagcagctcaaacagtacagggtgaagcgccagcaggagaggtccagtcaacctgcaaccaaaacgagactttttagcacgcttgatcctgagctcatgttaaacccagaaaacttaccaagggccagtaccctggctatgacaaaagaatattccttcctgcgcaccagtgtccctcgggggcctaaggtgggcagcctggggcttccggcacatcctagggagaaaaaaacttccaaatcaagcaaaatccggtctctggccgattacagaactgaagattcaaatgcggggaattctgggggaaatgtcccggctcccgattctaccaagggttccctgaagcagaacagaagcagtgcggcgtccgttgtgtctgagatcagcctgtcccccgacactgacgaccgtctggagaacacctccctggctggagacagcgtgtctgaggtggatggaaatgacagcgacagctcatcgtacagcagcgcctccacccgagggacctatggcattctgtcgaagacagtgggcacgcaggacaccccctatatggtcaacggccaggagattcctgcggataccctgggccagttcccctccattaaggacgtcctccaggccgcagccgctgagcaccaagaccaggggcaggaggtcaacggggaggtgcggagtcggagagacagcatctgcagcagcgtgtccttggagagctctgcagcagaaacacaggaggagatgctgcaggtgctcaaagagaaaatgcgactcgaaggacagctggaagccttgtcactggaggcgagtcaggcacttaaagagaaggctgagctgcaggcccagctggccgccctcagcacgaagctgcaggcgcaggtggagtgcagccacagcagccagcagcggcaggattcgctgagctcggaggtggacaccctgaagcagtcgtgctgggacctggagcgagccatgactgacctgcagaacatgctggaggcaaaaaatgccagcctggcgtcgtccaacaacgacttgcaggtggccgaggagcagtaccagaggcttatggccaaggtagaggacatgcagaggagcatgctcagcaaggacaacacagtgcacgacctgcgacagcagatgacagccttgcagagccagcttcagcaggtgcagctggagcggacgacgctgaccagcaagctgaaggcgtcgcaggcggagatctcgtccctgcagagtgtccggcagtggtaccagcagcagctcgccctggcacaggaggcccgcgtcaggctgcagggtgagatggcccacatccaggttggacagatgacccaggcaggtctcctggagcacctgaaactcgagaatgtgtccctgtcccagcagctgacggaaactcagcacaggtccatgaaggagaaggggcgcatcgcggcacagctgcagggcattgaggctgacatgttggatcaggaagcagccttcatgcagattcaggaggcaaagacgatggtggaggaggaccttcagaggaggctggaagagtttgaaggtgagagggagcggctgcagaggatggcggactcggcggcatccctggagcagcagctggagcaggtgaagttgactttactccagcgagaccagcagcttgaggctttgcagcaggagcacctggacctgatgaaacagctcaccttgactcaggaggctctgcagagcagggagcagtccctcgatgccctgcagacacactacgatgagctgcaggccaggctgggggagctgcagggcgaggccgcctccagggaggacacgatctgcctcctgcagaacgagaagatcatcttggaggcggctttgcaggcggccaagagtggcaaggaggagcttgacagaggagcaagacgcttggaagaaggtaccgaggaaacgtcggaaactttagagaagttaagagaagaattagctatcaaatccggccaggtggaacacctgcagcaggagactgctgctctgaaaaagcaaatgcaaaaaataaaggaacagtttctccaacaaaaggtgatggtggaggcctaccggcgcgacgccacctccaaagaccagctcatcagtgagctgaaagccaccaggaagaggctggactcggagctgaaggagctgcggcaggagctgatgcaagtgcacggggagaagcggactgccgaggcggagctctcgcgcctgcacagagaggtggcccaggtccgtcagcacatggcggaccttgaagggcatctccagtcggcgcagaaggagcgagacgagatggaaacacacttgcagtcgttgcagttcgataaggagcagatggtcgcggtcacagaggccaatgaggcgctgaagaaacaaatcgaagagttgcagcaagaggcccggaaggccatcacggaacagaagcagaagatgaggcggctgggctcagacttgaccagcgcccagaaggagatgaagaccaaacataaggcctacgagaacgccgtgggcatcctcagccgccgcctgcaggaggccctcgcggccaaggaggctgcggacgcggagctgggccagctccgagcccagggtggcagcagtgacagcagcctggctctacatgaaaggatccaggccctggaggcggagctgcaggctgtcagtcatagcaagacgctgctggaaaaggaactgcaggaggtcatagcgctgaccagccaggagctggaggagtcccgggagaaggtgctggagctggaggacgagcttcaagaatccagaggctttaggaagaagataaaacgccttgaggagtcaaacaagaagttggctcttgaattagagcacgagaaagggaagcttacgggcctcggtcagtccaacgcagctctgcgggaacacaacagcatcctagaaacagctttggccaagagggaggcagacctagtccagttgaaccttcaggtgcaggcagttttgcagcgcaaagaagaggaggatcgccagatgaagcatcttgtccaggccctgcaggcctcactagagaaggagaaggagaaggtgaacagcctcaaggagcaggtggctgctgccaaggtggaagccgggcataaccgccgccacttcaaggcggcctccttggagctgagtgaggtgaagaaggagctgcaggccaaggaacacctggtgcagaagctgcaggccgaggccgacgaccttcagattcgggaggggaaacattcccaggagatagcacagttccaagcagagctggccgaggcccgggcacagctccagctcctgcagaagcagctggacgagcagctcagcaaacagcccgtgggaaaccaagagatggaaaatctcaaatgggaggtggatcagaaagaaagagaaatccagtccttgaagcagcagctggacttgacggagcagcagggcaggaaggaactggaagggctacagcagctgctgcagaacgtcaagtctgagttggagatggcccaggaagacctgtccatgacccagaaggataaatttatgctccaggcaaaagtgtcggagctgaagaacaacatgaagaccctgctccagcagaaccagcagctcaagctggacctacgccgcggcgcggccaagacgagaaaggagccgaaaggcgaggccagctcttccaaccctgccacgcccatcaagatcccggactgcccagttcccgcctcgctgctggaggagctgctgagaccaccgcccgccgtgagcaaggagcccctcaagaacctgaacagctgcctccagcagctcaagcaggagatggacagcctgcagcgccagatggaggagcacgccctgacggtgcacgagtctctgtcctcgtggacgccgctggagccagccactgccagccctgtgcccccggggggtcacgccggcccacgcggcgacccacagagacacagtcagagcagggcttccaaagaagggccgggagagtgactgctgtggactcgcctccgtgcgccgctgccccagaaggctcttatcaatgttatttatttgattgtgtggtcgatgtttttctaagacatgaaatttaagttttgttttgcctttaacaagaagtaaaatatatagcagaatgagagccaaggactagaaaaacattcgaagatcacaattagcttttcacatggaatgaccaactcttaaaagcctgataggctctcggcgaggagctttgaacgtgtctgaagggttacttgtaggtcgtggcttctgagcggccaccgatgctgctctctgcgggtgacagggagaggctgcgtaactgggagcagctgtgtgacagggtctgcggcaccgcgcctggccaggccggctgcagtttctcacttccctgttccattcagtaagagctttacttttccgcagaaatgaaattttatctgtacctttggctttttacttgtttttttggatagccatcccaccataggatgtgtacatagatactgaatatcataatccaatctttgttttttttttttttttttttttgagacagagtctcgctttgttgcccaggctggagtgcagtggcacactctccgctcactgcaagctccgcctcccaggttcatgcgattctcctgcctcagcctctcgagtagctgggattacaggcgtgcgccactatgccaggctaatgtttgtatttttagtagcaatggggtttcaccatgttggccaggatggtctcgatctcctgacctcaagtgatctgcccatctcagcctcccaaagtgctgggattacaggcgtgagcccctgcgcccggcctgtcacccagtctttaagaagcatatgctcatgttattgaagaagaacctacttattattgattgccttttgaaaatttgttgggaataatttacctgcaggatttagggatagtcagaaaattctaagaaatataattattttatttaccttctaaagccaaatattcttacacagaaaggtcctctgttgttctggttttactttgttgctgaggatctttccttcctgctggtctcttcctctcaggccactggccctgtgtgattccaccgtggctggccactgggaaggggcagcttggacccttggtcaggcctgacggccatcaggaggcacaaggacactgaggccccatatctgatctgacctttgggggggcacagggagaggccggtggaggaggaggaggagagcagaccaggggctccctgcagcgactcccgcggtttcccctggagtcagccaggtgtaggtcgcaggcggtaacaaacctcacactcctgttccccaagtgaaaatctttaccattgtctgtgggagcgcctgtactcgtgtgtaggagcacctgtacttctgcagtcatcgagaagtcctggatcttttgtggttacaccagcatcatgtggcaagcagaggcgacttccggaagagacaggcaggcaccgtgaggaaggtggctgtgctctcccaggtgtctcagagacagatgccttatttaaaatcagcacgacatgtgtgagatcttctgtttcctaccccaaatcctgaaaccctgcagacactggctgactgggagaggtggggtctgtaagttgtcccctagtttgctaagaaaatctaaaataatatttattatatgagttaggagagagagaatgggtccgcgtggcctcctctgcagatgtactggtctgaaatgaggttctgagtcactggccaggccagatgtgctcatgtcggtgtctggtgtctgttttgtggagaaaacagtatggtgtgttttaagctatttgtgttctgttgtaatatacttttagaaggttaattggtaaggttaaggtagcattaaccacaaagatgtttggtatttaaaaaatattctctagcaaatattggaatttccaaaatatatcatttgtacagggttaattttgaaataatacttgaaaatttcattataaatatatcctactttttatcttaagttgaagatgttatttactaaattgttcttgtaccattagaaaaaaaaatacggcaatttacgttcttatttattttggctgtactacccctttgttttaattttaaaatcaagaaatcgggccgggcgcggtggctcatgcctgtaatcccagcactttgggaggccgaggcgggtggatcacctgaggtcaagaggtccagaccatcctggccaacatggcaaaaccccgtctttactaaacatacaaaaattagccgggtgtcgtagtgcgcacctataatcccagctacttgggaggctgaggcaggagaatcacttgaacccaggaggcggagcttgcagtgagccgagatcgcgccactgccctccagcctgggcaacagagcgagactccgtctcaaaaataaataaatgattttaaaaaatctaaaatcgagaaatcacacattcagtggggagcgacttctccttgcttatgggaagtcctcaagtgagtgatgttcaccatgtatttttttttctcttaggacagactaattctgaaaataccgaaggaaaagtagctctatgttctcaccccggttttcctgcgtgtgtgcccttgggtgcgatgcctcccccagcgctctgtggtcgccggtgccagggccccctctggtttggcagggcctggctgcctttgctccctgcagtgagtcttttggtgttttcatgcacggcttgtgcttctggatctgaggcctctcgtgttcacgcggacacttccttccttaagaagacgcctaaaagaggaagttggaattttttttttttttttttgagacagagtctcgctctgtcgcccaggctggagtgcagtggcgtgatctctgctcactgcaagctccgccatctgggttcaagcgattctcctgcctcattctccccagtagctgggattacaggtgcccgccaccacaccagcctaatttttgtatttttagaggggtggagttccaccatgttggccaggctggtcttgaactcttgacctcaggtgatcctgagcctcagcctcccaaagtgctggaattataggcgtgaaccaccgcccccggctgcagttggatttttaaattgcttttttttattgttgaggtttttttatctccaagggactctcccggcacttctaccttccagagttacttcagtgcataaagtttgaattattttgttcttgtgggcagaagtgggaatgatggaatatcctcacggaaaaggcagtgaagttgggagtactgcttacaaaacagggtcaccagtgcattatgtggcgtgttcatccccacgccgtgtgtcacgggctagggcggcgtgttcatccccacaccgtgtgtcacaacaggctagggcacttcacgatgtcactacttgtttttctgatgttccaaaaacaacgtaacttggttttcatgtgtttttccgtggtatatgtgagattgatgctacgggtcttacggactcacacccgttcccactctctgcaatatggatcaggcagtgtttctgataggatgtgaaatggactctcctcgggtgggtccagcaggggccctgcccaccagaacacagtccgtgctgtgctgcgctaaggagctggccctcaactctccttggtgcagggttcccacaaccgagttctagttccctgaggtctttaaaaacaaaaacagaatgttgtacgtgaagattctaggaggggagggaccagcaaatctgagagaaccgtcctggggcctcccttcgaggagccctctgatgtgaggagggacttgagttgagtgacgctgtggtgtgaggtgttctgagctcactgaccggaaggtccaggtgaatctcgtcataagtgatctcaggctctcacaggatccggagggaaatgtgttagagggtctggaaaattcagtgcttttgagttacttgtttttattaaaaatttcctcacaaaagagagtcctcaagttgtggctgttcttgggaaaggggtcaccgtgtctgacaaagtgtaactttaaaaagcacgttgattttttacaaatgtaagtgtgcttgggaattccttaaattttgtgcaataaactattttttggtaaag

SEQ ID NO: 138438 - DNA, 3784 bp, Homo sapiens
  Payload ID: 7109
  Gene Symbol: GOLGA3
  Gene Name: golgin A3
  Uniprot ID: Q08378
  ENST ID: ENST00000545875
  CDS Start-End: 222-3626
ccgggccgggcggcctccggggctgccagagcagcagggtatcatgatattagctggtttgacatcaagtcatttgtgagtcatcagatcttctcctgaaaatgggagacacagtagggcccctcccaggagctcttggctgttgctgatggcagaagccaagcttgtccaaggttcacttgtagcccctcagcgtcagctcagctggtgtcgtcctgaccatggacggcgcgtcggccgagcaagatggcctccaggaggacagatcccacagtggcccctcgtctctccccgaggccccactgaagcccccgggcccactggtgccacctgaccagcaggacaaagtccagtgtgccgaggtaaacagagcatccacggaaggggaaagcccggatggacctggccagggaggcctctgtcagaacgggccaacgccacccttcccagaccctccgtcgtctctcgatcccaccacaagcccagtgggccctgatgcctctccaggtgtggctggtttccatgacaacctaaggaagtctcagggaactagtgctgagggcagtgttagaaaagaagctttgcagtctctcagactcagtcttcctatgcaagaaacgcaactgtgctctacagattctcccctgcccctggagaaggaggagcaggtccgacttcaggctcggaagtggctggaagagcagctcaaacagtacagggtgaagcgccagcaggagaggtccagtcaacctgcaaccaaaacgagactttttagcacgcttgatcctgagctcatgttaaacccagaaaacttaccaagggccagtaccctggctatgacaaaagaatattccttcctgcgcaccagtgtccctcgggggcctaaggtgggcagcctggggcttccggcacatcctagggagaaaaaaacttccaaatcaagcaaaatccggtctctggccgattacagaactgaagattcaaatgcggggaattctgggggaaatgtcccggctcccgattctaccaagggttccctgaagcagaacagaagcagtgcggcgtccgttgtgtctgagatcagcctgtcccccgacactgacgaccgtctggagaacacctccctggctggagacagcgtgtctgaggtggatggaaatgacagcgacagctcatcgtacagcagcgcctccacccgagggacctatggcattctgtcgaagacagtgggcacgcaggacaccccctatatggtcaacggccaggagattcctgcggataccctgggccagttcccctccattaaggacgtcctccaggccgcagccgctgagcaccaagaccaggggcaggaggtcaacggggaggtgcggagtcggagagacagcatctgcagcagcgtgtccttggagagctctgcagcagaaacacaggaggagatgctgcaggtgctcaaagagaaaatgcgactcgaaggacagctggaagccttgtcactggaggcgagtcaggcacttaaagagaaggctgagctgcaggcccagctggccgccctcagcacgaagctgcaggcgcaggtggagtgcagccacagcagccagcagcggcaggattcgctgagctcggaggtggacaccctgaagcagtcgtgctgggacctggagcgagccatgactgacctgcagaacatgctggaggcaaaaaatgccagcctggcgtcgtccaacaacgacttgcaggtggccgaggagcagtaccagaggcttatggccaaggtagaggacatgcagaggagcatgctcagcaaggacaacacagtgcacgacctgcgacagcagatgacagccttgcagagccagcttcagcaggtgcagctggagcggacgacgctgaccagcaagctgaaggcgtcgcaggcggagatctcgtccctgcagagtgtccggcagtggtaccagcagcagctcgccctggcacaggaggcccgcgtcaggctgcagggtgagatggcccacatccaggttggacagatgacccaggcaggtctcctggagcacctgaaactcgagaatgtgtccctgtcccagcagctgacggaaactcagcacaggtccatgaaggagaaggggcgcatcgcggcacagctgcagggcattgaggctgacatgttggatcaggaagcagccttcatgcagattcaggaggcaaagacgatggtggaggaggaccttcagaggaggctggaagagtttgaaggtgagagggagcggctgcagaggatggcggactcggcggcatccctggagcagcagctggagcaggtgaagttgactttactccagcgagaccagcagcttgaggctttgcagcaggagcacctggacctgatgaaacagctcaccttgactcaggaggctctgcagagcagggagcagtccctcgatgccctgcagacacactacgatgagctgcaggccaggctgggggagctgcagggcgaggccgcctccagggaggacacgatctgcctcctgcagaacgagaagatcatcttggaggcggctttgcaggcggccaagagtggcaaggaggagcttgacagaggagcaagacgcttggaagaaggtaccgaggaaacgtcggaaactttagagaagttaagagaagaattagctatcaaatccggccaggtggaacacctgcagcaggagactgctgctctgaaaaagcaaatgcaaaaaataaaggaacagtttctccaacaaaaggtgatggtggaggcctaccggcgcgacgccacctccaaagaccagctcatcagtgagctgaaagccaccaggaagaggctggactcggagctgaaggagctgcggcaggagctgatgcaagtgcacggggagaagcggactgccgaggcggagctctcgcgcctgcacagagaggtggcccaggtccgtcagcacatggcggaccttgaagggcatctccagtcggcgcagaaggagcgagacgagatggaaacacacttgcagtcgttgcagttcgataaggagcagatggtcgcggtcacagaggccaatgaggcgctgaagaaacaaatcgaagagttgcagcaagaggcccggaaggccatcacggaacagaagcagaagatgaggcggctgggctcagacttgaccagcgcccagaaggagatgaagaccaaacataaggcctacgagaacgccgtgggcatcctcagccgccgcctgcaggaggccctcgcggccaaggaggctgcggacgcggagctgggccagctccgagcccagggtggcagcagtgacagcagcctggctctacatgaaaggatccaggccctggaggcggagctgcaggctgtcagtcatagcaagacgctgctggaaaaggaactgcaggaggtcatagcgctgaccagccaggagctggaggagtcccgggagaaggtgctggagctggaggacgaggtgaggcctggccatctgctgtggcggcagcgtggggcaggtcacgtgagccctggacatgccgccacgcgtgagacccgaagaacaaaacttcaccgtgtgcccagcgttgctacttttggtgttgccaccttctgaccgtcggcctctggctctgtggtggggcaggccctgattccagccctctggggaggatcactgtacagcctctttggtggaatggttacagaattcatagtggaacccttctcagttcaaatgctttggttgcaaataagaaacccaacttcgccagg

SEQ ID NO: 138439 - DNA, 498 bp, Homo sapiens
  Payload ID: 7109
  Gene Symbol: GOLGA3
  Gene Name: golgin A3
  ENST ID: ENST00000541013
  CDS Start-End: 1-254
tggacttgacggagcagcagggcaggaaggaactggaagggctacagcagctgctgcagaacgtcaagtctgagttggagatggcccaggaagacctgtccatgacccagaaggataaatttatgctccaggcaaaagtgtcggagctgaagaacaacatgaagaccctgctccagcagaaccagcagctcaagctggacctacgccgcggcgcggccaagacggtactcaggcccgcgtccctcccggggtagccgacgtgcgctgtagatgctctcggacaggaggctggcagacgtagaaaggagccgaaaggcgaggccagctcttccaaccctgccacgcccatcaagatcccggactgcccagttcccgcctcgctgctggaggagctgctgagaccaccgcccgccgtgagcaaggagcccctcaagaacctgaacagctgcctccagcagctcaagcaggagatggacagcctgcagcgccagatggagg

SEQ ID NO: 138440 - DNA, 7673 bp, Homo sapiens
  Payload ID: 7110
  Gene Symbol: GOLGA4
  Gene Name: golgin A4
  Uniprot ID: Q13439
  ENST ID: ENST00000356847
  CDS Start-End: 300-7031
gcaagcgcccttggcgcacagttcacctgctgccgttgtcgtcgccgccgcggctcccggggctggatggggggccgaggccagccagtggcacccggaagaaagagacgcggcggcggcgacgccgacaccctcaggacgagtgtccggacttgcccacagcctcaaggaggagacggcgaggcccggcccccgctgtccctggtgtaaagaagtcgccgtagccgtcgcggccgggactccccgggctctcgcccttcaggtttcgttgacactcaggaccgtacgtacgctgcgccatgttcaagaaactgaagcaaaagatcagcgaggagcagcagcagctccagcaggcgctggctcctgctcaggcgtcctccaattcttcaacaccaacaagaatgaggagcaggacatcttcatttacagagcaacttgatgaaggtacacccaatagagagaatgcatctactcatgcctcgaaatctcctgacagtgttaatggaagtgaaccaagcattcctcagtcaggtgacacacagtcttttgcacagaagctccagctccgggtgccctccgtggagtctttgtttcgaagtccgataaaggaatctctattccggtcttcttctaaagagtctttggtacgaacatcttccagagaatccctgaatcgacttgacctggacagttctactgccagttttgatccaccctctgatatggatagcgaggctgaagacttggtagggaattcagacagtctcaacaaagaacagttgattcagcggttgcgaagaatggaacgaagcttaagtagctacaggggaaaatattctgagcttgttacagcttatcagatgcttcagagagagaagaaaaagctacaaggtatattaagtcagagtcaggataaatcacttcggagaatagcagaattaagagaggagctccaaatggaccagcaggcaaagaaacatctgcaagaggagtttgatgcatctttagaggagaaagatcagtatatcagtgttctccaaactcaggtttctctactgaaacaacgattacgaaatggcccgatgaatgttgatgtactgaaaccacttcctcagctggaaccacaggctgaagtcttcactaaagaagagaatccagaaagtgatggagagccagtagtggaagatggaacttctgtaaaaacactggaaacactccagcaaagagtgaagcgtcaagagaacctacttaagcgttgtaaggaaacaattcagtcacataaggaacaatgtacactattaactagtgaaaaagaagctctgcaagaacaactggatgaaagacttcaagaactagaaaagataaaggaccttcatatggccgagaagactaaacttatcactcagttgcgtgatgcaaagaacttaattgaacagcttgaacaagataagggaatggtaatcgcagagacaaaacgtcagatgcatgaaaccctggaaatgaaagaagaagaaattgctcaactccgtagtcgcatcaaacagatgactacccagggagaggaattacgggaacagaaagaaaagtccgaaagagctgcttttgaggaacttgaaaaagctttgagtacagcccaaaaaacagaggaagcacggagaaaactgaaggcagaaatggatgaacaaataaaaactatcgaaaaaacaagtgaggaggaacgcatcagtcttcaacaggaattaagtcgggtgaaacaggaggttgttgatgtaatgaaaaaatcctcagaagaacaaattgctaagctacagaagcttcatgaaaaggagctggccagaaaagagcaggaactgaccaagaagcttcagacccgagaaagggaatttcaggaacaaatgaaagtagctcttgaaaagagtcaatcagaatatttgaagatcagccaagaaaaagaacagcaagaatctttggccctagaagagttagagttgcagaaaaaagcaatcctcacagaaagtgaaaataaacttcgggaccttcagcaagaagcagagacttacagaactagaattcttgaattggaaagttctttggaaaaaagcttacaagaaaacaaaaatcagtcaaaagatttggctgttcatctggaagctgaaaaaaataagcacaataaggagattacagtcatggttgaaaaacacaagacagaattggaaagccttaagcatcagcaggatgccctttggactgaaaaactccaagtcttaaagcaacaatatcagactgaaatggaaaaacttagggaaaagtgtgaacaagaaaaagaaacattgttgaaagacaaagagattatcttccaggcccacatagaagaaatgaatgaaaagactttagaaaagcttgatgtgaagcaaacagaactagaatcattatcttctgaactgtcagaagtattaaaagcccgtcacaaactagaagaggaactttctgttctgaaagatcaaacagataaaatgaagcaggaattagaggccaagatggatgaacagaaaaatcatcaccagcagcaagttgacagtatcattaaagaacacgaggtatctatccagaggactgagaaggcattaaaagatcaaattaatcaacttgagcttctcttgaaggaaagggacaagcatttgaaagagcatcaggctcatgtagaaaatttagaggcagatattaaaaggtctgaaggggaactccagcaggcatctgctaagctggacgtttttcagtcttaccagagtgccacacatgagcagacaaaagcatatgaggaacagttggcccaattgcagcagaagttgttggatttggaaacagaaagaattcttcttaccaaacaggttgctgaagttgaagcacaaaagaaagatgtttgtactgagttagatgctcacaaaatccaggtgcaggacttaatgcagcaacttgaaaaacaaaatagtgaaatggagcaaaaagtaaaatctttaacccaagtctatgagtccaaacttgaagatggtaacaaagaacaggaacagacaaagcaaatcttggtggaaaaggaaaatatgattttacaaatgagagaaggacagaagaaagaaattgagatactcacacagaaattgtcagccaaggaggacagtattcatattttgaatgaggaatatgaaaccaaatttaaaaaccaagaaaaaaagatggaaaaagttaagcagaaagcaaaggagatgcaagaaacgttaaagaaaaaattactggatcaggaagccaaacttaagaaagagcttgaaaatactgctctagagcttagtcagaaagaaaaacagtttaatgccaaaatgctggaaatggcacaggctaactcagctggaatcagtgatgcagtgtcaagactggaaacaaaccaaaaagaacaaatagaaagtcttactgaggttcatcgacgagaactcaatgatgtcatatcaatctgggaaaagaaacttaatcagcaagctgaagaacttcaggaaatacatgaaatccaattacaggaaaaagaacaagaggtagcagaactgaaacaaaagatcctcctatttgggtgtgaaaaagaagagatgaacaaggaaataacatggctgaaggaagaaggtgttaagcaggatacaacattaaatgaattacaggaacagttaaagcagaagtctgcccatgtgaattctcttgcacaagatgaaactaaactgaaagctcatcttgaaaagctagaggttgacttgaataagtctctgaaggaaaatacttttcttcaagagcagctagttgaactgaagatgctggcagaagaagataagcggaaggtttctgagttgactagcaagttgaaaaccacagatgaagaattccagagtttgaaatcttcacatgaaaaaagtaacaaaagcctagaggacaagagcttggaatttaaaaaactgtctgaggaactagcgattcagctagatatttgctgtaagaaaaccgaagccttattagaagctaaaacaaatgagctaatcaacattagtagtagtaaaactaatgccattctttctaggatttctcattgtcagcaccgtacaactaaagttaaggaggcactgttaattaaaacttgcacagtttctgaattagaagcacaacttagacagttgacagaggagcaaaatacactaaatatttcttttcaacaggctactcatcagttagaagaaaaagaaaatcaaattaagagcatgaaggctgatattgaaagtcttgtaacagaaaaagaagccttacagaaggaaggaggcaatcagcaacaggctgcttctgaaaaggagtcttgtataacacagttgaagaaagagttatctgaaaacatcaatgctgtcacattgatgaaagaagagcttaaagaaaaaaaagttgagattagcagtcttagtaaacaactaactgatttgaatgttcagcttcaaaatagcatcagcctatccgaaaaagaagcagccatttcatcactaagaaagcagtatgatgaagaaaaatgtgaattgctggatcaggtgcaagatttatcttttaaagttgacactctgagtaaagagaaaatttctgctcttgagcaggtagatgactggtccaataaattctcagaatggaagaagaaagcacagtcaagatttacacagcatcaaaacactgttaaagaattgcagatccagcttgagttaaaatcaaaggaagcttatgaaaaggatgagcagataaatttattgaaggaagagcttgatcagcaaaataaaagatttgattgtttaaagggtgaaatggaagacgacaagagcaagatggagaaaaaggagtctaatttagaaacagagttaaagtctcaaacagcaagaattatggaattagaggaccatattacccagaaaactattgaaatagagtccttaaatgaagttcttaaaaattacaatcaacaaaaggatattgaacacaaagaattggttcagaaacttcaacattttcaagagttaggagaagaaaaggacaacagggttaaagaagctgaagaaaaaatcttaacacttgaaaaccaagtttattccatgaaagctgaacttgaaactaagaagaaagaattagaacatgtgaatttaagtgtgaaaagcaaagaggaggagttaaaggcattggaagataggcttgagtcagaaagtgctgcaaaattagcagagttgaagagaaaagctgaacaaaaaattgctgccattaagaagcagttgttatctcaaatggaagagaaagaagaacagtataaaaaaggtacagaaagccatttgagtgagctaaatacaaaattgcaggaaagagaaagggaagttcacatcttggaagaaaaacttaagtcagtggaaagttcacagtcagaaacattaattgtacccagatcagcaaaaaatgtggcagcatatactgaacaagaagaagcagattcccaaggctgtgtgcagaagacatatgaagaaaaaatcagtgttttacaaagaaacttaactgaaaaagaaaagctattgcagagggtagggcaggaaaaagaagagacagtttcttctcattttgaaatgcgatgccaataccaggagcgcttaataaagctagaacatgctgaggcaaagcaacatgaagatcaaagtatgataggtcatcttcaagaggagcttgaagaaaaaaacaagaaatattccttgatagtagcccagcatgtggaaaaagaaggaggtaaaaataacatacaggcaaagcaaaacttggaaaatgtgtttgacgacgtccagaaaaccctccaggagaaggaactaacctgtcagattttggagcaaaagataaaagagctggattcctgcttagtaagacagaaagaagtacatagagttgaaatggaagagttgacctcaaaatatgaaaaattacaggctttacaacagatggatggaagaaataaacccacagaacttttggaagaaaacactgaagaaaagtccaaatcacatttggtccaacccaaattgcttagtaacatggaagcccagcacaatgatctggagtttaaattagccggggcagaacgggagaaacagaaactgggcaaggagattgttagattgcagaaagaccttcgaatgttgagaaaggagcatcagcaagaattggaaatactaaagaaagaatatgatcaagaaagggaagagaaaatcaaacaggagcaggaagatcttgaactgaagcacaattccacattaaaacagctgatgagggagtttaatacacagctggcacaaaaggaacaagagctggaaatgaccataaaagaaactatcaataaggcccaggaggtggaggctgaacttttagaaagccatcaagaagagacaaatcagttacttaaaaaaattgctgagaaagatgatgatctaaaacgaacagccaaaagatatgaagaaatccttgatgctcgtgaagaagaaatgactgcaaaagtaagggacctgcagactcaacttgaggagctgcagaagaaataccagcaaaagctagagcaggaggagaaccctggcaatgataatacacagctagcacagaagacgactttaatcagtgattcgaaattgaaagagcaagagttcagagaacagattcacaatttagaagaccgtttgaagaaatatgaaaagaatgtatatgcaacaactgtggggacaccttacaaaggtggcaatttgtaccatacggatgtctcactctttggagaacctaccgaatttgagtatttgcgaaaagtgctttttgagtatatgatgggtcgtgagactaagaccatggcaaaagttataaccaccgtactgaagttccctgatgatcagactcagaaaattttggaaagagaagatgctcggctgatgtcatggctccgatcttcatcttgaagaagagtgacattgggtgactgctgcttggaaaactgtccacacttgctactctttgagaatgaagttgtcattcagggcccctcatgtagccaaaagaccaagaaaaatctggcccacagataagttgcagactgcctttaaaatagattttatcagtggagaaatggtgatagttttttcttcagttttctcttgggaagagttttatgttgtttaaaagatattttgataacttaacctgctttatgggcttacataatattcctttcatccattctttttaaagaacggcttacctttcctatttatttttagggtgattttttaaaaagacttgtgcaatacattttgaggtgaaacttagtggattttttctgataaattagagcatttaattgactattttattcaggttgatctgttgaatatttgctaaagaccagttctttaagctaagacatgtaaaaaatcccaaatggcagtacctcattgtttacttagcttttgtacttatatttttcagaggaaaaaacactactgtaaattgtgaatagccaatacataactgtattgtatgcaaatctgtgattgttggcagtgtcatctctgagaaacagataaataaagtttatttactat

SEQ ID NO: 138441 - DNA, 7772 bp, Homo sapiens
  Payload ID: 7110
  Gene Symbol: GOLGA4
  Gene Name: golgin A4
  Uniprot ID: Q13439
  ENST ID: ENST00000361924
  CDS Start-End: 375-7067
atgtgcgggacccgacattgtgcttgtcccatccggtgctccgtagttagcctctgtgagctccacgtaggccgcgcaagcgcccttggcgcacagttcacctgctgccgttgtcgtcgccgccgcggctcccggggctggatggggggccgaggccagccagtggcacccggaagaaagagacgcggcggcggcgacgccgacaccctcaggacgagtgtccggacttgcccacagcctcaaggaggagacggcgaggcccggcccccgctgtccctggtgtaaagaagtcgccgtagccgtcgcggccgggactccccgggctctcgcccttcaggtttcgttgacactcaggaccgtacgtacgctgcgccatgttcaagaaactgaagcaaaagatcagcgaggagcagcagcagctccagcaggcgctggctcctgctcaggcgtcctccaattcttcaacaccaacaagaatgaggagcaggacatcttcatttacagagcaacttgatgaaggtacacccaatagagagtcaggtgacacacagtcttttgcacagaagctccagctccgggtgccctccgtggagtctttgtttcgaagtccgataaaggaatctctattccggtcttcttctaaagagtctttggtacgaacatcttccagagaatccctgaatcgacttgacctggacagttctactgccagttttgatccaccctctgatatggatagcgaggctgaagacttggtagggaattcagacagtctcaacaaagaacagttgattcagcggttgcgaagaatggaacgaagcttaagtagctacaggggaaaatattctgagcttgttacagcttatcagatgcttcagagagagaagaaaaagctacaaggtatattaagtcagagtcaggataaatcacttcggagaatagcagaattaagagaggagctccaaatggaccagcaggcaaagaaacatctgcaagaggagtttgatgcatctttagaggagaaagatcagtatatcagtgttctccaaactcaggtttctctactgaaacaacgattacgaaatggcccgatgaatgttgatgtactgaaaccacttcctcagctggaaccacaggctgaagtcttcactaaagaagagaatccagaaagtgatggagagccagtagtggaagatggaacttctgtaaaaacactggaaacactccagcaaagagtgaagcgtcaagagaacctacttaagcgttgtaaggaaacaattcagtcacataaggaacaatgtacactattaactagtgaaaaagaagctctgcaagaacaactggatgaaagacttcaagaactagaaaagataaaggaccttcatatggccgagaagactaaacttatcactcagttgcgtgatgcaaagaacttaattgaacagcttgaacaagataagggaatggtaatcgcagagacaaaacgtcagatgcatgaaaccctggaaatgaaagaagaagaaattgctcaactccgtagtcgcatcaaacagatgactacccagggagaggaattacgggaacagaaagaaaagtccgaaagagctgcttttgaggaacttgaaaaagctttgagtacagcccaaaaaacagaggaagcacggagaaaactgaaggcagaaatggatgaacaaataaaaactatcgaaaaaacaagtgaggaggaacgcatcagtcttcaacaggaattaagtcgggtgaaacaggaggttgttgatgtaatgaaaaaatcctcagaagaacaaattgctaagctacagaagcttcatgaaaaggagctggccagaaaagagcaggaactgaccaagaagcttcagacccgagaaagggaatttcaggaacaaatgaaagtagctcttgaaaagagtcaatcagaatatttgaagatcagccaagaaaaagaacagcaagaatctttggccctagaagagttagagttgcagaaaaaagcaatcctcacagaaagtgaaaataaacttcgggaccttcagcaagaagcagagacttacagaactagaattcttgaattggaaagttctttggaaaaaagcttacaagaaaacaaaaatcagtcaaaagatttggctgttcatctggaagctgaaaaaaataagcacaataaggagattacagtcatggttgaaaaacacaagacagaattggaaagccttaagcatcagcaggatgccctttggactgaaaaactccaagtcttaaagcaacaatatcagactgaaatggaaaaacttagggaaaagtgtgaacaagaaaaagaaacattgttgaaagacaaagagattatcttccaggcccacatagaagaaatgaatgaaaagactttagaaaagcttgatgtgaagcaaacagaactagaatcattatcttctgaactgtcagaagtattaaaagcccgtcacaaactagaagaggaactttctgttctgaaagatcaaacagataaaatgaagcaggaattagaggccaagatggatgaacagaaaaatcatcaccagcagcaagttgacagtatcattaaagaacacgaggtatctatccagaggactgagaaggcattaaaagatcaaattaatcaacttgagcttctcttgaaggaaagggacaagcatttgaaagagcatcaggctcatgtagaaaatttagaggcagatattaaaaggtctgaaggggaactccagcaggcatctgctaagctggacgtttttcagtcttaccagagtgccacacatgagcagacaaaagcatatgaggaacagttggcccaattgcagcagaagttgttggatttggaaacagaaagaattcttcttaccaaacaggttgctgaagttgaagcacaaaagaaagatgtttgtactgagttagatgctcacaaaatccaggtgcaggacttaatgcagcaacttgaaaaacaaaatagtgaaatggagcaaaaagtaaaatctttaacccaagtctatgagtccaaacttgaagatggtaacaaagaacaggaacagacaaagcaaatcttggtggaaaaggaaaatatgattttacaaatgagagaaggacagaagaaagaaattgagatactcacacagaaattgtcagccaaggaggacagtattcatattttgaatgaggaatatgaaaccaaatttaaaaaccaagaaaaaaagatggaaaaagttaagcagaaagcaaaggagatgcaagaaacgttaaagaaaaaattactggatcaggaagccaaacttaagaaagagcttgaaaatactgctctagagcttagtcagaaagaaaaacagtttaatgccaaaatgctggaaatggcacaggctaactcagctggaatcagtgatgcagtgtcaagactggaaacaaaccaaaaagaacaaatagaaagtcttactgaggttcatcgacgagaactcaatgatgtcatatcaatctgggaaaagaaacttaatcagcaagctgaagaacttcaggaaatacatgaaatccaattacaggaaaaagaacaagaggtagcagaactgaaacaaaagatcctcctatttgggtgtgaaaaagaagagatgaacaaggaaataacatggctgaaggaagaaggtgttaagcaggatacaacattaaatgaattacaggaacagttaaagcagaagtctgcccatgtgaattctcttgcacaagatgaaactaaactgaaagctcatcttgaaaagctagaggttgacttgaataagtctctgaaggaaaatacttttcttcaagagcagctagttgaactgaagatgctggcagaagaagataagcggaaggtttctgagttgactagcaagttgaaaaccacagatgaagaattccagagtttgaaatcttcacatgaaaaaagtaacaaaagcctagaggacaagagcttggaatttaaaaaactgtctgaggaactagcgattcagctagatatttgctgtaagaaaaccgaagccttattagaagctaaaacaaatgagctaatcaacattagtagtagtaaaactaatgccattctttctaggatttctcattgtcagcaccgtacaactaaagttaaggaggcactgttaattaaaacttgcacagtttctgaattagaagcacaacttagacagttgacagaggagcaaaatacactaaatatttcttttcaacaggctactcatcagttagaagaaaaagaaaatcaaattaagagcatgaaggctgatattgaaagtcttgtaacagaaaaagaagccttacagaaggaaggaggcaatcagcaacaggctgcttctgaaaaggagtcttgtataacacagttgaagaaagagttatctgaaaacatcaatgctgtcacattgatgaaagaagagcttaaagaaaaaaaagttgagattagcagtcttagtaaacaactaactgatttgaatgttcagcttcaaaatagcatcagcctatccgaaaaagaagcagccatttcatcactaagaaagcagtatgatgaagaaaaatgtgaattgctggatcaggtgcaagatttatcttttaaagttgacactctgagtaaagagaaaatttctgctcttgagcaggtagatgactggtccaataaattctcagaatggaagaagaaagcacagtcaagatttacacagcatcaaaacactgttaaagaattgcagatccagcttgagttaaaatcaaaggaagcttatgaaaaggatgagcagataaatttattgaaggaagagcttgatcagcaaaataaaagatttgattgtttaaagggtgaaatggaagacgacaagagcaagatggagaaaaaggagtctaatttagaaacagagttaaagtctcaaacagcaagaattatggaattagaggaccatattacccagaaaactattgaaatagagtccttaaatgaagttcttaaaaattacaatcaacaaaaggatattgaacacaaagaattggttcagaaacttcaacattttcaagagttaggagaagaaaaggacaacagggttaaagaagctgaagaaaaaatcttaacacttgaaaaccaagtttattccatgaaagctgaacttgaaactaagaagaaagaattagaacatgtgaatttaagtgtgaaaagcaaagaggaggagttaaaggcattggaagataggcttgagtcagaaagtgctgcaaaattagcagagttgaagagaaaagctgaacaaaaaattgctgccattaagaagcagttgttatctcaaatggaagagaaagaagaacagtataaaaaaggtacagaaagccatttgagtgagctaaatacaaaattgcaggaaagagaaagggaagttcacatcttggaagaaaaacttaagtcagtggaaagttcacagtcagaaacattaattgtacccagatcagcaaaaaatgtggcagcatatactgaacaagaagaagcagattcccaaggctgtgtgcagaagacatatgaagaaaaaatcagtgttttacaaagaaacttaactgaaaaagaaaagctattgcagagggtagggcaggaaaaagaagagacagtttcttctcattttgaaatgcgatgccaataccaggagcgcttaataaagctagaacatgctgaggcaaagcaacatgaagatcaaagtatgataggtcatcttcaagaggagcttgaagaaaaaaacaagaaatattccttgatagtagcccagcatgtggaaaaagaaggaggtaaaaataacatacaggcaaagcaaaacttggaaaatgtgtttgacgacgtccagaaaaccctccaggagaaggaactaacctgtcagattttggagcaaaagataaaagagctggattcctgcttagtaagacagaaagaagtacatagagttgaaatggaagagttgacctcaaaatatgaaaaattacaggctttacaacagatggatggaagaaataaacccacagaacttttggaagaaaacactgaagaaaagtccaaatcacatttggtccaacccaaattgcttagtaacatggaagcccagcacaatgatctggagtttaaattagccggggcagaacgggagaaacagaaactgggcaaggagattgttagattgcagaaagaccttcgaatgttgagaaaggagcatcagcaagaattggaaatactaaagaaagaatatgatcaagaaagggaagagaaaatcaaacaggagcaggaagatcttgaactgaagcacaattccacattaaaacagctgatgagggagtttaatacacagctggcacaaaaggaacaagagctggaaatgaccataaaagaaactatcaataaggcccaggaggtggaggctgaacttttagaaagccatcaagaagagacaaatcagttacttaaaaaaattgctgagaaagatgatgatctaaaacgaacagccaaaagatatgaagaaatccttgatgctcgtgaagaagaaatgactgcaaaagtaagggacctgcagactcaacttgaggagctgcagaagaaataccagcaaaagctagagcaggaggagaaccctggcaatgataatgtaacaattatggagctacagacacagctagcacagaagacgactttaatcagtgattcgaaattgaaagagcaagagttcagagaacagattcacaatttagaagaccgtttgaagaaatatgaaaagaatgtatatgcaacaactgtggggacaccttacaaaggtggcaatttgtaccatacggatgtctcactctttggagaacctaccgaatttgagtatttgcgaaaagtgctttttgagtatatgatgggtcgtgagactaagaccatggcaaaagttataaccaccgtactgaagttccctgatgatcagactcagaaaattttggaaagagaagatgctcggctgatgtttacttcacctcgcagtggtatcttctgagtaaaccatcagtctgtgcttagttaacatgtgtcatggctccgatcttcatcttgaagaagagtgacattgggtgactgctgcttggaaaactgtccacacttgctactctttgagaatgaagttgtcattcagggcccctcatgtagccaaaagaccaagaaaaatctggcccacagataagttgcagactgcctttaaaatagattttatcagtggagaaatggtgatagttttttcttcagttttctcttgggaagagttttatgttgtttaaaagatattttgataacttaacctgctttatgggcttacataatattcctttcatccattctttttaaagaacggcttacctttcctatttatttttagggtgattttttaaaaagacttgtgcaatacattttgaggtgaaacttagtggattttttctgataaattagagcatttaattgactattttattcaggttgatctgttgaatatttgctaaagaccagttctttaagctaagacatgtaaaaaatcccaaatggcagtacctcattgtttacttagcttttgtacttatatttttcagaggaaaaaacactactgtaaattgtgaatagccaatacataactgtattgtatgcaaatctgtgattgttggcagtgtcatctctgagaaacagataaataaagtttatttactatataaca

SEQ ID NO: 138442 - DNA, 1617 bp, Homo sapiens
  Payload ID: 7110
  Gene Symbol: GOLGA4
  Gene Name: golgin A4
  ENST ID: ENST00000450863
  CDS Start-End: 282-1617
cagttcacctgctgccgttgtcgtcgccgccgcggctcccggggctggatggggggccgaggccagccagtggcacccggaagaaagagacgcggcggcggcgacgccgacaccctcaggacgagtgtccggacttgcccacagcctcaaggaggagacggcgaggcccggcccccgctgtccctggtgtaaagaagtcgccgtagccgtcgcggccgggactccccgggctctcgcccttcaggtttcgttgacactcaggaccgtacgtacgctgcgccatgttcaagaaactgaagcaaaagatcagcgaggagcagcagcagctccagcaggcgctggctcctgctcaggcgtcctccaattcttcaacaccaacaagaatgaggagcaggacatcttcatttacagagcaacttgatgaaggtacacccaatagagagaatgcatctactcatgcctcgaaatctcctgacagtgttaatggaagtgaaccaagcattcctcagtcaggtgacacacagtcttttgcacagaagctccagctccgggtgccctccgtggagtctttgtttcgaagtccgataaaggaatctctattccggtcttcttctaaagagtctttggtacgaacatcttccagagaatccctgaatcgacttgacctggacagttctactgccagttttgatccaccctctgatatggatagcgaggctgaagacttggtagggaattcagacagtctcaacaaagaacagttgattcagcggttgcgaagaatggaacgaagcttaagtagctacaggggaaaatattctgagggtatattaagtcagagtcaggataaatcacttcggagaatagcagaattaagagagctccaaatggaccagcaggcaaagaaacatctgcaagaggagtttgatgcatctttagaggagaaagatcagtatatcagtgttctccaaactcaggtttctctactgaaacaacgattacgaaatggcccgatgaatgttgatgtactgaaaccacttcctcagctggaaccacaggctgaagtcttcactaaagaagagaatccagaaagtgatggagagccagtagtggaagatggaacttctgtaaaaacactggaaacactccagcaaagagtgaagcgtcaagagaacctacttaagcgttgtaaggaaacaattcagtcacataaggaacaatgtacactattaactagtgaaaaagaagctctgcaagaacaactggatgaaagacttcaagaactagaaaagataaaggaccttcatatggccgagaagactaaacttatcactcagttgcgtgatgcaaagaacttaattgaacagcttgaacaagataagggaatggtaatcgcagagacaaaacgtcagatgcatgaaaccctggaaatgaaagaagaagaaattgctcaactccgtagtcgcatcaaacagatgactacccagggagaggaattacgggaacagaaagaaaagtccgaaagagctgcttttgaggaacttgaaaaagctttgagtacagcccaaaaaacagaggaagcacggagaaaactgaaggcagaaatggatgaacaaa

SEQ ID NO: 138443 - DNA, 568 bp, Homo sapiens
  Payload ID: 7110
  Gene Symbol: GOLGA4
  Gene Name: golgin A4
  ENST ID: ENST00000431105
  CDS Start-End: 214-568
agtggcacccggaagaaagagacgcggcggcggcgacgccgacaccctcaggacgagtgtccggacttgcccacagcctcaaggaggagacggcgaggcccggcccccgctgtccctggtgtaaagaagtcgccgtagccgtcgcggccgggactccccgggctctcgcccttcaggtttcgttgacactcaggaccgtacgtacgctgcgccatgttcaagaaactgaagcaaaagatcagcgaggagcagcagcagctccagcaggcgctggctcctgctcaggcgtcctccaattcttcaacaccaacaagaatgaggagcaggacatcttcatttacagagcaacttgatgaaggtacacccaatagagagctactagccgggatgatagcagagcctgcttttctctctgagtatactatctttgctttggattcctccaaacatcctaaaacacagagtgacagtgtgaatgcatctactcatgcctcgaaatctcctgacagtgttaatggaagtgaaccaagcattcctcagtcaggtgacacacagtcttttgcacaga

SEQ ID NO: 138444 - DNA, 2036 bp, Homo sapiens
  Payload ID: 7110
  Gene Symbol: GOLGA4
  Gene Name: golgin A4
  ENST ID: ENST00000429018
  CDS Start-End: 281-2036
agttcacctgctgccgttgtcgtcgccgccgcggctcccggggctggatggggggccgaggccagccagtggcacccggaagaaagagacgcggcggcggcgacgccgacaccctcaggacgagtgtccggacttgcccacagcctcaaggaggagacggcgaggcccggcccccgctgtccctggtgtaaagaagtcgccgtagccgtcgcggccgggactccccgggctctcgcccttcaggtttcgttgacactcaggaccgtacgtacgctgcgccatgttcaagaaactgaagcaaaagatcagcgaggagcagcagcagctccagcaggcgctggctcctgctcaggcgtcctccaattcttcaacaccaacaagaatgaggagcaggacatcttcatttacagagcaacttgatgaaggtacacccaatagagagaatgcatctactcatgcctcgaaatctcctgacagtgttaatggaagtgaaccaagcattcctcaggaaaagagtcaatcagaatatttgaagatcagccaagaaaaagaacagcaagaatctttggccctagaagagttagagttgcagaaaaaagcaatcctcacagaaagtgaaaataaacttcgggaccttcagcaagaagcagagacttacagaactagaattcttgaattggaaagttctttggaaaaaagcttacaagaaaacaaaaatcagtcaaaagatttggctgttcatctggaagctgaaaaaaataagcacaataaggagattacagtcatggttgaaaaacacaagacagaattggaaagccttaagcatcagcaggatgccctttggactgaaaaactccaagtcttaaagcaacaatatcagactgaaatggaaaaacttagggaaaagtgtgaacaagaaaaagaaacattgttgaaagacaaagagattatcttccaggcccacatagaagaaatgaatgaaaagactttagaaaagcttgatgtgaagcaaacagaactagaatcattatcttctgaactgtcagaagtattaaaagcccgtcacaaactagaagaggaactttctgttctgaaagatcaaacagataaaatgaagcaggaattagaggccaagatggatgaacagaaaaatcatcaccagcagcaagttgacagtatcattaaagaacacgaggtatctatccagaggactgagaaggcattaaaagatcaaattaatcaacttgagcttctcttgaaggaaagggacaagcatttgaaagagcatcaggctcatgtagaaaatttagaggcagatattaaaaggtctgaaggggaactccagcaggcatctgctaagctggacgtttttcagtcttaccagagtgccacacatgagcagacaaaagcatatgaggaacagttggcccaattgcagcagaagttgttggatttggaaacagaaagaattcttcttaccaaacaggttgctgaagttgaagcacaaaagaaagatgtttgtactgagttagatgctcacaaaatccaggtgcaggacttaatgcagcaacttgaaaaacaaaatagtgaaatggagcaaaaagtaaaatctttaacccaagtctatgagtccaaacttgaagatggtaacaaagaacaggaacagacaaagcaaatcttggtggaaaaggaaaatatgattttacaaatgagagaaggacagaagaaagaaattgagatactcacacagaaattgtcagccaaggaggacagtattcatattttgaatgaggaatatgaaaccaaatttaaaaaccaagaaaaaaagatggaaaaagttaagcagaaagcaaaggagatgcaagaaacgttaaagaaaaaattactggatcaggaagccaaacttaagaaagagcttgaaaatactgctctagagcttagtcagaaagaaaaacagtttaatgccaaaatgctggaaatggcacaggctaactcagctggaatcagtgatgcagtgtcaagactggaaacaaacc

SEQ ID NO: 138445 - DNA, 6947 bp, Homo sapiens
  Payload ID: 7110
  Gene Symbol: GOLGA4
  Gene Name: golgin A4
  ENST ID: ENST00000437131
  CDS Start-End: 1-6300
aattcagacagtctcaacaaagaacagttgattcagcggttgcgaagaatggaacgaagcttaagtagctacaggggaaaatattctgagcttgttacagcttatcagatgcttcagagagagaagaaaaagctacaaggtatattaagtcagagtcaggataaatcacttcggagaatagcagaattaagagaggagctccaaatggaccagcaggcaaagaaacatctgcaagaggagtttgatgcatctttagaggagaaagatcagtatatcagtgttctccaaactcaggtttctctactgaaacaacgattacgaaatggcccgatgaatgttgatgtactgaaaccacttcctcagctggaaccacaggctgaagtcttcactaaagaagagaatccagaaagtgatggagagccagtagtggaagatggaacttctgtaaaaacactggaaacactccagcaaagagtgaagcgtcaagagaacctacttaagcgttgtaaggaaacaattcagtcacataaggaacaatgtacactattaactagtgaaaaagaagctctgcaagaacaactggatgaaagacttcaagaactagaaaagataaaggaccttcatatggccgagaagactaaacttatcactcagttgcgtgatgcaaagaacttaattgaacagcttgaacaagataagggaatggtaatcgcagagacaaaacgtcagatgcatgaaaccctggaaatgaaagaagaagaaattgctcaactccgtagtcgcatcaaacagatgactacccagggagaggaattacgggaacagaaagaaaagtccgaaagagctgcttttgaggaacttgaaaaagctttgagtacagcccaaaaaacagaggaagcacggagaaaactgaaggcagaaatggatgaacaaataaaaactatcgaaaaaacaagtgaggaggaacgcatcagtcttcaacaggaattaagtcgggtgaaacaggaggttgttgatgtaatgaaaaaatcctcagaagaacaaattgctaagctacagaagcttcatgaaaaggagctggccagaaaagagcaggaactgaccaagaagcttcagacccgagaaagggaatttcaggaacaaatgaaagtagctcttgaaaagagtcaatcagaatatttgaagatcagccaagaaaaagaacagcaagaatctttggccctagaagagttagagttgcagaaaaaagcaatcctcacagaaagtgaaaataaacttcgggaccttcagcaagaagcagagacttacagaactagaattcttgaattggaaagttctttggaaaaaagcttacaagaaaacaaaaatcagtcaaaagatttggctgttcatctggaagctgaaaaaaataagcacaataaggagattacagtcatggttgaaaaacacaagacagaattggaaagccttaagcatcagcaggatgccctttggactgaaaaactccaagtcttaaagcaacaatatcagactgaaatggaaaaacttagggaaaagtgtgaacaagaaaaagaaacattgttgaaagacaaagagattatcttccaggcccacatagaagaaatgaatgaaaagactttagaaaagcttgatgtgaagcaaacagaactagaatcattatcttctgaactgtcagaagtattaaaagcccgtcacaaactagaagaggaactttctgttctgaaagatcaaacagataaaatgaagcaggaattagaggccaagatggatgaacagaaaaatcatcaccagcagcaagttgacagtatcattaaagaacacgaggtatctatccagaggactgagaaggcattaaaagatcaaattaatcaacttgagcttctcttgaaggaaagggacaagcatttgaaagagcatcaggctcatgtagaaaatttagaggcagatattaaaaggtctgaaggggaactccagcaggcatctgctaagctggacgtttttcagtcttaccagagtgccacacatgagcagacaaaagcatatgaggaacagttggcccaattgcagcagaagttgttggatttggaaacagaaagaattcttcttaccaaacaggttgctgaagttgaagcacaaaagaaagatgtttgtactgagttagatgctcacaaaatccaggtgcaggacttaatgcagcaacttgaaaaacaaaatagtgaaatggagcaaaaagtaaaatctttaacccaagtctatgagtccaaacttgaagatggtaacaaagaacaggaacagacaaagcaaatcttggtggaaaaggaaaatatgattttacaaatgagagaaggacagaagaaagaaattgagatactcacacagaaattgtcagccaaggaggacagtattcatattttgaatgaggaatatgaaaccaaatttaaaaaccaagaaaaaaagatggaaaaagttaagcagaaagcaaaggagatgcaagaaacgttaaagaaaaaattactggatcaggaagccaaacttaagaaagagcttgaaaatactgctctagagcttagtcagaaagaaaaacagtttaatgccaaaatgctggaaatggcacaggctaactcagctggaatcagtgatgcagtgtcaagactggaaacaaaccaaaaagaacaaatagaaagtcttactgaggttcatcgacgagaactcaatgatgtcatatcaatctgggaaaagaaacttaatcagcaagctgaagaacttcaggaaatacatgaaatccaattacaggaaaaagaacaagaggtagcagaactgaaacaaaagatcctcctatttgggtgtgaaaaagaagagatgaacaaggaaataacatggctgaaggaagaaggtgttaagcaggatacaacattaaatgaattacaggaacagttaaagcagaagtctgcccatgtgaattctcttgcacaagatgaaactaaactgaaagctcatcttgaaaagctagaggttgacttgaataagtctctgaaggaaaatacttttcttcaagagcagctagttgaactgaagatgctggcagaagaagataagcggaaggtttctgagttgactagcaagttgaaaaccacagatgaagaattccagagtttgaaatcttcacatgaaaaaagtaacaaaagcctagaggacaagagcttggaatttaaaaaactgtctgaggaactagcgattcagctagatatttgctgtaagaaaaccgaagccttattagaagctaaaacaaatgagctaatcaacattagtagtagtaaaactaatgccattctttctaggatttctcattgtcagcaccgtacaactaaagttaaggaggcactgttaattaaaacttgcacagtttctgaattagaagcacaacttagacagttgacagaggagcaaaatacactaaatatttcttttcaacaggctactcatcagttagaagaaaaagaaaatcaaattaagagcatgaaggctgatattgaaagtcttgtaacagaaaaagaagccttacagaaggaaggaggcaatcagcaacaggctgcttctgaaaaggagtcttgtataacacagttgaagaaagagttatctgaaaacatcaatgctgtcacattgatgaaagaagagcttaaagaaaaaaaagttgagattagcagtcttagtaaacaactaactgatttgaatgttcagcttcaaaatagcatcagcctatccgaaaaagaagcagccatttcatcactaagaaagcagtatgatgaagaaaaatgtgaattgctggatcaggtgcaagatttatcttttaaagttgacactctgagtaaagagaaaatttctgctcttgagcaggtagatgactggtccaataaattctcagaatggaagaagaaagcacagtcaagatttacacagcatcaaaacactgttaaagaattgcagatccagcttgagttaaaatcaaaggaagcttatgaaaaggatgagcagataaatttattgaaggaagagcttgatcagcaaaataaaagatttgattgtttaaagggtgaaatggaagacgacaagagcaagatggagaaaaaggagtctaatttagaaacagagttaaagtctcaaacagcaagaattatggaattagaggaccatattacccagaaaactattgaaatagagtccttaaatgaagttcttaaaaattacaatcaacaaaaggatattgaacacaaagaattggttcagaaacttcaacattttcaagagttaggagaagaaaaggacaacagggttaaagaagctgaagaaaaaatcttaacacttgaaaaccaagtttattccatgaaagctgaacttgaaactaagaagaaagaattagaacatgtgaatttaagtgtgaaaagcaaagaggaggagttaaaggcattggaagataggcttgagtcagaaagtgctgcaaaattagcagagttgaagagaaaagctgaacaaaaaattgctgccattaagaagcagttgttatctcaaatggaagagaaagaagaacagtataaaaaaggtacagaaagccatttgagtgagctaaatacaaaattgcaggaaagagaaagggaagttcacatcttggaagaaaaacttaagtcagtggaaagttcacagtcagaaacattaattgtacccagatcagcaaaaaatgtggcagcatatactgaacaagaagaagcagattcccaaggctgtgtgcagaagacatatgaagaaaaaatcagtgttttacaaagaaacttaactgaaaaagaaaagctattgcagagggtagggcaggaaaaagaagagacagtttcttctcattttgaaatgcgatgccaataccaggagcgcttaataaagctagaacatgctgaggcaaagcaacatgaagatcaaagtatgataggtcatcttcaagaggagcttgaagaaaaaaacaagaaatattccttgatagtagcccagcatgtggaaaaagaaggaggtaaaaataacatacaggcaaagcaaaacttggaaaatgtgtttgacgacgtccagaaaaccctccaggagaaggaactaacctgtcagattttggagcaaaagataaaagagctggattcctgcttagtaagacagaaagaagtacatagagttgaaatggaagagttgacctcaaaatatgaaaaattacaggctttacaacagatggatggaagaaataaacccacagaacttttggaagaaaacactgaagaaaagtccaaatcacatttggtccaacccaaattgcttagtaacatggaagcccagcacaatgatctggagtttaaattagccggggcagaacgggagaaacagaaactgggcaaggagattgttagattgcagaaagaccttcgaatgttgagaaaggagcatcagcaagaattggaaatactaaagaaagaatatgatcaagaaagggaagagaaaatcaaacaggagcaggaagatcttgaactgaagcacaattccacattaaaacagctgatgagggagtttaatacacagctggcacaaaaggaacaagagctggaaatgaccataaaagaaactatcaataaggcccaggaggtggaggctgaacttttagaaagccatcaagaagagacaaatcagttacttaaaaaaattgctgagaaagatgatgatctaaaacgaacagccaaaagatatgaagaaatccttgatgctcgtgaagaagaaatgactgcaaaagtaagggacctgcagactcaacttgaggagctgcagaagaaataccagcaaaagctagagcaggaggagaaccctggcaatgataatgtaacaattatggagctacagacacagctagcacagaagacgactttaatcagtgattcgaaattgaaagagcaagagttcagagaacagattcacaatttagaagaccgtttgaagaaatatgaaaagaatgtatatgcaacaactgtggggacaccttacaaaggtggcaatttgtaccatacggatgtctcactctttggagaacctaccgaatttgagtatttgcgaaaagtgctttttgagtatatgatgggtcgtgagactaagaccatggcaaaagttataaccaccgtactgaagttccctgatgatcagactcagaaaattttggaaagagaagatgctcggctgatgtcatggctccgatcttcatcttgaagaagagtgacattgggtgactgctgcttggaaaactgtccacacttgctactctttgagaatgaagttgtcattcagggcccctcatgtagccaaaagaccaagaaaaatctggcccacagataagttgcagactgcctttaaaatagattttatcagtggagaaatggtgatagttttttcttcagttttctcttgggaagagttttatgttgtttaaaagatattttgataacttaacctgctttatgggcttacataatattcctttcatccattctttttaaagaacggcttacctttcctatttatttttagggtgattttttaaaaagacttgtgcaatacattttgaggtgaaacttagtggattttttctgataaattagagcatttaattgactattttattcaggttgatctgttgaatatttgctaaagaccagttctttaagctaagacatgtaaaaaatcccaaatggcagtacctcattgtttacttagcttttgtacttatatttttcagaggaaaaaacactactgtaaattgtgaatagccaatacataactgtattgtatgcaaatctgtgattgttggcagtgtcatctctgagaaacagataaataaagtttatttactatataac

SEQ ID NO: 138446 - DNA, 1451 bp, Homo sapiens
  Payload ID: 7110
  Gene Symbol: GOLGA4
  Gene Name: golgin A4
  ENST ID: ENST00000444882
  CDS Start-End: 305-805
gccgcgcaagcgcccttggcgcacagttcacctgctgccgttgtcgtcgccgccgcggctcccggggctggatggggggccgaggccagccagtggcacccggaagaaagagacgcggcggcggcgacgccgacaccctcaggacgagtgtccggacttgcccacagcctcaaggaggagacggcgaggcccggcccccgctgtccctggtgtaaagaagtcgccgtagccgtcgcggccgggactccccgggctctcgcccttcaggtttcgttgacactcaggaccgtacgtacgctgcgccatgttcaagaaactgaagcaaaagatcagcgaggagcagcagcagctccagcaggcgctggctcctgctcaggcgtcctccaattcttcaacaccaacaagaatgaggagcaggacatcttcatttacagagcaacttgatgaaggtacacccaatagagagtcaggtgacacacagtcttttgcacagaagctccagctccgggtgccctccgtggagtctttgtttcgaagtccgataaaggaatctctattccggtcttcttctaaagagtctttggtacgaacatcttccagagaatccctgaatcgacttgacctggacagttctactgccagttttgatccaccctctgatatggatagcgaggctgaagacttggtagggaattcagacagtctcaacaaagaacagttgattcagcggttgcgaagaatggaacgaagcttaagtagctacaggggaaaatattctgagtcatggctccgatcttcatcttgaagaagagtgacattgggtgactgctgcttggaaaactgtccacacttgctactctttgagaatgaagttgtcattcagggcccctcatgtagccaaaagaccaagaaaaatctggcccacagataagttgcagactgcctttaaaatagattttatcagtggagaaatggtgatagttttttcttcagttttctcttgggaagagttttatgttgtttaaaagatattttgataacttaacctgctttatgggcttacataatattcctttcatccattctttttaaagaacggcttacctttcctatttatttttagggtgattttttaaaaagacttgtgcaatacattttgaggtgaaacttagtggattttttctgataaattagagcatttaattgactattttattcaggttgatctgttgaatatttgctaaagaccagttctttaagctaagacatgtaaaaaatcccaaatggcagtacctcattgtttacttagcttttgtacttatatttttcagaggaaaaaacactactgtaaattgtgaatagccaatacataactgtattgtatgcaaatctgtgattgttggcagtgtcatctctgagaaacagataaataaagtttatttactatataa

SEQ ID NO: 138447 - DNA, 1545 bp, Homo sapiens
  Payload ID: 7110
  Gene Symbol: GOLGA4
  Gene Name: golgin A4
  ENST ID: ENST00000617480
  CDS Start-End: 889-1545
cagttcacctgctgccgttgtcgtcgccgccgcggctcccggggctggatggggggccgaggccagccagtggcacccggaagaaagagacgcggcggcggcgacgccgacaccctcaggacgagtgtccggacttgcccacagcctcaaggaggagacggcgaggcccggcccccgctgtccctggtgtaaagaagtcgccgtagccgtcgcggccgggactccccgggctctcgcccttcaggtttcgttgacactcaggaccgtacgtacgctgcgccatgttcaagaaactgaagcaaaagatcagcgaggagcagcagcagctccagcaggcgctggctcctgctcaggcgtcctccaattcttcaacaccaacaagaatgaggagcaggacatcttcatttacagagcaacttgatgaaggtacacccaatagagagaatgcatctactcatgcctcgaaatctcctgacagtgttaatggaagtgaaccaagcattcctcagtcaggtgacacacagtcttttgcacagaagctccagctccgggtgccctccgtggagtctttgtttcgaagtccgataaaggaatctctattccggtcttcttctaaagagtctttggtacgaacatcttccagagaatccctgaatcgacttgacctggacagttctactgccagttttgatccaccctctgatatggatagcgaggctgaagacttggtagggaattcagacagtctcaacaaagaacagttgattcagcggttgcgaagaatggaacgaagcttaagtagctacaggggaaaatattctgagggtatattaagtcagagtcaggataaatcacttcggagaatagcagaattaagaggagctccaaatggaccagcaggcaaagaaacatctgcaagaggagtttgatgcatctttagaggagaaagatcagtatatcagtgttctccaaactcaggtttctctactgaaacaacgattacgaaatggcccgatgaatgttgatgtactgaaaccacttcctcagctggaaccacaggctgaagtcttcactaaagaagagaatccagaaagtgatggagagccagtagtggaagatggaacttctgtaaaaacactggaaacactccagcaaagagtgaagcgtcaagagaacctacttaagcgttgtaaggaaacaattcagtcacataaggaacaatgtacactattaactagtgaaaaagaagctctgcaagaacaactggatgaaagacttcaagaactagaaaagataaaggaccttcatatggccgagaagactaaacttatcactcagttgcgtgatgcaaagaacttaattgaacagcttgaacaagataagggaatggtaatcgcagagacaaaacgtcagatgcatgaaaccctggaaatgaaagaagaagaaattgctcaactccgtagtcgcatcaaacagatgactacccagggagaggaattacgggaacagaaagaaaagtccgaaagagctgatgctttagggtaa

SEQ ID NO: 138448 - DNA, 2969 bp, Homo sapiens
  Payload ID: 7111
  Gene Symbol: GOLGA5
  Gene Name: golgin A5
  Uniprot ID: Q8TBA6
  ENST ID: ENST00000163416
  CDS Start-End: 257-2452
agtcgcctgcaggtggctgttcgcgtctccctgccgtgcaggcagctcgaaagccactctgttgtggggtcctcgcttcccttccacgtctcccggaagcggtagcagggccccggcgggtcggggaggaggtttactcagcttgggccccctccgggccagccgccgagggggcgcggcccaggacggcggctaggccgtagtgcagcctctccggagtcctcaggtttgccaataggattatcctgctgccatcatgtcttggtttgttgatcttgctggaaaggcagaagatcttttaaaccgagttgatcaaggggctgcaacagctctcagtaggaaagacaatgccagcaacatatatagcaaaaatactgactatactgaacttcaccagcaaaatacagatttgatatatcagactggacctaaatctacgtatatttcatcagcagctgataacattcgaaatcaaaaagccaccatcttagctggcactgcaaatgtgaaagtaggatctcggacaccagtagaggcctctcatcctgttgaaaatgcatctgttcctaggccttcatcccattttgtgcgaagaaaaaagtcagaacctgatgatgagctgctgtttgattttcttaatagttcacagaaggagcctaccgggagggtggaaatcagaaaggaaaaaggcaagacacctgtctttcagagctctcagacatcaagtgtcagttctgtgaaccccagtgtaaccaccatcaaaaccattgaagaaaattcttttgggagccaaacccacgaagctgccagtaactcagattctagccatgaaggtcaagaggaatcttcaaaggaaaatgtgtcatcaaatgctgcctgccctgaccacaccccaacacctaatgatgatggcaaatcacatgaactgtctaaccttcgactggagaatcagctgctgaggaatgaagttcagtctttaaatcaagaaatggcctcgttactccaaagatccaaagagactcaagaagaattaaacaaagcaagagcaagagttgaaaagtggaatgctgaccattcaaagagtgatcgaatgactcgaggactccgagcccaagtagatgacctgactgaagctgtggctgcaaaggattcccagctggctgtactgaaagtgagactccaggaagctgaccagctactgagtactcgcacagaagcattagaagccttacagagtgaaaaatcacgaataatgcaggatcaaagtgaaggtaacagcctgcagaatcaagctctgcagacttttcaggagagactgcatgaagcggatgccactctgaagagagagcaggagagctataaacagatgcagagcgagtttgctgcacgccttaataaagtggaaatggaacgtcagaatttagcagaagcaattacactggccgaaagaaaatactcagatgagaagaagagggttgatgaactgcagcagcaagtcaagctgtataagttgaacttggagtcctctaagcaggaattaattgactacaagcaaaaagctactagaatactgcaatctaaggaaaaattgattaacagcttgaaagaaggctctggttttgaaggcctagatagcagcactgccagtagcatggagctggaagaacttcggcatgagaaagagatgcagagggaggaaatacagaagctgatgggccagatacatcagctcagatccgaattacaggatatggaggcacagcaagttaatgaagcagaatcagcaagagaacagttacaggatctgcatgaccaaatagctgggcagaaagcatccaaacaagaactagagacagaactggagcgactgaagcaggagttccactatatagaagaagatctttatcgaacaaagaacacattgcaaagcagaattaaagatcgagacgaagaaattcaaaaactcaggaatcagcttaccaataaaactttaagcaatagcagtcagtctgagttagaaaatcgactccatcagctaacagagactctcatccagaaacagaccatgctggagagtctcagcacagaaaagaactccctggtctttcaactggagcgcctcgaacagcagatgaactccgcctctggaagtagtagtaatgggtcttcgattaatatgtctggaattgacaatggtgaaggcactcgtctgcgaaatgttcctgttctttttaatgacacagaaactaatctggcaggaatgtacggaaaagttcgcaaagctgctagttcaattgatcagtttagtattcgcctgggaatttttctccgaagataccccatagcgcgagtttttgtaattatatatatggctttgcttcacctctgggtcatgattgttctgttgacttacacaccagaaatgcaccacgaccaaccatatggcaaatgaaccaagcccagttgttgcagtgattggttgtctttttctagacttgggatctgcaagaaggccaattgcctaaaatttctgagaacagtgcacaagattattttatcactacaagcttttaactttttaagttattgtacaagtattctacctaaatcttccaatttcctttaaatggtaagagtttctaaaacagacaataatttaacaagctcagctctgctttatctgagtttagtggtcctaatatatatgtagagaaagatggtggggttgttcacctctgtacagaccatctgtatgttaggtgacattgattatgggttataatcagggaaactaattgtatttagtgacaaaaataaaaagtttttttttataattcagtctgcttttggattttcatatatttaactttgcaaaaagatttactttgtacatgttacaggcttgattggtgtaaatctttttataaatacataaataaaagaaaaatatgcatttttcttttctaaaa

SEQ ID NO: 138449 - DNA, 759 bp, Homo sapiens
  Payload ID: 7111
  Gene Symbol: GOLGA5
  Gene Name: golgin A5
  ENST ID: ENST00000554700
  CDS Start-End: 1-353
ccaataaaactttaagcaatagcagtcagtctgagttagaaaatcgactccatcagctaacagagactctcatccagaaacagaccatgctggagagtctcagcacagaaaagaactccctggtctttcaactggagcgcctcgaacagcagatgaactccgcctctggaagtagtagtaatgggtcttcgattaatatgtctggaattgacaatggtgaaggcactcgtctgcgaaatgttcctgttctttttaatgacacagaaactaatctggcaggaatgtacggaaaagttcgcaaagctgctagttcaattgatcagtttaggctttgcttcacctctgggtcatgattgttctgttgacttacacaccagaaatgcaccacgaccaaccatatggcaaatgaaccaagcccagttgttgcagtgattggttgtctttttctagacttgggatctgcaagaaggccaattgcctaaaatttctgagaacagtgcacaagattattttatcactacaagcttttaactttttaagttattgtacaagtattctacctaaatcttccaatttcctttaaatggtaagagtttctaaaacagacaataatttaacaagctcagctctgctttatctgagtttagtggtcctaatatatatgtagagaaagatggtggggttgttcacctctgtacagaccatctgtatgttaggtgacattgattatgggttataatcagggaaactaattgtatt

SEQ ID NO: 138450 - DNA, 3176 bp, Homo sapiens
  Payload ID: 7112
  Gene Symbol: GOLGA6A
  Gene Name: golgin A6 family, member A
  Uniprot ID: Q9NYA3
  ENST ID: ENST00000290438
  CDS Start-End: 42-2123
agtcacacagcagccttgtaggtgactggaggtgttcgctgatgtggccccaaccctacctccctccccaccccatgatgttagaagaatctcgacagaataaattggcagcagccaagaaaaagctaaaagaatatcagcaaaggaagagccctggtattccagcaggagcaaagacaaaaaagaaaaaaactgacagtagccctgagacaaccacttccggtggttgccactcacctggggatagccagtaccaagaactagcagtagccctggagtcaagctcagtgacaatcagtcaactcaatgaaaacatagaatcattgaaacagcagaagaaacaagtggaacatcagctggaagaagcaaagaaaacaaacaatgaaatacacaaagcacaaatggagcggttagagacaatcaacatcctcacattggaaaaggcagacttgaagaccaccctttaccatactaaacgtgctgcccgacacttcgaagaagagtccaaggatctggctggccgcctgcaatactccttacagcgtattcaagaattggagcgggctctctgtgctgtgtctacacagcagcaggaagaggacaggtcctcgagctgcagagaagcggtcctccagcggtggttacagcagaccataaaggagcgggcgctgctgaacgcacacgtgacacaggtgacagagtcactaaaacaagtccagctagagcgagacgaatatgctaaacacataaaaggagagagggcccggtggcaggagaggatgtggaaaatgtcggtggaggctcgaacattgaaggaagagaagaagcgtgacatacatcggatacaggagctggagaggagcttgtccgaactcaaaaaccagatggctgagcccccatccctggcgcccccagcagtgacctctgtggtggaacagctacaagatgaggccaaacacctgaggcaggaggtggaaggtctggagggaaagctccagtcccaggtggaaaacaatcaggccttgagtctccttagcaaggaacaaaagcagagactccaggagcaggaggagatgctccgagagcaggaggcgcagagagtgcgggagcaggagagactgtgtgaacaaaacgagaggcttcgggagcagcagaagacgctacaggagcagggtgagaggctgcgaaagcaggagcagaggctacgcaaacaggaggagaggctgcgaaaggaggaggagaggctgcaaaagcaggaaaagaggctgtgggaccaggaggagaggctgtggaagaaggaggagaggctacaaaagcaggaggagaggctcgcgctctcccagaaccacaagctcgacaagcagctggccgagccacagtgcagcttcgaggatctgaacaacgagaaaaagagcgcactgcagttggagcagcaagtaaaggagctgcaggagaagctagacgaggagcacctagaagctgccagccaccagaaccaacagctagagacccagctaagcctcgtggctctccctggagaaggagatggaggacaacatctggacagtgaggaggaggaggcgcctcggcccacgccaaacatcccagaggacctggagagccgggaggccacgagcagctttatggacctcccgaaggagaaggcggacgggacggagcaggtggagagacgagagcttggattcgtccagccttctggagtgacagacggcatgagagagtccttcaccgtatatgaaagccagggggcagtgccaaacacgcggcaccaggagatggaggatgtcatcaggctggcccagaaggaggaggagatgaaggtgaagctgctggagctgcaagagttggtgttgccccttgtgggcaaccatgaggggcatggcaaattcctcatcgctgcccagaaccctgctgatgagcccactccaggggccccagccccccaggaacttggggctgccggtgagcaggatgttttttatgaagtgagcctggacaacaacgtggagcctgcaccaggagcggccagggagggttctccccatgacaaccccactgtacagcagatcgtgcagctgtctcctgtcatgcaggacacctaggagcacccaggcttgcccagcaaaccctgcgtgccattcttctaccaggcagccgagaacagggagataaacatcatcatcttctaagagctggtcaagaaatttaaaacaacaacaacaacaaaaagttacggggttcatctcctacacaattcatttactccatttgaatgctagagccactcacatttatttgtgtttctaatttaccgtttaaatttatttgtaaaaagttaagggagagttggtctttccctgatgttctttctggcatcctttagcatttttatttttaatttgataattgtaggtcattagtatgcatatcgagtttgcccttaggtggtgggaattcaaacacacaaagacccactaatttgcacaaaactattctggctggtttggaacaggctgccatgcttttttaatgttattgcagcatgtatattcattccagaattcagataaaatgtgcttatgttctgctattacgtttgatcgaatcctaaccacagtgagctcttcattagctcaatatgtggtttgccctcaattgagcactgtttattactttgtaatatgccactgtgagtactgacatttagagttgtttaaaggccaagaactggaaacagccttttccctattttctgtgtattggggatgggagtaataacattttggggagctttttaaatctcacagaagaggaaagtggcctgctctggcaggtgtgtgcaggatagagtgtgtttcatttgttctggtgccaagaatgagcgctgtactatggtagttcccttaggatttgtatgtgctctgggctcatgaagatattgcatcatgagctgcagcagttgtaccctttcttgatgacctaaaaagggattatttctgaggaatgaaaggctcccatcattgactgtggatgtggaaaaccttttctagcttagagcatttatatctacaatacattttaaagtcagagttcatgttacctgttttaatcacgagtatatgtcccagtacacaaaagggcactggttggcattc

SEQ ID NO: 138451 - DNA, 2134 bp, Homo sapiens
  Payload ID: 7113
  Gene Symbol: GOLGA6B
  Gene Name: golgin A6 family, member B
  Uniprot ID: A6NDN3
  ENST ID: ENST00000421285
  CDS Start-End: 1-2082
atgtggccccaaccctacctccctccccaccccatgatgttagaagaatctcgacagaataaattggcagcagccaagaaaaagctaaaagaatatcagcaaaggaagagccctggtattccagcaggagcaaagacaaaaaagaaaaaaactgacagtagccctgagacaaccacttccggtggtggccactcacctggggatagccagtaccaagaactagcagtagccctggagtcaagctcagtgacaatcagtcaactcaatgaaaacatagaatcattgaaacagcagaagaaacaagtggaacatcagctggaagaagcaaagaaaacaaacaatgaaatacacaaagcacaaatggagcggttagagacaatcaacatcctcacattggaaaaggcagacttgaagaccaccctttaccatactaaacgtgctgcccgacacttcgaagaagagtccaaggatctggctggccgcctgcaatactccttacagcgtattcaagaattggagcgggctctctgtgctgtgtctacacagcagcaggaagaggacaggtcctcgagctgcagagaagcggtcctccaccggcggttacagcagaccataaaggagcgggcgctgctgaacgcacacgtgacacaggtgacagagtcactaaaacaagtccagctagagcgagacgaatatgctaaacacataaaaggagagagggcccggtggcaggagaggatgtggaaaatgtcggtggaggctcgaacattgaaggaagagaagaagcgtgacatacatcggatacaggagctggagaggagcttgtccgaactcaaaaaccagatggctaagcccccatccctggcgcccccagcagtgacctctgtggtggaacagctacaagatgaggccaaacacctgaggcaggaggtggaaggtctggagggaaagctccaatcccaggtggaaaacaatcaggccttgagtctccttagcaaggaacaaaagcagagactccaggagcaggaggagatgctccgagagcaggaggtgcagagagtgcgggagcaggagagactgtgtgaacaaaacgagaggcttcgggagcagcagaagacgctacaggagcagggtgagaggctgcgaaagcaggagcagaggctacgcaaacaggaggagaggctgcgaaaggaggaggagaggctgcaaaagcaggaaaagaggctgtgggaccaggaggagaggctgtggaagaaggaggagaggctacaaaagcaggaggagaggctcgcgctctcccagaaccacaagctcgacaagcagctggccgagccacagtgcagcttcgaggatctgaacaacgagaaaaagagcgcactgcagttggagcagcaagtaaaggagctgcaggagaagctagacgaggagcacctagaagctgccagccagcagaaccaacagctagagacccagctaagcctcgtggctctcccgggagaaggagatggaggacaacatctggacagtgaggaggaggaggcgcctcggcccacgccaaacatcccagaggacctggagagccgggaggccacgagcagctttatggacctcccgaaggagaaggcggacgggacggagcaggtggagagacgagagcttggattcgtccagccttctggagtgacagacggcatgagagagtccttcaccgtatatgaaagccagggggcagtgccaaacacgcggcaccaggagatggaggatgtcatcaggctggcccagaaggaggaggagatgaaggtgaagctgctggagctgcaagagttggtgttgccccttgtgggcaaccatgaggggcatggcaaattcctcatcgctgcccagaaccctgctgatgagcccactccaggggccccagccccccaggaacttggggctgccggtgagcaggatgatttttatgaagtgagcctggacaacaacgtggagcctgcaccaggagcggccagggagggttctccccatgacaaccccactgtacagcagatcgtgcagctgtctcctgtcatgcaggacacctaggagcacccaggcttgcccagcaaaccctgcgtgccattcttctaccaggcag

SEQ ID NO: 138452 - DNA, 2082 bp, Homo sapiens
  Payload ID: 7114
  Gene Symbol: GOLGA6C
  Gene Name: golgin A6 family, member C
  Uniprot ID: A6NDK9
  ENST ID: ENST00000300576
  CDS Start-End: 1-2082
atgtggccccaaccctacctccctccccaccccatgatgttagaagaatctcgacagaataaattggcagcagccaagaaaaagctaaaagaatatcagcaaaggaagagccctggtattccagcaggagcaaagacaaaaaagaaaaaaactgacagtagccctgagacaaccacttccggtggtggccactcacctggggatagccagtaccaagaactagcagtagccctggagtcaagctcagtgacaatcaatcagctcaatgaaaacatagaatcattgaaacagcagaagaaacaagtggaacatcagctggaagaagcaaagaaaacaaacaatgaaatacacaaagcacaaatggagcagttagagacaatcaacatcctcacattggaaaaggcagacttgaagaccaccctttaccatactaaacgtgctgcccgacacttcgaagaagagtccaaggatctggctggccgcctgcaatactccttacagcgtattcaagaattggagcgggctctctctgctgtgtctacacagcagcaggaagaggacaggtcctcgagctgcagagaagcggtcctccagcggcggttacagcagaccataaaggagcgggcgctgctgaacgcacacgtgacacaggtgacagagtcactaaaacaagtccagctagagcgggacgaatatgctaaacacataaaaggagagagggcccggtggcaggagaggatgtggaaaatgtcggtggaggctcgaacattgaaggaagagaagaagcgtgacatacatcggatacaggagctggagaggagcttgtccgaactcaaaaaccagatggctgagcccccatccctggcacccccagcagtgacctctgtggtggaacagctacaagatgaggccaaacacctgaggcaggaggtggaaggtctggagggaaagctccagtcccaggtggaaaacaatcaggccttgagtctccttagcaaggaacaaaagcagagactccaggagcaggaggagatgctccgagagcaggaggcgcagagagtgcgggagcaggagagactgtgtgaacaaaacgagaggcttcgggagcagcagaagacgctacaggagcagggtgagaggctgcgaaagcaggagcagaggctacgcaaacaggaggagaggctgcgaaaggaggaggagaggctgcaaaagcaggaaaagaggctgtgggaccaggaggagaggctgtggaagaaggaggagaggctacaaaagcaggaggagaggctcgcgctctcccagaaccacaagctcgacaagcagctggccgagccacagtgcagcttcgaggatctgaacaacgagaaaaagagcgcactgcagttggagcagcaagtaaaggagctgcaggagaagctagacgaggagcacctagaagctgccagccagcggaaccaacagctagagacccagctaagcctcgtggctctccctggagaaggagatggaggacaacatctggacagtgaggaggaggaggcgcctcggcccacgccaaacatcccagaggacctggagagccgggaggccacgagcagctttatggacctcccgaaggagaaggcggacgggacggagcaggtggagagacgagagcttggattcgtccagccttctggagtgacagacggcatgagagagtccttcaccgtatatgaaagccagggggcagtgccaaacacgcggcaccaggagatggaggatgtcatcaggctggcccagaaggaggaggagatgaaggtgaagctgctggagctgcaagagttggtgttgccccttgtgggcaaccatgaggggcatggcaaattcctcatcgctgcccagaaccctgctgatgagcccactccaggggccccagccccccaggaacttggggctgccggtgagcaggatgatttttatgaagtgagcctggacaacaacgtggagcctgcaccaggagcggccagggagggttctccccatgacaaccccccggtacagcagatcgtgcagctgtctcctgtcatgcaggacacctag

SEQ ID NO: 138453 - DNA, 2123 bp, Homo sapiens
  Payload ID: 7115
  Gene Symbol: GOLGA6D
  Gene Name: golgin A6 family, member D
  Uniprot ID: P0CG33
  ENST ID: ENST00000434739
  CDS Start-End: 42-2123
agtcacacagcagccttgtaggtgactggaggtgttcgctgatgtggccccaaccctacctccctccccaccccatgatgttagaagaatctcgacagaataaattggcagcagccaagaaaaagctaaaagaatatcagcaaaggaagagccctggtattccagcaggagcaaagacaaaaaagaaaaaaactgacagtagccctgagacaaccacttccggtggtggccactcacctggggatagccagtaccaagaactagcagtagccctggagtcaagctcagtgacaatcaatcagctcaatgaaaacatagaatcattgaaacagcagaagaaacaagtggaacatcagctggaagaagcaaagaaaacaaacaatgaaatacacaaagcacaaatggagcagttagagacaatcaacatcctcacattggaaaaggcagacttgaagaccaccctttaccatactaaacgtgctgcccgacacttcgaagaagagtccaaggatctggctggccgcctgcaatactccttacagcatattcaagaattggagcgggctctctgtgctgtgtctacacagcagcaggaagaggacaggtcctcgagctgcagagaagcggtcctccagcggcggttacagcagaccataaaggagcgggcgctgctgaacgcacacgtgacacaggtgacagagtcactaaaacaagtccagctagagcgagacgaatatgctaaacacataaaaggagagagggcccggtggcaggagaggatgtggaaaatgtcggtggaggctcgaacattgaaggaagagaagaagcgtgacatacatcggatacaggagctggagaggagcttgtccgaactcaaaaaccagatggctgagcccccatccctggcacccccagcagtgacctctgtggtggaacagctacaagatgaggccaaacacctgaggcaggaggtggaaggtctggagggaaagctccagtcccaggtggaaaacaatcaggccttgagtctccttagcaaggaacaaaagcagagactccaggagcaggaggagatgctccgagagcaggaggcgcagagagtgcgggagcaggagagactgtgtgaacaaaacgagaggcttcgggagcagcagaagacgctacaggagcagggtgagaggctgcgaaagcaggagcagaggctacgcaaacaggaggagaggctgcgaaaggaggaggagaggctgcaaaagcaggaaaagaggctgtgggaccaggaggagaggctgtggaagaaggaggagaggctacaaaagcaggaggagaggctcgcgctctcccagaaccacaagctcgacaagcagctggccgagccacagtgcagcttcgaggatctgaacaacgagaaaaagagcgcactgcagttggagcagcaagtaaaggagctgcaggagaagctagacgaggagcacctagaagctgccagccagcggaaccaacagctagagacccagctaagcctcgtggctctccctggagaaggagatggaggacaacatctggacagtgaggaggaggaggcgcctcggcccacgccaaacatcccagaggacctggagagccgggaggccacgagcagctttatggacctcccgaaggagaaggcggacgggacggagcaggtggagagacgagagcttggattcgtccagccttctggagtgacagacggcatgagagagtccttcaccgtatatgaaagccagggggcagtgccaaacacgcggcaccaggagatggaggatgtcatcaggctggcccagaaggaggaggagatgaaggtgaagctgctggagctgcaagagttggtgttgccccttgtgggcaaccatgaggggcatggcaaattcctcatcgctgcccagaaccctgctgatgagcccactccaggggccccagccccccaggaacttggggctgccggtgagcaggatgttttttatgaagtgagcctggacaacaacgtggagcctgcaccaggagtggccagggagggttctccccataacaaccccactgtacagcagatcgtgcagctgtctcctgtcatgcaggacacctag

SEQ ID NO: 138454 - DNA, 3178 bp, Homo sapiens
  Payload ID: 7115
  Gene Symbol: GOLGA6D
  Gene Name: golgin A6 family, member D
  ENST ID: ENST00000618219
  CDS Start-End: 42-2123
agtcacacagcagccttgtaggtgactggaggtgttcgctgatgtggccccaaccctacctccctccccaccccatgatgttagaagaatctcgacagaataaattggcagcagccaagaaaaagctaaaagaatatcagcaaaggaagagccctggtattccagcaggagcaaagacaaaaaagaaaaaaactgacagtagccctgagacaaccacttccggtggtggccactcacctggggatagccagtaccaagaactagcagtagccctggagtcaagctcagtgacaatcaatcagctcaatgaaaacatagaatcattgaaacagcagaagaaacaagtggaacatcagctggaagaagcaaagaaaacaaacaatgaaatacacaaagcacaaatggagcagttagagacaatcaacatcctcacattggaaaaggcagacttgaagaccaccctttaccatactaaacgtgctgcccgacacttcgaagaagagtccaaggatctggctggccgcctgcaatactccttacagcgtattcaagaattggagcgggctctctctgctgtgtctacacagcagcaggaagaggacaggtcctcgagctgcagagaagcggtcctccagcggcggttacagcagaccataaaggagcgggcgctgctgaacgcacacgtgacacaggtgacagagtcactaaaacaagtccagctagagcgagacgaatatgctaaacacataaaaggagagagggcccggtggcaggagaggatgtggaaaatgtcggtggaggctcgaacattgaaggaagagaagaagcgtgacatacatcggatacaggagctggagaggagcttgtccgaactcaaaaaccagatggctgagcccccatccctggcacccccagcagtgacctctgtggtggaacagctacaagatgaggccaaacacctgaggcaggaggtggaaggtctggagggaaagctccagtcccaggtggaaaacaatcaggccttgagtctccttagcaaggaacaaaagcagagactccaggagcaggaggagatgctccgagagcaggaggcgcagagagtgcgggagcaggagagactgtgtgaacaaaacgagaggcttcgggagcagcagaagacgctacaggagcagggtgagaggctgcgaaagcaggagcagaggctacgcaaacaggaggagaggctgcgaaaggaggaggagaggctgcaaaagcaggaaaagaggctgtgggaccaggaggagaggctgtggaagaaggaggagaggctacaaaagcaggaggagaggctcgcgctctcccagaaccacaagctcgacaagcagctggccgagccacagtgcagcttcgaggatctgaacaacgagaaaaagagcgcactgcagttggagcagcaagtaaaggagctgcaggagaagctagacgaggagcacctagaagctgccagccagcggaaccaacagctagagacccagctaagcctcgtggctctccctggagaaggagatggaggacaacatctggacagtgaggaggaggaggcgcctcggcccacgccaaacatcccagaggacctggagagccgggaggccacgagcagctttatggacctcccgaaggagaaggcggacgggacggagcaggtggagagacgagagcttggattcgtccagccttctggagtgacagacggcatgagagagtccttcaccgtatatgaaagccagggggcagtgccaaacacgcggcaccaggagatggaggatgtcatcaggctggcccagaaggaggaggagatgaaggtgaagctgctggagctgcaagagttggtgttgccccttgtgggcaaccatgaggggcatggcaaattcctcatcgctgcccagaaccctgctgatgagcccactccaggggccccagccccccaggaacttggggctgccggtgagcaggatgttttttatgaagtgagcctggacaacaacgtggagcctgcaccaggagtggccagggagggttctccccataacaaccccactgtacagcagatcgtgcagctgtctcctgtcatgcaggacacctaggagcacccaggcttgcccagcaaaccctgcgtgccattcttctaccaggcagccgagaacagggagataaacatcatcatcttctaagagctggtcaagaaatttaaaacaacaacaacaacaaaaagttacggggttcatctcctacacaattcatttactccatttgaatgctagagccactcacttttatttgtgtttctaatttaccgtttaaatttatttgtaaaaagttaagggagagttggtctttccctgatgttctttctggcatcctttagcatttttatttttaatttgataattgtaggtcattagtatgcatatcgagtttgcccttaggtggtgggaattcaaacacacaaagacccactaatttgcacaaaactattctggctggtttggaacaggctgccatgcttttttaatgttattgcagcatgtatattcattccagaattcagataaaatgtgcttatgttctgctattacgtttgatcgaatcctaaccacagtgagctcttcattagctcaatatgtggtttgccctcaattgagcactgtttattactttgtaatatgccactgtgagtactgacatttagagttgtttaaaggccaagaactggaaacagccttttccctattttctgtgtattggggatgggagtaataacattttggggagctttttaaatctcacagaagaggaaagtggcctgctctggcaggtgtgtgcaggatagagtgtgtttcatttgttctggtgccaagaatgagcgctgcactatggtagttcccttaggatttgtatgtgctctgggctcatgaagatattgcatcatgagctgcagcagttgtaccctttcttgatgacctaaaaagggattatttctgaggaatgaaaggctcccatcattgactgtggatgtggaaaaccttttctagcttagagcatttatatctacaatacattttaaagtcagagttcatgttacctgttttaatcacatgagtatatgtcccagtacacaaaagggcactggttggcattc

SEQ ID NO: 138455 - DNA, 2620 bp, Homo sapiens
  Payload ID: 7116
  Gene Symbol: GOLGA6L1
  Gene Name: golgin A6 family-like 1
  ENST ID: ENST00000614055
  CDS Start-End: 92-2098
attctagtgcagccctggttacgcctcctctggctcagtcacacagcgacgtagaggtgactggaggtatatacttgtcctcacctggatcatgctgatgtggccccaaccccacctccctacccatccccacctccctacccatccccacctccctacccatccccacctccctacccatccccacctccctacccatccccacctccctacccatccccacctccctacccatcctatgatgtccaaagaaaccagacagagcaaattggccgaggccaaggaacagttgacagaccatcatccccagaccaaccctagtgttggtacagcagcaagcgacaccaaaaagaagaaaataaataatggcactaaccctgagacaaccacttctggtggttgccactcgcctgaggatgaacagaaggcaagccaccaacatcaggaagccctaaggagggagctagaggcccaggttcataccatacgaatccttacatgtcagaaaactgagcttcagatggcactctactacagccagcatgctgtcaagcagttggaaggagaggccagggatctgatcagccgcctgcatgattcatggaagtttgcaggagagttagagcaggctctctctgctgtcgctacacagaagaagaaggcggataggtacattgaggagttaacaaaggagagggacgccctgagtctggaactgtacaggaacaccataactgatgaggagctgaaggagaaaaatgccaaactacaagaaaaacttcaacttgtagaatctgaaaagtctgagatccagctcaacgtaaaggagctaaaaaggaaactggagagggccaagctcctgctgccacagcagcagctgcaggcggaggctgaccacctgggtaaggagctgcagagtgtgtcagcaaagctccaagcccaggtggaagagaacgagttgtggaaccgcctgaaccagcaacaggaggagaagatgtggaggcaggaggagaagatacaggagtgggaggagaagatacaggagcaggaggagaagatacgggagcaggaggagaagatacgggagcaggaggagaagatgcggaggcaggaggagatgatgtgggagaaggaggagaagatgcggaggcaggaggagatgatgtgggagaaggaggagaagatgcggaggctggaggagatgatgtgggagaaggaggagaagatacgggagctggaagagaagatgcacgagcaggagaagatacgggagcaggaagagaagaggcaggaggaggagaagatacgcgagcaggagaagaggcaggagcaggaggcgaagatgtggaggcaggaggagaagatacgggagcaggaagagaagatacgggagcaggagaaaaagatgtggaggcaggaggagaagattcacgagcaggagaagatacgggaggaggagaagaggcaggagcaggaggagatgtggaggcaggaggagaagataagggagcaggaggagatatggaggcaaaaggagaagatgcacgagcaggagaagatacggaagcaggaggagaaggtgtggaggcaggaggagaagatgcacgaccaggaggagaagatacgggagcaggaggagaagatgtggaggcaggaggagaagataagggagcaggaggagaagatacgggagcaggaggagaagatacgagagcaggaggagatgatgcaggaacaggaagagaagatgggggagcaggaagagaagatgcaagaacaggagaagatgcggaggcaggaggagaagataagggagcaggaggagaagatacgggagcagaaggagaagatacgagagcaggaggagaagatatgggagcaggaggagaagatacgagagcaggaggagatgatgcaggaacaggaagagaagatgtgggagcaggaggagaagatgtgtgagcaggaagagaagatgcaagaacaggaggagaagatgcggaggcaggaggagaagatgtgggagcaggaagtgaggctgcggcagcaggaggagaagatgcaggaacaccaggagcacctggaagctgccatctaatgagcacatgacaagaaggcaaagacaataaacatgtaaaagccggcagcaaggcctggagaagagtaagccgccatgtgactgtttagaatatagtctgagcacaaacctgaaaaaaaaattttatttattttaaattgtggcaaaatactggccaggcatggtagctcacgcctgtaatcctagcaatttgggaggccgaggtaaatggatgacctgaggtcaagagttcaagaccagcctggccaatacaaaaattagccgggcatggtggcgcatgcctgtaatcccagctacttgggaggctgaggcaggagaatcgcttgaacctgggaggcagaggttgcagtgagctgagatcgtgccactgcactcaagcctgggtgacagagcgaaactccgtctcaaaaaaaaaagtttcttccttacatgtatgtttctattagttttcttcttggtctttctcatttagtcttgtgttgtcttttgacattcatagtaaacttttatctgcctccagag

SEQ ID NO: 138456 - DNA, 2620 bp, Homo sapiens; identical to SEQ ID NO: 138455
  Payload ID: 7116
  Gene Symbol: GOLGA6L1
  Gene Name: golgin A6 family-like 1
  ENST ID: ENST00000611085
  CDS Start-End: 92-2098

SEQ ID NO: 138457 - DNA, 2620 bp, Homo sapiens; identical to SEQ ID NO: 138455
  Payload ID: 7116
  Gene Symbol: GOLGA6L1
  Gene Name: golgin A6 family-like 1
  ENST ID: ENST00000616813
  CDS Start-End: 92-2098

SEQ ID NO: 138458 - DNA, 4266 bp, Homo sapiens
  Payload ID: 7117
  Gene Symbol: GOLGA6L10
  Gene Name: golgin A6 family-like 10
  ENST ID: ENST00000611944
  CDS Start-End: 63-1487
agttgcacagctgcctggtaggtgactggaggcattgagcagtgctcactggtatttcgctgatgtggccccaaccccgcctccctccccaccccgcgatgtcagaaaaaacacaacaggggaaattggccgcagccaagaaaaagttaaaagcatattggcagaggaagagccctggcattccagcaggagctaacaggaaaaagaaagtcaatggcagtagccctgacacagccacttctggtggttaccactcacctggggattcagcaacaggtgtctacggggagggccgtgcatcctctactaccctgcaggatctggagagccagtaccaagaactagcagtggccctggattcaagctccgcaataatcagtcaactcactgaaaacatcaattcactggttcgcacatctaaggaggagaagaagcatgagatacatctggtacagaagcttgggaggagcttgttcaaactcaaaaaccagacggctgaacccctggccccagagcccccagcagggccatctaaggtagagcagctacaagatgagaccaaccacctaaggaaggagctagagagtgtgggaagacagctccaggctgaggtggaaaacaatcagatgttgagtctcctgaacaggagacaggaggagaggctacgtgaacaggaggagaggctacatgaacaggaggagaggctacatgaacaggaggagaggctgctacgtgaacaggaggagaggctgtgtgaacaggaggagaggctacgtgaacaggaggagaggctgtgtgaacaggaggagaggctatgtgaacaggaggagaggctgtgtgaacaggaggagaggctatgtgaacaggaggagaggctgtgtgaacaggagaagctgccagggcaggagaggctgctggaagaggtggagaagctgttagaacaggagaggcggcaggaggagcaggagaggctgctggagagggagaggctgctggacgaggtggaggagctcctggagcaggagaggcttcggcaacaggatgagaggctgtggcagcaggagactctgcgggagctggagaggctgcgggagctggagaggctgcgggagctggagaggatgctggagctggggtgggaagccctgtacgagcagcgggccgagccacgcagcggcttcgaggagctgaacaacgagaacaagagcacactgcagttggagcagcaagtaaaggagctggagaagtcgggtggagctgaagagccaagaggctccgagtctgcagcagcagccagaccagtacctggagccccagtcccacaaggagcttggatgtgcggacaagcagggtggactccccaggagcacccaggcttgagtggagaagctgttggtacaggagaggcggcaggaggagcagaagaggctgcatgccattcttttcgggctgcggagaacagggagctaaacatcaccatcatctaagagcgggtcaagaaattgaaaaaaaaaaaaaacaaaacatttaaggggttaatatcctacacaattcatttacttcatttgaatgttagagccacttatgtttatttgtgtttctaatttatagtttaaatttatttgtgtttctaatttataatttaaatttatttgtgtttctaatttatagtttaaatttatttgtgtttctaatttataatttaaatttatttgtaaaaagttaaatgagagtgggtctttctctcatgttcactctggcatcttttagcatttttttaatttgataattataggacgttagcatgcatatcgagtttgcccttatgtggtgggagttcaaacacacaaagacccactgtatgcacacaactgttcttgctggtttgggataggctgccatgcttttttaatgttagtacagcctgtatattcattacggaattcagataaaatttccttatgttctgctgttatgtttgatcgaatcctaatcacagtgagctcttcattagctcaatatgtggtttgccctcaagtgcgcggtctattactttgtaatatgccactgtgagtactgacatttacagttgtttaaaggtggagcactggaaacagcctttccccctttttctgtgtattggggatgggagtaataacattttggggaggtttttaaatctcccagaagaggaaagtggcctgctttggcaggtgtgtgcaggatagaatatgtttcatttgttctggtgccaagaatgagcgctgtactacggtagttcccttaggatttgtatgtgctctgggctcatgaagatactgcctcatgagctgtggcagttgtactcttttttgatgacctgaaaagggattatttctgaggaatgaaaggctcccatcatgactgtggatgtggaaaaccttttctagctgagagcatttatatctacaatacattttaaagtcagagttcatgttccctgttttaatcacatgactacatgtcccagtacacaaaagggcactggttggcgttctccttaatgtatttagtaaagatcagaagaaatcctttaagagtttaaatgcccctggaacaggcatatacaggctctagtcaagaatgaattcgagtgaaggaaagctgtgtgacacctggcattcctctgtgttcatggagcttatttgaggctagaagatggattttaccatctagacctctctggctaatagctagtcttcaaccatctgacataggaatttacttcttttccttgaatggagaacactttaaaaataataacaaacattattataaactaatatatgtgagagtacttagttgaaacaaaaaggagttttagtagacagtattatactacatttgaaaatcaaggagcagtttatgcaacgtaaaatgtttacaaactgcagcgcaatctactgtttgtgactgtcaaagtgtcatgaggaaagtgtctatacaatcacagagttatatttcctcacaaagttctttacgaagagtgaaatatgtttttatacctctcagtttcagttagaggcatattttgtgtaatatttatggcttaaaatggactaaaggtcctgttcttgccttgtctgaacttgccgcttttgcattctttgagttcagtttaaagacacttactttaactccattttaaaccctcgggctagaaatcgtaccactgttaattagccacgttatttggtctaacagtttttgtttatcattctgaaactgagcttatctaatacattgataaattatttcaaaggtatttttatagttcaaatcgcttcacttttaccctgacacgtataaatgactaggaatgaccttcagatagcgtttagcaactgtaaccaatctgacaataatgtgttcatcaggtacctgtggattaaatcacatactggcatatttaagctgaatgtcagtctgaaaaataaatgtactatattaactcaaataccactctctgtgtaggtattttgtcatatgtttaagaaaaagctaaagagaatggaaatcctatgacaataactcaagtctttcttcaaagtgcatgcagtctcttgcagtacctcattcagccaagtatttgttctcttcctcattcagtataaggcagctttcaatttgcttagaaggcaatattagaaggttagagttcagcagaaagagagaattttaaaatgtgagttcgactgaataaatttgaatttctgtaggaagtaaagaatcaaaatacctatttaaagactgcaatatatgataattatttttaaagtaatagattaaacctgataggttttcctgaaatgaaaaacaatcagttctaaaaccaaagctgatttttagaaaatgtgaaaatgtaaatcaaccctatccaaaatagattctctaaaactttatcttacagtcactttcaaataactattcaaaaatgtaactgttaaattaatgtcttaaaataatttaaaacattttaaaatacgaatactgtagcttaaaacaaagaatctaggggaaggaaaagtagagaaagaaatgccaattccagtccaaagctgtatttgccaagttttcttagaacgacttttaccgatttatgaattcttatacacagaatgcatgatggaaatactgatttttgtctaaagtggcattattgactgcttctgtgatgctactgtaatgtaataaattattagattgtttcaaggtgctgttttgcct

SEQ ID NO: 138459 - DNA, 1705 bp, Homo sapiens
  Payload ID: 7117
  Gene Symbol: GOLGA6L10
  Gene Name: golgin A6 family-like 10
  Uniprot ID: A6NI86
  ENST ID: ENST00000610657
  CDS Start-End: 101-1669
gcgttccattggtgccctggttacgccacctgtggctcagttgcacagctgcctggtaggtgactggaggcattgagcagtgctcactggtatttcgctgatgtggccccaaccccgcctccctccccaccccgcgatgtcagaaaaaacacaacaggggaaattggccgcagccaagaaaaagttaaaagcatattggcagaggaagagccctggcattccagcaggagctaacaggaaaaagaaagtcaatggcagtagccctgacacagccacttctggtggttaccactcacctggggattcagcaacaggtatctacggggagggccgtgcatcctctactaccctgcaggatctggagagccagtaccaagaactagcagtggccctggattcaagctccgcaataatcagtcaactcactgaaaacatcaattcactggttcgcacatctaaggaggagaagaagcatgagatacatctggtacagaagcttgggaggagcttgttcaaactcaaaaaccagacggctgaacccctggccccagagcccccagcagggccatctaaggtggagcagctacaagatgagaccaaccacctaaggaaggagctagagagtgtgggaagacagctccaggctgaggtggaaaacaatcagatgttgagtctcctgaacaggagacaggaggagaggctacgtgaacaggaggagaggctacatgaacaggaggagaggctacatgaacaggaggagaggctgtgtgaacaggaggagaggctacgtgaacaggaggagaggctgtgtgaacaggaggagaggctacgtgaacaggaggagaggctgtgtgaacaggaggagaggctacgtgaacaggaggagaggctgtgtgaacaggaggagaggctacgtgaacaggaggagaggctacgtgaacaggaggagaggctatgtgaacaggaggagaggctgtgtgaacaggaggagaggctacgtgaacaggaggagaggctatgtgaacaggaggagaggctatgtgaacaggaggagaggctgtgtgaacaggagaagctgccagggcaggagaggctgctggaagaggtggagaagctgttagaacaggagaggcggcaggaggagcaggagaggctgctggagagggagaggctgctggacgaggtggaggagctcctggagcaggagaggcttcggcaacaggatgagaggctgtggcagcaggagactctgcgggagctggagaggctgcgggagctggagaggctgcgggagctggagaggatgctggagctggggtgggaagccctgtacgagcagcgggccgagccacgcagcggcttcgaggagctgaacaacgagaacaagagcacactgcagttggagcagcaagtaaaggagctggagaagtcgggtggagctgaagagccaagaggctccgagtctgcagcagcagccagaccagtacctggagccccagtcccacaaggagcttggatgtgcggacaagcagggtggactccccaggagcacccaggcttgagtggagaagctgttggtacaggagaggcggcaggaggagcagaagaggctgcatgccattcttttcgggctgcggagaacagggagctaaacatcaccatcatctaagagcgggtcaagaaattgaaaaaaaaaaaaacaaaa

SEQ ID NO: 138460 - DNA, 1425 bp, Homo sapiens
  Payload ID: 7117
  Gene Symbol: GOLGA6L10
  Gene Name: golgin A6 family-like 10
  ENST ID: ENST00000618409
  CDS Start-End: 1-1425
atgtggccccaaccccgcctccctccccaccccgcgatgtcagaaaaaacacaacaggggaaattggccgcagccaagaaaaagttaaaagcatattggcagaggaagagccctggcattccagcaggagctaacaggaaaaagaaagtcaatggcagtagccctgacacagccacttctggtggttaccactcacctggggattcagcaacaggtatctacggggagggccgtgcatcctctactaccctgcaggatctggagagccagtaccaagaactagcagtggccctggattcaagctccgcaataatcagtcaactcactgaaaacatcaattcactggttcgcacatctaaggaggagaagaagcatgagatacatctggtacagaagcttgggaggagcttgttcaaactcaaaaaccagacggctgaacccctggccccagagcccccagcagggccatctaaggtggagcagctacaagatgagaccaaccacctaaggaaggagctagagagtgtgggaagacagctccaggctgaggtggaaaacaatcagatgttgagtctcctgaacaggagacaggaggagaggctacgtgaacaggaggagaggctacatgaacaggaggagaggctacatgaacaggaggagaggctgctacgtgaacaggaggagaggctgtgtgaacaggaggagaggctacgtgaacaggaggagaggctgtgtgaacaggaggagaggctacgtgaacaggaggagaggctgtgtgaacaggaggagaggctatgtgaacaggaggagaggctgtgtgaacaggagaagctgccagggcaggagaggctgctggaagaggtggagaagctgttagaacaggagaggcggcaggaggagcaggagaggctgctggagagggagaggctgctggacgaggtggaggagctcctggagcaggagaggcttcggcaacaggatgagaggctgtggcagcaggagactctgcgggagctggagaggctgcgggagctggagaggctgcgggagctggagaggatgctggagctggggtgggaagccctgtacgagcagcgggccgagccacgcagcggcttcgaggagctgaacaacgagaacaagagcacactgcagttggagcagcaagtaaaggagctggagaagtcgggtggagctgaagagccaagaggctccgagtctgcagcagcagccagaccagtacctggagccccagtcccacaaggagcttggatgtgcggacaagcagggtggactccccaggagcacccaggcttgagtggagaagctgttggtacaggagaggcggcaggaggagcagaagaggctgcatgccattcttttcgggctgcggagaacagggagctaaacatcaccatcatctaa

SEQ ID NO: 138461 - DNA, 4306 bp, Homo sapiens
  Payload ID: 7117
  Gene Symbol: GOLGA6L10
  Gene Name: golgin A6 family-like 10
  ENST ID: ENST00000619556
  CDS Start-End: 101-1528
gcgttccattggtgccctggttacgccacctgtggctcagttgcacagctgcctggtaggtgactggaggcattgagcagtgctcactggtatttcgctgatgtggccccaaccccgcctccctccccaccccgcgatgtcagaaaaaacacaacaggggaaattggccgcagccaagaaaaagttaaaagcatattggcagaggaagagccctggcattccagcaggagctaacaggaaaaagaaagtcaatggcagtagccctgacacagccacttctggtggttaccactcacctggggattcagcaacaggtatctacggggagggccgtgcatcctctactaccctgcaggatctggagagccagtaccaagaactagcagtggccctggattcaagctccgcaataatcagtcaactcactgaaaacatcaattcactggttcgcacatctaaggaggagaagaagcatgagatacatctggtacagaagcttgggaggagcttgttcaaactcaaaaaccagacggctgaacccctggccccagagcccccagcagggccatctaaggtggagcagctacaagatgagaccaaccacctaaggaaggagctagagagtgtgggaagacagctccaggctgaggtggaaaacaatcagatgttgagtctcctgaacaggagacaggaggagaggctacgtgaacaggaggagaggctacatgaacaggaggagaggctacatgaacaggaggagaggctgtgtgaacaggaggaggagaggctgtgtgaacaggaggagaggctacgtgaacaggaggagaggctacgtgaacaggaggaggagaggctacgtgaacaggaggagaggctatgtgaacaggaggagaggctatgtgaacaggaggagaggctgtgtgaacaggagaagctgccagggcaggagaggctgctggaagaggtggagaagctgttagaacaggagaggcggcaggaggagcaggagaggctgctggagagggagaggctgctggacgaggtggaggagctcctggagcaggagaggcttcggcaacaggatgagaggctgtggcagcaggagactctgcgggagctggagaggctgcgggagctggagaggctgcgggagctggagaggatgctggagctggggtgggaagccctgtacgagcagcgggccgagccacgcagcggcttcgaggagctgaacaacgagaacaagagcacactgcagttggagcagcaagtaaaggagctggagaagtcgggtggagctgaagagccaagaggctccgagtctgcagcagcagccagaccagtacctggagccccagtcccacaaggagcttggatgtgcggacaagcagggtggactccccaggagcacccaggcttgagtggagaagctgttggtacaggagaggcggcaggaggagcagaagaggctgcatgccattcttttcgggctgcggagaacagggagctaaacatcaccatcatctaagagcgggtcaagaaattgaaaaaaaaaaaaacaaaacatttaaggggttaatatcctacacaattcatttacttcatttgaatgttagagccacttatgtttatttgtgtttctaatttatagtttaaatttatttgtgtttctaatttataatttaaatttatttgtgtttctaatttatagtttaaatttatttgtgtttctaatttataatttaaatttatttgtaaaaagttaaatgagagtgggtctttctctcatgttcactctggcatcttttagcatttttttaatttgataattataggacgttagcatgcatatcgagtttgcccttatgtggtgggagttcaaacacacaaagacccactgtatgcacacaactgttcttgctggtttgggataggctgccatgcttttttaatgttagtacagcctgtatattcattacggaattcagataaaatttccttatgttctgctgttatgtttgatcgaatcctaatcacagtgagctcttcattagctcaatatgtggtttgccctcaagtgcgcggtctattactttgtaatatgccactgtgagtactgacatttacagttgtttaaaggtggagcactggaaacagcctttccccctttttctgtgtattggggatgggagtaataacattttggggaggtttttaaatctcccagaagaggaaagtggcctgctttggcaggtgtgtgcaggatagaatatgtttcatttgttccggtgccaagaatgagcgctgtactacggtagttcccttaggatttgtatgtgctctgggctcatgaagatactgcctcatgagctgtggcagttgtactcttttttgatgacctgaaaagggattatttctgaggaatgaaaggctcccatcatgactgtggatgtggaaaaccttttctagctgagagcatttatatctacaatacattttaaagtcagagttcatgttccctgttttaatcacatgactacatgtcccagtacacaaaagggcactggttggcgttctccttaatgtatttagtaaagatcagaagaaatcctttaagagtttaaatgcccctggaacaggcatatacaggctctagtcaagaatgaattcgagtgaaggaaagctgtgtgacacctggcattcctctgtgttcatggagcttatctgaggctagaagatggattttaccatctagacctctctggctaatagctagtcttcaaccatctgacataggaatttacttcttttccttgaatggagaacactttaaaaataataacaaacattattataaactaatatatgtgagagtacttagttgaaacaaaaaggagttttagtagacagtattatactacatttgaaaatcaaggagcagtttatgcaacgtaaaatgtttacaaactgcagcgcaatctactgtttgtgactgtcaaagtgtcatgaggaaagtgtctatacaatcacagagttatatttcctcacaaagttctttacgaagagtgaaatatgtttttatacctctcagtttcagttagaggcatattttgtgtaatatttatggcttaaaatggactaaaggtcctgttcttgccttgtctgaacttgccgcttttgcattctttgagttcagtttaaagacacttactttaactccattttaaaccctcgggctagaaatcgtaccactgttaattagccacgttatttggtctaacagtttttgtttatcattctgaaactgagcttatctaatacattgataaattatttcaaaggtatttttatagttcaaatcgcttcacttttaccctgacacgtataaatgactaggaatgaccttcagatagcgtttagcaactgtaaccaatctgacaataatgtgttcatcaggtacctgtggattaaatcacatactggcatatttaagctgaatgtcagtctgaaaaataaatgtactatattaactcaaataccactctctgtgtaggtattttgtcatatgtttaagaaaaagctaaagagaatggaaatcctatgacaataactcaagtctttcttcaaagtgcatgcagtctcttgcagtacctcattcagccaagtatttgttctcttcctcattcagtataaggcagctttcaatttgcttagaaggcaatattagaaggttagagttcagcagaaagagagaattttaaaatgtgagtttgactgaataaatttgaatttctgtaggaagtaaagaatcaaaatacctatttaaagactgcaatatatgataattatttttaaagtaatagattaaacctgataggttttcctgaaatgaaaaacaatcagttctaaaaccaaagctgatttttagaaaatgtgaaaatgtaaatcaaccctatccaaaatagattctctaaaactttatcttacagtcactttcaaataactattcaaaaatgtaactgttaaattaatgtcttaaaataatttaaaacattttaaaatacgaatactgtagcttaaaacaaagaatctaggggaaggaaaagtagagaaagaaatgccaattccagtccaaagctgtatttgccaagttttcttagaacgacttttaccgatttatgaattcttatacacagaatgcatgatggaaatactgatttttgtctaaagtggcattattgactgcttctgtgatgctactgtaatgtaataaattattagattgtttcaaggtgctgttttgcct

SEQ ID NO: 138462 - DNA, 4160 bp, Homo sapiens
  Payload ID: 7117
  Gene Symbol: GOLGA6L10
  Gene Name: golgin A6 family-like 10
  ENST ID: ENST00000621197
  CDS Start-End: 63-1382
agttgcacagctgcctggtaggtgactggaggcattgagcagtgctcactggtatttcgctgatgtggccccaaccccgcctccctccccaccccgcgatgtcagaaaaaacacaacaggggaaattggccgcagccaagaaaaagttaaaagcatattggcagaggaagagccctggcattccagcaggagctaacaggaaaaagaaagtcaatggcagtagccctgacacagccacttctggtggttaccactcacctggggattcagcaacaggtatctacggggagggccgtgcatcctctactaccctgcaggatctggagagccagtaccaagaactagcagtggccctggattcaagctccgcaataatcagtcaactcactgaaaacatcaattcactggttcgcacatctaaggaggagaagaagcatgagatacatctggtacagaagcttgggaggagcttgttcaaactcaaaaaccagacggctgaacccctggccccagagcccccagcagggccatctaaggtggagcagctacaagatgagaccaaccacctaaggaaggagctagagagtgtgggaagacagctccaggctgaggtggaaaacaatcagatgttgagtctcctgaacaggagacaggaggagaggctacgtgaacaggaggagaggctacatgaacaggaggagaggctacatgaacaggaggagaggctgtgtgaacaggaggagaggctacgtgaacaggaggagaggctgctgtgtgaacaggagaagctgccagggcaggagaggctgctggaagaggtggagaagctgttagaacaggagaggcggcaggaggagcaggagaggctgctggagagggagaggctgctggacgaggtggaggagctcctggagcaggagaggcttcggcaacaggatgagaggctgtggcagcaggagactctgcgggagctggagaggctgcgggagctggagaggctgcgggagctggagaggatgctggagctggggtgggaagccctgtacgagcagcgggccgagccacgcagcggcttcgaggagctgaacaacgagaacaagagcacactgcagttggagcagcaagtaaaggagctggagaagtcgggtggagctgaagagccaagaggctccgagtctgcagcagcagccagaccagtacctggagccccagtcccacaaggagcttggatgtgcggacaagcagggtggactccccaggagcacccaggcttgagtggagaagctgttggtacaggagaggcggcaggaggagcagaagaggctgcatgccattcttttcgggctgcggagaacagggagctaaacatcaccatcatctaagagcgggtcaagaaattgaaaaaaaaaaaaacaaaacatttaaggggttaatatcctacacaattcatttacttcatttgaatgttagagccacttatgtttatttgtgtttctaatttatagtttaaatttatttgtgtttctaatttataatttaaatttatttgtgtttctaatttatagtttaaatttatttgtgtttctaatttataatttaaatttatttgtaaaaagttaaatgagagtgggtctttctctcatgttcactctggcatcttttagcatttttttaatttgataattataggacgttagcatgcatatcgagtttgcccttatgtggtgggagttcaaacacacaaagacccactgtatgcacacaactgttcttgctggtttgggataggctgccatgcttttttaatgttagtacagcctgtatattcattacggaattcagataaaatttccttatgttctgctgttatgtttgatcgaatcctaatcacagtgagctcttcattagctcaatatgtggtttgccctcaagtgcgcggtctattactttgtaatatgccactgtgagtactgacatttacagttgtttaaaggtggagcactggaaacagcctttccccctttttctgtgtattggggatgggagtaataacattttggggaggtttttaaatctcccagaagaggaaagtggcctgctttggcaggtgtgtgcaggatagaatatgtttcatttgttccggtgccaagaatgagcgctgtactacggtagttcccttaggatttgtatgtgctctgggctcatgaagatactgcctcatgagctgtggcagttgtactcttttttgatgacctgaaaagggattatttctgaggaatgaaaggctcccatcatgactgtggatgtggaaaaccttttctagctgagagcatttatatctacaatacattttaaagtcagagttcatgttccctgttttaatcacatgactacatgtcccagtacacaaaagggcactggttggcgttctccttaatgtatttagtaaagatcagaagaaatcctttaagagtttaaatgcccctggaacaggcatatacaggctctagtcaagaatgaattcgagtgaaggaaagctgtgtgacacctggcattcctctgtgttcatggagcttatctgaggctagaagatggattttaccatctagacctctctggctaatagctagtcttcaaccatctgacataggaatttacttcttttccttgaatggagaacactttaaaaataataacaaacattattataaactaatatatgtgagagtacttagttgaaacaaaaaggagttttagtagacagtattatactacatttgaaaatcaaggagcagtttatgcaacgtaaaatgtttacaaactgcagcgcaatctactgtttgtgactgtcaaagtgtcatgaggaaagtgtctatacaatcacagagttatatttcctcacaaagttctttacgaagagtgaaatatgtttttatacctctcagtttcagttagaggcatattttgtgtaatatttatggcttaaaatggactaaaggtcctgttcttgccttgtctgaacttgccgcttttgcattctttgagttcagtttaaagacacttactttaactccattttaaaccctcgggctagaaatcgtaccactgttaattagccacgttatttggtctaacagtttttgtttatcattctgaaactgagcttatctaatacattgataaattatttcaaaggtatttttatagttcaaatcgcttcacttttaccctgacacgtataaatgactaggaatgaccttcagatagcgtttagcaactgtaaccaatctgacaataatgtgttcatcaggtacctgtggattaaatcacatactggcatatttaagctgaatgtcagtctgaaaaataaatgtactatattaactcaaataccactctctgtgtaggtattttgtcatatgtttaagaaaaagctaaagagaatggaaatcctatgacaataactcaagtctttcttcaaagtgcatgcagtctcttgcagtacctcattcagccaagtatttgttctcttcctcattcagtataaggcagctttcaatttgcttagaaggcaatattagaaggttagagttcagcagaaagagagaattttaaaatgtgagtttgactgaataaatttgaatttctgtaggaagtaaagaatcaaaatacctatttaaagactgcaatatatgataattatttttaaagtaatagattaaacctgataggttttcctgaaatgaaaaacaatcagttctaaaaccaaagctgatttttagaaaatgtgaaaatgtaaatcaaccctatccaaaatagattctctaaaactttatcttacagtcactttcaaataactattcaaaaatgtaactgttaaattaatgtcttaaaataatttaaaacattttaaaatacgaatactgtagcttaaaacaaagaatctaggggaaggaaaagtagagaaagaaatgccaattccagtccaaagctgtatttgccaagttttcttagaacgacttttaccgatttatgaattcttatacacagaatgcatgatggaaatactgatttttgtctaaagtggcattattgactgcttctgtgatgctactgtaatgtaataaattattagattgtttcaaggtgctgttttgcct

SEQ ID NO: 138463 - DNA, 1640 bp, Homo sapiens
  Payload ID: 7117
  Gene Symbol: GOLGA6L10
  Gene Name: golgin A6 family-like 10
  ENST ID: ENST00000633133
  CDS Start-End: 63-1631
agttgcacagctgcctggtaggtgactggaggcattgagcagtgctcactggtatttcgctgatgtggccccaaccccgcctccctccccaccccgcgatgtcagaaaaaacacaacaggggaaattggccgcagccaagaaaaagttaaaagcatattggcagaggaagagccctggcattccagcaggagctaacaggaaaaagaaagtcaatggcagtagccctgacacagccacttctggtggttaccactcacctggggattcagcaacaggtgtctacggggagggccgtgcatcctctactaccctgcaggatctggagagccagtaccaagaactagcagtggccctggattcaagctccgcaataatcagtcaactcactgaaaacatcaattcactggttcgcacatctaaggaggagaagaagcatgagatacatctggtacagaagcttgggaggagcttgttcaaactcaaaaaccagacggctgaacccctggccccagagcccccagcagggccatctaaggtagagcagctacaagatgagaccaaccacctaaggaaggagctagagagtgtgggaagacagctccaggctgaggtggaaaacaatcagatgttgagtctcctgaacaggagacaggaggagaggctacgtgaacaggaggagaggctacatgaacaggaggagaggctacatgaacaggaggagaggctgtgtgaacaggaggagaggctacgtgaacaggaggagaggctgtgtgaacaggaggagaggctacgtgaacaggaggagaggctgtgtgaacaggaggagaggctacgtgaacaggaggagaggctgtgtgaacaggaggagaggctacgtgaacaggaggagaggctgtgtgaacaggaggagaggctacgtgaacaggaggagaggctgtgtgaacaggaggagaggctacgtgaacaggaggagaggctgtgtgaacaggaggagaggctatgtgaacaggaggagaggctgtgtgaacaggagaagctgccagggcaggagaggctgctggaagaggtggagaagctgttagaacaggagaggcggcaggaggagcaggagaggctgctggagagggagaggctgctggacgaggtggaggagctcctggagcaggagaggcttcggcaacaggatgagaggctgtggcagcaggagactctgcgggagctggagaggctgcgggagctggagaggctgcgggagctggagaggatgctggagctggggtgggaagccctgtacgagcagcgggccgagccacgcagcggcttcgaggagctgaacaacgagaacaagagcacactgcagttggagcagcaagtaaaggagctggagaagtcgggtggagctgaagagccaagaggctccgagtctgcagcagcagccagaccagtacctggagccccagtcccacaaggagcttggatgtgcggacaagcagggtggactccccaggagcacccaggcttgagtggagaagctgttggtacaggagaggcggcaggaggagcagaagaggctgcatgccattcttttcgggctgcggagaacagggagctaaacatcaccatcatctaagagcgggtc

SEQ ID NO: 138464 - DNA, 1682 bp, Homo sapiens
  Payload ID: 7117
  Gene Symbol: GOLGA6L10
  Gene Name: golgin A6 family-like 10
  ENST ID: ENST00000632596
  CDS Start-End: 63-1673
agttgcacagctgcctggtaggtgactggaggcattgagcagtgctcactggtatttcgctgatgtggccccaaccccgcctccctccccaccccgcgatgtcagaaaaaacacaacaggggaaattggccgcagccaagaaaaagttaaaagcatattggcagaggaagagccctggcattccagcaggagctaacaggaaaaagaaagtcaatggcagtagccctgacacagccacttctggtggttaccactcacctggggattcagcaacaggtatctacggggagggccgtgcatcctctactaccctgcaggatctggagagccagtaccaagaactagcagtggccctggattcaagctccgcaataatcagtcaactcactgaaaacatcaattcactggttcgcacatctaaggaggagaagaagcatgagatacatctggtacagaagcttgggaggagcttgttcaaactcaaaaaccagacggctgaacccctggccccagagcccccagcagggccatctaaggtggagcagctacaagatgagaccaaccacctaaggaaggagctagagagtgtgggaagacagctccaggctgaggtggaaaacaatcagatgttgagtctcctgaacaggagacaggaggagaggctacgtgaacaggaggagaggctacatgaacaggaggagaggctacatgaacaggaggagaggctgtgtgaacaggaggagaggctacgtgaacaggaggagaggctgtgtgaacaggaggagaggctacgtgaacaggaggagaggctacgtgaacaggaggagaggctacgtgaacaggaggagaggctacatgaacaggaggagaggctacatgaacaggaggagaggctgtgtgaacaggaggagaggctacgtgaacaggaggagaggctgtgtgaacaggaggagaggctacgtgaacaggaggagaggctgtgtgaacaggaggagaggctacgtgaacaggaggagaggctgtgtgaacaggaggagaggctatgtgaacaggaggagaggctgtgtgaacaggagaagctgccagggcaggagaggctgctggaagaggtggagaagctgttagaacaggagaggcggcaggaggagcaggagaggctgctggagagggagaggctgctggacgaggtggaggagctcctggagcaggagaggcttcggcaacaggatgagaggctgtggcagcaggagactctgcgggagctggagaggctgcgggagctggagaggctgcgggagctggagaggatgctggagctggggtgggaagccctgtacgagcagcgggccgagccacgcagcggcttcgaggagctgaacaacgagaacaagagcacactgcagttggagcagcaagtaaaggagctggagaagtcgggtggagctgaagagccaagaggctccgagtctgcagcagcagccagaccagtacctggagccccagtcccacaaggagcttggatgtgcggacaagcagggtggactccccaggagcacccaggcttgagtggagaagctgttggtacaggagaggcggcaggaggagcagaagaggctgcatgccattcttttcgggctgcggagaacagggagctaaacatcaccatcatctaagagcgggtc

SEQ ID NO: 138465 - DNA, 1379 bp, Homo sapiens
  Payload ID: 7118
  Gene Symbol: GOLGA6L2
  Gene Name: golgin A6 family-like 2
  Uniprot ID: Q8N9W4
  ENST ID: ENST00000312015
  CDS Start-End: 90-1334
gctgcgtggtacgtgactggaggtgtatccttgtcctcgtctgaatcacgctgatgtggccccaaccccacctccctccccaccccatgatgtcagaaaaaaccagacagaacaaattggctgaggccaagaaaaagtttacagactatcgtcagtggaacattgctggtgttggtaccagagcaactgacaccaaaaagaagaaaataaataatggcactaaccctgagacaaccacttcggagggttgccattcacctgaggatacacaacagaaccgagcgcagctgaaagaagaaaagaaggcaagccaccaacatcaggaagccctaaggcgggagatagaggcccaggatcatacaatacgaattctcacgtgtcagaaaactgaactggagacagcgctctattacagccaggatgctgccaggaaatttgaagatgggaacctgggcaccccatcatccttcaacctggcactttcacaggcctttagggggagtcctttgggctgtgtctcaacctctctcattccaggagagtccaaggatctcgccggccgcttgcatcattcctggcactttgcaggagagttacagcgggctctctctgctgtgtccacatggcacaagaaggcagacaggtacatcgaggagttaacaaaggagagggacgccctgagtctggaactgtacaggaacaccataaccaatgaggagctgaagaagaaaaatgccgaactacaagaaaaacttcgacttgcagaatctgaaaagtctgagatccagctcaacgtgaaggagctaaaaaggaaactggagagggccaagttcctgctgccacaggttcaaaccaacactttgcaggaggagatgtggaggcaggaggaggagctacgggagcaggaaaagaagatacggaagcaggaggagaagatgtggagacaggaggagagactgcgggagcaggaggggaagatgcgggagcaggaggagaagatgcggagacaggaggagatgcgagagaaggaggagaggatacgagatcagaaagagaagatgcaggagaggctgccagagcacgaggagcggtgctcagagccctgcctccctccctccaaagttctttgtaatatgagccacactggcagtgtggagcctgcaggaggagaggctggggagggttctccgcaggacaaccccactgcacaggagatcatgcagctgttttgtgggatgaagaacgcccagcagtgcccaggattaggcagtacctcctgcatcccattcttctaccgaggagacaagagaaagatgaagatcatcaatatctaaaagttggcactgtcaacaaggcctacagaagcataagccgccatg

SEQ ID NO: 138466 - DNA, 1972 bp, Homo sapiens
  Payload ID: 7118
  Gene Symbol: GOLGA6L2
  Gene Name: golgin A6 family-like 2
  ENST ID: ENST00000345070
  CDS Start-End: 781-1725
gctgcgtggtacgtgactggaggtgtatccttgtcctcgtctgaatcacgctgatgtggccccaaccccacctccctccccaccccatgatgtcagaaaaaaccagacagaacaaattggctgaggccaagaaaaagtttacagactatcgtcagtggaacattgctggtgttggtaccagagcaactgacaccaaaaagaagaaaataaataatggcactaaccctgagacaaccacttcggagggttgccattcacctgaggatgaaaagaaggcaagccaccaacatcaggaagccctaaggcgggagatagaggcccaggatcatacaatacgaattctcacgtgtcagaaaactgaactggagacagcgctctattacagccaggatgctgccaggaaatttgaagatgggaacctgggcaccccatcatccttcaacctggcactttcacaggcctttagggggagtcctttgggctgtgtctcaacctctctcattccaggagagtccaaggatctcgccggccgcttgcatcattcctggcactttgcaggagagttacagcgggctctctctgctgtgtccacatggcacaagaaggcagacaggtacatcgaggagttaacaaaggagagggacgccctgagtctggaactgtacaggaacacaatctgaaaagtctgagatccagctcaacgtgaaggagctaaaaaggaaactggagagggccaagttcctgctgccacaggttcaaaccaacactttgcaggaggagatgtggaggcaggaggaggagctacgggagcaggaaaagaagatacggaagcaggaggagaagatgtggagacaggaggagagactgcgggagcaggaggggaagatgcgggagcaggaggagaagatgcggagacaggagaagaggctgcgagagcaggagaaggagctgcgggagcaggagaaggagctgcgggagcagaagaagctgcgggagcaggaggagcagatgcaggagcaggaggagaagatgtgggagcaggaggagaagatgcgggagcaggaagagaagatgtggagacaggaggagaggctgtgggagcaggagaagcagatgcgggagcaggagcagaagatgcgggaccaagaggagaggatgtgggagcaggacgagaggctacgggagaaggaggagaggatgcgggagcaggagaagatgtgggagcaggtggagaagatgcgggaggagaagaagatgcaggagcaggagaagaagacgcgggaccaggaggagaagatgcaagaggaggagaggatacgggagcgggagaagaagatgcgggaagaggaggagacgatgcgggagcaggaggagaagatgcagaagcaggaggagaatatgtgggagcaggaagagaaggagtggcagcagcagaggctgccggaacagaaggagaagctgtgggaacaggagaagatgcaggagcaggaggagaagatatgggagcaggaggagaagatacgggaccaggaggagatgtgggggcaggagaagaagatgtggcggcaggagaagatgcgggagcaggaagatgtgggggcaggaggagatgcgagagaaggaggagaggatacgagatcagaaagagaagatgcaggagaggctgccagagcacgaggagcggtgctcagagccctgcctccctccctccaaagttctttgtaatatgagccacactggcagtgtggagcctgcaggaggagaggctggggagggttctccgcaggacaaccccactgcacaggagatcatgcagctgttttgtgggatgaagaacgcccagcagtgcccaggattaggcagtacctcctgcatcccattcttctaccgaggagacaagagaaagatgaagatcatcaatatctaaaagttggcactgtcaacaaggcctacagaagcataagccgccatg

SEQ ID NO: 138467 - DNA, 3030 bp, Homo sapiens
  Payload ID: 7118
  Gene Symbol: GOLGA6L2
  Gene Name: golgin A6 family-like 2
  ENST ID: ENST00000567107
  CDS Start-End: 54-2783
gctgcgtggtacgtgactggaggtgtatccttgtcctcgtctgaatcacgctgatgtggccccaaccccacctccctccccaccccatgatgtcagaaaaaaccagacagaacaaattggctgaggccaagaaaaagtttacagactatcgtcagtggaacattgctggtgttggtaccagagcaactgacaccaaaaagaagaaaataaataatggcactaaccctgagacaaccacttcggagggttgccattcacctgaggatacacaacagaaccgagcgcagctgaaagaagaaaagaaggcaagccaccaacatcaggaagccctaaggcgggagatagaggcccaggatcatacaatacgaattctcacgtgtcagaaaactgaactggagacagcgctctattacagccaggatgctgccaggaaatttgaagatgggaacctgggcaccccatcatccttcaacctggcactttcacaggcctttagggggagtcctttgggctgtgtctcaacctctctcattccaggagagtccaaggatctcgccggccgcttgcatcattcctggcactttgcaggagagttacagcgggctctctctgctgtgtccacatggcacaagaaggcagacaggtacatcgaggagttaacaaaggagagggacgccctgagtctggaactgtacaggaacaccataaccaatgaggagctgaagaagaaaaatgccgaactacaagaaaaacttcgacttgcagaatctgaaaagtctgagatccagctcaacgtgaaggagctaaaaaggaaactggagagggccaagttcctgctgccacaggttcaaaccaacactttgcaggaggagatgtggaggcaggaggaggagctacgggagcaggaaaagaagatacggaagcaggaggagaagatgtggagacaggaggagagactgcgggagcaggaggggaagatgcgggagcaggaggagaagatgcggagacaggagaagaggctgcgagagcaggagaaggagctgcgggagcaggagaaggagctgcgggagcagaagaagctgcgggagcaggaggagcagatgcaggagcaggaggagaagatgtgggagcaggaggagaagatgcgggagcaggaagagaagatgtggagacaggaggagaggctgtgggagcaggagaagcagatgcgggagcaggagcagaagatgcgggaccaagaggagaggatgtgggagcaggacgagaggctacgggagaaggaggagaggatgcgggagcaggagaagatgtgggagcaggtggagaagatgcgggaggagaagaagatgcaggagcaggagaagaagacgcgggaccaggaggagaagatgcaagaggaggagaggatacgggagcgggagaagaagatgcgggaagaggaggagacgatgcgggagcaggaggagaagatgcagaagcaggaggagaatatgtgggagcaggaagagaaggagtggcagcagcagaggctgccggaacagaaggagaagctgtgggaacaggagaagatgcaggagcaggaggagaagatatgggagcaggaggagaagatacgggaccaggaggagatgtgggggcaggagaagaagatgtggcggcaggagaagatgcgggagcaggaagatgtggagacaggaggagaggctgcaggagcaggagaagcagatgtgggagcaggaggagaagatgcgggatcaggagcagaagatgtgggaccaggaggagaggatgtgggagcaggacgagaggctgcgggagaaggaggagagaatgcgggagcagaagaagatgtggcagcaggaggagaagatgcgggaggagaagaagacgcaggagcaggagaagaagacatgggaccaggaggagaagatgcgagaggaggagaggatgcgggagcgggagaagaagatgcgggaggaggaggagatgatgcgggagcaggaggagaagatgcaggagcaggaagagaagatgcgggagcaggaggagaagatgtgggagcaggaagagaagatgcaggagcaggaggagaagatgtgggagcaggaggagaagatgtgggagcaggaagaagaagatgtgggagcagcagaggctgccggaacagaaggagaagctgtgggaacacgagaagatgcaggagcaggagatcaggagcagaagatgtgggaccagaaggagaggatgtgggagcaggacgagaggctgcgggagaaggaggagagaatgcgggagcagaagatgtggcagcaggtggagaagatgcgggagaagaagaagacgcaggaggagaagatgcaggagcagcaagagaagatgcaggagcaggaggagatgatgtgggagcaggaagagaagatgcaggagcaggaggagaagatgtgggagcaggaggagaagatgcgggagcaggaggagaagatgcgggagcaggaggagaagatgcagggccaggaggagaagatgcgggagcaggaggagaagatgcagggccaggaggagaagatgcgggagcaggaggagaagatgcggggccaggaggagaagatgtggggccaggaggagaagatgtgggggcaggaggagaagatgtgggggcaggaggagatgcgagagaaggaggagaggatacgagatcagaaagagaagatgcaggagaggctgccagagcacgaggagcggtgctcagagccctgcctccctccctccaaagttctttgtaatatgagccacactggcagtgtggagcctgcaggaggagaggctggggagggttctccgcaggacaaccccactgcacaggagatcatgcagctgttttgtgggatgaagaacgcccagcagtgcccaggattaggcagtacctcctgcatcccattcttctaccgaggagacaagagaaagatgaagatcatcaatatctaaaagttggcactgtcaacaaggcctacagaagcataagccgccatg

SEQ ID NO: 138468 - DNA, 2938 bp, Homo sapiens
  Payload ID: 7118
  Gene Symbol: GOLGA6L2
  Gene Name: golgin A6 family-like 2
  ENST ID: ENST00000566571
  CDS Start-End: 54-680
gctgcgtggtacgtgactggaggtgtatccttgtcctcgtctgaatcacgctgatgtggccccaaccccacctccctccccaccccatgatgtcagaaaaaaccagacagaacaaattggctgaggccaagaaaaagtttacagactatcgtcagtggaacattgctggtgttggtaccagagcaactgacaccaaaaagaagaaaataaataatggcactaaccctgagacaaccacttcggagggttgccattcacctgaggatgaaaagaaggcaagccaccaacatcaggaagccctaaggcgggagatagaggcccaggatcatacaatacgaattctcacgtgtcagaaaactgaactggagacagcgctctattacagccaggatgctgccaggaaatttgaagatgggaacctgggcaccccatcatccttcaacctggcactttcacaggcctttagggggagtcctttgggctgtgtctcaacctctctcattccaggagagtccaaggatctcgccggccgcttgcatcattcctggcactttgcaggagagttacagcgggctctctctgctgtgtccacatggcacaagaaggcagacaggtacatcgaggagttaacaaaggagagggacgccctgagtctggaactgtacaggaacacaatctgaaaagtctgagatccagctcaacgtgaaggagctaaaaaggaaactggagagggccaagttcctgctgccacaggttcaaaccaacactttgcaggaggagatgtggaggcaggaggaggagctacgggagcaggaaaagaagatacggaagcaggaggagaagatgtggagacaggaggagagactgcgggagcaggaggggaagatgcgggagcaggaggagaagatgcggagacaggagaagaggctgcgagagcaggagaaggagctgcgggagcaggagaaggagctgcgggagcagaagaagctgcgggagcaggaggagcagatgcaggagcaggaggagaagatgtgggagcaggaggagaagatgcgggagcaggaagagaagatgtggagacaggaggagaggctgtgggagcaggagaagcagatgcgggagcaggagcagaagatgcgggaccaagaggagaggatgtgggagcaggacgagaggctacgggagaaggaggagaggatgcgggagcaggagaagatgtgggagcaggtggagaagatgcgggaggagaagaagatgcaggagcaggagaagaagacgcgggaccaggaggagaagatgcaagaggaggagaggatacgggagcgggagaagaagatgcgggaagaggaggagacgatgcgggagcaggaggagaagatgcagaagcaggaggagaatatgtgggagcaggaagagaaggagtggcagcagcagaggctgccggaacagaaggagaagctgtgggaacaggagaagatgcaggagcaggaggagaagatatgggagcaggaggagaagatacgggaccaggaggagatgtgggggcaggagaagaagatgtggcggcaggagaagatgcgggagcaggaagatgtggagacaggaggagaggctgcaggagcaggagaagcagatgtgggagcaggaggagaagatgcgggatcaggagcagaagatgtgggaccaggaggagaggatgtgggagcaggacgagaggctgcgggagaaggaggagagaatgcgggagcagaagaagatgtggcagcaggaggagaagatgcgggaggagaagaagacgcaggagcaggagaagaagacatgggaccaggaggagaagatgcgagaggaggagaggatgcgggagcgggagaagaagatgcgggaggaggaggagatgatgcgggagcaggaggagaagatgcaggagcaggaagagaagatgcgggagcaggaggagaagatgtgggagcaggaagagaagatgcaggagcaggaggagaagatgtgggagcaggaggagaagatgtgggagcaggaagaagaagatgtgggagcagcagaggctgccggaacagaaggagaagctgtgggaacacgagaagatgcaggagcaggagatcaggagcagaagatgtgggaccagaaggagaggatgtgggagcaggacgagaggctgcgggagaaggaggagagaatgcgggagcagaagatgtggcagcaggtggagaagatgcgggagaagaagaagacgcaggaggagaagatgcaggagcagcaagagaagatgcaggagcaggaggagatgatgtgggagcaggaagagaagatgcaggagcaggaggagaagatgtgggagcaggaggagaagatgcgggagcaggaggagaagatgcgggagcaggaggagaagatgcagggccaggaggagaagatgcgggagcaggaggagaagatgcagggccaggaggagaagatgcgggagcaggaggagaagatgcggggccaggaggagaagatgtggggccaggaggagaagatgtgggggcaggaggagaagatgtgggggcaggaggagatgcgagagaaggaggagaggatacgagatcagaaagagaagatgcaggagaggctgccagagcacgaggagcggtgctcagagccctgcctccctccctccaaagttctttgtaatatgagccacactggcagtgtggagcctgcaggaggagaggctggggagggttctccgcaggacaaccccactgcacaggagatcatgcagctgttttgtgggatgaagaacgcccagcagtgcccaggattaggcagtacctcctgcatcccattcttctaccgaggagacaagagaaagatgaagatcatcaatatctaaaagttggcactgtcaacaaggcctacagaagcataagccgccatg

SEQ ID NO: 138469 - DNA, 2054 bp, Homo sapiens
  Payload ID: 7119
  Gene Symbol: GOLGA6L22
  Gene Name: golgin A6 family-like 22
  ENST ID: ENST00000612056
  CDS Start-End: 1-1980
atgctgatgtggccccaaccccacctccctacccatccccacctccctacccatccccacctccctacccatccccctatgatgtccaaagaaaccagacagagcaaattggccgaggccaaggaacagttgacagaccatcatccccagaccaaccctagtgttggtacagcagcaagcgacaccaaaaagaagaaaataaataatggcactaaccctgagacaaccacttctggtggttgccactcgcctgaggatgaacagaaggcaagccaccaacatcaggaagccctaaggagggagctagaggcccaggttcataccatacgaatccttacatgtcagaaaactgagcttcagatggcactctactacagccagcatgctgtcaagcagttggaaggagaggccagggatctgatcagccgcctgcatgattcatggaagtttgcaggagagttagagcaggctctctctgctgtcgctacacagaagaagaaggcggataggtacattgaggagttaacaaaggagagggacgccctgagtctggaactgtacaggaacaccataactgatgaggagctgaaggagaaaaatgccaaactacaagaaaaacttcaacttgtagaatctgaaaagtctgagatccagctcaacgtaaaggagctaaaaaggaaactggagagggccaagctcctgctgccacagcagcagctgcaggcggaggctgaccacctgggtaaggagctgcagagtgtgtcagcaaagctccaagcccaggtggaagagaacgagttgtggaaccgcctgaaccagcaacaggaggagaagatgtggaggcaggaggagaagatacaggagtgggaggagaagatacaggagcaggaggagaagatacgggagcaggaggagaagatacgggagcaggaggagaagatgcggaggcaggaggagatgatgtgggagaaggaggagaagatgcggaggcaggaggagatgatgtgggagaaggaggagaagatgcggaggcaggaggagatgatgtgggagaaggaggagaagatgcggaggctggaggagatgatgtgggagaaggaggagaagatacgggagctggaagagaagatgcacgagcaggagaagatacgggagcaggaagagaagaggcaggaggaggagaagatacgcgagcaggagaagaggcaggagcaggaggcgaagatgtggaggcaggaggagaagatacgggagcaggaagagaagatacgggagcaggagaaaaagatgtggaggcaggaggagaagattcacgagcaggagaagatacgggaggaggagaagaggcaggagcaggaggagatgtggaggcaggaggagaagataagggagcaggaggagatatggaggcaaaaggagaagatgcacgagcaggagaagatacggaagcaggaggagaaggtgtggaggcaggaggagaagatgcacgaccaggaggagaagatacgggagcaggaggagaagatgtggaggcaggaggagaagataagggagcaggaggagaagatacgggagcaggaggagaagatacgagagcaggaggagatgatgcaggaacaggaagagaagatgggggagcaggaagagaagatgcaagaacaggagaagatgcggaggcaggaggagaagataagggagcaggaggagaagatacgggagcagaaggagaagatacgagagcaggaggagaagatatgggagcaggaggagaagatacgagagcaggaggagatgatgcaggaacaggaagagaagatgtgggagcaggaggagaagatgtgtgagcaggaagagaagatgcaagaacaggaggagaagatgcggaggcaggaggagaagatgtgggagcaggaagtgaggctgcggcagcaggaggagaagatgcaggaacaccaggagcacctggaagctgccatctaatgagcacatgacaagaaggcaaagacaataaacatgtaaaagccggcagcaaggcctggagaagagtaagccgc

SEQ ID NO: 138470 - DNA, 4178 bp, Homo sapiens
  Payload ID: 7119
  Gene Symbol: GOLGA6L22
  Gene Name: golgin A6 family-like 22
  ENST ID: ENST00000622895
  CDS Start-End: 1-2433
atgatgtccaaagaaaccagacagagcaaattggccgaggccaaggaacagttgacagaccatcatccccagaccaaccctagtgttggtacagcagcaagcgacaccaaaaagaagaaaataaataatggcactagccctgagacaaccacttctggtggttgccactcgcctgaggatgaacagaaggcaagccaccaacatcaggaagccctaaggagggagctagaggcccaggttcataccatacgaatccttacatgtcagaaaactgagcttcagatggcactctactacagccagcatgctgtcaagcagttggaaggagaggccagggatctgatcagccgcctgcatgattcatggaagtttgcaggagagttagagcaggctctctctgctgtcactacacagaagaagaaggcggataggtacattgaggagttaacaaaggagagggacgccctgagtctggaactgtacaggaacaccataactgatgaggagctgaaggagaaaaatgccaaactacaagaaaaacttcaacttgtagaatctgaaaagtctgagatccagctcaacgtaaaggagctaaaaaggaaactggagagggccaagctcctgctgccacagcagctgcaggcggaggctgaccacctgggtaaggagctgcagagtgtgtcagcaaagctccaagcccaggtggaagagaacgagttgtggaaccgcctgaaccagcaacaggaggagaagatgtggaggcaggaggagaagatacaggagtgggaggagaagatacaggagcaggaggagaagatacgggagcaggaggagaagatacgggagcaggaggagaagatgcggaggcaggaggagatgatgtgggagaaggaggagaagatgcggaggcaggaggagatgatgtgggagaaggaggagaagatacgggagctggaagagaagatgcacgagcaggagaagatacgggagcaggaagagaagaggcaggaggaggagaagatacgcgagcaggagaagaggcaggagcaggaggcgaagatgtggaggcaggaggagaagatacgggagcaggaagagaagatacgggagcaggagaaaaagatgtggaggcaggaggagaagattcacgagcaggagaagatacgggaggaggagaagaggcaggagcaggaggagatgtggaggcaggaggagaagataagggagcaggaggagatatggaggcaaaaggagaagatgcacgagcaggaggagaagatacggaagcaggaggagaaggtgtggaggcaggaggagaagatgcacgaccaggaggagaagatacgggagcaggaggagaaggtgtggaggcaggaggagaagatacgggagcaggagaagaaacgggagcaggaggagaagatgtggaggcaggaggagaagatacgggagcaggaggagaagatacgggagcaggaggagatgtggagggaggaagagaagatgcatgagcaggagaagatatgggaggaggagaagaggcaggagcaggaggataagatgtggaggcaggaggagaagatacgggagcaggaggagaaggtgtggaggcaggaggagaagatacgggagcaggaggaaaagaggcaggagcaggaggagaagatgtggaagcaggaggagaagataagggagcaggaggagaagatacgggagcaggaggagaagatacgggagcaggaggagaagatacgagagcaggaggagatgatgcaggaacaggaagagaagatgggggagcaggaagagaagatgcaagaacaggagaagatgcggaggcaggaggagaagataagggagcaggaggagaagatacgggagcagaaggagaagatacgagagcaggaggagaagatatgggagcaggaggagaagatacgagagcaggaggagatgatgcaggaacaggaagagaagatgggggagcaggaggagaagatttgggagcaggaagagaagatgcaagaacaggaggagaagatgcggaggcaggaggagaagataagggagcaggagaagaagatacgggagcaggaggagaagatacgagagcaggaggagatgatgcaggaacaggaagagaagatgggggagcaggaagagaagatgcaagaacaggaggagaagatgcggaggcaggaggagaagataagggagcaggagaagaagatacgggagcaggaggagaagatacgagagcaggaggagatgatgcaggaacaggaagagaagatgtgggagcaggaggagaagatgtgtgagcaggaagagaagatgcaagaacaggaggagaagatgcggaggcaggaggagaagatgtgggagcaggaagtgaggctgcggcagcaggaggagaagatgcaggaacactaggagcacctggaagctgccatctaatgagcacatgacaagaaggcaaagacaataaacatgtaaaagccggcagcaaggcctggagaagagtaagccgccatgtgactgtttagaatatagtctgagcacaaacctgaaaaaaaaattttatttattttaaattgtggcaaaatactggccaggcatggtagctcacgcctgtaatcctagcaatttgggaggccgaggtaaatggatgacctgaggtcaagagttcaagaccagcctggccaatacaaaaattagccgggcatggtggcgcatgcctgtaatcccagctacttgggaggctgaggcaggagaatcgcttgaacctgggaggcagaggttgcagtgagctgagatcgtgccactgcactcaagcctgggtgacagagcgaaactccgtctcaaaaaaaaaagtttcttccttacatgtatgtttctattagttttcttcttggtctttctcatttagtcttgtgttgtcttttgacattcatagtaaacttttatctgcctccagagagtattgactttgagtttatggcacacaattggagtaagggcagatcgccttcatctactttgggactaagctggttcaaagcaggttttaggttttctgatggctggtctatgttttattcatctggactcccaggggtggcccttccagggtccccaccaaggtcccatctccttcctgggacccaaattctcattaggtcatttcagccctgtgagagtgccaaacattcagctaggctctccagcctcttaactaccacttcatactcagtttcttagcctcttagccctctactgttgaccaatcaccaaatgtgggaaagcactacagactgtcaggatcacctcctaggcctggtcactcaagtcctgactgaggtctccaattaccttccaacaattgtttttgattgggggcggggcacatttttatccagtttttctaactgctcttgtggggaggcgaatctgtaacaagctcctctgcctttattgaaagttgaaaaccttcatctgtcctttttttgttgttgttgagatggagtcttgcgctgttgcccaggctctagtgcaatggcacgatctctgctcactgtaacctctgcctcctgggttcaagcaattctcctgcctcagcttcccgagtagcgtgtgccaccatgcctggctaatttttttttatacctttaatagaggcaggatttcaccatgttttccaggctggtctcgagctcctgactcaggtgatctacctgcctcagcctcccaaagtgctgggattacaagtatgagccactgcatccggcccatctgtcttttaaaacatgtttttaattggaggtataatttctattagtgaaatgcacaggtctggtttacattttgatgagttttaactcatttaacattactatggaacccacctcctttgaagatacagagtatttctatcatccagaaagttctcctgtgctttcatgctgtcccgcactcccccagccagctgatgaacatgctgaggacattggtactggattctggccgccccaaaagagccactttgaccaggcttacccagcactaaatccctgcctgctctctcaaaatttccatctttaaactggttgtacctataaccctccctcatcaagtcaatagataaacaaaccctgaaaaataaacaactcttcctggcc

SEQ ID NO: 138471 - DNA, 3991 bp, Homo sapiens
  Payload ID: 7119
  Gene Symbol: GOLGA6L22
  Gene Name: golgin A6 family-like 22
  ENST ID: ENST00000620691
  CDS Start-End: 92-2242
attctagtgcagccctggttacgcctcctctggctcagtcacacagcgacgtagaggtgactggaggtatatacttgtcctcacctggatcatgctgatgtggccccaaccccacctccctacccatccccacctccctacccatccccacctccctacccatccccacctccctacccatccccacctccctacccatccccacctccctacccatcctatgatgtccaaagaaaccagacagagcaaattggccgaggccaaggaacagttgacagaccatcatccccagaccaaccctagtgttggtacagcagcaagcgacaccaaaaagaagaaaataaataatggcactagccctgagacaaccacttctggtggttgccactcgcctgaggatgaacagaaggcaagccaccaacatcaggaagccctaaggagggagctagaggcccaggttcataccatacgaatccttacatgtcagaaaactgagcttcagatggcactctactacagccagcatgctgtcaagcagttggaaggagaggccagggatctgatcagccgcctgcatgattcatggaagtttgcaggagagttagagcaggctctctctgctgtcactacacagaagaagaaggcggataggtacattgaggagttaacaaaggagagggacgccctgagtctggaactgtacaggaacaccataactgatgaggagctgaaggagaaaaatgccaaactacaagaaaaacttcaacttgtagaatctgaaaagtctgagatccagctcaacgtaaaggagctaaaaaggaaactggagagggccaagctcctgctgccacagcagcagctgcaggcggaggctgaccacctgggtaaggagctgcagagtgtgtcagcaaagctccaagcccaggtggaagagaacgagttgtggaaccgcctgaaccagcaacaggaggagaagatgtggaggcaggaggagaagatacaggagtgggaggagaagatacaggagcaggaggagaagatacgggagcaggaggagaagatacgggagcaggaggagaagatgcggaggcaggaggagatgatgtgggagaaggaggagaagatgcggaggcaggaggagatgatgtgggagaaggaggagaagatacgggagctggaagagaagatgcacgagcaggagaagatacgggagcaggaagagaagaggcaggaggaggagaagatacgcgagcaggagaagaggcaggagcaggaggcgaagatgtggaggcaggaggagaagatacgggagcaggaagagaagatacgggagcaggagaaaaagatgtggaggcaggaggagaagattcacgagcaggagaagatacgggaggaggagaagaggcaggagcaggaggagatgtggaggcaggaggagaagataagggagcaggaggagatatggaggcaaaaggagaagatgcacgagcaggaggagaagatacggaagcaggaggagaaggtgtggaggcaggaggagaagatgcacgaccaggaggagaagatacgggagcaggaggagaaggtgtggaggcaggaggagaagatacgggagcaggaggagatgtggagggaggaagagaagatgcatgagcaggagaagatatgggaggaggagaagaggcaggagcaggaggataagatgtggaggcaggaggagaagatacgggagcaggaggagaaggtgtggaggcaggaggagaagatacgggagcaggaggaaaagaggcaggagcaggaggagaagatgtggaagcaggaggagaagataagggagcaggaggagaagatacgggagcaggaggagaagatacgggagcaggaggagaagatacgagagcaggaggagatgatgcaggaacaggaagagaagatgggggagcaggaagagaagatgggggagcaggaagagaagatgcaagaacaggaggagaagatgcggaggcaggaggagaagataagggagcaggagaagaagatacgggagcaggaggagaagatacgagagcaggaggagatgatgcaggaacaggaagagaagatgtgggagcaggaggagaagatgtgtgagcaggaagagaagatgcaagaacaggaggagaagatgcggaggcaggaggagaagatgtgggagcaggaagtgaggctgcggcagcaggaggagaagatgcaggaacactaggagcacctggaagctgccatctaatgagcacatgacaagaaggcaaagacaataaacatgtaaaagccggcagcaaggcctggagaagagtaagccgccatgtgactgtttagaatatagtctgagcacaaacctgaaaaaaaaattttatttattttaaattgtggcaaaatactggccaggcatggtagctcacgcctgtaatcctagcaatttgggaggccgaggtaaatggatgacctgaggtcaagagttcaagaccagcctggccaatacaaaaattagccgggcatggtggcgcatgcctgtaatcccagctacttgggaggctgaggcaggagaatcgcttgaacctgggaggcagaggttgcagtgagctgagatcgtgccactgcactcaagcctgggtgacagagcgaaactccgtctcaaaaaaaaaagtttcttccttacatgtatgtttctattagttttcttcttggtctttctcatttagtcttgtgttgtcttttgacattcatagtaaacttttatctgcctccagagagtattgactttgagtttatggcacacaattggagtaagggcagatcgccttcatctactttgggactaagctggttcaaagcaggttttaggttttctgatggctggtctatgttttattcatctggactcccaggggtggcccttccagggtccccaccaaggtcccatctccttcctgggacccaaattctcattaggtcatttcagccctgtgagagtgccaaacattcagctaggctctccagcctcttaactaccacttcatactcagtttcttagcctcttagccctctactgttgaccaatcaccaaatgtgggaaagcactacagactgtcaggatcacctcctaggcctggtcactcaagtcctgactgaggtctccaattaccttccaacaattgtttttgattgggggcggggcacatttttatccagtttttctaactgctcttgtggggaggcgaatctgtaacaagctcctctgcctttattgaaagttgaaaaccttcatctgtcctttttttgttgttgttgagatggagtcttgcgctgttgcccaggctctagtgcaatggcacgatctctgctcactgtaacctctgcctcctgggttcaagcaattctcctgcctcagcttcccgagtagcgtgtgccaccatgcctggctaatttttttttatacctttaatagaggcaggatttcaccatgttttccaggctggtctcgagctcctgactcaggtgatctacctgcctcagcctcccaaagtgctgggattacaagtatgagccactgcatccggcccatctgtcttttaaaacatgtttttaattggaggtataatttctattagtgaaatgcacaggtctggtttacattttgatgagttttaactcatttaacattactatggaacccacctcctttgaagatacagagtatttctatcatccagaaagttctcctgtgctttcatgctgtcccgcactcccccagccagctgatgaacatgctgaggacattggtactggattctggccgccccaaaagagccactttgaccaggcttacccagcactaaatccctgcctgctctctcaaaatttccatctttaaactggttgtacctataaccctccctcatcaagtcaatagataaacaaaccctgaaaaataaacaactcttcctggcccagc

SEQ ID NO: 138472 - DNA, 3619 bp, Homo sapiens
  Payload ID: 7119
  Gene Symbol: GOLGA6L22
  Gene Name: golgin A6 family-like 22
  ENST ID: ENST00000629225
  CDS Start-End: 1-1899
atgatgtccaaagaaaccagacagagcaaattggccgaggccaaggaacagttgacagaccatcatccccagaccaaccctagtgttggtacagcagcaagcgacaccaaaaagaagaaaataaataatggcactaaccctgagacaaccacttctggtggttgccactcgcctgaggatgaacagaaggcaagccaccaacatcaggaagccctaaggagggagctagaggcccaggttcataccatacgaatccttacatgtcagaaaactgagcttcagatggcactctactacagccagcatgctgtcaagcagttggaaggagaggccagggatctgatcagccgcctgcatgattcatggaagtttgcaggagagttagagcaggctctctctgctgtcgctacacagaagaagaaggcggataggtacattgaggagttaacaaaggagagggacgccctgagtctggaactgtacaggaacaccataactgatgaggagctgaaggagaaaaatgccaaactacaagaaaaacttcaacttgtagaatctgaaaagtctgagatccagctcaacgtaaaggagctaaaaaggaaactggagagggccaagctcctgctgccacagcagctgcaggcggaggctgaccacctgggtaaggagctgcagagtgtgtcagcaaagctccaagcccaggtggaagagaacgagttgtggaaccgcctgaaccagcaacaggaggagaagatgtggaggcaggaggagaagatacaggagtgggaggagaagatacaggagcaggaggagaagatacgggagcaggaggagaagatacgggagcaggaggagaagatgcggaggcaggaggagatgatgtgggagaaggaggagaagatgcggaggcaggaggagatgatgtgggagaaggaggagaagatgcggaggcaggaggagatgatgtgggagaaggaggagaagatgcggaggctggaggagatgatgtgggagaaggaggagaagatacgggagctggaagagaagatgcacgagcaggagaagatacgggagcaggaagagaagaggcaggaggaggagaagatacgcgagcaggagaagaggcaggagcaggaggcgaagatgtggaggcaggaggagaagatacgggagcaggaagagaagatacgggagcaggagaaaaagatgtggaggcaggaggagaagattcacgagcaggagaagatacgggaggaggagaagaggcaggagcaggaggagatgtggaggcaggaggagaagataagggagcaggaggagatatggaggcaaaaggagaagatgcacgagcaggagaagatacggaagcaggaggagaaggtgtggaggcaggaggagaagatgcacgaccaggaggagaagatacgggagcaggaggagaagatgtggaggcaggaggagaagataagggagcaggaggagaagatacgggagcaggaggagaagatacgagagcaggaggagatgatgcaggaacaggaagagaagatgggggagcaggaagagaagatgcaagaacaggagaagatgcggaggcaggaggagaagataagggagcaggaggagaagatacgggagcagaaggagaagatacgagagcaggaggagaagatatgggagcaggaggagaagatacgagagcaggaggagatgatgcaggaacaggaagagaagatgtgggagcaggaggagaagatgtgtgagcaggaagagaagatgcaagaacaggaggagaagatgcggaggcaggaggagaagatgtgggagcaggaagtgaggctgcggcagcaggaggagaagatgcaggaacaccaggagcacctggaagctgccatctaatgagcacatgacaagaaggcaaagacaataaacatgtaaaagccggcagcaaggcctggagaagagtaagccgccatgtgactgtttagaatatagtctgagcacaaacctgaaaaaaaaattttatttattttaaattgtggcaaaatactggccaggcatggtagctcacgcctgtaatcctagcaatttgggaggccgaggtaaatggatgacctgaggtcaagagttcaagaccagcctggccaatacaaaaattagccgggcatggtggcgcatgcctgtaatcccagctacttgggaggctgaggcaggagaatcgcttgaacctgggaggcagaggttgcagtgagctgagatcgtgccactgcactcaagcctgggtgacagagcgaaactccgtctcaaaaaaaaaagtttcttccttacatgtatgtttctattagttttcttcttggtctttctcatttagtcttgtgttgtcttttgacattcatagtaaacttttatctgcctccagagagtattgactttgagtttatggcacacaattggagtaagggcagatcgccttcatctactttgggactaagctggttcaaagcaggttttaggttttctgatggctggtctatgttttattcatttggactcccaggggtggcccttccagggtccccaccaaggtcccatctccttcctgggacccaaattctcattaggtcatttcagccctgtgagagtgccaaacattcagctaggctctccagcctcttaactaccacttcatactcagtttcttagcctcttagccctctactgttgaccaatcaccaaatgtgggaaagcactacagactgtcaggatcacctcctaggcctggtcactcaagtcctgactgaggtctccaattaccttccaacaattgtttttgattgggggcggggcacatttttatccagtttttctaactgctcttgtggggaggcgaatctgtaacaagctcctctgcctttactgaaagttgaaaaccttcatctgtcctttttttgttgttgttgagatggagtcttgcgctgttgcccaggctctagtgcaatggcacgatctctgctcactgtaacctctgcctcctgggttcaagcaattctcctgcctcagcttcccgcgtagcgtgtgccaccatgcctggctaatttttttttatacctttaatagaggcaggatgtcaccatgttttccaggctggtctcgagctcctgactcaggtgatctacctgcctcagcctcccaaagtgctgggattacaagtatgagccactgcatccggcccatctgtcttttaaaacatgtttttaattggaggtataatttctattagtgaaatgcacaggtctggtttacattttgatgagttttaactcatttaacattactatggaacccacctcctttgaagatacagagtatttctatcatccagaaagttctcctgtgctttcatgctgtcccgcactcccccagcagctgatgaacatgctgaggacattggtactggattctggccgccccaaaagagccgctttgaccaggcttacccagcactaaatccctgcctgctctctcaaaatttccatctttaaactggttgtacctataaccctccctcatcaagtcaatagataaacaaaccctgaaaaataaacaactcttcctggcc

SEQ ID NO: 138473 - DNA, 4155 bp, Homo sapiens
  Payload ID: 7120
  Gene Symbol: GOLGA6L4
  Gene Name: golgin A6 family-like 4
  ENST ID: ENST00000422563
  CDS Start-End: 63-1379
agttgcacagctgcctggtaggtgactggaggcattgagcagtgctcactggtatttcgctgatgtggccccaaccccgcttccctccccaccccgcgatgtcagaaaaaacacaacaggggaaattggccgcagccaagaaaaagttaaaagcatattggcagaggaagagccctggcattccagcaggagctaacaggaaaaagaaaatcaatggcagtagccctgacacagccacttctggtggttaccactcacctggggattcagcaacaggtatctacggggagggccgtgcatcctctactaccctggaggatctggagagccagtaccaagaactagcagtggccctggattcaagctccgcaataatcagtcaactcactgaaaacatcaattcactggttcgcacatctaaggaggagaagaagcatgagatacatctggtacagaagcttgggaggagcttgttcaaactcaaaaaccagacggctgaacccctggccccagagcccccagcagggccatctaaggtagagcagctacaagatgagaccaaccacctaaggaaggagctagagagtgtgggaagacagctccaggctgaggtggaaaacaatcagatgttgagtctcctgaacaggagacaggaggagaggctacgtgaacaggaggagaggctacgtgaacaggaggagaggctacgtgaacaggaggagaggctgtgtgaacaggaggagaggctacgtgaacaggaggagaggctgtgtgaacaggagaagctgccagggcaggagaggctgctggaagaggtggagaagctgttagaacaggagaggcggcaggaggagcaggagaggctgctggagagggagaggctgctggaagaggtggaggagctcctggagcaggagaggcttcggcaacaggatgagaggctgtggcagcaggagactctgcaggagctggagaggctgcgggagctggagaggctgcgggagctggagaggatgctggagctggggtgggaagccctgtacgagcagcgggccgagccacgcagcggcttcgaggagctgaacaacgagaacaagagcacactgcagttggagcagcaagtaaaggagctgaagaagtcgggtggagctgaagagccaagaggctccgagtctgcagcagcagccagaccagtagctggagccccagtcccacaaggagcttggatgtgcggacaagcagggtggactccccaggagcacccaggcttgagtggagaagctgttggtacaggagaggcggcaggaggagcaggagaggctgcatgccattcttttcgggctgcggagaacagggagctaaacatcaccatcatctaagagcgggtcaaggaattgaaaaaaaaaaacaaaacatttaaggggttaatatcctacacaattcatttacttcatttgaatgttagagccacttatgtttatttgtgtttctaatttatagtttaaatttatttgtgtttctaatttatagtttaaatttatttgtgtttctaatttatagtttaaatttatttgtgtttctaatttataatttaaatttatttgtaaaaagttaaatgagagtgggtgtttctctcatgttcactctggcatcttttagcatttttttaatttgataattataggacgttagcatgcatatcgagtttgcccttatgtggtgggagttcaaacacacaaagacccactgtatgcacacaactgttcttgctggtttgggataggctgccatgctttttgaatgttagtacagcctgtatattcattacggaattcagataaaatttccttatgttctgctgttatgtttgatcgaatcctaatcacagtgagctcttcattagctcaatatgcagtttgccctcaagtgcgcggtctattactttgtaatatgccactgtgagtactgacatttacagttgtttaaaggtggagcactggaaacagcctttccccctttttctgtgtattggggatgggagtaataacattttggggaggtttttaaatctcccagaagaggaaagtggcctgctttggcaggtgtgtgcaggatagaatatgtttcatttgttccggtgccaagaatgagcgctgtactacggtagttcccttaggatttgtatgtgctctgggctcatgaagatactgcctcatgagctgtggcagttgtactcttttttgatgacctgaaaagggattatttctgaggaatgaaaggctcccatcatgactgtggatgtggaaaaccttttctagctgagagcatttatatctacaatacattttaaagtcagcgttcatgttccctgttttaatcacatgactacatgtcccagtacacaaaagggcactggttggcgttctccttaatgtatttagtaaagatcagaagaaatcctttaagagtttaaatgcccctggaacaggcatatacaggctctagtcaagaatgaattcgagtgaaggaaagctgtgtgacacctggcattcctctgtgttcatggagcttatttgaggctagaagatggattttaccatctagacctctctggctaatagctagtcttcaaccatctgacataggaatttacttcttttccttgaatggagaacactttaaaaataataacaaacattattataaactaatatatgtgagagtacttagttgaaacaaaaaggagttttagtagacagtattatactacatttgaaaatcaaggagcagtttatgcaacgtaaaatgtttacaaactgcagcgcaatctactgtttgtgactgtcaaagtgtcatgaggaaagtgtctatacaatcacagagttatatttcctcacaaagttctttacgaagagtgaaatatgtttttatacctctcagtttcagttagaggcatattttgtgtaatatttatggcttaaaatggactaaaggtcctgttcttgccttgtctgaacttgccgcttttgcattctttgagttcagtttaaagacacttactttaactccattttaaaccctcgggctagaaatcgtaccactgttaattagccacgttatttggtctaacagtttttgtttatcattctgaaactgagcttatctaatacattgataaattatttcaaaggtatttttatagttcaaatcgcttcacttttaccctgacacgtataaatgaataggaatgaccttcagatagcgtttagcaactgtaaccaatctgacaataatgtgttcatcaggtacctgtggattaaatcacatactggcatatttaagatgaatgtcagtctgaaaaataaatatactatattaattcaaatacgactctttgtgtaggtattttgtcatatgtttaagaaaaagctaaagagaatggaaatcctatgacaataactcaagtctttcttcaaagtgcatgcagtcttttgcagtacctcattcagccaagtatttgttctctacctcattcagtataaggcagcctttaatttgcttagaaggcaacattagaaggttagagttcagcaggaacatagaattttaaaatgtgacttcaactgaataaatttgaatttctctagggagtaaagaatcaaaacacctatttaaagactgcaaaatatgataattatttttaaagtaattgattaaacctggtaggttttcccaaaatgaaaaacaatcagttctaaaaccaaagctgatttttagaaaatgtgaaaatgtaaatcaaccctatccataatagattctctaaaactttatcttacagtcactttcaaataactattcaaaaatgtaactgctatattaacgtcttaaaataatttaaaacattttaaaatatgaatactgtagtttaaaacaaagaatctaggggaaggaaaagtagacaaagaaatgccaattccagtccaaagctgtatttgccaagttttcttagaatgacttttaccgatttatgaattcttatacacagaatgcataatggaaatactgatttttgtctaaagtggcattattgactgcttctgtgatgctactgtaatgtaatacattattaaattgtttcaaggtgctgttttgcct

SEQ ID NO: 138474 - DNA, 4563 bp, Homo sapiens
  Payload ID: 7120
  Gene Symbol: GOLGA6L4
  Gene Name: golgin A6 family-like 4
  Uniprot ID: A6NEF3
  ENST ID: ENST00000510439
  CDS Start-End: 63-1787
agttgcacagctgcctggtaggtgactggaggcattgagcagtgctcactggtatttcgctgatgtggccccaaccccgcttccctccccaccccgcgatgtcagaaaaaacacaacaggggaaattggccgcagccaagaaaaagttaaaagcatattggcagaggaagagccctggcattccagcaggagctaacaggaaaaagaaaatcaatggcagtagccctgacacagccacttctggtggttaccactcacctggggattcagcaacaggtatctacggggagggccgtgcatcctctactaccctggaggatctggagagccagtaccaagaactagcagtggccctggattcaagctccgcaataatcagtcaactcactgaaaacatcaattcactggttcgcacatctaaggaggagaagaagcatgagatacatctggtacagaagcttgggaggagcttgttcaaactcaaaaaccagacggctgaacccctggccccagagcccccagcagggccatctaaggtagagcagctacaagatgagaccaaccacctaaggaaggagctagagagtgtgggaagacagctccaggctgaggtggaaaacaatcagatgttgagtctcctgaacaggagacaggaggagaggctacgtgaacaggaggagaggctacgtgaacaggaggagaggctacgtgaacaggaggataggctacatgaacaggaggagaggctacgtgaacaggaggagaggctgtgtgaacaggaggagaggctacgtgaacatgaggagaggctgtgtgaacaggaggagaggctatgtgaacaggaggagaggctacgtgaacaggaggagaggctacatgaacaggaggagaggctacgtgaacaggaggagaggctgtgtgaacaggaggagaggctacgtgaacaggaggagaggctgtgtgaacaggaggagaggctacgtgaacaggaggagaggctgtgtgaacaggagaagctgccagggcaggagaggctgctggaagaggtggagaagctgttagaacaggagaggcggcaggaggagcaggagaggctgctggagagggagaggctgctggaagaggtggagaagctgttagaacaggagaggcagcaggaggagcaggagaggctgctggagagggagaggctgctggaagaggtggagaagctgttagaacaggagaggcggcaggaggagcaggagaggctgctggagagggagaggctgctggacgaggtggaggagctcctggatgaggtggaggagctcctggagcaggagaggcttcggcaacaggatgagaggctgtggcagcaggagactctgcaggagctggagaggctgcgggagctggagaggctgcgggagctggagaggatgctggagctggggtgggaagccctgtacgagcagcgggccgagccacgcagcggcttcgaggagctgaacaacgagaacaagagcacactgcagttggagcagcaagtaaaggagctgaagaagtcgggtggagctgaagagccaagaggctccgagtctgcagcagcagccagaccagtagctggagccccagtcccacaaggagcttggatgtgcggacaagcagggtggactccccaggagcacccaggcttgagtggagaagctgttggtacaggagaggcggcaggaggagcaggagaggctgcatgccattcttttcgggctgcggagaacagggagctaaacatcaccatcatctaagagcgggtcaaggaattgaaaaaaaaaaacaaaacatttaaggggttaatatcctacacaattcatttacttcatttgaatgttagagccacttatgtttatttgtgtttctaatttatagtttaaatttatttgtgtttctaatttatagtttaaatttatttgtgtttctaatttatagtttaaatttatttgtgtttctaatttataatttaaatttatttgtaaaaagttaaatgagagtgggtgtttctctcatgttcactctggcatcttttagcatttttttaatttgataattataggacgttagcatgcatatcgagtttgcccttatgtggtgggagttcaaacacacaaagacccactgtatgcacacaactgttcttgctggtttgggataggctgccatgctttttgaatgttagtacagcctgtatattcattacggaattcagataaaatttccttatgttctgctgttatgtttgatcgaatcctaatcacagtgagctcttcattagctcaatatgcagtttgccctcaagtgcgcggtctattactttgtaatatgccactgtgagtactgacatttacagttgtttaaaggtggagcactggaaacagcctttccccctttttctgtgtattggggatgggagtaataacattttggggaggtttttaaatctcccagaagaggaaagtggcctgctttggcaggtgtgtgcaggatagaatatgtttcatttgttccggtgccaagaatgagcgctgtactacggtagttcccttaggatttgtatgtgctctgggctcatgaagatactgcctcatgagctgtggcagttgtactcttttttgatgacctgaaaagggattatttctgaggaatgaaaggctcccatcatgactgtggatgtggaaaaccttttctagctgagagcatttatatctacaatacattttaaagtcagcgttcatgttccctgttttaatcacatgactacatgtcccagtacacaaaagggcactggttggcgttctccttaatgtatttagtaaagatcagaagaaatcctttaagagtttaaatgcccctggaacaggcatatacaggctctagtcaagaatgaattcgagtgaaggaaagctgtgtgacacctggcattcctctgtgttcatggagcttatttgaggctagaagatggattttaccatctagacctctctggctaatagctagtcttcaaccatctgacataggaatttacttcttttccttgaatggagaacactttaaaaataataacaaacattattataaactaatatatgtgagagtacttagttgaaacaaaaaggagttttagtagacagtattatactacatttgaaaatcaaggagcagtttatgcaacgtaaaatgtttacaaactgcagcgcaatctactgtttgtgactgtcaaagtgtcatgaggaaagtgtctatacaatcacagagttatatttcctcacaaagttctttacgaagagtgaaatatgtttttatacctctcagtttcagttagaggcatattttgtgtaatatttatggcttaaaatggactaaaggtcctgttcttgccttgtctgaacttgccgcttttgcattctttgagttcagtttaaagacacttactttaactccattttaaaccctcgggctagaaatcgtaccactgttaattagccacgttatttggtctaacagtttttgtttatcattctgaaactgagcttatctaatacattgataaattatttcaaaggtatttttatagttcaaatcgcttcacttttaccctgacacgtataaatgaataggaatgaccttcagatagcgtttagcaactgtaaccaatctgacaataatgtgttcatcaggtacctgtggattaaatcacatactggcatatttaagatgaatgtcagtctgaaaaataaatatactatattaattcaaatacgactctttgtgtaggtattttgtcatatgtttaagaaaaagctaaagagaatggaaatcctatgacaataactcaagtctttcttcaaagtgcatgcagtcttttgcagtacctcattcagccaagtatttgttctctacctcattcagtataaggcagcctttaatttgcttagaaggcaacattagaaggttagagttcagcaggaacatagaattttaaaatgtgacttcaactgaataaatttgaatttctctagggagtaaagaatcaaaacacctatttaaagactgcaaaatatgataattatttttaaagtaattgattaaacctggtaggttttcccaaaatgaaaaacaatcagttctaaaaccaaagctgatttttagaaaatgtgaaaatgtaaatcaaccctatccataatagattctctaaaactttatcttacagtcactttcaaataactattcaaaaatgtaactgctatattaacgtcttaaaataatttaaaacattttaaaatatgaatactgtagtttaaaacaaagaatctaggggaaggaaaagtagacaaagaaatgccaattccagtccaaagctgtatttgccaagttttcttagaatgacttttaccgatttatgaattcttatacacagaatgcataatggaaatactgatttttgtctaaagtggcattattgactgcttctgtgatgctactgtaatgtaatacattattaaattgtttcaaggtgctgttttgcct

SEQ ID NO: 138475 - DNA, 670 bp, Homo sapiens
  Payload ID: 7120
  Gene Symbol: GOLGA6L4
  Gene Name: golgin A6 family-like 4
  ENST ID: ENST00000512109
  CDS Start-End: 1-585
ttaaaagcatattggcagaggaagagccctggcattccagcaggagctaacaggaaaaagaaaatcaatggcagtagccctgacacagccacttctggtggttaccactcacctggggattcagcaacaggtatctacggggagggccgtgcatcctctactaccctggaggatctggagagccagtaccaagaactagcagtggccctggattcaagctccgcaataatcagtcaactcactgaaaacatcaattcactggttcgcacatctaaggaggagaagaagcatgagatacatctggtacagaagcttgggaggagcttgttcaaactcaaaaaccagacgggtggagctgaagagccaagaggctccgagtctgcagcagcagccagaccagtagctggagccccagtcccacaaggagcttggatgtgcggacaagcagggtggactccccaggagcacccaggcttgagtggagaagctgttggtacaggagaggcggcaggaggagcaggagaggctgcatgccattcttttcgggctgcggagaacagggagctaaacatcaccatcatctaagagcgggtcaaggaattgaaaaaaaaaaacaaaacatttaaggggttaatatcctacacaattcatttacttcatttgaatgtta

SEQ ID NO: 138476 - DNA, 4013 bp, Homo sapiens
  Payload ID: 7121
  Gene Symbol: GOLGA6L6
  Gene Name: golgin A6 family-like 6
  ENST ID: ENST00000619213
  CDS Start-End: 92-2266
attctagtgcagccctggttacgcctcctctggctcagtcacacagcgacgtagaggtgactggaggtatatacttgtcctcacctggatcatgctgatgtggccccaaccccacctccctacccatccccacctccctacccatccccacctccctacccatccccacctccctacccatccccacctccctacccatcctatgatgtccaaagaaaccagacagagcaaattggccgaggccaaggaacagttgacagaccatcatccccagaccaaccctagtgttggtacagcagcaagcgacaccaaaaagaagaaaataaataatggcactaaccctgagacaaccacttctggtggttgccactcgcctgaggatgaacagaaggcaagccatcaacatcaggaagccctaaggagggagctagaggcccaggttcataccatacgaatccttacatgtcagaaaactgagcttcagatggcactctactacagccagcatgctgtcaagcagttggaaggagaggccagggatctgatcagccgcctgcatgattcatggaagtttgcaggagagttagagcaggctctctctgctgtcgctacacagaagaagaaggcagataggtacattgaggagttaacaaaggagagggacgccctgagtctggaactgtacaggaacacgataactgatgaggagctgaaggagaaaaatgccgaactacaagaaaaacttcaacttgtagaatctgaaaagtctgagatccagctcaacgtaaaggagctaaaaaggaaactggagagggccaagctcctgctgccacagcagcagctgcaggcggaggctgaccacctgggtaaggagctgcagagtgtgtcagcaaagctccaagcccaggtggaagagaacgagttgtggaaccgcctgaaccagcaacaggaggagaagatgtggaggcaggaggagaagatacaggagtgggaggagaagatacaggagcaggaggagaagatacgggagcaggaggagaagatacgggagcaggaggagaagatgcggaggcaggaggagatgatgtgggagaaggaggagaagatgcggaggcaggaggagatgatgtgggagaaggaggagaagatgcggaggcaggaggagatgatgtgggagaaggaggagaagatacgggagctggaagagaagatgcacgagcaggagaagatacgggagcaggaagagaagaggcaggaggaggagaagatacgcgagcaggagaagaggcaggagcaggaggcgaagatgtggaggcaggaggagaagatacgggagcaggaagagaagatacgggagcaggagaaaaagatgtggaggcaggaggagaagattcatgagcaggagaagatacgggaggaggagaagaggcaggagcaggaggagatgtggaggcaggaggagaagataagggagcaggaggagatatggaggcaaaaggagaagatgcacgagcaggaggagaagatacggaagcaggaggagaaggtgtggaggcaggaggagaagatacgggagcaggaggagaagatacgggagcaggaggagaagatgtggaggcaggaggagaagatacgggagcaggaggagatgtggagggaggaagagaagatgcatgagcaggagaagatatgggaggaggagaagaggcaggagcaggaggataagatgtggaggcaggaggagaagatacgggagcaggaggagaaggtgtggaggcaggaggagaagatacgggagcaggaggaaaagaggcaggagcaggaggagaagatgtggaagcaggaggagaagataagggagcaggaggagaagatacgggagcaggaggagaagatacgggagcaggaggagaagatacgagagcaggaggagatgacgcaggaacaggaagagaagatgggggagcaggaggagaagatgtgtgagcaggaagagaagatgcaagaacaggaggagacgatgtggaggcaggaggagaagataagggagcaggagaagaagatacgggagcaggaggagaagatacgagagcaggaggagatgatgcaggaacaggaagagaagatgtgggagcaggaggagaagatgtgtgagcaggaagagaagatgcaagaacaggaggagaagatgcggaggcaggaggagaagatgtgggagcaggaagtgaggctgcggcagcaggaggagaagatgcaggaacactaggagcacctggaagctgccatctaatgagcacatgacaagaaggcaaagacaataaacatgtaaaagccggcagcaaggcctggagaagagtaagccgccatgtgactgtttagaatatagtctgagcacaaacctgaaaaaaaaattttatttattttaaattgtggcaaaatactggccaggcatggtagctcacgcctgtaatcctagcaatttgggaggccgaggtaaatggatgacctgaggtcaagagttcaagaccagcctggccaatacaaaaattagccgggcatggtggcgcatgcctgtaatcccagctacttgggaggctgaggcaggagaatcgcttgaacctgggaggcagaggttgcagtgagctgagatcgtgccactgcactcaagcctggtgacagagcgaaactccgtctcaaaaaaaaaagtttcttccttacatgtatgtttctattagttttcttcttggtctttctcatttagtcttgtgttgtcttttgacattcatagtaaacttttatctgcctccagagagtattgactttgagtttatggcacacaattggagtaagggcagatcgccttcatctactttgggactaagctggttcaaagcaggttttaggttttctgatggctggtctatgttttattcatttggactcccaggggtggcccttccagggtccccaccaaggtcccatctccttcctgggacccaaattctcattaggtcatttcagccctgtgagagtgccaaacattcagctaggctctccagcctcttaactaccacttcatactcagtttcttagcctcttagccctctactgttgaccaatcaccaaatgtgggaaagcactacagactgtcaggatcacctcctaggcctggtcactcaagtcctgactgaggtctccaattaccttccaacaattgtttttgattgggggcggggcacatttttatccagtttttctaactgctcttgtggggaggcgaatccgtaacaagctcctctgcctttactgaaagttgaaaaccttcatctgtcctttttttgttgtttttgagatggagtattgcgctgttgcccaggctctagtgcaatggcacgatctctgctcactgtaacctctgcctcctgggttcaagcaattctcctgcctcagcttcccgagtagcgtgtgccaccatgcctggctaatttttttttatacctttaatagaggcaggatttcaccatgttttccaggctggtctcgagctcctgactcaggtgatctacctgcctcagcctcccaaagtgctgggattacaagtatgagccactgcatctggcccatctgtcttttaaaacatgtttttaattggaggtataatttctattagtgaaatgcacaggtctggtttacattttgatgagttttaactcatttaacattactatggaacccacctcctttgaagatacagagtatttctatcatccagaaagttctcctgtgctttcatgctgtcccgcactcccccagcagctgatgaacatgctgaggacattggtactggattctggccgccccaaaagagccgctttgaccaggcttacccagcactaaatccctgcctgctctctcaaaatttccatctttaaactggttgtacctataaccctccctcatcaagtcaatagataaacaaaccctgaaaaataaacaactcttcctggcccagc

SEQ ID NO: 138477 - DNA, 1710 bp, Homo sapiens
  Payload ID: 7122
  Gene Symbol: GOLGA6L9
  Gene Name: golgin A6 family-like 9
  Uniprot ID: A6NEM1
  ENST ID: ENST00000620574
  CDS Start-End: 61-1359
ttgcacagctgcctggtaggtgactggaggcattgagcagtgctcactggtatttcgctgatgtggccccaaccccgcctccctccccaccccgcgatgtcagaaaaaacacaacaggggaaattggccgcagccaagaaaaagttaaaagcatattggcagaggaagagccctggcattccagcaggagctaacaggaaaaagaaagtcaatggcagtagccctgacacagccacttctggtggttaccactcacctggggattcagcaacaggtatctacggggagggccgtgcatcctctactaccctgcaggatctggagagccagtaccaagaactagcagtagccctggattcaagctccgcaataatcagtcaactcactgaaaacatcaattcactggttcgcacatctaaggaggagaagaagcatgagatacatctggtacagaagcttgggaggagcttgttcaaactcaaaaaccagacggctgaacccctggccccacagcccccagcagggccatctaaggtggagcagctacaagatgagaccaaccacctaaggaaggagctagagagtgtgggaagacagctccaggctgaggtggaaaacaatcagatgttgagtctcctgaacaggagacaggaggagaggctacgtgaacaggaggagaggctacgtgaacaggaggagaggctgtgtgaacaggaggagaggctgtgtgaacaggaggagaggctacgtgaacaggaggagaggctgtgtgaacaggagaagctgccagggcaggagaggctgctggaagaggtggagaagctgttaaaacaggagaggcggcaggaggagcaggagaggctgctggagagggagaggctgctggacgaggtggaggagctcctggagcaggagaggcttcggcaacaggatgagaggctgtggcagcaggagactctgcgggagctggagaggttgcgggagctggagaggatgctggagctggggtgggaagccctgtacgagcagcgggccgagccacgcagcggcttcgaggagctgaacaacgagaacaagagcacactgcagttggagcagcaagtaaaggagctggagaagtcgggtggagctgaagagccaagaggctccgagtctgcagcagcagccagaccagtacctggagccccagtcccacaaggagcttggatgtgcggacaagcagggtggactccccaggagcacccaggcttgagtggagaagctgttggtacaggagaggcggcaggaggagcaggagaggctgcatgccattcttttcgggctgccgagaacagggagctaaacatcaccatcatctaagagcgggtcaagaaattgaaaaaaaaaaacaaaacatttaaggggttaatatcctacacaattcatttacttcatttgaatgttagagccacttatgtttgtgtttctaatttatagtttaaatttatttgtgtttctaatttatagtttaaatttatttgtttctaatttatagtttaaatttatttgtgtttctaatttatagtttaaatttatttgtgtttctaatttataatttaaatttatttgtaaaaagttaaatgagagtgggtctttctctcatgttcactctggcatcttttagcatttttttaatttgataattataggacgttagcatgcatatcgagt

SEQ ID NO: 138478 - DNA, 1710 bp, Homo sapiens
  Payload ID: 7122
  Gene Symbol: GOLGA6L9
  Gene Name: golgin A6 family-like 9
  Uniprot ID: A6NEM1
  ENST ID: ENST00000618348
  CDS Start-End: 61-1359
ttgcacagctgcctggtaggtgactggaggcattgagcagtgctcactggtatttcgctgatgtggccccaaccccgcctccctccccaccccgcgatgtcagaaaaaacacaacaggggaaattggccgcagccaagaaaaagttaaaagcatattggcagaggaagagccctggcattccagcaggagctaacaggaaaaagaaaatcaatggcagtagccctgacacattcacttctggtggttaccactcacctggggattcagcaacaggtatctacggggagggccgtgcatcctctactaccctgcaggatctggagagccagtaccaagaactagcagtagccctggattcaagctccgcaataatcagtcaactcactgaaaacatcaattcactggttcgcacatctaaggaggagaagaagcatgagatacatctggtacagaagcttgggaggagcttgttcaaactcaaaaaccagacggctgaacccctggccccacagcccccagcagggccatctaagatggagcagctacaagatgagaccaaccacctaaggaaggagctagagagtgtgggaagacagctccaggctgaggtggaaaacaatcagatgttgagtctcctgaacaggagacaggaggagaggctacgtgaacaggaggagaggctacgtgaacaggaggagaggctgtgtgaacaggaggagaggctgtgtgaacaggaggagaggctacgtgaacaggaggagaggctgtgtgaacaggagaagctgccagggcaggagaggctgctggaagaggtggagaagctgttagaacaggagaggcggcaggaggagcaggagaggctgctggagagggagaggctgctggacgaggtggaggagctcctggagcaggagaggcttcggcaacaggatgagaggctgtggcagcaggagactctgcgggagctggagaggctgcgggagctggagaggatgctggagctggggtgggaagccctgtacgagcagcgggccgagccacgcagcggcttcgaggagctgaacaacgagaacaagagcacactgcagttggagcagcaagtaaaggagctggagaagtcgggtggagctgaagagccaagaggctccgagtctgcagcagcagccagaccagtagctggagccccagtcccacaaggagcttggatgtgcggacaagcagggtggactccccaggagcacccaggcttgagtggagaagctgttggtacaggagaggcggcaggaggagcaggagaggctgcatgccattcttttcgggctgccgagaacagggagctaaacatcaccatcatctaagagcgggtcaagaaattgaaaaaaaaaaacaaaacatttaaggggttaatatcctacacaattcatttacttcatttgaatgttagagccacttatgtttgtgtttctaatttatagtttaaatttatttgtgtttctaatttatagtttaaatttatttgtttctaatttatagtttaaatttatttgtgtttctaatttatagtttaaatttatttttgtttctaatttataatttaaatttatttgtaaaaagttaaatgagagtgggtctttctctcatgttcactctggcatcttttagcatttctttaatttgataattataggacgttagcatgcatatcgagt

SEQ ID NO: 138479 - DNA, 2027 bp, Homo sapiens
  Payload ID: 7123
  Gene Symbol: GOLGA7
  Gene Name: golgin A7
  Uniprot ID: Q7Z5G4
  ENST ID: ENST00000357743
  CDS Start-End: 202-615
cgcggggcctgggccaggcggcagctaaggcccgcggtgacagcatgggtgaaggggagcggggcagaggaggccttgggctgttttcggcggcgggtgggggcgaggggctggcgggtcagagtcccgggtccaggccggggctctgactcgcggttggtgttcccccgaccccgcagcgcggggtgtcctgtcctcgccatgaggccgcagcaggcgccggtgtccggaaaggtgttcattcagcgagactacagcagtggcacacgctgccagttccagaccaagttccctgcggagctggagaaccggattgataggcagcagtttgaagaaacagttcgaactctaaataacctttatgcagaagcagagaagctcggcggccagtcatatctcgaaggttgtttggcttgtttaacagcatataccatcttcctatgcatggaaactcattatgagaaggttctgaagaaagtctccaaatacattcaagagcagaatgagaagatctatgctccacaaggcctcctcctgacagaccctattgagcgaggactgcgagttattgaaattaccatttatgaagacagaggcatgagcagtggaagataaaccgaagaattaaagatcccacttccagccgggcccctcatgtatccactggccgaccgcagagtgtccctacctcctctccagagcatcattcctttctatctgctgccagagccacggtgccatttactccaaggactcactttctaaaattccacacctggagtgacctctagtcgctcagcatccactttgtgtctccaaattgtgtaggactctgtaatcttttgattagtttctgagaaaacacaatgaagcacttcacttttttttattcaaagccatttaataaaacacagttggtcagcccagtgcaaagcttgttatctgccaccagtacataccattggttctcttcattccttgggccagcttctcaggtggctttagacctcaacaagccgtatcttcaccagtgttctatcttgttcccctaaattaataaaatgtttttctccaggattttggtgagggttggctgtggctgtcgttttgcacctcccagatttcaaagaattactggttttaccatgactcaaatcttaagatctgtttctactattcagttcctcaaactgaagcttattgaaaaaaaaatgtataatgttatttgttttattatagcaattatgcctaattaaagcagtatttaatgcaatttccagttatttctttggagaattttatgtcattgttccattaccttgaatgttggaaagatatgatacgtgctgcttgttcatcacaaaaatcagtaagcacaataaagtggatgccaaaccatcagacacataaatgttcccgctgtgtccctggatatggaataagcaggtataaaaaatattttaattatagttttgttataaatataacttatgagaaaaaaatttgataggaataatactgtatattactaatttttaactatccctaaggcaaaccttatgacccacagaattttctcatatacagtattcagtgcacagaaatcttatgattggctcaagtacagtaagttacttctcagtaaaactctcaagtctgagtccatatttgtagctctgcttttggctgtacgttcctaggatcggggctgcttatgcctttcgtttatccttggggtttgagagcgctgtatttgggagagagtttaaaaatacattaggagagagaaaccattaaaagtttcactgtcagatatattgtaggtgctaatactggatttcgtctcagatttaatttcttttatgggtctgttagtcattcaacaaatcccataagtatgtgttaatattttaattgtgtaaaactcatttgttactttacagcctgtaatagtgtgtctgcattttcaacctgttgcaataactttgctgaaatattaacacattaataaaacttttcttaaacaa

SEQ ID NO: 138480 - DNA, 1903 bp, Homo sapiens
  Payload ID: 7123
  Gene Symbol: GOLGA7
  Gene Name: golgin A7
  Uniprot ID: Q7Z5G4
  ENST ID: ENST00000405786
  CDS Start-End: 79-483
aggacgtaagtgacggcgaaggcggtgcgacagcagctggagggcagaggaggcggcgcggggtgtcctgtcctcgccatgaggccgcagcaggcgccggtgtccggaaaggtgttcattcagcgagactacagcagtggcacacgctgccagttccagaccaagttccctgcggagctggagaaccggattgataggcagcagtttgaagaaacagttcgaactctaaataacctttatgcagaagcagagaagctcggcggccagtcatatctcgaaggttgtttggcttgtttaacagcatataccatcttcctatgcatggaaactcattatgagaaggttctgaagaaagtctccaaatacattcaagagcagaatgagaagatctatgctccacaaggcctcctcctgacagaccctattgagcgaggactgcgagtttttagattgaaattaccatttatgaagacagaggcatgagcagtggaagataaaccgaagaattaaagatcccacttccagccgggcccctcatgtatccactggccgaccgcagagtgtccctacctcctctccagagcatcattcctttctatctgctgccagagccacggtgccatttactccaaggactcactttctaaaattccacacctggagtgacctctagtcgctcagcatccactttgtgtctccaaattgtgtaggactctgtaatcttttgattagtttctgagaaaacacaatgaagcacttcacttttttttattcaaagccatttaataaaacacagttggtcagcccagtgcaaagcttgttatctgccaccagtacataccattggttctcttcattccttgggccagcttctcaggtggctttagacctcaacaagccgtatcttcaccagtgttctatcttgttcccctaaattaataaaatgtttttctccaggattttggtgagggttggctgtggctgtcgttttgcacctcccagatttcaaagaattactggttttaccatgactcaaatcttaagatctgtttctactattcagttcctcaaactgaagcttattgaaaaaaaaatgtataatgttatttgttttattatagcaattatgcctaattaaagcagtatttaatgcaatttccagttatttctttggagaattttatgtcattgttccattaccttgaatgttggaaagatatgatacgtgctgcttgttcatcacaaaaatcagtaagcacaataaagtggatgccaaaccatcagacacataaatgttcccgctgtgtccctggatatggaataagcaggtataaaaaatattttaattatagttttgttataaatataacttatgagaaaaaaatttgataggaataatactgtatattactaatttttaactatccctaaggcaaaccttatgacccacagaattttctcatatacagtattcagtgcacagaaatcttatgattggctcaagtacagtaagttacttctcagtaaaactctcaagtctgagtccatatttgtagctctgcttttggctgtacgttcctaggatcggggctgcttatgcctttcgtttatccttggggtttgagagcgctgtatttgggagagagtttaaaaatacattaggagagagaaaccattaaaagtttcactgtcagatatattgtaggtgctaatactggatttcgtctcagatttaatttcttttatgggtctgttagtcattcaacaaatcccataagtatgtgttaatattttaattgtgtaaaactcatttgttactttacagcctgtaatagtgtgtctgcattttcaacctgttgcaataactttgctgaaatattaacacattaataaaacttttctt

SEQ ID NO: 138481 - DNA, 808 bp, Homo sapiens
  Payload ID: 7123
  Gene Symbol: GOLGA7
  Gene Name: golgin A7
  Uniprot ID: Q7Z5G4
  ENST ID: ENST00000518270
  CDS Start-End: 194-607
gcggaaggcggggtcggccctggccccgcccacatcatttcccttcctcggcccagccccacagcgcgcagcttcggcagggtggctttacggccggaggagagggtgggtcccagacctgaggtaggaggccgagctgaggggcggggaagaggctttttgcggcaggaccgcggggtgtcctgtcctcgccatgaggccgcagcaggcgccggtgtccggaaaggtgttcattcagcgagactacagcagtggcacacgctgccagttccagaccaagttccctgcggagctggagaaccggattgataggcagcagtttgaagaaacagttcgaactctaaataacctttatgcagaagcagagaagctcggcggccagtcatatctcgaaggttgtttggcttgtttaacagcatataccatcttcctatgcatggaaactcattatgagaaggttctgaagaaagtctccaaatacattcaagagcagaatgagaagatctatgctccacaaggcctcctcctgacagaccctattgagcgaggactgcgagttattgaaattaccatttatgaagacagaggcatgagcagtggaagataaaccgaagaattaaagatcccacttccagccgggcccctcatgtatccactggccgaccgcagagtgtccctacctcctctccagagcatcattcctttctatctgctgccagagccacggtgccatttactccaaggactcactttctaaaattccacacctggagtgacctctagtcgctcagcatccactttgtgtctc

SEQ ID NO: 138482 - DNA, 1984 bp, Homo sapiens
  Payload ID: 7123
  Gene Symbol: GOLGA7
  Gene Name: golgin A7
  Uniprot ID: Q7Z5G4
  ENST ID: ENST00000520817
  CDS Start-End: 159-572
tttacggccggaggagagggtgggtcccagacctgaggtaggaggccgagctgaggggcggggaagaggctttttgcggcaggacgtaagtgacggcgaaggcggtgcgacagcagctggagggcagaggaggcggcgcggggtgtcctgtcctcgccatgaggccgcagcaggcgccggtgtccggaaaggtgttcattcagcgagactacagcagtggcacacgctgccagttccagaccaagttccctgcggagctggagaaccggattgataggcagcagtttgaagaaacagttcgaactctaaataacctttatgcagaagcagagaagctcggcggccagtcatatctcgaaggttgtttggcttgtttaacagcatataccatcttcctatgcatggaaactcattatgagaaggttctgaagaaagtctccaaatacattcaagagcagaatgagaagatctatgctccacaaggcctcctcctgacagaccctattgagcgaggactgcgagttattgaaattaccatttatgaagacagaggcatgagcagtggaagataaaccgaagaattaaagatcccacttccagccgggcccctcatgtatccactggccgaccgcagagtgtccctacctcctctccagagcatcattcctttctatctgctgccagagccacggtgccatttactccaaggactcactttctaaaattccacacctggagtgacctctagtcgctcagcatccactttgtgtctccaaattgtgtaggactctgtaatcttttgattagtttctgagaaaacacaatgaagcacttcacttttttttattcaaagccatttaataaaacacagttggtcagcccagtgcaaagcttgttatctgccaccagtacataccattggttctcttcattccttgggccagcttctcaggtggctttagacctcaacaagccgtatcttcaccagtgttctatcttgttcccctaaattaataaaatgtttttctccaggattttggtgagggttggctgtggctgtcgttttgcacctcccagatttcaaagaattactggttttaccatgactcaaatcttaagatctgtttctactattcagttcctcaaactgaagcttattgaaaaaaaaatgtataatgttatttgttttattatagcaattatgcctaattaaagcagtatttaatgcaatttccagttatttctttggagaattttatgtcattgttccattaccttgaatgttggaaagatatgatacgtgctgcttgttcatcacaaaaatcagtaagcacaataaagtggatgccaaaccatcagacacataaatgttcccgctgtgtccctggatatggaataagcaggtataaaaaatattttaattatagttttgttataaatataacttatgagaaaaaaatttgataggaataatactgtatattactaatttttaactatccctaaggcaaaccttatgacccacagaattttctcatatacagtattcagtgcacagaaatcttatgattggctcaagtacagtaagttacttctcagtaaaactctcaagtctgagtccatatttgtagctctgcttttggctgtacgttcctaggatcggggctgcttatgcctttcgtttatccttggggtttgagagcgctgtatttgggagagagtttaaaaatacattaggagagagaaaccattaaaagtttcactgtcagatatattgtaggtgctaatactggatttcgtctcagatttaatttcttttatgggtctgttagtcattcaacaaatcccataagtatgtgttaatattttaattgtgtaaaactcatttgttactttacagcctgtaatagtgtgtctgcattttcaacctgttgcaataactttgctgaaatattaacacattaataaaacttttcttaaacaa

SEQ ID NO: 138483 - DNA, 6447 bp, Homo sapiens
  Payload ID: 7124
  Gene Symbol: GOLGA7B
  Gene Name: golgin A7 family, member B
  Uniprot ID: Q2TAP0
  ENST ID: ENST00000370602
  CDS Start-End: 66-569
cggggtcagcaccgcggagacccccctcgcccggccccgcgacagcctccgagcgcccccggatcatggccaccgaggtccacaatctgcaggagctccggcgaagtgcctcactggccaccaaggtctttatccagagagactacagcgatgggaccatctgtcagttccagaccaaattccccccagagctggacagccggatcgagcggcagctctttgaagagactgtgaagaccctcaacggattttacgcagaggctgagaagattgggggcagctcctacctcgagggctgcctggcctgcgccacggcctacttcatcttcctctgcatggagacccactatgagaaggttctcaagaagatttcccgctacatccaggagcagaatgagaagatctttgcacctcgaggcctcctacttacagaccctgtggagcgtgggatgagggttattgagatctccatctacgaggaccggtgcagcagtggcagctccagcagcggcagcagcagcggcagtggcagcagcagcggtgggggtggtggggcgggggcccggtgactggccgagagtccctgtagggaggtgtatggccggagtgagggccttgcagacctgcggcggctgcgctaccagagcacccgcttctgagtcattctttgggctcaccctgctgcccggggtgggagggagggtgacgggcctcatatttcctgtgggccatcaacctatgccccctgtccctcacccccgtctggatcagtccatttcctgacctgggggcttttccttcccgatggggctggtctgggccacacagagacagatcttcctaggaaggctggggtggggagaacacaacctaggcggcccctctcttccacagcccctctcccaaccctgcgaggggggccgaggcctgccacatagaggactcccacactgcatgacccctcatcccaaacccatatccaccaggactctttcccttgggccctgcgtcccgtggctgtctcccagtatctgttccttctcatgcccctgcagggccccggcctgtctatgatcctgcctccaccaaattcaaggtgtggggagacgggtgccgtggttgggagctgttcagcgcactcctgacctcttctagacctatggctttcctgtcctgcattcagagctagaggccagctcggccttgcgagaagcatccaactttgagactttgcaggctgccaggtgctggttggggggcacagagcctggggctctgggaggtaatatgggggtctgggaaactccgtgaagagacatagccatgcggggcctgaatctcctgaactacagccagtttcctgagattagaacctgtgtgtatgcacatgtgaatgtatgtgtgagtgcacatgtgtgtaagtgcagtgtgcgtaaatgtgtgagtctgcgtgtgttagcatgcctgtatgtgagcgcgtgtgtgagcgcatgtgtgtgcaccagtgcacaagtgtatgaatgtggacacatttataagcacacctgtgtgtgtctgagtacatgtgcacacacgtgtgcacaaatgtgcatttatatgagtgtgagtgcatgcatgtgcatgaacatgtgtgcacaagcatgtgtgtatgagtgttcatgtgtatgagtgtgtgtgtatgcaggtgagtgcatgtgtgtgtgagtgtgtttgtgtgttccccttggctgccaggccaacgactgcttctctgcatcctgctgtcttcgctacctgagggtctgtgacttcttccctgtgtgggtccagcctgaccccctgtaagtaaatgtccaaaagccccttgcccctcccctagggctaccagggaacatactctactgcatatgttctagtggaagagaagccggggttctaggaaagaagagccaaactttggtggcctttggtgccccctctcagctccccatgacaagacaacggggctgcagacactgtgtgttcagcctgcccaggggctggggctctttaaggctttgtaggtgaggtttccatggaccttcaaaggtgccagcagcctgcaggggaaaggcaaactccctccttgcaaggaaaggagatgtccagccaatgatgcccggcttctgaggcccagaggagcaggtgggatgggagcagcccctggggctggtgtcccgaagatgaaatgaagggggctgcctatctcagttggcgggaggtgttagaagtggatgtgcaagaccagccactggaggtagctctctggagtcaaagagaggcctgcttttctaccagacatgggagcagcatgtaggatacaagggcctacccagagaccagagagagtcagcctagtccttgcagcctcaggaagtcctcggcccaagtgagtcctggtccaaggatccccctggagagccgcagttcagtgggctccaccgcagcccctggccacggcctatgccctccctgggcccctgtggggctgggcattgtgtctgacctgtgcatctcccatgggagggctgggcacaggcagtgctatggccttttttttttttttctttttccaataaaagaacttgcccagcgtgaagctctgtgatgctttctctgccccgtgacgatggagggtcagttctatgctccaggaccacatgaggggatactcagctgcctgaactggacctgacatggggagcaggatgaactctgtcttcttggagcttgcagtctactgaagaggcagacacctcagcatctctaatctggaatctttggggcacttgtagccttgggtgggggaacaggttggactgaaagcgaggccaaaagtaatcaattaatgatatcaataaatcctcatttcttgagctcttcccctgggttgggtcctgttgggagctggatcacacaggtcactcagtactgaagatgagaaagtagctggatgatcacttctcggccttttggccaagatcaaatatggagaaagtagctggatgttggaacctagcagagttgtgtcttgaattttataatttattgagcacctactatgtgccagatactttgctgaaaccatatgttagagctggcaggggatttaaagatcacttgaatcctgtcacagaggtccagagagggtgggtgacttgccctaggccacacagctggttgatgataacagggcccaagcttggaacccaggtctcctgactcagtgcccactctgttaccacagggatggcacccagatgggaagctgcctgaggctgcagggaggctgggatcacaaactcaggcctgttcccagagaggggctcatcagactgtggggacaacggctccagcctcttaggtgggggctgggcagtcccctctgggtggttctcatgtttgttgtcactgccgctaagggctgcagtgagctgtgtgcagcctggactcactccctctgctggaacctgggccgtgtgtgggttgccacaagtgagcgtgttctctaatatgagggcaggttcattctgttttgggataggaagtttgttctaccccgaggccagatttgaatccaaactcagctcttctagagatgaggtcctggggagggggtgaggatttactaaacgggtaaaaccaaatctgggtgcttatctgactgagaggcattcaacccttccattttcaaatggtaatcataataataatagtagctgacgtttatttagcacttcctatgtgccaggcactaggctaagactctacataattagtcattcaattctcacagcaaccctctatggcatggattcttatttcccattttacatatggggaaactgaggctcatggacgttaagtaactgggaaattgcagatcttggctttgaatctaggcaatctgactccaaactgcaaggaagaagacagatccagcctcagaggccgcttaacagcttgagggcctcagccgtcctgggattaggatcaggcagattcccagggaaggacttggagccatgcctgggttttgaggccgggctggcacctccacttccagggcatcacgggagggtgcatgggctgtgctcgcaggcatgcgggacccagaggcagcccggtgaagggtagtgggggactcgactcactgtgggcctggggaggtgtggtttctctctgctggcttagttacaggtggtggcctgtctctccggggtctggctgtagccatgtccctgcacccaccttgccagccagggacaggccccatcaagacccaggagcagctccagcctcagccagactgtccccgaggtcccaagtgaggccccagccactcaggcatgcctcaggaagctcctgctgcacatgctcctctccctgcgccagcaccctgctgtctggcttccttcctttggccacagggcgggtgtgtgtgaaaccacagggtttacagaagctcgaggtgccactgagtggcaggattatgcactgcactcggggaatcaaaggtggagacagaaagaactatggctgttgtgacacgtcccccacggctccccggttggcagccactgccacccgcagggacttttctgtggcttccagaggtgtggggcaaaggtggagtctggtgactttctccctagggccagcccctgggctgtcgagcctgggaaactccacatccctctccacacctctagaaggactcacaatgaggggggcccagacaggaggcatcaccacctggtttgggctttaccattcacccagggataaggcaaggcaaacaccactccacatcagatctgaatttgagctctggcttcatgacactgacacatgaagactcttggagcctcagattccccagttgttaaatagggagactaatatctcacagagttgtttagacccgaggcgttcaaccttggtggcaatggatgtcaactggaagcatgaaaaatcaccaatgcctgatcctatcctcagagattctgatttaattgttttgggggacagcttgggcatcaggattttaaagagtttccctggtgattttaatgtgaaggtaaggctgagaatccctggttttgacagtacctatagcctataagcctttaatacacctctgaaaatgcctgagacctgaataagaagtttatggttccacagaagcagccagacacaaaaatgcatatgcaccatgtgattccccttatatgaaactgaaagacaggccaaactcgcctttgattgggagtcaggatcaagattaccctgggtcgggggtagcgaatggatggggacctggggggcttctgggagctcaggatgttctgtttcttgatcagagtgccagttacacggggtgctcacttcatgagaattcactgagctgtatacttaagagctgtgtatttgtctgtactggtgatatatttcaataaaattcaccagaaaagcctgttggctacaaaataggaaaagaaaggacacacttgaaattaacgttttgttaaatatctggaaatgtaacacatatgccaaacagacaactgcaactctatgttacgtgtgtgtgtgtgtgtgtgtgtgaaaatgtaatgtctgctctgctgtgggtgggccctctaaaagggaaggtccctgatgcctaagaaaatctgaaaacagcccaggttcacaccaggagttcttaacctcgacccgactgcattcaggtgcatattatgtgccgttatctgaggagagcatctacagctttcagcagattctcaaaggggtatgcaaccccctaaaaaggttaagaacaattggttttgaggagtcagtaagaaactggccatgaatgtgcttggcatgaaagagatgcttggtaatgtcggtttctttccttcctttcagagcccagccttcggaggtttccgcatgagccttctcgggcgacttctaggaggatttattcccctggcagtgccaagggcagcctgcaccaagctcacaactcttcctccaagaggatgttcaaagggcctgtcatttcagcatctgctggacagcagaacttcgcatgcaggatcctggagctgcgtcgggttttgaatcagggacaatggaggaagtgggaaactgtgaagagagtcagagggctgtgccagctgccccctttcccacccccagcaattcacttaactttcctgagtctcacctttgtcattatgagaatgtgtatatttataaataatcatctgtttctccaatgtaagatattgttattgcagaagtgatactaggacctcgttatacgatggcctcatgatgtagatttatagcaggcttcagattctggcatagaataaacagatatttatccaagggttcactgattcccgaataaatgccaggaacattcatgta

SEQ ID NO: 138484 - DNA, 6378 bp, Homo sapiens
  Payload ID: 7124
  Gene Symbol: GOLGA7B
  Gene Name: golgin A7 family, member B
  ENST ID: ENST00000596005
  CDS Start-End: 1-501
tctcctcaggtccacaatctgcaggagctccggcgaagtgcctcactggccaccaaggtctttatccagagagactacagcgatgggaccatctgtcagttccagaccaaattccccccagagctggacagccggatcgagcggcagctctttgaagagactgtgaagaccctcaacggattttacgcagaggctgagaagattgggggcagctcctacctcgagggctgcctggcctgcgccacggcctacttcatcttcctctgcatggagacccactatgagaaggttctcaagaagatttcccgctacatccaggagcagaatgagaagatctttgcacctcgaggcctcctacttacagaccctgtggagcgtgggatgagggttattgagatctccatctacgaggaccggtgcagcagtggcagctccagcagcggcagcagcagcggcagtggcagcagcagcggtgggggtggtggggcgggggcccggtgactggccgagagtccctgtagggaggtgtatggccggagtgagggccttgcagacctgcggcggctgcgctaccagagcacccgcttctgagtcattctttgggctcaccctgctgcccggggtgggagggagggtgacgggcctcatatttcctgtgggccatcaacctatgccccctgtccctcacccccgtctggatcagtccatttcctgacctgggggcttttccttcccgatggggctggtctgggccacacagagacagatcttcctaggaaggctggggtggggagaacacaacctaggcggcccctctcttccacagcccctctcccaaccctgcgaggggggccgaggcctgccacatagaggactcccacactgcatgacccctcatcccaaacccatatccaccaggactctttcccttgggccctgcgtcccgtggctgtctcccagtatctgttccttctcatgcccctgcagggccccggcctgtctatgatcctgcctccaccaaattcaaggtgtggggagacgggtgccgtggttgggagctgttcagcgcactcctgacctcttctagacctatggctttcctgtcctgcattcagagctagaggccagctcggccttgcgagaagcatccaactttgagactttgcaggctgccaggtgctggttggggggcacagagcctggggctctgggaggtaatatgggggtctgggaaactccgtgaagagacatagccatgcggggcctgaatctcctgaactacagccagtttcctgagattagaacctgtgtgtatgcacatgtgaatgtatgtgtgagtgcacatgtgtgtaagtgcagtgtgcgtaaatgtgtgagtctgcgtgtgttagcatgcctgtatgtgagcgcgtgtgtgagcgcatgtgtgtgcaccagtgcacaagtgtatgaatgtggacacatttataagcacacctgtgtgtgtctgagtacatgtgcacacacgtgtgcacaaatgtgcatttatatgagtgtgagtgcatgcatgtgcatgaacatgtgtgcacaagcatgtgtgtatgagtgttcatgtgtatgagtgtgtgtgtatgcaggtgagtgcatgtgtgtgtgagtgtgtttgtgtgttccccttggctgccaggccaacgactgcttctctgcatcctgctgtcttcgctacctgagggtctgtgacttcttccctgtgtgggtccagcctgaccccctgtaagtaaatgtccaaaagccccttgcccctcccctagggctaccagggaacatactctactgcatatgttctagtggaagagaagccggggttctaggaaagaagagccaaactttggtggcctttggtgccccctctcagctccccatgacaagacaacggggctgcagacactgtgtgttcagcctgcccaggggctggggctctttaaggctttgtaggtgaggtttccatggaccttcaaaggtgccagcagcctgcaggggaaaggcaaactccctccttgcaaggaaaggagatgtccagccaatgatgcccggcttctgaggcccagaggagcaggtgggatgggagcagcccctggggctggtgtcccgaagatgaaatgaagggggctgcctatctcagttggcgggaggtgttagaagtggatgtgcaagaccagccactggaggtagctctctggagtcaaagagaggcctgcttttctaccagacatgggagcagcatgtaggatacaagggcctacccagagaccagagagagtcagcctagtccttgcagcctcaggaagtcctcggcccaagtgagtcctggtccaaggatccccctggagagccgcagttcagtgggctccaccgcagcccctggccacggcctatgccctccctgggcccctgtggggctgggcattgtgtctgacctgtgcatctcccatgggagggctgggcacaggcagtgctatggccttttttttttttttctttttccaataaaagaacttgcccagcgtgaagctctgtgatgctttctctgccccgtgacgatggagggtcagttctatgctccaggaccacatgaggggatactcagctgcctgaactggacctgacatggggagcaggatgaactctgtcttcttggagcttgcagtctactgaagaggcagacacctcagcatctctaatctggaatctttggggcacttgtagccttgggtgggggaacaggttggactgaaagcgaggccaaaagtaatcaattaatgatatcaataaatcctcatttcttgagctcttcccctgggttgggtcctgttgggagctggatcacacaggtcactcagtactgaagatgagaaagtagctggatgatcacttctcggccttttggccaagatcaaatatggagaaagtagctggatgttggaacctagcagagttgtgtcttgaattttataatttattgagcacctactatgtgccagatactttgctgaaaccatatgttagagctggcaggggatttaaagatcacttgaatcctgtcacagaggtccagagagggtgggtgacttgccctaggccacacagctggttgatgataacagggcccaagcttggaacccaggtctcctgactcagtgcccactctgttaccacagggatggcacccagatgggaagctgcctgaggctgcagggaggctgggatcacaaactcaggcctgttcccagagaggggctcatcagactgtggggacaacggctccagcctcttaggtgggggctgggcagtcccctctgggtggttctcatgtttgttgtcactgccgctaagggctgcagtgagctgtgtgcagcctggactcactccctctgctggaacctgggccgtgtgtgggttgccacaagtgagcgtgttctctaatatgagggcaggttcattctgttttgggataggaagtttgttctaccccgaggccagatttgaatccaaactcagctcttctagagatgaggtcctggggagggggtgaggatttactaaacgggtaaaaccaaatctgggtgcttatctgactgagaggcattcaacccttccattttcaaatggtaatcataataataatagtagctgacgtttatttagcacttcctatgtgccaggcactaggctaagactctacataattagtcattcaattctcacagcaaccctctatggcatggattcttatttcccattttacatatggggaaactgaggctcatggacgttaagtaactgggaaattgcagatcttggctttgaatctaggcaatctgactccaaactgcaaggaagaagacagatccagcctcagaggccgcttaacagcttgagggcctcagccgtcctgggattaggatcaggcagattcccagggaaggacttggagccatgcctgggttttgaggccgggctggcacctccacttccagggcatcacgggagggtgcatgggctgtgctcgcaggcatgcgggacccagaggcagcccggtgaagggtagtgggggactcgactcactgtgggcctggggaggtgtggtttctctctgctggcttagttacaggtggtggcctgtctctccggggtctggctgtagccatgtccctgcacccaccttgccagccagggacaggccccatcaagacccaggagcagctccagcctcagccagactgtccccgaggtcccaagtgaggccccagccactcaggcatgcctcaggaagctcctgctgcacatgctcctctccctgcgccagcaccctgctgtctggcttccttcctttggccacagggcgggtgtgtgtgaaaccacagggtttacagaagctcgaggtgccactgagtggcaggattatgcactgcactcggggaatcaaaggtggagacagaaagaactatggctgttgtgacacgtcccccacggctccccggttggcagccactgccacccgcagggacttttctgtggcttccagaggtgtggggcaaaggtggagtctggtgactttctccctagggccagcccctgggctgtcgagcctgggaaactccacatccctctccacacctctagaaggactcacaatgaggggggcccagacaggaggcatcaccacctggtttgggctttaccattcacccagggataaggcaaggcaaacaccactccacatcagatctgaatttgagctctggcttcatgacactgacacatgaagactcttggagcctcagattccccagttgttaaatagggagactaatatctcacagagttgtttagacccgaggcgttcaaccttggtggcaatggatgtcaactggaagcatgaaaaatcaccaatgcctgatcctatcctcagagattctgatttaattgttttgggggacagcttgggcatcaggattttaaagagtttccctggtgattttaatgtgaaggtaaggctgagaatccctggttttgacagtacctatagcctataagcctttaatacacctctgaaaatgcctgagacctgaataagaagtttatggttccacagaagcagccagacacaaaaatgcatatgcaccatgtgattccccttatatgaaactgaaagacaggccaaactcgcctttgattgggagtcaggatcaagattaccctgggtcgggggtagcgaatggatggggacctggggggcttctgggagctcaggatgttctgtttcttgatcagagtgccagttacacggggtgctcacttcatgagaattcactgagctgtatacttaagagctgtgtatttgtctgtactggtgatatatttcaataaaattcaccagaaaagcctgttggctacaaaataggaaaagaaaggacacacttgaaattaacgttttgttaaatatctggaaatgtaacacatatgccaaacagacaactgcaactctatgttacgtgtgtgtgtgtgtgtgtgtgtgaaaatgtaatgtctgctctgctgtgggtgggccctctaaaagggaaggtccctgatgcctaagaaaatctgaaaacagcccaggttcacaccaggagttcttaacctcgacccgactgcattcaggtgcatattatgtgccgttatctgaggagagcatctacagctttcagcagattctcaaaggggtatgcaaccccctaaaaaggttaagaacaattggttttgaggagtcagtaagaaactggccatgaatgtgcttggcatgaaagagatgcttggtaatgtcggtttctttccttcctttcagagcccagccttcggaggtttccgcatgagccttctcgggcgacttctaggaggatttattcccctggcagtgccaagggcagcctgcaccaagctcacaactcttcctccaagaggatgttcaaagggcctgtcatttcagcatctgctggacagcagaacttcgcatgcaggatcctggagctgcgtcgggttttgaatcagggacaatggaggaagtgggaaactgtgaagagagtcagagggctgtgccagctgccccctttcccacccccagcaattcacttaactttcctgagtctcacctttgtcattatgagaatgtgtatatttataaataatcatctgtttctccaatgtaagatattgttattgcagaagtgatactaggacctcgttatacgatggcctcatgatgtagatttatagcaggcttcagattctggcatagaataaacagatatttatccaagggttcactgattcccgaataaatgccaggaacattcatgt

SEQ ID NO: 138485 - DNA, 1899 bp, Homo sapiens
  Payload ID: 7125
  Gene Symbol: GOLGA8O
  Gene Name: Golgin A8 family member O
  ENST ID: ENST00000632788
  CDS Start-End: 1-1899
atggcagaagaaactcaacacaacaaattggctgcagccaagaaaaagttaaaagaatattggcagaaaaacagacctagagttccagcaggagtgaacagaaacaggaaaacaaatggcagtatccctgagacagccacttccggtggttgccagccacctggggattcagcaacaggtttccacagggaaggccctacatcatctgctaccctgaaagatctggagagcccgtgccaagaacgagcagtagtcctggattcaacgtccgtaaaaatcagtcgactgaagaacaccatcaaatctttgaaacaacagaagaaacaagtggaacatcagctggaagaagaaaagaaagcaaacaacgagagacagaaagccgaaagggagctagaggttcaaatccagacattgatcatacagaaagaggaactaaatacggacctgtaccacatggaacgttctctcagatactttgaagaagagtccaaggacctggctgtccgcctgcaacattcattgcagtgtaaaggagagttagagagggctctgtctgctgtcatcgccacagagaagaagaaggcaaaccagttgtccagctgcagcaaagcacatacagagtgggagttagagcagtccctacaggaccaggcactgctgaaagcgcagctgacacagttgaaggagtcatttcaacaactccaattagaaagagatgagtgtgctgaacatatagaaggagagagggcccggtggcatcagaggatgagtaaaatgttgcaggagatttgcacattaaagaaagagaagcagcaagatatgcgtcgggtagaggagctggagaggagcttgtccaaactcaaaaaccagatggctgaacccttgcccccggagcccccagcagtgccctctgaggtggagctgcagcacctgaggaaggaactagagagagtggcaggagagctccagtcccaggtcaaaaacaatcagcacataagtctcctgaaccggcgacaagaagagaggattcgggaacaggaagagaggcttcggaagcaggaggagaggcttcaggagcagcacgagaagcttcggcagctggccaagccacagagcgtcttcgaggagctgaacaatgagaacaagagcacactgcagttggagcagcaagtaaaggagctacaggagaagcttggcgaggagcacctggaagcggccagccagcagaaccagcagctaacggcccagctgaacctcatggctctccctggggaaggacacggaggagaacatctggacagtgagggggaggaggcacctcagcccatgccgagtgtcccagaggacccggagagcagggaggccatgagcagctttatggaccacctgaaggagaaggcagacctgagtgagctggtgaaaaaacaagaacttcgcttcattcaatactggcaagagagatgccatcagaaaatccatcaccttttatcagaaccagggggccgtgccaaagatgcagcactgggaggaggacaccatcaggctggagctcagggaggagatgaaggtgaagctgctggagctgcagcagatggtattgcggcttacagcaactacaacaatgggcacagaaaattcctggccgctgcccacaactctgctgatgagcccggtccaggagccccagccccccaggagcttggggctgcagacaagcatggtgatcttcgtgaggtgaccctcacctcctctgcccaaggagaggccagggaggatcctctccttgacaagcctactgcacagccgatcgtgcaggaccaccaggagcacccaggcttgggcagcaactgctgtgtgccattattttgttgggcttggctgccaagaagaaggagataa

SEQ ID NO: 138486 - DNA, 1877 bp, Homo sapiens
  Payload ID: 7126
  Gene Symbol: GOLGA8A
  Gene Name: golgin A8 family, member A
  Uniprot ID: A7E2F4
  ENST ID: ENST00000359187
  CDS Start-End: 66-1877
gttgatcagcgctcgctgggatttggctgacgtggccccagccccgcctccctccccaccccacaatggcagaagaaactggacagagtaaattagctgcagccaagaaaaagttcaaagaatattggcagagaaaccgccctggtgttccagcagcagcgaagaggaacacgaaagcaaatggcagtagccctgagacggccgcttctggtggttgccactcatctgaggcttcctcctccgcctcctcctctctgcatgcgcgtcagagcccgtgccaagaacaagcagcagtcctgaactcgaggtccataaaaatcagtcgactgaatgacaccatcaaatctttgaaacaacagaagaaacaagtggaacatcagctggaagaagaaaagaaagcaaacaatgagaaacagaaagctgaaagggagctagagggtcaaatccagagattgaacacagagaaaaagaaactaaatacggacctgtatcacatgaaacattctctcagatactttgaagaagagtccaaggatctggccggccgcctgcaacgttcatcgcagcgtataggagagttagagtggtctctctgtgctgtcgccgccacacagaagaagaagccggatgggttctcgagccgcagtaaagcacttctcaagcggcagttagagcagtccatacgggagcagatactgctgaaaggacacgtgacacagttgaaggagtcgcttaaagaagtccagctggagagagatcaatatgctgaacaaataaaaggagagagggcccagtggcagcagaggatgaggaaaatgtcgcaggaggtttgcacattgaaggaggagaagaagcatgatacgcatcgggtagaggagctggagaggagcttgtccagactcaaaaaccagatggctgagccactgcccccggatgccccagcagtgtcctctgaggtggagctgcaagacctgaggaaggagctggagagagtggcaggagagctccaggctcaggtggaaaacaatcagtgcatcagtctcctgaaccgtgggcaaaaggagaggcttcgcgagcaggaggagaggcttcaggagcagcaggagaggcttcgggaacgggagaagaggcttcagcagctggccgagccacagagcgacttggaggagctgaagcacgagaacaagagcgcactgcagttggagcagcaagtaaaggagctgcaggagaagctgggccaggtgatggagacgctcacctcggccgagaaggagccagaggcagcagtcccagcctcagggactgggggcgagtctagcggccttatggacctcctggaggagaaggcggacctgagggagcatgtggagaaactggaacttggattcatccagtaccggagagagagatgccatcagaaagtacatcgccttctaacagagccaggggacagtgccaaagatgcgtcaccgggaggaggccatcatcaggctggcccaggacaaggaggagaggaaggtgaagctgctggagctgcaggagatggtgttgcggcttgtggcagctacagcgaggggcacggcaaattcctggccgctgcccggaaccctgctgctgaacccagtccaggagccccagccccccaggagctcggggctgccgacaagcatggtgatctttgtgaggcgagcctcaccaacagcgtggagcctgcacaaggagaagccagggagggttcttcccaggacaaccctactgcacagccagtcgtgcagctccttggtgagatgcaggaccaccaggagcacccaggcttgggcagcaactgctgtgtgccatgcttttgctgggcttggctgccgagaagaaggagataa

SEQ ID NO: 138487 - DNA, 4577 bp, Homo sapiens
  Payload ID: 7126
  Gene Symbol: GOLGA8A
  Gene Name: golgin A8 family, member A
  Uniprot ID: A7E2F4
  ENST ID: ENST00000432566
  CDS Start-End: 342-2237
tgcttgagctctttgggcctctgttttcacgtctgtatgatagaggtggtattgtttgacttgtatttgtgaagtttcaatgagattgataattgtcgattttatgttaatccctagtacatggcctgctgtcaacacccaggacacccaggatatggtctttgctgtttgattttcctcatccccagtctcaaggggaagccaggacaatgagaacagccacttcccatcaggagtcactgcaaggcccccagggtgggatggtggggagataagaaccgtgagagaagttggcacaaaggagttatgggacaaagggtccaagataggcagaaaagaaaatgttgccagttgatggggaagaaaggaagtcggagggctcagacactgagggggacagaacatctccatgtgcagtctcatctgctaccctgaaggatctggaggtaggaggctctgggcggaggtgcagtgaccccgcaggccagccctccaacctcctcccgcagcggggactgggtgcccctctgccagctgagacagcccacacacaacccagccctaatgatcgttctctctacctctcccccaagtcctcctccgcctcctcctctctgcatgcgcgtcagagcccgtgccaagaacaagcagcagtcctgaactcgaggtccataaaaatcagtcgactgaatgacaccatcaaatctttgaaacaacagaagaaacaagtggaacatcagctggaagaagaaaagaaagcaaacaatgagaaacagaaagctgaaagggagctagagggtcaaatccagagattgaacacagagaaaaagaaactaaatacggacctgtatcacatgaaacattctctcagatactttgaagaagagtccaaggatctggccggccgcctgcaacgttcatcgcagcgtataggagagttagagtggtctctctgtgctgtcgccgccacacagaagaagaagccggatgggttctcgagccgcagtaaagcacttctcaagcggcagttagagcagtccatacgggagcagatactgctgaaaggacacgtgacacagttgaaggagtcgcttaaagaagtccagctggagagagatcaatatgctgaacaaataaaaggagagagggcccagtggcagcagaggatgaggaaaatgtcgcaggaggtttgcacattgaaggaggagaagaagcatgatacgcatcgggtagaggagctggagaggagcttgtccagactcaaaaaccagatggctgagccactgcccccggatgccccagcagtgtcctctgaggtggagctgcaagacctgaggaaggagctggagagagtggcaggagagctccaggctcaggtggaaaacaatcagtgcatcagtctcctgaaccgtgggcaaaaggagaggcttcgcgagcaggaggagaggcttcaggagcagcaggagaggcttcgggaacgggagaagaggcttcagcagctggccgagccacagagcgacttggaggagctgaagcacgagaacaagagcgcactgcagttggagcagcaagtaaaggagctgcaggagaagctgggccaggtgatggagacgctcacctcggccgagaaggagccagaggcagcagtcccagcctcagggactgggggcgagtctagcggccttatggacctcctggaggagaaggcggacctgagggagcatgtggagaaactggaacttggattcatccagtaccggagagagagatgccatcagaaagtacatcgccttctaacagagccaggggacagtgccaaagatgcgtcaccgggaggaggccatcatcaggctggcccaggacaaggaggagaggaaggtgaagctgctggagctgcaggagatggtgttgcggcttgtggcagctacagcgaggggcacggcaaattcctggccgctgcccggaaccctgctgctgaacccagtccaggagccccagccccccaggagctcggggctgccgacaagcatggtgatctttgtgaggcgagcctcaccaacagcgtggagcctgcacaaggagaagccagggagggttcttcccaggacaaccctactgcacagccagtcgtgcagctccttggtgagatgcaggaccaccaggagcacccaggcttgggcagcaactgctgtgtgccatgcttttgctgggcttggctgccgagaagaaggagataaacaccaccatcatcaaagagctgctcaagaaatttttaaaaacgaaacaaagttatggggttaatctcctacacaattcatttacttcatttgaatgttagagctactcatgattatttgtgtttctaatttatagtttaagtttatttgtaaaaagttaaaagagagtgggtctctgtggctctcactgatgttcactctggcatccttcagcatttttcttttttcatttcataattgtaggtcattagcatgcatatcgagtttgcccttacgtggtgggagttcaaacacacaaagacccactctttgcacaaaactgttctcgctggtttggaataggctcccgtgcttttctaatgttattgcagcatggatgtccattacagaattcagataaaatttgctaatgttctgctatgatgtttgatctcatcttaatcacagtgagctcttctatagctcaatatgcggtttgccctcaagtgtgcactgtttattactttgtaatatgccactgtgagtactgacatttagagctgtttaaaggccgagaactggaaacagcctttcctccattttctgtgtattggtgatgggagtgataaccttttgggggagctttctaaatctcacagaagaggaaagtggcctgctctggcaggtatgtgcaggatacagtgtgtttcatctgttccggtgccaagaatgagcagtgtactgtggcagttccctttggatttgtatgtgctctgggctcatgaagatattgcatcgtgagctgcagcagttgcactctttttcagtgacctaaaaagggcttatttccgaggaatgaaaggctgccatcattggctgtgggtgtgaaaaacctttcctagcttagagcatttgtatctacaatacattttaaagtcagagttcgtgttccctgttttaatcacatgactacctgtcccagtacacgaaagggcgctggttggcattcttcttaatgtatttagtgaagatcataagaaatcctttaagagtttaaatgtctctgaaacaggcatacaggctctagtcaagaatgaattagagtgaaggaaagctgtgtgacacctggcattcctctctgttcatggagcttctttgaggcttgaagtttgattttactatctagacctctctggctaatacctattcttcaaccacctcggttactctgacataggaatttacttcttttccttgagtggaaaacactttagaaagtaataacaaacattattataaactaatatatgtgagagtacttagttgaaacaaaaaggaattttagtagacagtattatattatctttgaaaatcaaggagaagtttatgcaacttaaaatgtttacacactgtggtgcaatctactgtttgtgaatgtctgtattatcaggaaacatgtctatacgatcgcagagttgtatttcctcacaaacttctttacgaagagtgaaatacgtttttgtacctctcattttcagtcagggacatactttgtgcaatatttctgtgattgtgcctatgcatgatgaatgaatgcatttcaatcatacattgcctaaatcataacttgatgatgcttgggaaagaatcaacagttaaaacttcatgaagttctaatgtctgtgttccaaaacacatcacattattaggttgtagggagatatgtaggtgtgctccctggggtggggagttttctagttactagaccatctccatttttagcacttggcagcctcatgatccttttataaatgtgagattaacaggagagcagcaatacgattttgccaatggaataacagatttgccggcattcactgaaagagggcagatattgggtccttgtaacttcaactgactcttccaaattgtatgaatttatcaatgtattacacaaatccagtttcagaatgataaaaaatgttagaccaaataatgcggctaattaacagtcgtatgatttctagcccatgggtttaaaactgtatcttaaagagtcattttaaaataatataaatattaaaaaatgtaactgctatcttaatgttctgaaataaaacattttaaaatataaatcctgtagtttaaaaggaagaaatggtgggaaggaaaagtagagaaagaaatgccaattccaggccaaagcgttatttgccaagttttcttagaatgaattttaccaatgtatgagttcttgttaacagaatgtgtaacggaaatactgaaagacttttgcttaaagtggcattattgactgctgatgtgatgctactgtaatgcaataaatttttaaattgttgc

SEQ ID NO: 138488 - DNA, 4335 bp, Homo sapiens
  Payload ID: 7127
  Gene Symbol: GOLGA8B
  Gene Name: golgin A8 family, member B
  Uniprot ID: A8MQT2
  ENST ID: ENST00000342314
  CDS Start-End: 99-1910
agttacgcagctgtcttccaggtgactggatgtgttgatcagcgctcgctgggatttggctgacgtggccccagccccgcctccctccccaccccacaatggcagaagaaactggacagagtaaattagctgcagccaagaaaaagttcaaagaatattggcagagaaaccgccctggtgttccagcagcagcgaagaggaacacgaaagcaaatggcagtagccctgagacggccgcttctggtggttgccactcatctgaggcttcctcctccgcctcctcctctctgcatgcgcgtcagagcccgtgccaagaacaagcagcagtcctgaactcgaggtccataaaaatcagtcgactgaatgacaccatcaaatctttgaaacaacagaagaaacaagtggaacatcagctggaagaagaaaagaaagcaaacaatgagaaacagaaagctgaaagggagctagagggtcaaatccagagattgaacacagagaaaaagaaactaaatacggacctgtatcacatgaaacattctctcagatactttgaagaagagtccaaggatctggccggccgcctgcaacgttcatcgcagcgtataggagagttagagtggtctctctgtgctgtcgccgccacacagaagaagaagccggatgggttctcgagccgcagtaaagcacttctcaagcggcagttagagcagtccatacgggagcagatactgctgaaaggacacgtgacacagttgaaggagtcgcttaaagaagtccagctggagagagatcaatatgctgaacaaataaaaggagagagggcccagtggcagcagaggatgaggaaaatgtcgcaggaggtttgcacattgaaggaggagaagaagcatgatacgcatcgggtagaggagctggagaggagcttgtccagactcaaaaaccagatggctgagccactgcccccggatgccccagcagtgtcctctgaggtggagctgcaagacctgaggaaggagctggagagagtggcaggagagctccaggctcaggtggaaaacaatcagtgcatcagtctcctgaaccgtgggcaaaaggagaggcttcgcgagcaggaggagaggcttcaggagcagcaggagaggcttcgggaacgggagaagaggcttcagcagctggccgagccacagagcgacttggaggagctgaagcacgagaacaagagcgcactgcagttggagcagcaagtaaaggagctgcaggagaagctgggccaggtgatggagacgctcacctcggccgagaaggagccagaggcagcagtcccagcctcagggactgggggcgagtctagcggccttatggacctcctggaggagaaggcggacctgagggagcatgtggagaaactggaacttggattcatccagtaccggagagagagatgccatcagaaagtacatcgccttctaacagagccaggggacagtgccaaagatgcgtcaccgggaggaggccatcatcaggctggcccaggacaaggaggagaggaaggtgaagctgctggagctgcaggagatggtgttgcggcttgtggcagctacagcgaggggcacggcaaattcctggccgctgcccggaaccctgctgctgaacccagtccaggagccccagccccccaggagctcggggctgccgacaagcatggtgatctttgtgaggcgagcctcaccaacagcgtggagcctgcacaaggagaagccagggagggttcttcccaggacaaccctactgcacagccagtcctgcagctccttggtgagatgcaggaccaccaggagcacccaggcttgggcagcaactgctgtgtgccatgcttttgctgggcttggctgccgagaagaaggagataaacaccaccatcatcaaagagctgctcaagaaatttttaaaaacgaaacaaagttatggggttaatctcctacacaattcatttacttcatttgaatgttagagctactcatgattatttgtgtttctaatttatagtttaagtttatttgtaaaaagttaaaagagagtgggtctctgtgcctctcactgatgttcactctggcatcctttagcatttttcttttttcatttcataattgtaggtcattagcatgcatatcgagtttgcccttacgtggtgggagttcaaacacacaaagacccactctttgcacaaaactgttctcgctggtttggaataggctcccgtgcttttttaatgttattgcagcatggatgttcattacagaattcagataaaatttgctaatgttctgctatgatgtttgatctcatcttaatcacagtgagctcttccatagctcaatatgcggtttgccctcaagtgtgcactgtttattactttgtaatatgccactatgagtactgacacttagagctgtttaaaggccgagaactggaaacagcctttcctccattttctgtgtattggtgatgggagtgataaccttttgggggagctttctaaatctcgcagaagaggaaagtggcctgctctggcaggtatgtgcaggatacagtgtgtttcatctgttccggtgccaagaatgagcactgtactgtggcagttccctttggatttgtatgtgctctgggctcatgaagatattgcatcgtgagctgcagcagttgcactctttttcagtgacctaaaaatggcttatttccgaggaatgaaaggctgccatcgttggctgtggatgtggaaaacctttcctagcttagagcatttgtatctacaatacattttaaagtcagagttcgtgttccctgttttaatcacatgactacctgtcccagtacacgaaagggcgctggttggcattcttcttaatgtatttagtaaagatcataagacatcctttaagagtttaaatgtctctgaaacaggcatacaggctctagtcaagaatgaattagagtgaaggaaagctgtgtgacacctggcattcctctctgttcatggagcttctttgaggcttgaagtttgattttactatctagacctctctggctaatacctattcttcaaccacctcggttactctgacataggaatttacttcttttccttgagtggaaaacactttagaaaataataacaaacattattataaactaatatatgtgagagtacttagttgaaacaaaaaggaattttagtagacagtattatattatctttgaaaatcaaggagaagtttatgcaactgaaaatgtttacacactgtgctgcaatctactgtttgtgaatgtcaatgtattatcaggaaacatgtctatacgatcgcagagttgtatttcctcacaaacttctttacgaagagtgaaatatgtttttgtacctctcagtttcagtcagggacatattttgtgcaatatttctgtgattgtgcctatgcgtgatgagtgaatgcatttcaatcatacattgcctaaatcataacttgatgatgcttgggaaagaatcaacagttaaaacttcatgaagttctaatgtctgtgttccaaaacacatcacattattaggttgtagggagatatgtatgtgtgctccctggggtggggagttttctagttactagaccatctccatttttagcacttggcagcctcatgatccttttataaataggagattaacaggagagcagcaatacgattttgccaatggaataacagatttgccggcattcactgaaagagggcagatattgggtccttgtgacttcaactgactcttccgaattgtatgaatttatcaatgtattagataaacccagtttcagaataataaagaaaaaatattagaccaaataatgtggctaatagtggtatgatttctagcccgtgggtttaaaactgtatcctaaagagtcattttaaaataatataaatatttaaaagtgtaactgctatctttatgttctgaaataagttaaaacattttaaaatatgaatactgtagtttaaaagaaagaaatggtgggaaggaaaagtagagaaagaaatgccaattccagtccaaagctttgtttgccaagttttcttagaatgaattttaccaatgtatgggttcttgttaacagaatgtgtaacagaaatactgaaagacttttgcctaaagtggcattattgactgctggtgtgatgctactgtaatgtgataaattattaaattgttgcaaagtgctgtttttgccttaaaattttattttgcgcatcttgaaaattatagtattaaaggtattgatactgtgcaaa

SEQ ID NO: 138489 - DNA, 4252 bp, Homo sapiens
  Payload ID: 7127
  Gene Symbol: GOLGA8B
  Gene Name: golgin A8 family, member B
  ENST ID: ENST00000438958
  CDS Start-End: 1-1902
atgttgccagttgatggggaagaaaggaagtcggagggctcagacactgagggggacagaacatctccatgtgcaggccctacatcatctgctaccctgaaggatctggaggtaggaggctctgggtggaggtgcagtgaccccgcaggccagccctccaacctcctcccgcagcggggactgggtgcccctctgccagctgagacagcccacacacaacccagccctaatgatcgttctctctacctctcccccaagtcctcctccgcctcctcctctctgcatgcgcgtcagagcccgtgccaagaacaagcagcagtcctgaactcgaggtccataaaaatcagtcgactgaatgacaccatcaaatctttgaaacaacagaagaaacaagtggaacatcagctggaagaagaaaagaaagcaaacaatgagaaacagaaagctgaaagggagctagagggtcaaatccagagattgaacacagagaaaaagaaactaaatacggacctgtatcacatgaaacattctctcagatactttgaagaagagtccaaggatctggccggccgcctgcaacgttcatcgcagcgtataggagagttagagtggtctctctgtgctgtcgccgccacacagaagaagaagccggatgggttctcgagccgcagtaaagcacttctcaagcggcagttagagcagtccatacgggagcagatactgctgaaaggacacgtgacacagttgaaggagtcgcttaaagaagtccagctggagagagatcaatatgctgaacaaataaaaggagagagggcccagtggcagcagaggatgaggaaaatgtcgcaggaggtttgcacattgaaggaggagaagaagcatgatacgcatcgggtagaggagctggagaggagcttgtccagactcaaaaaccagatggctgagccactgcccccggatgccccagcagtgtcctctgaggtggagctgcaagacctgaggaaggagctggagagagtggcaggagagctccaggctcaggtggaaaacaatcagtgcatcagtctcctgaaccgtgggcaaaaggagaggcttcgcgagcaggaggagaggcttcaggagcagcaggagaggcttcgggaacgggagaagaggcttcagcagctggccgagccacagagcgacttggaggagctgaagcacgagaacaagagcgcactgcagttggagcagcaagtaaaggagctgcaggagaagctgggccaggtgatggagacgctcacctcggccgagaaggagccagaggcagcagtcccagcctcagggactgggggcgagtctagcggccttatggacctcctggaggagaaggcggacctgagggagcatgtggagaaactggaacttggattcatccagtaccggagagagagatgccatcagaaagtacatcgccttctaacagagccaggggacagtgccaaagatgcgtcaccgggaggaggccatcatcaggctggcccaggacaaggaggagaggaaggtgaagctgctggagctgcaggagatggtgttgcggcttgtggcagctacagcgaggggcacggcaaattcctggccgctgcccggaaccctgctgctgaacccagtccaggagccccagccccccaggagctcggggctgccgacaagcatggtgatctttgtgaggcgagcctcaccaacagcgtggagcctgcacaaggagaagccagggagggttcttcccaggacaaccctactgcacagccagtcctgcagctccttggtgagatgcaggaccaccaggagcacccaggcttgggcagcaactgctgtgtgccatgcttttgctgggcttggctgccgagaagaaggagataaacaccaccatcatcaaagagctgctcaagaaatttttaaaaacgaaacaaagttatggggttaatctcctacacaattcatttacttcatttgaatgttagagctactcatgattatttgtgtttctaatttatagtttaagtttatttgtaaaaagttaaaagagagtgggtctctgtgcctctcactgatgttcactctggcatcctttagcatttttcttttttcatttcataattgtaggtcattagcatgcatatcgagtttgcccttacgtggtgggagttcaaacacacaaagacccactctttgcacaaaactgttctcgctggtttggaataggctcccgtgcttttttaatgttattgcagcatggatgttcattacagaattcagataaaatttgctaatgttctgctatgatgtttgatctcatcttaatcacagtgagctcttccatagctcaatatgcggtttgccctcaagtgtgcactgtttattactttgtaatatgccactatgagtactgacacttagagctgtttaaaggccgagaactggaaacagcctttcctccattttctgtgtattggtgatgggagtgataaccttttgggggagctttctaaatctcgcagaagaggaaagtggcctgctctggcaggtatgtgcaggatacagtgtgtttcatctgttccggtgccaagaatgagcactgtactgtggcagttccctttggatttgtatgtgctctgggctcatgaagatattgcatcgtgagctgcagcagttgcactctttttcagtgacctaaaaatggcttatttccgaggaatgaaaggctgccatcgttggctgtggatgtggaaaacctttcctagcttagagcatttgtatctacaatacattttaaagtcagagttcgtgttccctgttttaatcacatgactacctgtcccagtacacgaaagggcgctggttggcattcttcttaatgtatttagtaaagatcataagacatcctttaagagtttaaatgtctctgaaacaggcatacaggctctagtcaagaatgaattagagtgaaggaaagctgtgtgacacctggcattcctctctgttcatggagcttctttgaggcttgaagtttgattttactatctagacctctctggctaatacctattcttcaaccacctcggttactctgacataggaatttacttcttttccttgagtggaaaacactttagaaaataataacaaacattattataaactaatatatgtgagagtacttagttgaaacaaaaaggaattttagtagacagtattatattatctttgaaaatcaaggagaagtttatgcaactgaaaatgtttacacactgtgctgcaatctactgtttgtgaatgtcaatgtattatcaggaaacatgtctatacgatcgcagagttgtatttcctcacaaacttctttacgaagagtgaaatatgtttttgtacctctcagtttcagtcagggacatattttgtgcaatatttctgtgattgtgcctatgcgtgatgagtgaatgcatttcaatcatacattgcctaaatcataacttgatgatgcttgggaaagaatcaacagttaaaacttcatgaagttctaatgtctgtgttccaaaacacatcacattattaggttgtagggagatatgtatgtgtgctccctggggtggggagttttctagttactagaccatctccatttttagcacttggcagcctcatgatccttttataaataggagattaacaggagagcagcaatacgattttgccaatggaataacagatttgccggcattcactgaaagagggcagatattgggtccttgtgacttcaactgactcttccgaattgtatgaatttatcaatgtattagataaacccagtttcagaataataaagaaaaaatattagaccaaataatgtggctaatagtggtatgatttctagcccgtgggtttaaaactgtatcctaaagagtcattttaaaataatataaatatttaaaagtgtaactgctatctttatgttctgaaataagttaaaacattttaaaatatgaatactgtagtttaaaagaaagaaatggtgggaaggaaaagtagagaaagaaatgccaattccagtccaaagctttgtttgccaagttttcttagaatgaattttaccaatgtatgggttcttgttaacagaatgtgtaacagaaatactgaaagacttttgcctaaagtggcattattgactgctggtgtgatgctactgtaatgtgataaattattaaattgttgcaaa

SEQ ID NO: 138490 - DNA, 2009 bp, Homo sapiens
  Payload ID: 7128
  Gene Symbol: GOLGA8F
  Gene Name: golgin A8 family, member F
  ENST ID: ENST00000532622
  CDS Start-End: 63-2009
agtcgcacagctacctggtaggtgactggaggtgttgatcagtgcttggtgggattttgctgatgtggccccaagcccgcctccctccccaccctgcgatggcagaagaaactcgacaaagtaaattggcagcagccaagagaaagttaaaagaatattggcagagaaacagccctggtgttccagcaggagccaagaggaacaggaaaacaaatggcagcatccatgagacagccacttctggtggttgccactcacctggagattcagcaacaggtatccacggggagagccctacatcatctgctaccctgaaggatctggagagcccgtgccaagaactagcagtagtcccagactcgaggtccgtaaaagtcagtcaactgaagaacaccatcaaatctttgaaacaacagaataaacaagtggaacatcagctggaagaagaaaagaaagcaaacaacgagaaacagaaagccgaaagggagctagaggttcaaatccagagattgaacatacagaaagggaaactaaatacggacctgtaccacacgaaacgttctctcagatactttgaagaagagtccaaggatctggccgtccgtctgcaacattcattgcagcgtaaaggagagttagagcgggctctctctgctgtcaccgccacacagaagaagaaggcggagaggcagttctccagccgcagtaaagcacgtatggagtggaagttagagcagtccatgcgggagcaggcactgctgaaagcgcagctgacacagttgaaggagtcacttaaagaagtccagctagagagggatgaatatgctgaacatctaaaaggagagagggcccggtggcagcagaggatgagaaaaatgtcgcaggaggtttgctcgttgaagaaggagaagaagcatgataaatatcgggtagagaagctggagaggagcttgtccaaactcaaacaccagatggctgaacctctgcccccggagcccccagcagtgccctctgaggtggagctgcagcacctgaggaaggaactagagagagtggcaggagagctccaggcccaggtggagtacaatcagcgcataagtctcctgaatgaggggcaaaaggagaggcttcgggagcaggaggagaggcttcaggagcagcaggagaggcttccagagcaggaggagaggcttcagcagctggccgagccacagaacagcttcaaggagctgaacaatgagaacaagagcgtactacagttggagcagcaagtaaaggagctgcaggagaagctaggcaaggagcgtctggaagctgcgagccagcagaaacagcagctaacggcccagttgagcctcatggctctccctggggaaggagatggaggaggacatctggacagtgagggggaggaggcacctcggcccattcctagcatcccacaggacctggagagcagggaggccatgagcggctttatggaccacctggaggagaaggcagacctgagtgagctggtggagaaagaagaacttggattcttccagtactacagagagagatgccatcagaaagtttatcaccctataacaaagccagggggcagtgccaaagatgcagcaccgggaggaggacaccatcaggctggccctggacagggaggagatgaaggtgaagctgctggagctgcaggagatggtgttgcagctggtggcgactacaagggacacagcaaattcttggtgactgcccagaaccctgctcatgagcccagtccaggagccccagccccccaggagcttggggctgcccacaagcatggtgatctttgtgaggtgagcctcactgacagcgtggagcctgtgcaaggagaggccagggagggttctccccacgacaaccctactgcacagccgatcgtgcaggaccaccaggagcacccaggcttgggcagcaactgctgtgtgccattcttttgctgggcttggctgccaagaagaaggagataa

SEQ ID NO: 138491 - DNA, 5237 bp, Homo sapiens
  Payload ID: 7128
  Gene Symbol: GOLGA8F
  Gene Name: golgin A8 family, member F
  Uniprot ID: Q08AF8
  ENST ID: ENST00000526619
  CDS Start-End: 990-2282
agtcgcacagctacctggtaggtgactggaggtgttgatcagtgcttggtgggattttgctgatgtggccccaagcccgcctccctccccaccctgcgatggcagaagaaactcgacaaagtaaattggcagcagccaagagaaagttaaaagaatattggcagagaaacagccctggtgttccagcaggagccaagaggaacaggaaaacaaatggcagcatccatgagacagccacttctggtggttgccactcacctggagattcagcaacaggtatccacggggagagccctacatcatctgctaccctgaaggatctggagagcccgtgccaagaactagcagtagtcccagactcgaggtccgtaaaagtcagtcaactgaagaacaccatcaaatctttgaaacaacagaataaacaagtggaacatcagctggaagaagtaacatgatttctttgtttgctcgcgacatgactgctcggtttgggggacactcagatgtagaggccccgagtctcgtctcacccactcccagcctggggaagaaggctcaccccccagagtccaccccatcccccacagggtccctgataacccggtcccatgggtgggcctgtcccggggcaggggcagtggtggcattctggggacatgtctcttgcagtaccatctctgcctctgcctggttagatctctgtcttcctcttcctacaggaaaagaaagcaaacaacgagaaacagaaagccgaaagggagctagaggttcaaatccagagattgaacatacagaaagggaaactaaatacggacctgtaccacacgaaacgttctctcagatactttgaagaagagtccaaggatctggccgtccgtctgcaacattcattgcagcgtaaaggagagttagagcgggctctctctgctgtcaccgccacacagaagaagaaggcggagaggcagttctccagccgcagtaaagcacgtatggagtggaagttagagcagtccatgcgggagcaggcactgctgaaagcgcagctgacacagttgaaggagtcacttaaagaagtccagctagagagggatgaatatgctgaacatctaaaaggagagagggcccggtggcagcagaggatgagaaaaatgtcgcaggaggtttgctcgttgaagaaggagaagaagcatgataaatatcgggtagagaagctggagaggagcttgtccaaactcaaacaccagatggctgaacctctgcccccggagcccccagcagtgccctctgaggtggagctgcagcacctgaggaaggaactagagagagtggcaggagagctccaggcccaggtggagtacaatcagcgcataagtctcctgaatgaggggcaaaaggagaggcttcgggagcaggaggagaggcttcaggagcagcaggagaggcttccagagcaggaggagaggcttcagcagctggccgagccacagaacagcttcaaggagctgaacaatgagaacaagagcgtactacagttggagcagcaagtaaaggagctgcaggagaagctaggcaaggagcgtctggaagctgcgagccagcagaaacagcagctaacggcccagttgagcctcatggctctccctggggaaggagatggaggaggacatctggacagtgagggggaggaggcacctcggcccattcctagcatcccacaggacctggagagcagggaggccatgagcggctttatggaccacctggaggagaaggcagacctgagtgagctggtggagaaagaagaacttggattcttccagtactacagagagagatgccatcagaaagtttatcaccctataacaaagccagggggcagtgccaaagatgcagcaccgggaggaggacaccatcaggctggccctggacagggaggagatgaaggtgaagctgctggagctgcaggagatggtgttgcagctggtggcgactacaagggacacagcaaattcttggtgactgcccagaaccctgctcatgagcccagtccaggagccccagccccccaggagcttggggctgcccacaagcatggtgatctttgtgaggtgagcctcactgacagcgtggagcctgtgcaaggagaggccagggagggttctccccacgacaaccctactgcacagccgatcgtgcaggaccaccaggagcacccaggcttgggcagcaactgctgtgtgccattcttttgctgggcttggctgccaagaagaaggagataaacatcaccatcgtcaaagagctgctgaagaaatttttaaaaaagaaacaaagttatggggttaatctcctacacaattcatttacttcatttgaatgttatagccacttatgattatttgtgtttctaatttatagtttaagttcatttgtaaatagttaaaagagagtgggtctctgtggctttcactgatgttcactctggcatactttcgcaattttctttttcaatttcataattgtaggtcattagcatgcatattgagtttgcccttacgtggtgggagttcaaacacacaaagacccactatttgcacaaaactattcttgctggtttggaataggctgccatgtgtttttaatgttattgcagcatgtatattcattacagaattcagataaaatgtgcctatgttctgctgttgtttgatctaatcttaatcacagtgagctcttcattagcacaatatgtggtttgccccaagtgtgcactatttaatactttgtaatatgccaccaagagtactgacatttagagttgtttaaaggccgagaactggaaacagcctttccctcattttctgtgtattggtgatgggagtaataacattttgggggagctttttaaatttcacagaagaggaaagttgcctgctctggcaggtatgtgcaagatagagtgtgtttcatttgttctgttgccaagaattagtgctgtactattgtagttcctttaggatttgtatgtgctctgggctcatgaagatattgcatcatgagcttcagcagttgtactcttttttgatgacctaaaaagggcttatttctgaggaatgaaaggttcccatcattgactacggatgtggaaaacctttcctagcttagagcatttgtatctatattttaaagtcagagttcatgttacctgttttaatcacatgactgcatgtcccagtacacaaaagggcactggttggcattcttcttaatgtatttagtaaagatcataagaaatcctttaagagttcaaatgtccctggaacaggcatacaagctctagtcaagaatgaattagagtgaaggaaagctgtgtgacacctggcattcctctgttcatggagcttctttgaggcttgaagattgattttaccatctagaccactctgcctattcttcaaccaccttggttactttgacataggaattgacttcttttccttgaatggaaaacactttgaaataataataaacattgttataaactaatatatgtgagagtgcttagttgaaacaaaaaggagttttagtagacagtattatactatctttgaaaatcaaggagaagtttatgcaacttaaaatgtgtacaaactgcagtgcaatctactgttggtgaatgtcagtgtattatcaggaaacatgtctatacaatcacagagttatatttcctcacaaacttctttgtgaagagtgaaatgtgtttctgtacctctgggtttcacttacgggcatattttgtgcagtatttatgtgattgtgcctatgcatgatgaatgaatgaatttcagttgtacattgcctaaatcataacttgatgatgcttgggaaagactcaacagttaaaacttcatgaagttctaatgtctgtgttccaaaacacatcacattattaggatgtagggagatatgtatgtgtgctccctggggtggggatttctagttactagaccatctccatttttagcatttggcatcctcatgatacttttataaatacgacattaacaggagagcagcagtacgattttgccgatggaataacagatttgccggcaatcactgaaagagtgcaaacatcgggtccttgtgacttcaacggactcttccaaattgtatgaatgtatcaatgtattagataaacccagtttcagaatgataaagaaaaaatgttagaccaaataatgcggctagttaacagtggtacgatttctcgcccgtggctttaaaatgcacttaaagtcctgtccttgccttttattttctgaacttgatgtttttgcattctttgagttcagtttaaagacaactacgagcatctgtaaccaatctgacaataatgtgttcatcaggtgcctgtggattaaatcacatactggcatatttaagctgaatgtcaatctggaaaataaattgactgtattaacggaaataccactctttgtgtagatatttgtcgtatatttaagaaaaagctaaaaagaatggaaatcgcatgactataacttaagtctttcttcaaagtgcatgcagtcttttgcgatacctcattcagccaagtattggtattcttcctcattcggtataaggcagctttcaatttgcttagagggcaacattggaaggttagagttcatcagaaacagaattctaaaatgtgagttcaattcaataaatttgaatttctgtaggaagaatcaaatcaccgatttaaagattgcaatatataataatcatttttaaagtattggattaaatctgataggttttccagaaatgaacaaaaatcagctctaaaaccaaagctgatttttagaaaatttgaaaatgtaaatcagccctatccatactatagtttctctaaaactttatctgaaacagtcattttaaaataactattaaacaatgtaactgctatcttaatgttctgaaataagttaaaacattttaaaatatgaatactgtaaaggaaataaacggtgggaaggaaaagtagagaaagaaatgccaattccagtccaaagctttatttgccaagttttcttagaatgaattttaccaatttatgaattcttgtaagcggaatgtaaaacggaaatactgaaagacttttgcctaaagtggcattattgactgctggtgtgatgctactgtaatgtaataaattattaagttgttgc

SEQ ID NO: 138492 - DNA, 5237 bp, Homo sapiens
  Payload ID: 7128
  Gene Symbol: GOLGA8F
  Gene Name: golgin A8 family, member F
  ENST ID: ENST00000618263
  CDS Start-End: 990-2282
agtcgcacagctacctggtaggtgactggaggtgttgatcagtgcttggtgggattttgctgatgtggccccaagcccgcctccctccccaccctgcgatggcagaagaaactcgacaaagtaaattggcagcagccaagagaaagttaaaagaatattggcagagaaacagccctggtgttccagcaggagccaagaggaacaggaaaacaaatggcagcatccatgagacagccacttctggtggttgccactcacctggagattcagcaacaggtatccacggggagagccctacatcatctgctaccctgaaggatctggagagcccgtgccaagaactagcagtagtcccagactcgaggtccgtaaaagtcagtcaactgaagaacaccatcaaatctttgaaacaacagaataaacaagtggaacatcagctggaagaagtaacatgatttctttgtttgctcgcgacatgactgctcggtttgggggacactcagatgtagaggccccgagtctcgtctcacccactcccagcctggggaagaaggctcaccccccagagtccaccccatcccccacagggtccctgataacccggtcccatgggtgggcctgtcccggggcaggggcagtggtggcattctggggacatgtctcttgcagtaccatctctgcctctgcctggttagatctctgtcttcctcttcctacaggaaaagaaagcaaacaacgagaaacagaaagccgaaagggagctagaggttcaaatccagagattgaacatacagaaagggaaactaaatacggacctgtaccacacgaaacgttctctcagatactttgaagaagagtccaaggatctggccgtccgtctgcaacattcattgcagcgtaaaggagagttagagcgggctctctctgctgtcaccgccacacagaagaagaaggcggagaggcagttctccagccgcagtaaagcacgtatggagtggaagttagagcagtccatgcgggagcaggcactgctgaaagcgcagctgacacagttgaaggagtcacttaaagaagtccagctagagagggatgaatatgctgaacatctaaaaggagagagggcccggtggcagcagaggatgagaaaaatgtcgcaggaggtttgctcgttgaagaaggagaagaagcatgataaatatcgggtagagaagctggagaggagcttgtccaaactcaaacaccagatggctgaacctctgcccccggagcccccagcagtgccctctgaggtggagctgcagcacctgaggaaggaactagagagagtggcaggagagctccaggcccaggtggagtacaatcagcgcataagtctcctgaatgaggggcaaaaggagaggcttcgggagcaggaggagaggcttcaggagcagcaggagaggcttccagagcaggaggagaggcttcagcagctggccgagccacagaacagcttcaaggagctgaacaatgagaacaagagcgtactacagttggagcagcaagtaaaggagctgcaggagaagctaggcaaggagcgtctggaagctgccagccagcagaaccagcagctaacggcccagttgagcctcatggctctccctggggaaggagatggaggaggacatctggacagtgagggggaggaggcacctcggcccattcctagcatcccacaggacctggagagcagggaggccatgagcggctttatggaccacctggaggagaaggcagacctgagtgagctggtggagaaagaagaacttggattcttccagtactacagagagagatgccatcagaaagtttatcaccctataacaaagccagggggcagtgccaaagatgcagcaccgggaggaggacaccatcaggctggccctggacagggaggagatgaaggtgaagctgctggagctgcaggagatggtgttgcagctggtggcgactacaagggacacagcaaattcttggtgactgcccagaaccctgctcatgagcccagtccaggagccccagccccccaggagcttggggctgcccacaagcatggtgatctttgtgaggtgagcctcactgacagcgtggagcctgtgcaaggagaggccagggagggttctccccacgacaaccctactgcacagccgatcgtgcaggaccaccaggagcacccaggcttgggcagcaactgctgtgtgccattcttttgctgggcttggctgccaagaagaaggagataaacatcaccatcgtcaaagagctgctgaagaaatttttaaaaaagaaacaaagttatggggttaatctcctacacaattcatttacttcgtttgaatgttatagccacttatgattatttgtgtttctaatttatagtttaagtttatttgtaaatagttaaaagagagtgggtctctgtggctttcactgatgttcactctggcatactttcgcaattttctttttcaatttcataattgtaggtcattagcatgcatattgagtttgcccttacgtggtgggagttcaaacacacaaagacccactatttgcacaaaactattcttgctggtttggaataggctgccatgtgtttttaatgttattgcagcatgtatattcattacagaattcagataaaatgtgcctatgttctgctgttgtttgatctaatcttaatcacagtgagctcttcattagcacaatatgtggtttgccccaagtgtgcactatttaatactttgtaatatgccaccaagagtactgacatttagagttgtttaaaggccgagaactggaaacagcctttccctcattttctgtgtattggtgatgggagtaataacattttgggggagctttttaaatttcacagaagaggaaagttgcctgctctggcaggtatgtgcaagatagagtgtgtttcatttgttctgttgccaagaattagtgctgtactattgtagttcctttaggatttgtatgtgctctgggctcatgaagatattgcatcatgagcttcagcagttgtactcttttttgatgacctaaaaagggcttatttctgaggaatgaaaggttcccatcattgactacggatgtggaaaacctttcctagcttagagcatttgtatctatattttaaagtcagagttcatgttacctgttttaatcacatgactgcatgtcccagtacacaaaagggcactggttggcattcttcttaatgtatttagtaaagatcagaagaaatcctttaagagttcaaatgtccctggaacaggcatacaggctctagtcaagaatgaattagagtgaaggaaagctgtgtgacacctggcattcctctgttcatggagcttctttgaggcttgaagattgattttaccatctagaccactctgcctattcttcaaccaccttggttactttgacataggaattgacttcttttccttgaatggaaaacactttgaaataataataaacattgttataaactaatatatgtgagagtgcttagttgaaacaaaaaggagttttagtagacagtattatactatctttgaaaatcaaggagaagtttatgcaacttaaaatgtgtacaaactgcagtgcaatctactgttggtgaatgtcagtgtattatcaggaaacatgtctatacaatcacagagttatatttcctcacaaacttctttgtgaagagtgaaatgtgtttctgtacctctgggtttcacttacgggcatattttgtgcagtatttatgtgattgtgcctatgcatgatgaatgaatgaatttcagttgtacattgcctaaatcataacttgatgatgcttgggaaagactcaacagttaaaacttcatgaagttctaatgtctgtgttccaaaacacatcacattattaggatgtagggagatatgtatgtgtgctccctggggtggggatttctagttactagaccatctccatttttagcatttggcatcctcatgatacttttataaatacgacattaacaggagagcagcagtacgattttgccgatggaataacagatttgccggcaatcactgaaagagtgcaaacatcgggtccttgtgacttcaacggactcttccaaattgtatgaatgtatcaatgtattagataaacccagtttcagaatgataaagaaaaaatgttagaccaaataatgcggctagttaacagtggtacgatttctcgcccgtggctttaaaatgcacttaaagtcctgtccttgccttttattttctgaacttgatgtttttgcattctttgagttcagtttaaagacaactacgagcatctgtaaccaatctgacaataatgtgttcatcaggtgcctgtggattaaatcacatactggcatatttaagctgaatgtcaatctggaaaataaattgactgtattaacggaaataccactctttgtgtagatatttgtcgtatattgaagaaaaagctaaaaagaatggaaatcgcatgactataacttaagtctttcttcaaagtgcatgcagtcttttgcgatacctcattcagccaagtattggtattcttcctcattcggtataaggcagctttcaatttgcttagagggcaacattggaaggttagagttcatcagaaacagaattctaaaatgtgagttcaattcaataaatttgaatttctgtaggaagaatcaaatcaccgatttaaagattgcaatatataataatcatttttaaagtattggattaaatctgataggttttccagaaatgaacaaaaatcagctctaaaaccaaagctgatttttagaaaatttgaaaatgtaaatcagccctatccatactatagtttctctaaaactttatctgaaagagtcattttaaaataactattaaacaatgtaactgctatcttaatgttctgaaataagttaaaacattttaaaatatgaatactgtaaaggaaataaacggtgggaaggaaaagtagagaaagaaatgccaattccagtccaaagctttatttgccaagttttcttagaatgaattttaccaatttatgaattcttgtaagcggaatgtaaaacggaaatactgaaagacttttgcctaaagtggcattattgactgctggtgtgatgctactgtaatgtaataaattattaagttgttgc

SEQ ID NO: 138493 - DNA, 2009 bp, Homo sapiens
  Payload ID: 7128
  Gene Symbol: GOLGA8F
  Gene Name: golgin A8 family, member F
  ENST ID: ENST00000615448
  CDS Start-End: 63-2009
agtcgcacagctacctggtaggtgactggaggtgttgatcagtgcttggtgggattttgctgatgtggccccaagcccgcctccctccccaccctgcgatggcagaagaaactcgacaaagtaaattggcagcagccaagagaaagttaaaagaatattggcagagaaacagccctggtgttccagcaggagccaagaggaacaggaaaacaaatggcagcatccatgagacagccacttctggtggttgccactcacctggagattcagcaacaggtatccacggggagagccctacatcatctgctaccctgaaggatctggagagcccgtgccaagaactagcagtagtcccagactcgaggtccgtaaaagtcagtcaactgaagaacaccatcaaatctttgaaacaacagaataaacaagtggaacatcagctggaagaagaaaagaaagcaaacaacgagaaacagaaagccgaaagggagctagaggttcaaatccagagattgaacatacagaaagggaaactaaatacggacctgtaccacacgaaacgttctctcagatactttgaagaagagtccaaggatctggccgtccgtctgcaacattcattgcagcgtaaaggagagttagagcgggctctctctgctgtcaccgccacacagaagaagaaggcggagaggcagttctccagccgcagtaaagcacgtatggagtggaagttagagcagtccatgcgggagcaggcactgctgaaagcgcagctgacacagttgaaggagtcacttaaagaagtccagctagagagggatgaatatgctgaacatctaaaaggagagagggcccggtggcagcagaggatgagaaaaatgtcgcaggaggtttgctcgttgaagaaggagaagaagcatgataaatatcgggtagagaagctggagaggagcttgtccaaactcaaacaccagatggctgaacctctgcccccggagcccccagcagtgccctctgaggtggagctgcagcacctgaggaaggaactagagagagtggcaggagagctccaggcccaggtggagtacaatcagcgcataagtctcctgaatgaggggcaaaaggagaggcttcgggagcaggaggagaggcttcaggagcagcaggagaggcttccagagcaggaggagaggcttcagcagctggccgagccacagaacagcttcaaggagctgaacaatgagaacaagagcgtactacagttggagcagcaagtaaaggagctgcaggagaagctaggcaaggagcgtctggaagctgccagccagcagaaccagcagctaacggcccagttgagcctcatggctctccctggggaaggagatggaggaggacatctggacagtgagggggaggaggcacctcggcccattcctagcatcccacaggacctggagagcagggaggccatgagcggctttatggaccacctggaggagaaggcagacctgagtgagctggtggagaaagaagaacttggattcttccagtactacagagagagatgccatcagaaagtttatcaccctataacaaagccagggggcagtgccaaagatgcagcaccgggaggaggacaccatcaggctggccctggacagggaggagatgaaggtgaagctgctggagctgcaggagatggtgttgcagctggtggcgactacaagggacacagcaaattcttggtgactgcccagaaccctgctcatgagcccagtccaggagccccagccccccaggagcttggggctgcccacaagcatggtgatctttgtgaggtgagcctcactgacagcgtggagcctgtgcaaggagaggccagggagggttctccccacgacaaccctactgcacagccgatcgtgcaggaccaccaggagcacccaggcttgggcagcaactgctgtgtgccattcttttgctgggcttggctgccaagaagaaggagataa

SEQ ID NO: 138494 - DNA, 2009 bp, Homo sapiens; identical to SEQ ID NO: 138490
  Payload ID: 7129
  Gene Symbol: GOLGA8G
  Gene Name: golgin A8 family, member G
  ENST ID: ENST00000525590
  CDS Start-End: 63-2009

SEQ ID NO: 138495 - DNA, 2009 bp, Homo sapiens; identical to SEQ ID NO: 138490
  Payload ID: 7129
  Gene Symbol: GOLGA8G
  Gene Name: golgin A8 family, member G
  Uniprot ID: Q08AF8
  ENST ID: ENST00000612831
  CDS Start-End: 63-2009

SEQ ID NO: 138496 - DNA, 1947 bp, Homo sapiens
  Payload ID: 7129
  Gene Symbol: GOLGA8G
  Gene Name: golgin A8 family, member G
  ENST ID: ENST00000619115
  CDS Start-End: 1-1947
atgtggccccaagcccgcctccctccccaccctgcgatggcagaagaaactcgacaaagtaaattggcagcagccaagagaaagttaaaagaatattggcagagaaacagccctggtgttccagcaggagccaagaggaacaggaaaacaaatggcagcatccatgagacagccacttctggtggttgccactcacctggagattcagcaacaggtatccacggggagagccctacatcatctgctaccctgaaggatctggagagcccgtgccaagaactagcagtagtcccagactcgaggtccgtaaaagtcagtcaactgaagaacaccatcaaatctttgaaacaacagaataaacaagtggaacatcagctggaagaagaaaagaaagcaaacaacgagaaacagaaagccgaaagggagctagaggttcaaatccagagattgaacatacagaaagggaaactaaatacggacctgtaccacacgaaacgttctctcagatactttgaagaagagtccaaggatctggccgtccgtctgcaacattcattgcagcgtaaaggagagttagagcgggctctctctgctgtcaccgccacacagaagaagaaggcggagaggcagttctccagccgcagtaaagcacgtatggagtggaagttagagcagtccatgcgggagcaggcactgctgaaagcgcagctgacacagttgaaggagtcacttaaagaagtccagctagagagggatgaatatgctgaacatctaaaaggagagagggcccggtggcagcagaggatgagaaaaatgtcgcaggaggtttgctcgttgaagaaggagaagaagcatgataaatatcgggtagagaagctggagaggagcttgtccaaactcaaacaccagatggctgaacctctgcccccggagcccccagcagtgccctctgaggtggagctgcagcacctgaggaaggaactagagagagtggcaggagagctccaggcccaggtggagtacaatcagcgcataagtctcctgaatgaggggcaaaaggagaggcttcgggagcaggaggagaggcttcaggagcagcaggagaggcttccagagcaggaggagaggcttcagcagctggccgagccacagaacagcttcaaggagctgaacaatgagaacaagagcgtactacagttggagcagcaagtaaaggagctgcaggagaagctaggcaaggagcgtctggaagctgcgagccagcagaaacagcagctaacggcccagttgagcctcatggctctccctggggaaggagatggaggaggacatctggacagtgagggggaggaggcacctcggcccattcctagcatcccacaggacctggagagcagggaggccatgagcggctttatggaccacctggaggagaaggcagacctgagtgagctggtggagaaagaagaacttggattcttccagtactacagagagagatgccatcagaaagtttatcaccctataacaaagccagggggcagtgccaaagatgcagcaccgggaggaggacaccatcaggctggccctggacagggaggagatgaaggtgaagctgctggagctgcaggagatggtgttgcagctggtggcgactacaagggacacagcaaattcttggtgactgcccagaaccctgctcatgagcccagtccaggagccccagccccccaggagcttggggctgcccacaagcatggtgatctttgtgaggtgagcctcactgacagcgtggagcctgtgcaaggagaggccagggagggttctccccacgacaaccctactgcacagccgatcgtgcaggaccaccaggagcacccaggcttgggcagcaactgctgtgtgccattcttttgctgggcttggctgccaagaagaaggagataa

SEQ ID NO: 138497 - DNA, 1899 bp, Homo sapiens
  Payload ID: 7130
  Gene Symbol: GOLGA8H
  Gene Name: golgin A8 family, member H
  Uniprot ID: P0CJ92
  ENST ID: ENST00000566740
  CDS Start-End: 1-1899
atggcagaagaaactcaacacaacaaattggctgcagccaagaaaaagttaaaagaatattggcagaaaaacagccctagagttccagcaggagcgaacaggaacaggaaaacaaatggcagtgtccctgagaaagccacttctggtggttgccagccacctggggattcagcaacaggtttccacagggaaggccctacatcatctgctaccctgaaagatctggagagcccgtgccaagaacgagcagtagtcctggattcaaggtccgtagaaatcagtcaactgaagaacaccatcaaatctctgaaacaacagaagaaacaagtggaacatcagctggaagaagaaaagaaagcaaacaacaagaaacagaaagccaaaagggtgctagaggttcaaatccagacattgaacatacagaaagggaaactaaatacggacctgtaccacatgaaacgttctctcagatactttgaagaaaagtccaaggatctggctgtctgcctgcaacattcattgcagcgtaaaggagagttagagagtgttctctctaatgtcatggccacacagaagaagaaggcaaaccagttgtccagccgcagcaaagcacgtacggagtggaagttagagcagtccatgcgggaggaggcactactgaaagtgcagctgacacagttgaaggagtcatttcaacaagtccaattagaaagagatgagtgtgctgaacatctaaaaggagagagggcccggtggcagcagaggatgagaaaaatgtcgcaggagatttgcacattaaagaaagagaagcagcaagatatgcgtcgggtagagaagctggagaggagcttgtccaaactcaaaaaccagatggctgaacccttgcccccggagcccccagcagtgccctctgaggtggagctgcagcacctgaggaaggaactagagagagtggcaggagagctccaggcccaggtcaaaaagaatcagcgcataagtctcctgaaccagcgacaagaagagaggattcaggagcaggaagagaggcttcggaagcaggaggagaggattcaggagcagcacaagagccttcagcagctggccaagccacagagcgtcttcgaggagccgaacaatgagaacaagaacgcactgcagttggagcagcaagtaaaggagctacaggagaagcttggcgaggagcacctggaagctgccagccagcagaaccagcagctaacggcccagctgagcctcatggctctccctggggaaggacacggaggagaacatctggacagtgagggggaggaggcacctcggcccatgccgagtgtcccagaggacccggagagcagggaggccatgagcagctttatggaccacctggaggagaaggcagacctgagtgagctggtgaagaaaaaagaactctgcttcatccaccactggcgagacagatgccatcagaaaacccatcaccttttatcagaaccagggggccgtgccaaagatgcggcactgggaggaggacaccatcaggctggagctcagggaggagatgaaggtgaagctgctggagctgcagcagatggtattgcggcttacagcaactacaacaatgggcacagaaaattcctggccgctgcccacaactctgctgatgagcccggtccaggagccccagccccccaggagcttggggctgcagacaagcatggtgatctttgtgaggtgagcctcacctcctctgcccaaggagaggccagggaggatcctctccttgacaagcctactgcacagccgatcgtgcaggaccaccaggagcacccaggcttgggcagcaactgctgtgtgccattgttgtgctgggcttggctgccaagaagaaggagataa

SEQ ID NO: 138498 - DNA, 1899 bp, Homo sapiens
  Payload ID: 7131
  Gene Symbol: GOLGA8J
  Gene Name: golgin A8 family, member J
  Uniprot ID: A6NMD2
  ENST ID: ENST00000567927
  CDS Start-End: 1-1899
atggcagaagaaactcaacacaacaaattggctgcagccaagaaaaagttaaaagaatattggcagaaaaacagccctagagttccagcaggagcgaacaggaacaggaaaacaaatggcagtatccctgagaaagccacttctggtggttgccagccacctagggattcagcaacaggtttccacagggaaggccctacatcatctgctaccctgaaagatctggagagcccgtgccaagaacgagcagtagtcctggattcaaggtccgtagaaatcagtcaactgaagaacaccatcaaatctctgaaacaacagaagaaacaagtggaacatcagctggaagaagaaaagaaagcaaacaacaagaaacagaaagccaaaagggtgctagaggttcaaatccagacattgaacatacagaaagaggaactaaatacggacctgtaccacatgaaacgttctctcagatactttgaagaaaagtccaaggatctggctgtccgcctgcaacattcattgcagcgtaaaggagagttagagagtgttctctctaatgtcatggccacacagaagaagaaggcaaaccagttgtccagccgcagcaaagcacgtacggagtggaagttagagcagtccatgcgggaggaggcactactgaaagtgcagctgacacagttcaaggagtcatttcaacaagtccaattagaaagagatgagtattctgaacatctaaaaggagagagggcccggtggcagcagaggatgagaaaaatgtcgcaggagatttgcacattaaagaaagagaagcagcaagatatgcgtcgggtagagaagctggagaggagcttgtccaaactcaaaaaccagatggctgaacccttgcccccggagcccccagcagtgccctctgaggtggagctgcagcacctgaggaaggaactagagagagtggcaggagagctccaggcccaggtcaaaaacaatcagcgcataagtctcctgaaccagcgacaagaagagaggattcgggagcaggaagagaggcttcggaagcaggaggagaggattcaggagcagcacaagagccttcagcagctggccaagccacagagcgtcttcaaggagccgaacaatgagaacaagaacgcactgcagttggagcagcaagtaaaggagctacaggagaagcttggcgaggagcacctggaagctgccagccagcagaaccagcagctaacggcccagctgagcctcatggctctccctggggaaggacacggaggagaacatctggacagtgagggggaggaggcacctcggcccatgccgagtgtcccagaggacccggagagcagggaggccatgagcagctttatggaccacctggaggagaaggcagacctgagtgagctggtgaagaaaaaagaactctgcttcatccaccactggcgagagagatgccatcagaaaacccatcaccttttatcagaaccagggggccgtgccaaagatgcggcactgggaggaggacaccatcaggctggagctcagggaggagatgaaggtgaagctgctggagctgcagcagatggtattgcggcttacagcaactacaacaatgggcacagaaaattcctggccgctgcccacaactctgctgatgagcccggtccaggagccccagccccccaggagcttggggctgcagacaagcatggtcatctttgtgaggtgagcctcacctcctctgcccaaggagaggccagggaggatcctctccttgacaagcctactgcacagccgatcgtgcaggaccaccaggagcacccaggcttgggcagcaactgctgtgtgccattcttgtgctgggcttggctgccaagaagaaggagataa

SEQ ID NO: 138499 - DNA, 5199 bp, Homo sapiens
  Payload ID: 7131
  Gene Symbol: GOLGA8J
  Gene Name: golgin A8 family, member J
  Uniprot ID: A6NMD2
  ENST ID: ENST00000611771
  CDS Start-End: 99-1997
agtcacacagctgcctggtaggtgactggaggccttgatcggttctcattgagattttgctgctgtgaccccaaccctgcctccctccccaccctgcgatggcagaagaaactcaacacaacaaattggctgcagccaagaaaaagttaaaagaatattggcagaaaaacagccctagagttccagcaggagcgaacaggaacaggaaaacaaatggcagtatccctgagaaagccacttctggtggttgccagccacctagggattcagcaacaggtttccacagggaaggccctacatcatctgctaccctgaaagatctggagagcccgtgccaagaacgagcagtagtcctggattcaaggtccgtagaaatcagtcaactgaagaacaccatcaaatctctgaaacaacagaagaaacaagtggaacatcagctggaagaagaaaagaaagcaaacaacaagaaacagaaagccaaaagggtgctagaggttcaaatccagacattgaacatacagaaagaggaactaaatacggacctgtaccacatgaaacgttctctcagatactttgaagaaaagtccaaggatctggctgtccgcctgcaacattcattgcagcgtaaaggagagttagagagtgttctctctaatgtcatggccacacagaagaagaaggcaaaccagttgtccagccgcagcaaagcacgtacggagtggaagttagagcagtccatgcgggaggaggcactactgaaagtgcagctgacacagttcaaggagtcatttcaacaagtccaattagaaagagatgagtattctgaacatctaaaaggagagagggcccggtggcagcagaggatgagaaaaatgtcgcaggagatttgcacattaaagaaagagaagcagcaagatatgcgtcgggtagagaagctggagaggagcttgtccaaactcaaaaaccagatggctgaacccttgcccccggagcccccagcagtgccctctgaggtggagctgcagcacctgaggaaggaactagagagagtggcaggagagctccaggcccaggtcaaaaacaatcagcgcataagtctcctgaaccagcgacaagaagagaggattcgggagcaggaagagaggcttcggaagcaggaggagaggattcaggagcagcacaagagccttcagcagctggccaagccacagagcgtcttcaaggagccgaacaatgagaacaagaacgcactgcagttggagcagcaagtaaaggagctacaggagaagcttggcgaggagcacctggaagctgccagccagcagaaccagcagctaacggcccagctgagcctcatggctctccctggggaaggacacggaggagaacatctggacagtgagggggaggaggcacctcggcccatgccgagtgtcccagaggacccggagagcagggaggccatgagcagctttatggaccacctggaggagaaggcagacctgagtgagctggtgaagaaaaaagaactctgcttcatccaccactggcgagagagatgccatcagaaaacccatcaccttttatcagaaccagggggccgtgccaaagatgcggcactgggaggaggacaccatcaggctggagctcagggaggagatgaaggtgaagctgctggagctgcagcagatggtattgcggcttacagcaactacaacaatgggcacagaaaattcctggccgctgcccacaactctgctgatgagcccggtccaggagccccagccccccaggagcttggggctgcagacaagcatggtcatctttgtgaggtgagcctcacctcctctgcccaaggagaggccagggaggatcctctccttgacaagcctactgcacagccgatcgtgcaggaccaccaggagcacccaggcttgggcagcaactgctgtgtgccattcttgtgctgggcttggctgccaagaagaaggagataaacatcaccatcctcaaagagctgctcaagaaatttttaaataagaaaccaagttatggggttaatctcctacacaattcatttacttcctttgaatgttagagtcactcatgattatttgtttttctaatttatagttttaagtttatttgtaaaaagttaaaagagagtgggtgtctgtggctctcactgatgttcactctggcatcctttagcatttttcttttttaatttcataattgtaggtcattagcgtgcatatcgagtttgcccttacgtggtgggagttcaaacacacaaagacccactctttgcccaaaactgttctctttggtttggaataggctgccatgcttttttaatgttattgcagcatgtatattcactacagaattcagacaaaatttgcctatgttctgctgttgtttgatctaatcttaatcacagtgagctcttcattagctcaatatgtagtttgcccccaagtgtgcactgtttattactttgtaatatgccactatgagtactgacatttagagttgtttaaaggccaagaactggaaacagcctttcctccattttctgtgtgttggtgatgggagtgataaccttttgggggagctttttaaatctcacagaagaggaaagtggcctcctctggcaggtacgtgcaggatagagtgtgtttcatctgttccggtgcccggaattagcagtgtattatggtggttcccttaggatttgtatgtgctctgggctcatgaagatactgcatcatgagctgcagcagttgtactctttttcgatgacctaaaaagggcttatttctgaggaatgaaaggttcccatcattgactgtggatgtgggaaacctttcctagcttagagcatttgtatctacaatacattttaaagtcagagttcatgttacctgttttaatcacatgactacatgtcccagtacacaaaagggcactggttggcattcttcttaatgtatttagtgaagatcataagaaatcctttatgagttcaaacgttcctggaacaggcatacaggctctagtcaagaatgaattagagtgaaggaaagctgtgtgacacctggcattcctctctgttcacggagattctttgaggcttgaagattgattttaccatctagacctctttggctaatacctattcttcaaccaccttggttactctgacataggaatttacttctttttctttgaatggaaaacactttaaaaaataatagaaacattattataaactaatatatgtgagatacttagttgaaacaaaaaggagttttagtagacggtattgtactctctttgaaaatcaaggagaagtttatgaaacttaaaatgtgtacaaactgcagtgcaatctactgttcgtgaatgtcaatgtattatcaggaaacgtgtctatacaatcacagagttatattttctcacagacttctttacaaagtgaaatatgtttttgtacctctgggtttctgttcgggacatattttgtgcaatatttatgtgattgtgcctatgcatgatgaatgaatacatttcagttatatattgcctaaatcataacttgatgatgcttgggaaagactcaacagttaaaacttcatgaagttctaatgtctgtgttccaaaacacatcacattgttaggatgcagggagataggtgtgtgtgctccctgcggtggggatttctagttactagatcatctccatttttagcatttggcatcctcatgatacttctataaatatgacattaacaggagagcaacaatacgattttaccgatggaataacagatttgctggcattcactgaaagagtgcaaatattcggtccttgtgacttccactgactcttccaaattttatgaatgtatcaatgtattagataaacccagtttcagaatgataaagaaaaaatttagaccaaataatgcagctaattaacagtggtacgatttgtagcccgtgggtttaaaatgcacttaaagtcctgttctcgccttttattttctgaacttgccgcttttgcattctttgagttcagtttaaagacagttactttaagagcattttaaaccctcgggctagaaatcggaccactgttaatcagccacattatttggtctaacgttttttcttttatcattctgaaactgggtttatctaatacattgataaattattgcaaaggtacttttatcgttgaaatcacttcacttttaccctgataaatatcagtgactaggaatgaccttcggatagcgtttagcatctgtaaccaatctgacaataatgtgttcatgaggtgcctatggattaaatcacacactggcatatttaagctgaaggtcagtctggaaaataaatttactatattgactgaaataccactctttgtgtaggtatttgtcatatatttaagaaaaagttaaaaagaatggaaattgtatgacaataactcaagtctttctccaaagtgcatgcagtcttttgcgatacctcattcagccgagtatttgtgctcttcctcattcagtataaggcagctttcagtttgcttagaaggcaacattggaatgttagagttcatcagaaacatagaattttaaactgtgagttccactgaatacattttaatgtctgtaggaagaatcaaaacacctatttaaagatggcaatatataataatcattttaaaagtatttgattcaacctgataattttccagaaatgaaaaaaaaaaatcagctcttaaaccaaagctgattttagaaaatttgaaaatgtaaatcagccctatccataatatagtttctctaaaactttattttaaagagtcattttaaaataatataactattaaaaaatgtaactgctatcttaatgttctgaaataatttaaaacattttaaaatatgaatactgtagtataaaagaaagaaatggtgggaacgaaaagcagagaaagaaatgccaattccagtccaaagttttatttgccaagttttcttagaatgaattttaccagtttatgaattattgtaaagagaatgtgtcgtggaaatactgaaagatttttccctagagtggccttattgactgctggtgtgatgccactgtaatgtaataaattattaagttgtttcaatgtgttgtttt

SEQ ID NO: 138500 - DNA, 1894 bp, Homo sapiens
  Payload ID: 7132
  Gene Symbol: GOLGA8K
  Gene Name: golgin A8 family, member K
  Uniprot ID: D6RF30
  ENST ID: ENST00000512626
  CDS Start-End: 2-1894
gatggcagaagaaactcaacacaacaaattggctgcagccaagaaaaagttaaaagaatattggcagaaaaacagccctagagttccagcaggagcgaacaggaacaggaaaacaaatggcagtatccctgagaaagccacttctggtggttgccagccacctagggattcagcaacaggtttccacagggaaggccctacatcatctgctaccctgaaagatctggagagcccgtgccaagaacgagcagtagtcctggattcaaggtccgtagaaatcagtcaactgaagaacaccatcaaatctctgaaacaacagaagaaacaagtggaacatcagctggaagaagaaaagaaagcaaacaacaagaaacagaaagccaaaagggtgctagaggttcaaatccagacattgaacatacagaaagaggaactaaatacggacctgtaccacatgaaacgttctctcagatactttgaagaaaagtccaaggatctggctgtccgcctgcaacattcattgcagcgtaaaggagagttagagagtgttctctctaatgtcatggccacacagaagaagaaggcaaaccagttgtccagccgcagcaaagcacgtacggagtggaagttagagcagtccatgcgggaggaggcactactgaaagtgcagctgacacagttgaaggagtcttttcaacaagtccaattagaaagagatgagtattctgaacatctaaaaggagagagggcccggtggcagcagaggatgagaaaaatgtcgcaggagatttgcacattaaagaaagagaagcagcaagatatgcgtcgggtagagaagctggagaggagcttgtccaaactcaaaaaccagatggctgaacccttgcccccggagcccccagcagtgccctctgaggtggagctgcagcacctgaggaaggaactagagagagtggcaggagagctccaggcccaggtcaaaaagaatcagcgcataagtctcctgaaccagcgacaagaagagaggattcaggagcaggaagagaggcttcggaagcaggaggagaggattcaggagcagcacaagagccttcagcagctggccaagccacagagcgtcttcgaggagccgaacaatgagaacaagaacgcactgcagttggagcagcaagtaaaggagctacaggagaagcttggcgaggagcacctggaagcggccagccagcagaaccagcagctaacggcccagctgagcctcatggctctccctggggaaggacacggagaacatctggacagtgagggggaggaggcacctcagcccatgccgagtgtcccagaggacctggagagcagggaggccatgagcagctttatggaccacctgaaggagaaggcagacctgagtgagctggtgaaaaaagaactctgcttcatccaccactggcgagacagacgccatcagaaaacccatcaccttttatcagaaccagggggctgtgccaaagatgcggcactgggaggaggacaccatcaggctggagctcagggaggagatgaaggtgaagctgctggagctgcagcagatggtattgcggcttacagcaactacaacaatgggcacagaaaattcctggccgctgcccacaaccctgctgatgagcccggtccaggagccccagctccccaggagcttggggctgcagacaagcatggtgatcttcgtgaggtgagcctcacctcctctgcccaaggagaggccagggaggatcctctccttgacaagcctactgcacagccgatcgtgcaggaccacaaggagcacccaggcttgggcagcaactgctgtgtgccattattttgttgggcttggctgccaagaagaaggagataa

SEQ ID NO: 138501 - DNA, 1899 bp, Homo sapiens
  Payload ID: 7133
  Gene Symbol: GOLGA8M
  Gene Name: golgin A8 family, member M
  Uniprot ID: H3BSY2
  ENST ID: ENST00000563027
  CDS Start-End: 1-1899
atggcagaagaaactcaacacaacaaattggctgcagccaagaaaaagttaaaagaatattggcagaaaaacagccctagagttccagcaggagcgaacaggaacaggaaaacaaatggcagtatccctcagacagccacttctggtggttgccagccacctggggattcagcaacaggttttcacagggaaggccctacatcatctgctaccctgaaagatctggagagcccgtgccaagaacgagcagtagtcctggattcaaggtccgtagaaatcagtcaactgaagaacaccatcaaatctttgaaacaacagaagaaacaagtggaacatcagctggaagaagaaaagaaagcaaacaacaagaaacagaaagccaaaagggtgctagaggttcaactccagacattgaacatacagaaagaggaactaaatacggacctgtaccacatgaaacgttctctcagatactttgaagaaaagtccaaggatctggctgtccgcctgcaacattcattgcagcgtaaaggagagttagagagtgttctctctgatgtcatggccacacagaagaagaaggcaaaccagttgtccagccccagtaaagcaggtacggagtggaagttagagcagtccatgcgggaggaggcactactgaaagtgcagctgacacagttgaaggagtcatttcaacaagtccaattagaaagagatgagtattctgaacatctaaaaggagagagggcccggtggcagcagaggatgagaaaaatgtcgcaggagatttgcacattaaagaaagagaagcagcaagatatgcgtcgggtagagaagctggagaggagcttgtccaaactcaaaaaccagatggctgaacccttgcccccggagcccccagcagtgccctctgaggtggagctgcagcacctgaggaaggaactagagagagtggcaggagagctccaggcccaggtcaaaaacaatcagcgcataagtctcctgaaccagcgacaagaagagaggattcgggagcaggaagagaggcttcggaagcaggaggagaggattcaggagcagcacaagagccttcagcagctggccaagccacagagcgtcttcgaggagccgaacaatgagaacaagagcacactgcagttggagcagcaagtaaaggagctacaggagaagcttggcgaggagcacctggaagctgccagccagcagaaccagcagctaacggcccagctgagcctcatggctctccctggggaaggacacggaggagaacatctggacagtgagggggaggaggcacctcagcccatgccgagtgtcccagaggacccggagagcagggaggccatgagcagctttatggaccacctggaggagaaggcagacctgagtgagcttgtgaagaaacaagaacttcgcttcattcaatactggcaagagagatgccatcagaaaatccatcaccttttatcagaaccagggggccgtgccaaagatgcggcactgggaggaggacaccatcaggctggagctcagggaggagatgaaggtgaagctgctggagctgcagcagatggtattgcggcttacagcaactacaacaatgggcacagaaaattcctggccgctgcccacaactctgctgatgagcccggtccaggagccccagctccccaggagcttggggctgcagacaagcatggtgatctttgtgaggtgagcctcacctcctctgcccaaggagaggccagggaggatcctctccttgacaagcctactgcacagccgatcgtgcaggaccaccaggagcacccaggcttgggcagcaactgctgtgtgccattcttttgctgggcttggctgccaagaagaaggagataa

SEQ ID NO: 138502 - DNA, 5329 bp, Homo sapiens
  Payload ID: 7134
  Gene Symbol: GOLGA8N
  Gene Name: golgin A8 family, member N
  Uniprot ID: F8WBI6
  ENST ID: ENST00000448387
  CDS Start-End: 99-1997
agtcacacagctgcctggtaggtgactggaggccttgatcggttcttattgggattttgctgctgtggccccaacccttcctccctccccaccctgcgatggcagaagaaactcaacacaacaaattggctgcagccaagaaaaagttaaaagaatattggcagaaaaacagacctagagttccagcaggagtgaacaggaacaggaaaacaaatggcagtatccctgagacagccacttccggtggttgccagccacctggggattcagcaacaggtttccacagggaaggccctacatcatctgctaccctgaaagatctggagagcccgtgccaagaacgagcagtagtcctggattcaacgtccgtaaaaatcagtcgactgaagaacaccatcaaatctttgaaacaacagaagaaacaagtggaacatcagctggaagaagaaaagaaagcaaacaacgagagacagaaagccgaaagggagctagaggttcaaatccagacattgatcatacagaaagaggaactaaatacggacctgtaccacatggaacgttctctcagatactttgaagaagagtccaaggacctggctgtccgtctgcaacattcattgcagtgtaaaggagagttagagagcgctctgtctgctgtcatcgccacagagaagaagaaggcaaaccagttgtccagctgcagcaaagcacatacagagtgggagttagagcagtccctacaggaccaggcactgctgaaagcgcagctgacacagttgaaggagtcatttcaacaactccaattagaaagagatgagtgtgctgaacatatagaaggagagagggcccggtggcatcagaggatgagtaaaatgtcgcaggagatttgcacattaaagaaagagaagcagcaagatatgcgtcgggtagaggagctggagaggagcttgtccaaactcaaaaaccagatggctgaacccttgcccccggagcccccagcagtgccctctgaggtggagctgcagcacctgaggaaggaactagagagagtggcaggagagctccagtcccaggtcaaaaacaatcagcacataagtctcctgaaccggcgacaagaagagaggattcgggaacaggaagagaggcttcggaagcaggaggagaggcttcaggagcagcacgagaagcttcggcagctggccaagccacagagcgtcttcgaggagctgaacaatgagaacaagagcacactgcagttggagcagcaagtaaaggagctacaggagaagcttggcgaggagcacctggaagcggccagccagcagaaccagcagctaacggcccagctgagcctcatggctctccctggggaaggacacggaggagaacatctggacagtgagggggaggaggcacctcagcccatgccgagtgtcccagaggacctggagagcagggaggccatgagcagctttatggaccacctgaaggagaaggcagacctgagtgagctggtgaaaaaacaagaacttcgcttcattcaatactggcaagagagatgccatcagaaaatccatcaccttttatcagaaccagggggccgtgccaaagatgcagcactgggaggaggacaccatcaggctggagctcagggaggagatgaaggtgaagctgctggagctgcagcagatggtattgcggcttacagcaactacaacaatgggcacagaaaattcctggccgctgcccacaactctgctgatgagcccggtccaggagccccagccccccaggagcttggggctgcagacaagcatggtgatcttcgtgaggtgaccctcacctcctctgcccaaggagaggccagggaggatcctctccttgacaagcctactgcacagccgatcgtgcaggaccaccaggagcacccaggcttgggcagcaactgctgtgtgccattattttgttgggcttggctgccaagaagaaggagataaacatcaccatcatcaaacagctgctcaagaaatttttaaataagaaaccaagttatggggttaatctcctacacaattcatttacttcctttgaatgttagactcactcatgattatttgtgtttctaatttatagtttaagtttatttgtaaaaagttaaaagagagtgtgtgtctgtggctctcactgatgttcactctggcatcctttagcatttttcttttttaatttcataattgtaggtcattagcatgcatatcgagtttgcccttacgtggtgggagttcaaacacacaaagacccactctttgcccaaaactgttctctttggtttggaataggctgccatgcttttttaatgttattgcagcatgtatattcactacagcattcagacaaaatttgcctatgttctgctgttgtttgatctaatcttaatcacagtgagctcttccttagctcaatatgtagtttgcccccaagtgtgcactgtttattactttgtaatacgccactatgagtactgacatttagagttgtttaaaggccaagaattggaaacagcctttcctccattttctgtgtattggtgatgggagtgataaccttttgggggagctttttaaatctcacagaagaggaaagtggcctcctctggcaggtatgtgcaggatagagtgtgtttcatctcttccggtgccaggaattagcggtgtattatggtggtgcccttaggatttgtatgtgctctgggctcatgaagatattgcatcatgagctgcagcagttgcactctttttcgatgacctaaaaagggcttatttctgaggaatgaaaggttcccatcgttgactgtggatgtggaaaacctttcctagcttagagcatttgtatctacaatacattttaaagtcagagttcatgttacctgttttaatcacatgactacatgccccagtacacaaaagggcactggttggcattcttcttaatgtatttagtgaagatcataagaaatcctttacgagttcaaatgtccctggaacaggcatacaggctctagtcaagaatgaattagagtgaaggaaagctgtgtgactcctggcattcctctctgttcacggagattctttgaggcttgaagattgattttaccatctagacctctttggctaatacctattcttcaaccaccttggttactctgatataggaatttacttctttttctttgaatggaaaacactttaaaaaaaatagaaacattcttataaactaatatatgtgagatagttgaaacaaaaaggagttttagtagatggtattatactatctttgaaaatcaaggagaagtttatgaaacttaaaatgtgtacaaactgcagtgcaatctactgttgttcgtgaatgtcaatgtattatcaggaaacgtgtctatacaaccacagagttatattttctcacaaacttctttacaaagtgaaatatgtttttgtacctctgggtttctgttcgggacatattttgtgcgatatttatgtgattgtgcctatgcatgatgaatgaatgcatttcagttatgtattgcctaaatcgtaacttgatgatgcttgggaaagactcaacagttaaaacttcatgaagttctaatgtctgtgttccaaaacacatcacattgttaggatgcagggagataggtgtgtgtgctccctgcggtggggatttctagttactagatcatctccatttttagcatttggcatcctcatgatacttctataaatatgacattaacaggagagcaacaatacgattttaccgatggaataacagatttgctggcattcactgaaagagtgcaaatattcggtccttgtgacttccactgactcttccaaattttatgaatgtatcaatgtattagataaacccagtttcagaatgataaagaaaaaatcttagaccaaataatgcggctaattaacagtggtacgatttctagcccgtgggtttaaaatgcacttaaagtcctgttctcgccttttattttctgaacttgccgcttttgcattctttgagttcagtttaaagacagttactttaagagcattttaaaccctcgggctagaaatcggaccactgttaatcagccacattatttggtctaacgttttttcttttatcattctgaaactgggtttatctaatacattgataaattatttcaaaggtacttttatcgttgaaatcacttcacttttaccctgataaatatcagtgactaggaatgaccttcggatagcgtttagcatctgtaaccaatctgacaataatgtgttcatgaggtgcctatggattaaatcacacactggcatatttaagctgaaggtcagtctggaaaataaatttactatattgactgaaataccactctttgtgtaggtatttgtcatatatttaagaaaacactaaaaagaatggaaattgtatgacaataacttaagtctttctccaaagtgcatgcagtcttttgcgatacctcattcagccgagtatttgtactcttcctcattcagtataaggaagctttcagtttgcttagaaggcaacattggaatgttagagttcatgagaaacatagaattttaaactgtgagttccactgaatacattttaatgtctgtaggaagaatcaaaacacctatttaaagatggcaatatataataatcattttaaaagtatttgattcaacctaattttccagaaatgaaaaaaaaaaaatcagctctaaaaccaaagctgatttcagaaaatttgaaaatgtaaatcagccctatccataatatagtttctctaaaactttatcttagtcattttaaaataatataactattaaaaaatgtaactgctatcttaatgttctgaaataatttaaaacattttaaaatatgaatactgtagtataaaagaaagaaatggtgggaacgaaaagcagagaaagaaatgccaattccagtccaaagttttatttgccaagttttcttagaatgaattttaccagtttatgaattattgtaaacagaatgtgtcatggaaatactgaaagatttttccctagagtggccttattgactgctggtgtgatgccactgtaatgtaataaattattaaattgtttcaatgtgttgtttttgccttaaaattttattttgcgtttcttgaaaactatagtattaaaggtattgatactgtgcaaatgctgggcatgcttggcatgagataatgtgtttcatttttacaaaggtgtaatataactatgcaagtgtttct

SEQ ID NO: 138503 - DNA, 1791 bp, Homo sapiens
  Payload ID: 7134
  Gene Symbol: GOLGA8N
  Gene Name: golgin A8 family, member N
  ENST ID: ENST00000569659
  CDS Start-End: 1-1791
atggcagaagaaactcaacacaacaaattggctgcagccaagaaaaagttaaaagaatattggcagaaaaacagacctagagttccagcaggagtgaacaggaacaggaaaacaaatggcagtatccctgagacagccacttccggtggttgccagccacctggggattcagcaacaggtttccacagggaaggccctacatcatctgctaccctgaaagatctggagagcccgtgccaagaacgagcagtagtcctggattcaacgtccgtaaaaatcagtcgactgaagaacaccatcaaatctttgaaacaacagaagaaacaagtggaacatcagctggaagaagaaaagaaagcaaacaacgagagacagaaagccgaaagggagctagaggttcaaatccagacattgatcatacagaaagaggaactaaatacggacctgtaccacatggaacgttctctcagatactttgaagaagagtccaaggacctggctgtccgtctgcaacattcattgcagtgtaaaggagagttagagagcgctctgtctgctgtcatcgccacagagaagaagaaggcaaaccagttgtccagctgcagcaaagcacatacagagtgggagttagagcagtccctacaggaccaggcactgctgaaagcgcagctgacacagatttgcacattaaagaaagagaagcagcaagatatgcgtcgggtagaggagctggagaggagcttgtccaaactcaaaaaccagatggctgaacccttgcccccggagcccccagcagtgccctctgaggtggagctgcagcacctgaggaaggaactagagagagtggcaggagagctccagtcccaggtcaaaaacaatcagcacataagtctcctgaaccggcgacaagaagagaggattcgggaacaggaagagaggcttcggaagcaggaggagaggcttcaggagcagcacgagaagcttcggcagctggccaagccacagagcgtcttcgaggagctgaacaatgagaacaagagcacactgcagttggagcagcaagtaaaggagctacaggagaagcttggcgaggagcacctggaagcggccagccagcagaaccagcagctaacggcccagctgagcctcatggctctccctggggaaggacacggaggagaacatctggacagtgagggggaggaggcacctcagcccatgccgagtgtcccagaggacctggagagcagggaggccatgagcagctttatggaccacctgaaggagaaggcagacctgagtgagctggtgaaaaaacaagaacttcgcttcattcaatactggcaagagagatgccatcagaaaatccatcaccttttatcagaaccagggggccgtgccaaagatgcagcactgggaggaggacaccatcaggctggagctcagggaggagatgaaggtgaagctgctggagctgcagcagatggtattgcggcttacagcaactacaacaatgggcacagaaaattcctggccgctgcccacaactctgctgatgagcccggtccaggagccccagccccccaggagcttggggctgcagacaagcatggtgatcttcgtgaggtgaccctcacctcctctgcccaaggagaggccagggaggatcctctccttgacaagcctactgcacagccgatcgtgcaggaccaccaggagcacccaggcttgggcagcaactgctgtgtgccattattttgttgggcttggctgccaagaagaaggagataa

SEQ ID NO: 138504 - DNA, 555 bp, Homo sapiens
  Payload ID: 7134
  Gene Symbol: GOLGA8N
  Gene Name: golgin A8 family, member N
  ENST ID: ENST00000611209
  CDS Start-End: 161-555
gttactgcaagactggcctttgaccttacgacccagtcccctaagcgttctcaccccgtttctggttcctctggtcacagcacaaatttccagctggaaggggaatggagactatgggacctaggagcaagaggttccaggctgcctcactcccttacagatgttgacgttaaaagaatattggcagaaaaacagacctagagttccagcaggagtgaacaggaacaggaaaacaaatggcagtatccctgagacagccacttccggtggttgccagccacctggggattcagcaacaggtttccacagggaaggccctacatcatctgctaccctgaaagatctggagagcccgtgccaagaacgagcagtagtcctggattcaacgtccgtaaaaatcagtcgactgaagaacaccatcaaatctttgaaacaacagaagaaacaagtggaacatcagctggaagaagaaaagaaagcaaacaacgagagacagaaagccgaaagggagctagaggttcaaatccagacattgatcatacagaaagaggaact

SEQ ID NO: 138505 - DNA, 1997 bp, Homo sapiens
  Payload ID: 7135
  Gene Symbol: GOLGA8O
  Gene Name: golgin A8 family, member O
  Uniprot ID: A6NCC3
  ENST ID: ENST00000509311
  CDS Start-End: 99-1997
agtcacacagctgcctggtaggtgactggaggccttgatcggttcttattgggattttgctgctgtggccccaacccttcctccctccccaccctgcaatggcagaagaaactcaacacaacaaattggctgcagccaagaaaaagttaaaagaatattggcagaaaaacagacctagagttccagcaggagtgaacaggaacaggaaaacaaatggcagtatccctgagacagccacttccggtggttgccagccacctggggattcagcaacaggtttccacagggaaggccctacatcatctgctaccctgaaagatctggagagcccgtgccaagaacgagcagtagtcctggattcaacgtccgtaaaaatcagtcgactgaagaacaccatcaaatctttgaaacaacagaagaaacaagtggaacatcagctggaagaagaaaagaaagcaaacaacgagagacagaaagccgaaagggagctagaggttcaaatccagacattgatcatacagaaagaggaactaaatacggacctgtaccacatggaacgttctctcagatactttgaagaagagtccaaggacctggctgtccgcctgcaacattcattgcagtgtaaaggagagttagagagcgctctgtctgctgtcatcgccacagagaagaagaaggcaaaccagttgtccagctgcagcaaagcacatacagagtgggagttagagcagtccctacaggaccaggcactgctgaaagcgcagctgacacagttgaaggagtcatttcaacaactccaattagaaagagatgagtgtgctgaacatatagaaggagagagggcccggtggcatcagaggatgagtaaaatgtcgcaggagatttgcacattaaagaaagagaagcagcaagatatgcgtcgggtagaggagctggagaggagcttgtccaaactcaaaaaccagatggctgaacccttgcccccggagcccccagcagtgccctctgaggtggagctgcagcacctgaggaaggaactagagagagtggcaggagagctccagtcccaggtcaaaaacaatcagcacataagtctcctgaaccggcgacaagaagagaggattcgggaacaggaagagaggcttcggaagcaggaggagaggcttcaggagcagcacgagaagcttcggcagctggccaagccacagagcgtcttcgaggagctgaacaatgagaacaagagcacactgcagttggagcagcaagtaaaggagctacaggagaagcttggcgaggagcacctggaagcggccagccagcagaaccagcagctaacggcccagctgagcctcatggctctccctggggaaggacacggaggagaacatctggacagtgagggggaggaggcacctcggcccatgccgagtgtcccagaggacccggagagcagggaggccatgagcagctttatggaccacctgaaggagaaggcagacctgagtgagctggtgaaaaaacaagaacttcgcttcattcaatactggcaagagagatgccatcagaaaatccatcaccttttatcagaaccagggggccgtgccaaagatgcagcactgggaggaggacaccatcaggctggagctcagggaggagatgaaggtgaagctgctggagctgcagcagatggtattgcggcttacagcaactacaacaatgggcacagaaaattcctggccgctgcccacaactctgctgatgagcccggtccaggagccccagccccccaggagcttggggctgcagacaagcatggtgatcttcgtgaggtgaccctcacctcctctgcccaaggagaggccagggaggatcctctccttgacaagcctactgcacagccgatcgtgcaggaccaccaggagcacccaggcttgggcagcaactgctgtgtgccattattttgttgggcttggctgccaagaagaaggagataa

SEQ ID NO: 138506 - DNA, 555 bp, Homo sapiens; identical to SEQ ID NO: 138504
  Payload ID: 7135
  Gene Symbol: GOLGA8O
  Gene Name: golgin A8 family, member O
  ENST ID: ENST00000562377
  CDS Start-End: 161-555

SEQ ID NO: 138507 - DNA, 1899 bp, Homo sapiens
  Payload ID: 7136
  Gene Symbol: GOLGA8Q
  Gene Name: golgin A8 family, member Q
  ENST ID: ENST00000562783
  CDS Start-End: 1-1899
atggcagaagaaactcaacacaacaaattggctgcagccaagaaaaagttaaaagaatattggcagaaaaacagacctagagttccagcaggagtgaacagaaacaggaaaacaaatggcagtatccctgagacagccacttccggtggttgccagccacctggggattcagcaacaggtttccacagggaaggccctacatcatctgctaccctgaaagatctggagagcccgtgccaagaacgagcagtagtcctggattcaacgtccgtaaaaatcagtcgactgaagaacaccatcaaatctttgaaacaacagaagaaacaagtggaacatcagctggaagaagaaaagaaagcaaacaacgagagacagaaagccgaaagggagctagaggttcaaatccagacattgatcatacagaaagaggaactaaatacggacctgtaccacatggaacgttctctcagatactttgaagaagagtccaaggacctggctgtccgcctgcaacattcattgcagtgtaaaggagagttagagagggctctgtctgctgtcatcgccacagagaagaagaaggcaaaccagttgtccagctgcagcaaagcacatacagagtgggagttagagcagtccctacaggaccaggcactgctgaaagcgcagctgacacagttgaaggagtcatttcaacaactccaattagaaagagatgagtgtgctgaacatatagaaggagagagggcccggtggcatcagaggatgagtaaaatgttgcaggagatttgcacattaaagaaagagaagcagcaagatatgcgtcgggtagaggagctggagaggagcttgtccaaactcaaaaaccagatggctgaacccttgcccccggagcccccagcagtgccctctgaggtggagctgcagcacctgaggaaggaactagagagagtggcaggagagctccagtcccaggtcaaaaacaatcagcacataagtctcctgaaccggcgacaagaagagaggattcgggaacaggaagagaggcttcggaagcaggaggagaggcttcaggagcagcacgagaagcttcggcagctggccaagccacagagcgtcttcgaggagctgaacaatgagaacaagagcacactgcagttggagcagcaagtaaaggagctacaggagaagcttggcgaggagcacctggaagcggccagccagcagaaccagcagctaacggcccagctgaacctcatggctctccctggggaaggacacggaggagaacatctggacagtgagggggaggaggcacctcagcccatgccgagtgtcccagaggacctggagagcagggaggccatgagcagctttatggaccacctgaaggagaaggcagacctgagtgagctggtgaaaaaacaagaacttcgcttcattcaatactggcaagagagatgccatcagaaaatccatcaccttttatcagaaccagggggccgtgccaaagatgcagcactgggaggaggacaccatcaggctggagctcagggaggagatgaaggtgaagctgctggagctgcagcagatggtattgcggcttacagcaactacaacaatgggcacagaaaattcctggccgctgcccacaactctgctgatgagcccggtccaggagccccagccccccaggagcttggggctgcagacaagcatggtgatcttcgtgaggtgaccctcacctcctctgcccaaggagaggccagggaggatcctctccttgacaagcctactgcacagccgatcgtgcaggaccaccaggagcacccaggcttgggcagcaactgctgtgtgccattattttgttgggcttggctgccaagaagaaggagataa

SEQ ID NO: 138508 - DNA, 1896 bp, Homo sapiens
  Payload ID: 7137
  Gene Symbol: GOLGA8R
  Gene Name: golgin A8 family, member R
  Uniprot ID: I6L899
  ENST ID: ENST00000327271
  CDS Start-End: 1-1896
atggcagaagaaactcaacacaacaaattggctgcagccaagaaaaagttaaaagaatattggcagaaaaacagacctagagttccagcaggagtgaacaggaacaggaaaacaaatggcagtatccctgagacagccacttccggtggttgccagccacctggggattcagcaacaggtttccacagggaaggccctacatcatctgctaccctgaaagatctggagagcccgtgccaagaacgagcagtagtcctggattcaacgtccgtaaaaatcagtcgactgaagaacaccatcaaatctttgaaacaacagaagaaacaagtggaacatcagctggaagaagaaaagaaagcaaacaacgagagacagaaagccgaaagggtgctagaggttcaaatccagacattgatcatacagaaagaggaactaaatacggacctgtaccacatggaacgttctctcagatactttgaagaagagtccaaggacctggctgtccgcctgcaacattcattgcagtgtaaaggagagttagagagggctctgtctgctgtcatcgccacagagaagaagaaggcaaaccagttgtccagctgcagcaaagcacatacagagtgggagttagagcagtccctacaggaccaggcactgctgaaagcgcagctgacacagttgaaggagtcatttcaacaactccaattagaaagagatgagtgtgctgaacatatagaaggagagagggcccggtggcatcagaggatgagtaaaatgtcgcaggagatttgcacattaaagaaagagaagcaggatatgcgttgggtagagcagctggagtggagcttgtccaaactcaaaaaccagacggctgaacccttgcccccggagcccccagcagtgccctctgaggtggagctgcagcacctgaggaaggaactagagagagtggcaggagagctccagtcccaggtcaaaaacaatcagcacataagtctcctgaaccggcgacaagaagagaggattcgggaacaggaagagaggcttcggaagcaggaggagaggcttcaggagcagcacgagaagcttcggcagctggccaagccacagagcgtcttcgaggagctgaacaatgagaacaagagcacactgcagttggagcagcaagtaaaggagctacaggagaagcttggcgaggagcacctggaagtggccagccagcagaaccagcagctaacggcccagctgagcctcatggctctccctggggaaggacacggaggagaacatctggacagtgagggggaggaggcacctcagcccatgccgagtgtcccagaggacccggagagcagggaggccatgagcagctttatggaccacctgaaggagaaggcagacctgagtgagctgctgaaaaaacaagaacttcgcttcattcaatactggcaagagagatgccatcagaaaatccatcaccttttatcagaaccagggggccgtgccaaagatgcagcactgggaggaggacaccatcaggctggagctcagggaggagatgaaggtgaagctgctggagctgcagcagatggtattgcggcttacagcaactacaacaatgggcacagaaaattcctggccgctgcccacaactctgctgatgagcccggtccaggagccccagccccccaggagcttggggctgcagacaagcatggtgatcttcgtgaggtgaccctcacctcctctgcccaaggagaggccagggaggatcctctccttgacaagcctactgcacagccgatcgtgcaggaccaccaggagcacccaggcttgggcagcaactgctgtgtgccattattttgttgggcttggctgccaagaagaaggagataa

SEQ ID NO: 138509 - DNA, 1878 bp, Homo sapiens
  Payload ID: 7138
  Gene Symbol: GOLGA8S
  Gene Name: golgin A8 family, member S
  ENST ID: ENST00000562295
  CDS Start-End: 1-1878
atggcagaagaaactcgacaaagtaaattggcagcagccaagagaaagttaaaagaatattggcagagaaacagccctggtgttccagcaggagccaagaggaacaggaaaacaaatggcagcatccatgagacagccacttctggtggttgccactcacctggagattcagcaacaggtatccacggggagagccctacatcatctgctaccctgaaggatctggagagcccgtgccaagaactagcagtagtcccagactcgaggtccgtaaaagtcagtcaactgaagaacaccatcaaatctttgaaacaacagaagaaacaagtggtacatcagctggaagaagaaaagaaagcaaacaacgagaaacagaaagccgaaagggagctagaggttcaaatccagagattgaacatacagaaagggaaactaaatacggacctgtaccacacgaaacgttctctcagatactttgaagaagagtccaaggatctggccgtccgtctgcaacattcattgcagcgtaaaggagagttagagcgggctctctctgctgtcaccgccacacagaagaagaaggcggagaggttctccagccgcagtaaagcacgtacggagtggaagttagagcagtccatgcgggagcaggcactgctgaaagcgcagctgacacagttgaaggagtcacttaaagaagtccagctagagagggatgaatatgctgaacatctaaaaggagagagggcccggtggcagcagaggatgagaaaaatgtcgcaggaggtttgctcgttgaagaaggagaagaagcatgataaatatcgggtagagacgctggagaggagcttgtccaaactcaaaaaccagatggctgaacctctgcccccggagcccccagcagtgccctctgaggcggagctgcagcacctgaggaaggaactagagagagtggcaggagcgctccaggcccaggtggagtacaatcagcgcataagtctcctgaatgaggggcaaaaggagaggcttcgggagcagcaggagaggcttccagagcaggaggagaggcttcagcagctggccgagccacagaacagcttcaaggagctgaacaatgagaacaagagcgtactacagttggagcagcaagtaaaggagctgcaggagaagctaggcaaggagcgtctggaagctgccagccagcagaaacagcagctaacggcccagttgagcctcatggctctccctggggaaggagatggaggaggacatctggacagtgagggggaggaggcacctcggcccattcctagcatcccacaggacctggagagcagggaggccatgagcagctttatggaccacctggaggagaaggcagacctgagtgagctggtgaagaaacaagaacttcgcttcattcaatactggcaagagagatgccatcagaaaatccatcaccttttatcagaaccagggggccgtgccaaagatgcggcactgggaggaggacaccatcaggctggagctcagggaggagatgaagatgaagctgctggagctgcagcagatggtattgcggcttacagcaactacaacaatgggcacagaaaattcctggccgctgcccacaaccctgctgatgagcccggtccaggagccccagccccccaggagcttggggctgcagacaagcatggtgatctttgtgaggtgagcctcacctcctctgcccaaggagaggccagggaggatcctctccttgacaagcctactgcacagccgatcgtgcaggaccaccaggagcacccaggcttgggcaacaactgctgtgtgccattcttttgctgggcttggctgccaagaagaaggagataa

SEQ ID NO: 138510 - DNA, 1896 bp, Homo sapiens
  Payload ID: 7139
  Gene Symbol: GOLGA8T
  Gene Name: golgin A8 family, member T
  ENST ID: ENST00000569052
  CDS Start-End: 1-1896
atggcagaagaaactcaacacaacaaattggctgcagccaagaaaaagttaaaagaatattggcagaaaaacagccctagagttccagcaggagcgaacaggaacaggaaaacaaatggcagtatccctgagaaagccacttctggtggttgccagccacctagggattcagcaacaggtttccacagggaaggccctacatcatctgctaccctgaaagatctggagagcccgtgccaagaacgagcagtagtcctggattcaaggtccgtagaaatcagtcaactgaagaacaccatcaaatctctgaaacaacagaagaaacaagtggaacatcagctggaagaagaaaagaaagcaaacaacaagaaacagaaagccaaaagggtgctagaggttcaaatccagacattgaacatacagaaagaggaactaaatacggacctgtaccacatgaaacgttctctcagatactttgaagaaaagtccaaggatctggctgtccgcctgcaacattcattgcagcgtaaaggagagttagagagtgttctctctaatgtcatggccacacagaagaagaaggcaaaccagttgtccagccgcagcaaagcacgtacggagtggaagttagagcagtccatgcgggaggagacactactgaaagtgcagctgacacagttgaaggagtcatttcaacaagtccaattagaaagagatgagtattctgaacatctaaaaggagagagggcccggtggcagcagaggatgagaaaaatgtcgcaggagatttgcacattaaagaaagagaagcagcaagatatgcgtcgggtagaggagctggagaggagcttgtccaaactcaaaaaccagatggctgaacccttgcccccggagcccccagcagtgccctctgaggtggagctgcagcacctgaggaaggaactagagagagtggcaggagagctccaggcccaggtcaaaaagaatcagcgcataagtctcctgaaccagcgacaagaagagaggattcaggagcaggaagagaggcttcggaagcaggaggagaggattcaggagcagcacaagagccttcagcagctggccaagccacagagcgtcttcgaggagccgaacaatgagaacaagaacgcactgcagttggagcagcaagtaaaggagctacaggagaagcttggcgaggagcacctggaagctgccagccagcagaaccagcagctaacggcccagctgagcctcatggctctccctggggaaggacacggaggagaacatctggacagtgagggggaggaggcacctcagcccatgccgagtgtcccagaggacctggagagcagggaggccatgagcagctttatggaccacctgaaggagaaggcagacctgagtgagctggtgaaaaaagaactctgcttcatccaccactggcgagacagacgccatcagaaaacccatcaccttttatcagaaccagggggctgtgccaaagatgcggcactgggaggaggacaccatcaggctggagctcagggaggagatgaaggtgaagctgctggagctgcagcagatggtattgcggcttacagcaactacaacaatgggcacagaaaattcctggccgctgcccacaaccctgctgatgagcccggtccaggagccccagctccccaggagcttggggctgcagacaagcatggtgatcttcgtgaggtgagcctcacctcctctgcccaaggagaggccagggaggatcctctccttgacaagcctactgcacagccgatcgtgcaggaccaccaggagcacccaggcttgggcagcaactgctgtgtgccattcttgtgctgggcttggctgccaagaagaaggagataa

SEQ ID NO: 138511 - DNA, 11187 bp, Homo sapiens
  Payload ID: 7140
  Gene Symbol: GOLGB1
  Gene Name: golgin B1
  Uniprot ID: Q14789
  ENST ID: ENST00000340645
  CDS Start-End: 127-9906
aactgctagtggctgagtccctggcggggcgcggcggtggaaggtgtcgcgtacgggcttcccgagctgacgtggcttgaattgggaggggggcagctggagcctcaggcggcagcgcttctagaaatgctgagccgattatcaggattagcaaatgttgttttgcatgaattatcaggagatgatgacactgatcagaatatgagggctcccctagaccctgaattacaccaagaatctgacatggaatttaataatactacacaagaagatgttcaggagcgcctggcttatgcagagcaattggtggtggagctaaaagatattattagacagaaggatgttcaactgcagcagaaagatgaagctctacaggaagagagaaaagctgctgataacaaaattaaaaaactaaaacttcatgcgaaggccaaattaacttctttgaataaatacatagaagaaatgaaagcacaaggagggactgttctgcctacagaacctcagtcagaggagcaactttccaagcatgacaagagttctacagaggaagagatggaaatagaaaagataaaacataagctccaggagaaggaggaactaatcagcactttgcaagcccagcttactcaggcacaggcagaacaacctgcacagagttctacagagatggaagaatttgtaatgatgaagcaacagctccaggagaaggaagaattcattagcactttacaagcccagctcagccagacacaggcagagcaagctgcacagcaggtggtccgagagaaagatgcccgctttgaaacacaagttcgtcttcatgaagatgagcttcttcagttagtaacccaggcagatgtggaaacagagatgcaacagaaattgagggtgctgcaaaggaagcttgaggaacacgaagaatccttggtgggccgtgctcaggtcgttgacttgctgcaacaggagctgactgctgctgagcagagaaaccagattctctctcagcagttacagcagatggaagctgagcataatactttgaggaacactgtggaaacagaaagagaggagtccaagattctactggaaaagatggaacttgaagtggcagagagaaaattatccttccataatctgcaggaagaaatgcatcatcttttagaacagtttgagcaagcaggccaagcccaggctgaactagagtctcggtatagtgctttggagcagaagcacaaagcagaaatggaagagaagacctctcatattttgagtcttcaaaagactggacaagagctgcagtctgcctgtgatgctctaaaggatcaaaattcaaagcttctccaagataagaatgagcaagcagttcagtcagcccagaccattcagcaactggaagatcagctccagcaaaaatccaaagaaattagccaatttctaaatagactgcccttgcaacaacatgaaacagcatctcagacttctttcccagatgtttataatgagggcacacaggcagtcactgaggagaatattgcttctttgcagaagagagtggtagaactagagaatgaaaagggagccttgctccttagttctatagagctggaggagctgaaagctgagaatgaaaaactgtcttctcagattactctcctagaggctcagaatagaactggggaggcagacagagaagtcagtgagatcagcattgttgatattgccaacaagaggagctcttctgctgaggaaagtggacaagatgttctagaaaacacattttctcagaaacataaagaattatcagttttattgttggaaatgaaagaagctcaagaggaaattgcatttcttaaattacagctccagggaaaaagggctgaggaagcagatcatgaggtccttgaccagaaagaaatgaaacagatggagggtgagggaatagctccaattaaaatgaaagtatttcttgaagatacagggcaagattttcccttaatgccaaatgaagagagcagtcttccagcagttgaaaaagaacaggcgagcactgaacatcaaagtagaacatctgaggaaatatctttaaatgatgctggagtagaattgaaatcaacaaagcaggatggtgataaatccctttctgctgtaccagatattggtcagtgtcatcaggatgagttggaaaggttaaaaagtcaaattttggagctcgagctaaactttcataaagcacaagaaatctatgagaaaaatttagatgagaaagctaaggaaattagcaacctaaaccagttgattgaggagtttaagaaaaatgctgacaacaacagcagtgcattcactgctttgtctgaagaaagagaccagcttctctctcaggtgaaggaacttagcatggtaacagaattgagggctcaggtaaagcaactggaaatgaaccttgcagaagcagaaaggcaaagaagacttgattatgaaagccaaactgcccatgacaacctgctcactgaacagatccatagtctcagcatagaagccaaatctaaagatgtgaaaattgaagttttacagaatgaactggatgatgtgcagcttcagttttctgagcagagtaccctgataagaagcctgcaaagccagctgcaaaataaggaaagtgaagtgcttgagggggcagaacgtgtaaggcatatctcaagtaaagtggaagaactgtcccaggctctttcacagaaggaacttgaaataacaaaaatggatcagctcttactagagaaaaagagagatgtggaaaccctccaacaaaccatcgaggagaaggatcaacaagtgacagaaatcagctttagtatgactgagaaaatggttcagcttaatgaagagaagttttctcttggggttgaaattaagactcttaaagaacagctaaatttattatccagagctgaggaagcaaaaaaagagcaggtggaagaagataatgaagtttcttctggccttaaacaaaattatgatgagatgagcccagcaggacaaataagtaaggaagaacttcagcatgaatttgaccttctgaagaaagaaaatgagcagagaaagagaaagctccaggcagctcttattaacagaaaggagcttctgcaaagagtcagtagattggaagaagaattagccaacttgaaagatgaatctaagaaagaaatcccactcagtgagactgagaggggagaagtggaagaagataaagaaaacaaagaatactcagaaaaatgtgtgacttctaagtgccaagaaatagaaatttatttaaaacagacaatatctgagaaagaagtggaactacagcatataaggaaggatttggaagaaaagctggcagctgaagagcaattccaggctctggtcaaacagatgaatcagaccttgcaagataaaacaaaccaaatagatttgctccaagcagaaatcagtgaaaaccaagcaattatccagaagttaatcacaagtaacacggatgcaagtgatggggactccgtagcacttgtaaaggaaacagtggtgataagtccaccttgtacaggtagtagtgaacactggaaaccagaactagaagaaaagatactggcccttgaaaaagaaaaggagcaacttcaaaagaagctacaggaagccttaacctcccgcaaggcaattcttaaaaaggcacaggagaaagaaagacatctcagggaggagctaaagcaacagaaagatgactataatcgcttgcaagaacagtttgatgagcaaagcaaggaaaatgagaatattggagaccagctaaggcaactccagattcaagtaagggaatccatagacggaaaactcccaagcacagaccagcaggaatcgtgttcttccactccaggtttagaagaacctttattcaaagccacagaacagcatcacactcaacctgttttagagtccaacttgtgcccagactggccttctcattctgaagatgcgagtgctctgcagggcggaacttctgttgcccagattaaggcccagctgaaggaaatagaggctgagaaagtagagttagaattgaaagttagttctacaacaagtgagcttactaaaaaatcagaagaggtatttcagttacaagagcagataaataaacagggtttagaaatcgagagtctaaagacagtatcccatgaagctgaagtccatgccgaaagcctgcagcagaaattggaaagcagccaactacaaattgctggcctagaacatctaagagaattgcaacctaaactggatgaactgcaaaaactcataagcaaaaaggaagaagacgttagctacctttctggacaacttagtgagaaagaagcagctctcactaaaatacagacagagataatagaacaagaagatttaattaaggctctgcatacacagctagaaatgcaagccaaagagcatgatgagaggataaagcagctacaggtggaactttgtgaaatgaagcaaaaaccagaagagattggagaagaaagtagagcaaagcaacaaatacaaaggaaactgcaagctgcccttatttcccgaaaagaagcactaaaagaaaacaaaagtctccaagaggaattgtctttggccagaggtaccattgaacgtctcaccaagtctctggcagatgtggaaagccaagtttctgctcaaaataaagaaaaagatacggtcttaggaaggttagctcttcttcaagaagaaagagacaaactcattacagaaatggacaggtctttattggaaaatcagagtctcagcagctcctgtgaaagtctaaaactagctctagagggtcttactgaagacaaggaaaagttagtgaaggaaattgaatctttgaaatcttctaagattgcagaaagtactgagtggcaagagaaacacaaggagctacaaaaagagtatgaaattcttctgcagtcctatgagaatgttagtaatgaagcagaaaggattcagcatgtggtggaagctgtgaggcaagagaaacaagaactgtatggcaagttaagaagcacagaggcaaacaagaaggagacagaaaagcagttgcaggaagctgagcaagaaatggaggaaatgaaagaaaagatgagaaagtttgctaaatctaaacagcagaaaatcctagagctggaagaagagaatgaccggcttagggcagaggtgcaccctgcaggagatacagctaaagagtgtatggaaacacttctttcttccaatgccagcatgaaggaagaacttgaaagggtcaaaatggagtatgaaaccctttctaagaagtttcagtctttaatgtctgagaaagactctctaagtgaagaggttcaagatttaaagcatcagatagaaggtaatgtatctaaacaagctaacctagaggccaccgagaaacatgataaccaaacgaatgtcactgaagagggaacacagtctataccaggtgagactgaagagcaagactctctgagtatgagcacaagacctacatgttcagaatcggttccatcagcgaagagtgccaaccctgctgtaagtaaggatttcagctcacatgatgaaattaataactacctacagcagattgatcagctcaaagaaagaattgctggattagaggaggagaagcagaaaaacaaggaatttagccagactttagaaaatgagaaaaataccttactgagtcagatatcaacaaaggatggtgaactaaaaatgcttcaggaggaagtaaccaaaatgaacctgttaaatcagcaaatccaagaagaactctccagagttaccaaactaaaggagacagcagaagaagagaaagatgatttggaagagaggcttatgaatcaattagcagaacttaatggaagcattgggaattactgtcaggatgttacagatgcccaaataaaaaatgagctattggaatctgaaatgaagaaccttaaaaagtgtgtgagtgaattggaagaagaaaagcagcagttagtcaaggaaaaaactaaggtggaatcagaaatacgaaaggaatatttggagaaaatacaaggtgctcagaaagaacccggaaataaaagccatgcaaaggaacttcaggaactgttaaaagaaaaacaacaagaagtaaagcagctacagaaggactgcatcaggtatcaagagaaaattagtgctctggagagaactgttaaagctctagaatttgttcaaactgaatctcaaaaagatttggaaataaccaaagaaaatctggctcaagcagttgaacaccgcaaaaaggcacaagcagaattagctagcttcaaagtcctgctagatgacactcaaagtgaagcagcaagggtcctagcagacaatctcaagttgaaaaaggaacttcagtcaaataaagaatcagttaaaagccagatgaaacaaaaggatgaagatcttgagcgaagactggaacaggcagaagagaagcacctgaaagagaagaagaatatgcaagagaaactggatgctttgcgcagagaaaaagtccacttggaagagacaattggagagattcaggttactttgaacaagaaagacaaggaagttcagcaacttcaggaaaacttggacagtactgtgacccagcttgcagcctttactaagagcatgtcttccctccaggatgatcgtgacagggtgatagatgaagctaagaaatgggagaggaagtttagtgatgcgattcaaagcaaagaagaagaaattagactcaaagaagataattgcagtgttctaaaggatcaacttagacagatgtccatccatatggaagaattaaagattaacatttccaggcttgaacatgacaagcagatttgggagtccaaggcccagacagaggtccagcttcagcagaaggtctgtgatactctacagggggaaaacaaagaacttttgtcccagctagaagagacacgccacctataccacagttctcagaatgaattagctaagttggaatcagaacttaagagtctcaaagaccagttgactgatttaagtaactctttagaaaaatgtaaggaacaaaaaggaaacttggaagggatcataaggcagcaagaggctgatattcaaaattctaagttcagttatgaacaactggagactgatcttcaggcctccagagaactgaccagtaggctgcatgaagaaataaatatgaaagagcaaaagattataagcctgctttctggcaaggaagaggcaatccaagtagctattgctgaactgcgtcagcaacatgataaagaaattaaagagctggaaaacctgctgtcccaggaggaagaggagaatattgttttagaagaggagaacaaaaaggctgttgataaaaccaatcagcttatggaaacactgaaaaccatcaaaaaggaaaacattcagcaaaaggcacagttggattcctttgttaaatccatgtcttctctccaaaatgatcgagaccgcatagtgggtgactatcaacagctggaagagcgacatctctctataatcttggaaaaagaccaactcatccaagaggctgctgcagagaataataagcttaaagaagaaatacgaggcttgagaagtcatatggatgatctcaattctgagaatgccaagctagatgcagaactgatccaatatagagaagacctgaaccaagtgataacaataaaggacagccaacaaaagcagcttcttgaagttcaacttcagcaaaataaggagctggaaaataaatatgctaaattagaagaaaagctgaaggaatctgaggaagcaaatgaggatctgcggaggtcctttaatgccctacaagaagagaaacaagatttatctaaagagattgagagtttgaaagtatctatatcccagctaacaagacaagtaacagccttgcaagaagaaggtactttaggactctatcatgcccagttaaaagtaaaagaagaagaggtacacaggttaagtgctttgttttcctcctctcaaaagagaattgcagaactggaagaagaattggtttgtgttcaaaaggaagctgccaagaaggtaggtgaaattgaagataaactgaagaaagaattaaagcatcttcatcatgatgcagggataatgagaaatgaaactgaaacagcagaagagagagtggcagagctagcaagagatttggtggagatggaacagaaattactcatggtcaccaaagaaaataaaggtctcacagcacaaattcagtcttttggaaggtctatgagttccttgcaaaatagtagagatcatgccaatgaggaacttgatgaactgaaaaggaaatatgatgccagtctgaaggaattggcacagttgaaagaacagggactcttaaacagagagagagatgctcttctttctgaaaccgccttttcaatgaactccactgaggagaatagcttgtctcaccttgagaaacttaaccaacagctcctatccaaagatgagcaattgcttcacttgtcctcacaactagaagattcttataaccaagtgcagtccttttccaaggctatggccagtctgcagaatgagagagatcacctgtggaatgagctggagaaatttcgaaagtcagaggaagggaagcagaggtctgcagctcagccttccaccagcccagctgaagtacagagtttaaaaaaagctatgtcttcactccaaaatgacagagacagactactgaaggaattgaagaatctgcagcagcaatacttacagattaatcaagagatcactgagttacatccactgaaggctcaacttcaggagtatcaagataagacaaaagcatttcagattatgcaagaagagctcaggcaggaaaacctctcctggcagcatgagctgcatcagctcaggatggagaagagttcctgggaaatacatgagaggagaatgaaggaacagtaccttatggctatctcagataaagatcagcagctcagtcatctgcagaatcttataagggaattgaggtcttcttcctcccagactcagcctctcaaagtgcaataccaaagacaggcatccccagagacatcagcttccccagatgggtcacaaaatctggtttatgagacagaacttctcaggacccagctcaatgacagcttaaaggaaattcaccaaaaggagttaagaattcagcaactgaacagcaacttctctcagctactggaagagaaaaacaccctttccattcagctctgcgataccagtcagagtcttcgtgagaaccagcagcactatggtgaccttttaaatcactgtgcagtcttggagaagcaggttcaagagctgcaggcggggccactaaatatagatgttgctccaggagctccccaggaaaagaatggagttcacagaaagagtgaccctgaggaactaagggaaccgcagcaaagcttttctgaagctcagcagcagctatgcaacaccagacaggaagtgaatgaattaaggaagctgctggaagaagaacgagaccaaagagtggctgctgagaatgctctctctgtggccgaggagcagatcagacggttagagcacagtgaatgggactcttcccggactcctatcattggctcctgtggcactcaggagcaggcactgttaatagatcttacaagcaacagttgtcgaaggacccggagtggcgttggatggaagcgagtcctgcgttcactctgtcattcacggacccgagtgccacttctagcagccatctactttctaatgattcatgtcctgctcattctgtgttttacgggccatctatagacttagttgttactctttggaccactcccctcaaaacttggaattctctcacctctaacatcagaacatcaattccagtggaacagtcttcccatttacaggtcttctctccaactcttcacggaaagtgcctgcaaaaacagaggtggatacgaggacaggttggagctgcagggactggcgagtctgctttcttctactgccctgagcctgaacgcttctgcttaatctgagaatcacatttggtttgttgagcctaatatttgttgagattttgcaggaccctgatcttttgtggtcctgtaaaagatactgaggaatgtctttcagccaagccaagaggatggtttcaataaacctaataatctgaagttcagtatcattttgattgataactttctttgccttgtttgcctgtattttctcctgtttcagggggaaggtggctctgccataaacagagttcagggaaatgaacatgtcacctcataggacatctgatttaggtctcttgcagaatagggtggtgaaagctgaaggaactccctaggggttttagctgttagatcacatgggaggacagcatcttcttccctgccaatttcagatataattggagggagaatttcaggtcttagactataaggatagaatccctttgcttttgcccttgatcacatgtatactaaggtattaagtggcccaagtctttcctttcaccaaagggcagggagaagtgtctatggacagcagggttccaattcttgtcattccaggaatatctgaatattcctggaatgtggaccctgagacagtgctcaggggccactgggagccaatattaggcattgactctcagccaggagtctgactggtctaacaccacactgcaactcctgacctcttgaagtactaagctactttgctgttagtgacagttattacagtttctcagccccattgtctctgccctctgtggcaatggaaggagaatatagagaagacaaaattaaatatagatagacctgagaaggacagccaggatagaattccatttgtgcctattccctgcctcccctcccctcccccatcctaccagttggttattttctcattgcatacgtgatgtgttcactgcctagcctctccctaaagaagagagaagacaagtgggctgactgatctgctctaaatctactgtggtgattaaatcttggttacaacatcctgggaagtttcctgaacaactgtaaaataataaaattattttcagaatgaaga

SEQ ID NO: 138512 - DNA, 11198 bp, Homo sapiens
  Payload ID: 7140
  Gene Symbol: GOLGB1
  Gene Name: golgin B1
  Uniprot ID: Q14789
  ENST ID: ENST00000393667
  CDS Start-End: 112-9921
agtccctggcggggcgcggcggtggaaggtgtcgcgtacgggcttcccgagctgacgtggcttgaattgggaggggggcagctggagcctcaggcggcagcgcttctagaaatgctgagccgattatcaggattagcaaatgttgttttgcatgaattatcaggagatgatgacactgatcagaatatgagggctcccctagaccctgaattacaccaagaatctgacatggaatttaataatactacacaagaagatgttcaggagcgcctggcttatgcagagcaattggtggtggagctaaaagatattattagacagaaggatgttcaactgcagcagaaagatgaagctctacaggaagagagaaaagctgctgataacaaaattaaaaaactaaaacttcatgcgaaggccaaattaacttctttgaataaatacatagaagaaatgaaagcacaaggagggactgttctgcctacagaacctcagtcagaggagcaactttccaagcatgacaagagttctacagaggaagagatggaaatagaaaagataaaacataagctccaggagaaggaggaactaatcagcactttgcaagcccagcttactcaggcacaggcagaacaacctgcacagagttctacagagatggaagaatttgtaatgatgaagcaacagctccaggagaaggaagaattcattagcactttacaagcccagctcagccagacacaggcagagcaagctgcacagttgagttccatgcagcaggtggtccgagagaaagatgcccgctttgaaacacaagttcgtcttcatgaagatgagcttcttcagttagtaacccaggcagatgtggaaacagagatgcaacagaaattgagggtgctgcaaaggaagcttgaggaacacgaagaatccttggtgggccgtgctcaggtcgttgacttgctgcaacaggagctgactgctgctgagcagagaaaccagattctctctcagcagttacagcagatggaagctgagcataatactttgaggaacactgtggaaacagaaagagaggagtccaagattctactggaaaagatggaacttgaagtggcagagagaaaattatccttccataatctgcaggaagaaatgcatcatcttttagaacagtttgagcaagcaggccaagcccaggctgaactagagtctcggtatagtgctttggagcagaagcacaaagcagaaatggaagagaagacctctcatattttgagtcttcaaaagactggacaagagctgcagtctgcctgtgatgctctaaaggatcaaaattcaaagcttctccaagataagaatgagcaagcagttcagtcagcccagaccattcagcaactggaagatcagctccagcaaaaatccaaagaaattagccaatttctaaatagactgcccttgcaacaacatgaaacagcatctcagacttctttcccagatgtttataatgagggcacacaggcagtcactgaggagaatattgcttctttgcagaagagagtggtagaactagagaatgaaaagggagccttgctccttagttctatagagctggaggagctgaaagctgagaatgaaaaactgtcttctcagattactctcctagaggctcagaatagaactggggaggcagacagagaagtcagtgagatcagcattgttgatattgccaacaagaggagctcttctgctgaggaaagtggacaagatgttctagaaaacacattttctcagaaacataaagaattatcagttttattgttggaaatgaaagaagctcaagaggaaattgcatttcttaaattacagctccagggaaaaagggctgaggaagcagatcatgaggtccttgaccagaaagaaatgaaacagatggagggtgagggaatagctccaattaaaatgaaagtatttcttgaagatacagggcaagattttcccttaatgccaaatgaagagagcagtcttccagcagttgaaaaagaacaggcgagcactgaacatcaaagtagaacatctgaggaaatatctttaaatgatgctggagtagaattgaaatcaacaaagcaggatggtgataaatccctttctgctgtaccagatattggtcagtgtcatcaggatgagttggaaaggttaaaaagtcaaattttggagctcgagctaaactttcataaagcacaagaaatctatgagaaaaatttagatgagaaagctaaggaaattagcaacctaaaccagttgattgaggagtttaagaaaaatgctgacaacaacagcagtgcattcactgctttgtctgaagaaagagaccagcttctctctcaggtgaaggaacttagcatggtaacagaattgagggctcaggtaaagcaactggaaatgaaccttgcagaagcagaaaggcaaagaagacttgattatgaaagccaaactgcccatgacaacctgctcactgaacagatccatagtctcagcatagaagccaaatctaaagatgtgaaaattgaagttttacagaatgaactggatgatgtgcagcttcagttttctgagcagagtaccctgataagaagcctgcaaagccagctgcaaaataaggaaagtgaagtgcttgagggggcagaacgtgtaaggcatatctcaagtaaagtggaagaactgtcccaggctctttcacagaaggaacttgaaataacaaaaatggatcagctcttactagagaaaaagagagatgtggaaaccctccaacaaaccatcgaggagaaggatcaacaagtgacagaaatcagctttagtatgactgagaaaatggttcagcttaatgaagagaagttttctcttggggttgaaattaagactcttaaagaacagctaaatttattatccagagctgaggaagcaaaaaaagagcaggtggaagaagataatgaagtttcttctggccttaaacaaaattatgatgagatgagcccagcaggacaaataagtaaggaagaacttcagcatgaatttgaccttctgaagaaagaaaatgagcagagaaagagaaagctccaggcagctcttattaacagaaaggagcttctgcaaagagtcagtagattggaagaagaattagccaacttgaaagatgaatctaagaaagaaatcccactcagtgagactgagaggggagaagtggaagaagataaagaaaacaaagaatactcagaaaaatgtgtgacttctaagtgccaagaaatagaaatttatttaaaacagacaatatctgagaaagaagtggaactacagcatataaggaaggatttggaagaaaagctggcagctgaagagcaattccaggctctggtcaaacagatgaatcagaccttgcaagataaaacaaaccaaatagatttgctccaagcagaaatcagtgaaaaccaagcaattatccagaagttaatcacaagtaacacggatgcaagtgatggggactccgtagcacttgtaaaggaaacagtggtgataagtccaccttgtacaggtagtagtgaacactggaaaccagaactagaagaaaagatactggcccttgaaaaagaaaaggagcaacttcaaaagaagctacaggaagccttaacctcccgcaaggcaattcttaaaaaggcacaggagaaagaaagacatctcagggaggagctaaagcaacagaaagatgactataatcgcttgcaagaacagtttgatgagcaaagcaaggaaaatgagaatattggagaccagctaaggcaactccagattcaagtaagggaatccatagacggaaaactcccaagcacagaccagcaggaatcgtgttcttccactccaggtttagaagaacctttattcaaagccacagaacagcatcacactcaacctgttttagagtccaacttgtgcccagactggccttctcattctgaagatgcgagtgctctgcagggcggaacttctgttgcccagattaaggcccagctgaaggaaatagaggctgagaaagtagagttagaattgaaagttagttctacaacaagtgagcttactaaaaaatcagaagaggtatttcagttacaagagcagataaataaacagggtttagaaatcgagagtctaaagacagtatcccatgaagctgaagtccatgccgaaagcctgcagcagaaattggaaagcagccaactacaaattgctggcctagaacatctaagagaattgcaacctaaactggatgaactgcaaaaactcataagcaaaaaggaagaagacgttagctacctttctggacaacttagtgagaaagaagcagctctcactaaaatacagacagagataatagaacaagaagatttaattaaggctctgcatacacagctagaaatgcaagccaaagagcatgatgagaggataaagcagctacaggtggaactttgtgaaatgaagcaaaaaccagaagagattggagaagaaagtagagcaaagcaacaaatacaaaggaaactgcaagctgcccttatttcccgaaaagaagcactaaaagaaaacaaaagtctccaagaggaattgtctttggccagaggtaccattgaacgtctcaccaagtctctggcagatgtggaaagccaagtttctgctcaaaataaagaaaaagatacggtcttaggaaggttagctcttcttcaagaagaaagagacaaactcattacagaaatggacaggtctttattggaaaatcagagtctcagcagctcctgtgaaagtctaaaactagctctagagggtcttactgaagacaaggaaaagttagtgaaggaaattgaatctttgaaatcttctaagattgcagaaagtactgagtggcaagagaaacacaaggagctacaaaaagagtatgaaattcttctgcagtcctatgagaatgttagtaatgaagcagaaaggattcagcatgtggtggaagctgtgaggcaagagaaacaagaactgtatggcaagttaagaagcacagaggcaaacaagaaggagacagaaaagcagttgcaggaagctgagcaagaaatggaggaaatgaaagaaaagatgagaaagtttgctaaatctaaacagcagaaaatcctagagctggaagaagagaatgaccggcttagggcagaggtgcaccctgcaggagatacagctaaagagtgtatggaaacacttctttcttccaatgccagcatgaaggaagaacttgaaagggtcaaaatggagtatgaaaccctttctaagaagtttcagtctttaatgtctgagaaagactctctaagtgaagaggttcaagatttaaagcatcagatagaaggtaatgtatctaaacaagctaacctagaggccaccgagaaacatgataaccaaacgaatgtcactgaagagggaacacagtctataccaggtgagactgaagagcaagactctctgagtatgagcacaagacctacatgttcagaatcggttccatcagcgaagagtgccaaccctgctgtaagtaaggatttcagctcacatgatgaaattaataactacctacagcagattgatcagctcaaagaaagaattgctggattagaggaggagaagcagaaaaacaaggaatttagccagactttagaaaatgagaaaaataccttactgagtcagatatcaacaaaggatggtgaactaaaaatgcttcaggaggaagtaaccaaaatgaacctgttaaatcagcaaatccaagaagaactctccagagttaccaaactaaaggagacagcagaagaagagaaagatgatttggaagagaggcttatgaatcaattagcagaacttaatggaagcattgggaattactgtcaggatgttacagatgcccaaataaaaaatgagctattggaatctgaaatgaagaaccttaaaaagtgtgtgagtgaattggaagaagaaaagcagcagttagtcaaggaaaaaactaaggtggaatcagaaatacgaaaggaatatttggagaaaatacaaggtgctcagaaagaacccggaaataaaagccatgcaaaggaacttcaggaactgttaaaagaaaaacaacaagaagtaaagcagctacagaaggactgcatcaggtatcaagagaaaattagtgctctggagagaactgttaaagctctagaatttgttcaaactgaatctcaaaaagatttggaaataaccaaagaaaatctggctcaagcagttgaacaccgcaaaaaggcacaagcagaattagctagcttcaaagtcctgctagatgacactcaaagtgaagcagcaagggtcctagcagacaatctcaagttgaaaaaggaacttcagtcaaataaagaatcagttaaaagccagatgaaacaaaaggatgaagatcttgagcgaagactggaacaggcagaagagaagcacctgaaagagaagaagaatatgcaagagaaactggatgctttgcgcagagaaaaagtccacttggaagagacaattggagagattcaggttactttgaacaagaaagacaaggaagttcagcaacttcaggaaaacttggacagtactgtgacccagcttgcagcctttactaagagcatgtcttccctccaggatgatcgtgacagggtgatagatgaagctaagaaatgggagaggaagtttagtgatgcgattcaaagcaaagaagaagaaattagactcaaagaagataattgcagtgttctaaaggatcaacttagacagatgtccatccatatggaagaattaaagattaacatttccaggcttgaacatgacaagcagatttgggagtccaaggcccagacagaggtccagcttcagcagaaggtctgtgatactctacagggggaaaacaaagaacttttgtcccagctagaagagacacgccacctataccacagttctcagaatgaattagctaagttggaatcagaacttaagagtctcaaagaccagttgactgatttaagtaactctttagaaaaatgtaaggaacaaaaaggaaacttggaagggatcataaggcagcaagaggctgatattcaaaattctaagttcagttatgaacaactggagactgatcttcaggcctccagagaactgaccagtaggctgcatgaagaaataaatatgaaagagcaaaagattataagcctgctttctggcaaggaagaggcaatccaagtagctattgctgaactgcgtcagcaacatgataaagaaattaaagagctggaaaacctgctgtcccaggaggaagaggagaatattgttttagaagaggagaacaaaaaggctgttgataaaaccaatcagcttatggaaacactgaaaaccatcaaaaaggaaaacattcagcaaaaggcacagttggattcctttgttaaatccatgtcttctctccaaaatgatcgagaccgcatagtgggtgactatcaacagctggaagagcgacatctctctataatcttggaaaaagaccaactcatccaagaggctgctgcagagaataataagcttaaagaagaaatacgaggcttgagaagtcatatggatgatctcaattctgagaatgccaagctagatgcagaactgatccaatatagagaagacctgaaccaagtgataacaataaaggacagccaacaaaagcagcttcttgaagttcaacttcagcaaaataaggagctggaaaataaatatgctaaattagaagaaaagctgaaggaatctgaggaagcaaatgaggatctgcggaggtcctttaatgccctacaagaagagaaacaagatttatctaaagagattgagagtttgaaagtatctatatcccagctaacaagacaagtaacagccttgcaagaagaaggtactttaggactctatcatgcccagttaaaagtaaaagaagaagaggtacacaggttaagtgctttgttttcctcctctcaaaagagaattgcagaactggaagaagaattggtttgtgttcaaaaggaagctgccaagaaggtaggtgaaattgaagataaactgaagaaagaattaaagcatcttcatcatgatgcagggataatgagaaatgaaactgaaacagcagaagagagagtggcagagctagcaagagatttggtggagatggaacagaaattactcatggtcaccaaagaaaataaaggtctcacagcacaaattcagtcttttggaaggtctatgagttccttgcaaaatagtagagatcatgccaatgaggaacttgatgaactgaaaaggaaatatgatgccagtctgaaggaattggcacagttgaaagaacagggactcttaaacagagagagagatgctcttctttctgaaaccgccttttcaatgaactccactgaggagaatagcttgtctcaccttgagaaacttaaccaacagctcctatccaaagatgagcaattgcttcacttgtcctcacaactagaagattcttataaccaagtgcagtccttttccaaggctatggccagtctgcagaatgagagagatcacctgtggaatgagctggagaaatttcgaaagtcagaggaagggaagcagaggtctgcagctcagccttccaccagcccagctgaagtacagagtttaaaaaaagctatgtcttcactccaaaatgacagagacagactactgaaggaattgaagaatctgcagcagcaatacttacagattaatcaagagatcactgagttacatccactgaaggctcaacttcaggagtatcaagataagacaaaagcatttcagattatgcaagaagagctcaggcaggaaaacctctcctggcagcatgagctgcatcagctcaggatggagaagagttcctgggaaatacatgagaggagaatgaaggaacagtaccttatggctatctcagataaagatcagcagctcagtcatctgcagaatcttataagggaattgaggtcttcttcctcccagactcagcctctcaaagtgcaataccaaagacaggcatccccagagacatcagcttccccagatgggtcacaaaatctggtttatgagacagaacttctcaggacccagctcaatgacagcttaaaggaaattcaccaaaaggagttaagaattcagcaactgaacagcaacttctctcagctactggaagagaaaaacaccctttccattcagctctgcgataccagtcagagtcttcgtgagaaccagcagcactatggtgaccttttaaatcactgtgcagtcttggagaagcaggttcaagagctgcaggcggtgagtaaagagaaggggccactaaatatagatgttgctccaggagctccccaggaaaagaatggagttcacagaaagagtgaccctgaggaactaagggaaccgcagcaaagcttttctgaagctcagcagcagctatgcaacaccagacaggaagtgaatgaattaaggaagctgctggaagaagaacgagaccaaagagtggctgctgagaatgctctctctgtggccgaggagcagatcagacggttagagcacagtgaatgggactcttcccggactcctatcattggctcctgtggcactcaggagcaggcactgttaatagatcttacaagcaacagttgtcgaaggacccggagtggcgttggatggaagcgagtcctgcgttcactctgtcattcacggacccgagtgccacttctagcagccatctactttctaatgattcatgtcctgctcattctgtgttttacgggccatctatagacttagttgttactctttggaccactcccctcaaaacttggaattctctcacctctaacatcagaacatcaattccagtggaacagtcttcccatttacaggtcttctctccaactcttcacggaaagtgcctgcaaaaacagaggtggatacgaggacaggttggagctgcagggactggcgagtctgctttcttctactgccctgagcctgaacgcttctgcttaatctgagaatcacatttggtttgttgagcctaatatttgttgagattttgcaggaccctgatcttttgtggtcctgtaaaagatactgaggaatgtctttcagccaagccaagaggatggtttcaataaacctaataatctgaagttcagtatcattttgattgataactttctttgccttgtttgcctgtattttctcctgtttcagggggaaggtggctctgccataaacagagttcagggaaatgaacatgtcacctcataggacatctgatttaggtctcttgcagaatagggtggtgaaagctgaaggaactccctaggggttttagctgttagatcacatgggaggacagcatcttcttccctgccaatttcagatataattggagggagaatttcaggtcttagactataaggatagaatccctttgcttttgcccttgatcacatgtatactaaggtattaagtggcccaagtctttcctttcaccaaagggcagggagaagtgtctatggacagcagggttccaattcttgtcattccaggaatatctgaatattcctggaatgtggaccctgagacagtgctcaggggccactgggagccaatattaggcattgactctcagccaggagtctgactggtctaacaccacactgcaactcctgacctcttgaagtactaagctactttgctgttagtgacagttattacagtttctcagccccattgtctctgccctctgtggcaatggaaggagaatatagagaagacaaaattaaatatagatagacctgagaaggacagccaggatagaattccatttgtgcctattccctgcctcccctcccctcccccatcctaccagttggttattttctcattgcatacgtgatgtgttcactgcctagcctctccctaaagaagagagaagacaagtgggctgactgatctgctctaaatctactgtggtgattaaatcttggttacaacatcctgggaagtttcctgaacaactgtaaaataataaaattattttcagaatg

SEQ ID NO: 138513 - DNA, 280 bp, Homo sapiens
  Payload ID: 7140
  Gene Symbol: GOLGB1
  Gene Name: golgin B1
  ENST ID: ENST00000472475
  CDS Start-End: 157-280
ggtctttagggcggagatcacagaatcattggagatattaatgcaaacggaggcctgtccaataatcctgctaatgctaatgggttactggaaagatgagaagagaggaaagatcccaacgatcccgtcaacacgaaaatcccaggaatcagagaaatgctgagccgattatcaggattagcaaatgttgttttgcatgaattatcaggagatgatgacactgatcagaatatgagggctcccctagaccctgaattacaccaagaatctgacatggaat

SEQ ID NO: 138514 - DNA, 3093 bp, Homo sapiens
  Payload ID: 7140
  Gene Symbol: GOLGB1
  Gene Name: golgin B1
  ENST ID: ENST00000489400
  CDS Start-End: 1-3093
cttatgcagagcaattggtggtggagctaaaagatattattagacagaaggatgttcaactgcagcagaaagatgaagctctacaggaagagagaaaagctgctgataacaaaattaaaaaactaaaacttcatgcgaaggccaaattaacttctttgaataaatacatagaagaaatgaaagcacaaggagggactgttctgcctacagaacctcagtcagaggagcaactttccaagcatgacaagagttctacagaggaagagatggaaatagaaaagataaaacataagctccaggagaaggaggaactaatcagcactttgcaagcccagcttactcaggcacaggcagaacaacctgcacagaaattgagggtgctgcaaaggaagcttgaggaacacgaagaatccttggtgggccgtgctcaggtcgttgacttgctgcaacaggagctgactgctgctgagcagagaaaccagattctctctcagcagttacagcagatggaagctgagcataatactttgaggaacactgtggaaacagaaagagaggagtccaagattctactggaaaagatggaacttgaagtggcagagagaaaattatccttccataatctgcaggaagaaatgcatcatcttttagaacagtttgagcaagcaggccaagcccaggctgaactagagtctcggtatagtgctttggagcagaagcacaaagcagaaatggaagagaagacctctcatattttgagtcttcaaaagactggacaagagctgcagtctgcctgtgatgctctaaaggatcaaaattcaaagcttctccaagataagaatgagcaagcagttcagtcagcccagaccattcagcaactggaagatcagctccagcaaaaatccaaagaaattagccaatttctaaatagactgcccttgcaacaacatgaaacagcatctcagacttctttcccagatgtttataatgagggcacacaggcagtcactgaggagaatattgcttctttgcagaagagagtggtagaactagagaatgaaaagggagccttgctccttagttctatagagctggaggagctgaaagctgagaatgaaaaactgtcttctcagattactctcctagaggctcagaatagaactggggaggcagacagagaagtcagtgagatcagcattgttgatattgccaacaagaggagctcttctgctgaggaaagtggacaagatgttctagaaaacacattttctcagaaacataaagaattatcagttttattgttggaaatgaaagaagctcaagaggaaattgcatttcttaaattacagctccagggaaaaagggctgaggaagcagatcatgaggtccttgaccagaaagaaatgaaacagatggagggtgagggaatagctccaattaaaatgaaagtatttcttgaagatacagggcaagattttcccttaatgccaaatgaagagagcagtcttccagcagttgaaaaagaacaggcgagcactgaacatcaaagtagaacatctgaggaaatatctttaaatgatgctggagtagaattgaaatcaacaaagcaggatggtgataaatccctttctgctgtaccagatattggtcagtgtcatcaggatgagttggaaaggttaaaaagtcaaattttggagctcgagctaaactttcataaagcacaagaaatctatgagaaaaatttagatgagaaagctaaggaaattagcaacctaaaccagttgattgaggagtttaagaaaaatgctgacaacaacagcagtgcattcactgctttgtctgaagaaagagaccagcttctctctcaggtgaaggaacttagcatggtaacagaattgagggctcaggtaaagcaactggaaatgaaccttgcagaagcagaaaggcaaagaagacttgattatgaaagccaaactgcccatgacaacctgctcactgaacagatccatagtctcagcatagaagccaaatctaaagatgtgaaaattgaagttttacagaatgaactggatgatgtgcagcttcagttttctgagcagagtaccctgataagaagcctgcaaagccagctgcaaaataaggaaagtgaagtgcttgagggggcagaacgtgtaaggcatatctcaagtaaagtggaagaactgtcccaggctctttcacagaaggaacttgaaataacaaaaatggatcagctcttactagagaaaaagagagatgtggaaaccctccaacaaaccatcgaggagaaggatcaacaagtgacagaaatcagctttagtatgactgagaaaatggttcagcttaatgaagagaagttttctcttggggttgaaattaagactcttaaagaacagctaaatttattatccagagctgaggaagcaaaaaaagagcaggtggaagaagataatgaagtttcttctggccttaaacaaaattatgatgagatgagcccagcaggacaaataagtaaggaagaacttcagcatgaatttgaccttctgaagaaagaaaatgagcagagaaagagaaagctccaggcagctcttattaacagaaaggagcttctgcaaagagtcagtagattggaagaagaattagccaacttgaaagatgaatctaagaaagaaatcccactcagtgagactgagaggggagaagtggaagaagataaagaaaacaaagaatactcagaaaaatgtgtgacttctaagtgccaagaaatagaaatttatttaaaacagacaatatctgagaaagaagtggaactacagcatataaggaaggatttggaagaaaagctggcagctgaagagcaattccaggctctggtcaaacagatgaatcagaccttgcaagataaaacaaaccaaatagatttgctccaagcagaaatcagtgaaaaccaagcaattatccagaagttaatcacaagtaacacggatgcaagtgatggggactccgtagcacttgtaaaggaaacagtggtgataagtccaccttgtacaggtagtagtgaacactggaaaccag

SEQ ID NO: 138515 - DNA, 4959 bp, Homo sapiens
  Payload ID: 7140
  Gene Symbol: GOLGB1
  Gene Name: golgin B1
  ENST ID: ENST00000494517
  CDS Start-End: 38-4959
ggggcagctggagcctcaggcggcagcgcttctagaaatgctgagccgattatcaggattagcaaatgttgttttgcatgaattatcaggagatgatgacactgatcagaatatgagggctcccctagaccctgaattacaccaagaatctgacatggaatttaataatactacacaagaagatgttcaggagcgcctggcttatgcagagcaattggtggtggagctaaaagatattattagacagaaggatgttcaactgcagcagaaagatgaagctctacaggaagagagaaaagctgctgataacaaaattaaaaaactaaaacttcatgcgaaggccaaattaacttctttgaataaatacatagaagaaatgaaagcacaaggagggactgttctgcctacagaacctcagtcagaggagcaactttccaagcatgacaagagttctacagaggaagagatggaaatagaaaagataaaacataagctccaggagaaggaggaactaatcagcactttgcaagcccagcttactcaggcacaggcagaacaacctgcacagagttctacagagatggaagaatttgtaatgatgaagcaacagctccaggagaaggaagaattcattagcactttacaagcccagctcagccagacacaggcagagcaagctgcacagaaattgagggtgctgcaaaggaagcttgaggaacacgaagaatccttggtgggccgtgctcaggtcgttgacttgctgcaacaggagctgactgctgctgagcagagaaaccagattctctctcagcagttacagcagatggaagctgagcataatactttgaggaacactgtggaaacagaaagagaggagtccaagattctactggaaaagatggaacttgaagtggcagagagaaaattatccttccataatctgcaggaagaaatgcatcatcttttagaacagtttgagcaagcaggccaagcccaggctgaactagagtctcggtatagtgctttggagcagaagcacaaagcagaaatggaagagaagacctctcatattttgagtcttcaaaagactggacaagagctgcagtctgcctgtgatgctctaaaggatcaaaattcaaagcttctccaagataagaatgagcaagcagttcagtcagcccagaccattcagcaactggaagatcagctccagcaaaaatccaaagaaattagccaatttctaaatagactgcccttgcaacaacatgaaacagcatctcagacttctttcccagatgtttataatgagggcacacaggcagtcactgaggagaatattgcttctttgcagaagagagtggtagaactagagaatgaaaagggagccttgctccttagttctatagagctggaggagctgaaagctgagaatgaaaaactgtcttctcagattactctcctagaggctcagaatagaactggggaggcagacagagaagtcagtgagatcagcattgttgatattgccaacaagaggagctcttctgctgaggaaagtggacaagatgttctagaaaacacattttctcagaaacataaagaattatcagttttattgttggaaatgaaagaagctcaagaggaaattgcatttcttaaattacagctccagggaaaaagggctgaggaagcagatcatgaggtccttgaccagaaagaaatgaaacagatggagggtgagggaatagctccaattaaaatgaaagtatttcttgaagatacagggcaagattttcccttaatgccaaatgaagagagcagtcttccagcagttgaaaaagaacaggcgagcactgaacatcaaagtagaacatctgaggaaatatctttaaatgatgctggagtagaattgaaatcaacaaagcaggatggtgataaatccctttctgctgtaccagatattggtcagtgtcatcaggatgagttggaaaggttaaaaagtcaaattttggagctcgagctaaactttcataaagcacaagaaatctatgagaaaaatttagatgagaaagctaaggaaattagcaacctaaaccagttgattgaggagtttaagaaaaatgctgacaacaacagcagtgcattcactgctttgtctgaagaaagagaccagcttctctctcaggtgaaggaacttagcatggtaacagaattgagggctcaggtaaagcaactggaaatgaaccttgcagaagcagaaaggcaaagaagacttgattatgaaagccaaactgcccatgacaacctgctcactgaacagatccatagtctcagcatagaagccaaatctaaagatgtgaaaattgaagttttacagaatgaactggatgatgtgcagcttcagttttctgagcagagtaccctgataagaagcctgcaaagccagctgcaaaataaggaaagtgaagtgcttgagggggcagaacgtgtaaggcatatctcaagtaaagtggaagaactgtcccaggctctttcacagaaggaacttgaaataacaaaaatggatcagctcttactagagaaaaagagagatgtggaaaccctccaacaaaccatcgaggagaaggatcaacaagtgacagaaatcagctttagtatgactgagaaaatggttcagcttaatgaagagaagttttctcttggggttgaaattaagactcttaaagaacagctaaatttattatccagagctgaggaagcaaaaaaagagcaggtggaagaagataatgaagtttcttctggccttaaacaaaattatgatgagatgagcccagcaggacaaataagtaaggaagaacttcagcatgaatttgaccttctgaagaaagaaaatgagcagagaaagagaaagctccaggcagctcttattaacagaaaggagcttctgcaaagagtcagtagattggaagaagaattagccaacttgaaagatgaatctaagaaagaaatcccactcagtgagactgagaggggagaagtggaagaagataaagaaaacaaagaatactcagaaaaatgtgtgacttctaagtgccaagaaatagaaatttatttaaaacagacaatatctgagaaagaagtggaactacagcatataaggaaggatttggaagaaaagctggcagctgaagagcaattccaggctctggtcaaacagatgaatcagaccttgcaagataaaacaaaccaaatagatttgctccaagcagaaatcagtgaaaaccaagcaattatccagaagttaatcacaagtaacacggatgcaagtgatggggactccgtagcacttgtaaaggaaacagtggtgataagtccaccttgtacaggtagtagtgaacactggaaaccagaactagaagaaaagatactggcccttgaaaaagaaaaggagcaacttcaaaagaagctacaggaagccttaacctcccgcaaggcaattcttaaaaaggcacaggagaaagaaagacatctcagggaggagctaaagcaacagaaagatgactataatcgcttgcaagaacagtttgatgagcaaagcaaggaaaatgagaatattggagaccagctaaggcaactccagattcaagtaagggaatccatagacggaaaactcccaagcacagaccagcaggaatcgtgttcttccactccaggtttagaagaacctttattcaaagccacagaacagcatcacactcaacctgttttagagtccaacttgtgcccagactggccttctcattctgaagatgcgagtgctctgcagggcggaacttctgttgcccagattaaggcccagctgaaggaaatagaggctgagaaagtagagttagaattgaaagttagttctacaacaagtgagcttactaaaaaatcagaagaggtatttcagttacaagagcagataaataaacagggtttagaaatcgagagtctaaagacagtatcccatgaagctgaagtccatgccgaaagcctgcagcagaaattggaaagcagccaactacaaattgctggcctagaacatctaagagaattgcaacctaaactggatgaactgcaaaaactcataagcaaaaaggaagaagacgttagctacctttctggacaacttagtgagaaagaagcagctctcactaaaatacagacagagataatagaacaagaagatttaattaaggctctgcatacacagctagaaatgcaagccaaagagcatgatgagaggataaagcagctacaggtggaactttgtgaaatgaagcaaaaaccagaagagattggagaagaaagtagagcaaagcaacaaatacaaaggaaactgcaagctgcccttatttcccgaaaagaagcactaaaagaaaacaaaagtctccaagaggaattgtctttggccagaggtaccattgaacgtctcaccaagtctctggcagatgtggaaagccaagtttctgctcaaaataaagaaaaagatacggtcttaggaaggttagctcttcttcaagaagaaagagacaaactcattacagaaatggacaggtctttattggaaaatcagagtctcagcagctcctgtgaaagtctaaaactagctctagagggtcttactgaagacaaggaaaagttagtgaaggaaattgaatctttgaaatcttctaagattgcagaaagtactgagtggcaagagaaacacaaggagctacaaaaagagtatgaaattcttctgcagtcctatgagaatgttagtaatgaagcagaaaggattcagcatgtggtggaagctgtgaggcaagagaaacaagaactgtatggcaagttaagaagcacagaggcaaacaagaaggagacagaaaagcagttgcaggaagctgagcaagaaatggaggaaatgaaagaaaa

SEQ ID NO: 138516 - DNA, 10295 bp, Homo sapiens
  Payload ID: 7140
  Gene Symbol: GOLGB1
  Gene Name: golgin B1
  ENST ID: ENST00000482512
  CDS Start-End: 94-213
gcggtggaaggtgtcgcgtacgggcttcccgagctgacgtggcttgaattgggaggggggcagctggagcctcaggcggcagcgcttctagaaatgctgagccgattatcaggattagcaaatgttgttttgcatgaattatcaggagatgatgacactgatcagaatatgagggctcccctagaccctgtgagtagttctgttctgatttaaactggaattacaccaagaatctgacatggaatttaataatactacacaagaagatgttcaggagcgcctggcttatgcagagcaattggtggtggagctaaaagatattattagacagaaggatgttcaactgcagcagaaagatgaagctctacaggaagagagaaaagctgctgataacaaaattaaaaaactaaaacttcatgcgaaggccaaattaacttctttgaataaatacatagaagaaatgaaagcacaaggagggactgttctgcctacagaacctcagtcagaggagcaactttccaagcatgacaagagttctacagaggaagagatggaaatagaaaagataaaacataagctccaggagaaggaggaactaatcagcactttgcaagcccagcttactcaggcacaggcagaacaacctgcacagagttctacagagatggaagaatttgtaatgatgaagcaacagctccaggagaaggaagaattcattagcactttacaagcccagctcagccagacacaggcagagcaagctgcacagttgagttccatgcagcaggtggtccgagagaaagatgcccgctttgaaacacaagttcgtcttcatgaagatgagcttcttcagttagtaacccaggcagatgtggaaacagagatgcaacagaaattgagggtgctgcaaaggaagcttgaggaacacgaagaatccttggtgggccgtgctcaggtcgttgacttgctgcaacaggagctgactgctgctgagcagagaaaccagattctctctcagcagttacagcagatggaagctgagcataatactttgaggaacactgtggaaacagaaagagaggagtccaagattctactggaaaagatggaacttgaagtggcagagagaaaattatccttccataatctgcaggaagaaatgcatcatcttttagaacagtttgagcaagcaggccaagcccaggctgaactagagtctcggtatagtgctttggagcagaagcacaaagcagaaatggaagagaagacctctcatattttgagtcttcaaaagactggacaagagctgcagtctgcctgtgatgctctaaaggatcaaaattcaaagcttctccaagataagaatgagcaagcagttcagtcagcccagaccattcagcaactggaagatcagctccagcaaaaatccaaagaaattagccaatttctaaatagactgcccttgcaacaacatgaaacagcatctcagacttctttcccagatgtttataatgagggcacacaggcagtcactgaggagaatattgcttctttgcagaagagagtggtagaactagagaatgaaaagggagccttgctccttagttctatagagctggaggagctgaaagctgagaatgaaaaactgtcttctcagattactctcctagaggctcagaatagaactggggaggcagacagagaagtcagtgagatcagcattgttgatattgccaacaagaggagctcttctgctgaggaaagtggacaagatgttctagaaaacacattttctcagaaacataaagaattatcagttttattgttggaaatgaaagaagctcaagaggaaattgcatttcttaaattacagctccagggaaaaagggctgaggaagcagatcatgaggtccttgaccagaaagaaatgaaacagatggagggtgagggaatagctccaattaaaatgaaagtatttcttgaagatacagggcaagattttcccttaatgccaaatgaagagagcagtcttccagcagttgaaaaagaacaggcgagcactgaacatcaaagtagaacatctgaggaaatatctttaaatgatgctggagtagaattgaaatcaacaaagcaggatggtgataaatccctttctgctgtaccagatattggtcagtgtcatcaggatgagttggaaaggttaaaaagtcaaattttggagctcgagctaaactttcataaagcacaagaaatctatgagaaaaatttagatgagaaagctaaggaaattagcaacctaaaccagttgattgaggagtttaagaaaaatgctgacaacaacagcagtgcattcactgctttgtctgaagaaagagaccagcttctctctcaggtgaaggaacttagcatggtaacagaattgagggctcaggtaaagcaactggaaatgaaccttgcagaagcagaaaggcaaagaagacttgattatgaaagccaaactgcccatgacaacctgctcactgaacagatccatagtctcagcatagaagccaaatctaaagatgtgaaaattgaagttttacagaatgaactggatgatgtgcagcttcagttttctgagcagagtaccctgataagaagcctgcaaagccagctgcaaaataaggaaagtgaagtgcttgagggggcagaacgtgtaaggcatatctcaagtaaagtggaagaactgtcccaggctctttcacagaaggaacttgaaataacaaaaatggatcagctcttactagagaaaaagagagatgtggaaaccctccaacaaaccatcgaggagaaggatcaacaagtgacagaaatcagctttagtatgactgagaaaatggttcagcttaatgaagagaagttttctcttggggttgaaattaagactcttaaagaacagctaaatttattatccagagctgaggaagcaaaaaaagagcaggtggaagaagataatgaagtttcttctggccttaaacaaaattatgatgagatgagcccagcaggacaaataagtaaggaagaacttcagcatgaatttgaccttctgaagaaagaaaatgagcagagaaagagaaagctccaggcagctcttattaacagaaaggagcttctgcaaagagtcagtagattggaagaagaattagccaacttgaaagatgaatctaagaaagaaatcccactcagtgagactgagaggggagaagtggaagaagataaagaaaacaaagaatactcagaaaaatgtgtgacttctaagtgccaagaaatagaaatttatttaaaacagacaatatctgagaaagaagtggaactacagcatataaggaaggatttggaagaaaagctggcagctgaagagcaattccaggctctggtcaaacagatgaatcagaccttgcaagataaaacaaaccaaatagatttgctccaagcagaaatcagtgaaaaccaagcaattatccagaagttaatcacaagtaacacggatgcaagtgatggggactccgtagcacttgtaaaggaaacagtggtgataagtccaccttgtacaggtagtagtgaacactggaaaccagaactagaagaaaagatactggcccttgaaaaagaaaaggagcaacttcaaaagaagctacaggaagccttaacctcccgcaaggcaattcttaaaaaggcacaggagaaagaaagacatctcagggaggagctaaagcaacagaaagatgactataatcgcttgcaagaacagtttgatgagcaaagcaaggaaaatgagaatattggagaccagctaaggcaactccagattcaagtaagggaatccatagacggaaaactcccaagcacagaccagcaggaatcgtgttcttccactccaggtttagaagaacctttattcaaagccacagaacagcatcacactcaacctgttttagagtccaacttgtgcccagactggccttctcattctgaagatgcgagtgctctgcagggcggaacttctgttgcccagattaaggcccagctgaaggaaatagaggctgagaaagtagagttagaattgaaagttagttctacaacaagtgagcttactaaaaaatcagaagaggtatttcagttacaagagcagataaataaacagggtttagaaatcgagagtctaaagacagtatcccatgaagctgaagtccatgccgaaagcctgcagcagaaattggaaagcagccaactacaaattgctggcctagaacatctaagagaattgcaacctaaactggatgaactgcaaaaactcataagcaaaaaggaagaagacgttagctacctttctggacaacttagtgagaaagaagcagctctcactaaaatacagacagagataatagaacaagaagatttaattaaggctctgcatacacagctagaaatgcaagccaaagagcatgatgagaggataaagcagctacaggtggaactttgtgaaatgaagcaaaaaccagaagagattggagaagaaagtagagcaaagcaacaaatacaaaggaaactgcaagctgcccttatttcccgaaaagaagcactaaaagaaaacaaaagtctccaagaggaattgtctttggccagaggtaccattgaacgtctcaccaagtctctggcagatgtggaaagccaagtttctgctcaaaataaagaaaaagatacggtcttaggaaggttagctcttcttcaagaagaaagagacaaactcattacagaaatggacaggtctttattggaaaatcagagtctcagcagctcctgtgaaagtctaaaactagctctagagggtcttactgaagacaaggaaaagttagtgaaggaaattgaatctttgaaatcttctaagattgcagaaagtactgagtggcaagagaaacacaaggagctacaaaaagagtatgaaattcttctgcagtcctatgagaatgttagtaatgaagcagaaaggattcagcatgtggtggaagctgtgaggcaagagaaacaagaactgtatggcaagttaagaagcacagaggcaaacaagaaggagacagaaaagcagttgcaggaagctgagcaagaaatggaggaaatgaaagaaaagatgagaaagtttgctaaatctaaacagcagaaaatcctagagctggaagaagagaatgaccggcttagggcagaggtgcaccctgcaggagatacagctaaagagtgtatggaaacacttctttcttccaatgccagcatgaaggaagaacttgaaagggtcaaaatggagtatgaaaccctttctaagaagtttcagtctttaatgtctgagaaagactctctaagtgaagaggttcaagatttaaagcatcagatagaaggtaatgtatctaaacaagctaacctagaggccaccgagaaacatgataaccaaacgaatgtcactgaagagggaacacagtctataccaggtgagactgaagagcaagactctctgagtatgagcacaagacctacatgttcagaatcggttccatcagcgaagagtgccaaccctgctgtaagtaaggatttcagctcacatgatgaaattaataactacctacagcagattgatcagctcaaagaaagaattgctggattagaggaggagaagcagaaaaacaaggaatttagccagactttagaaaatgagaaaaataccttactgagtcagatatcaacaaaggatggtgaactaaaaatgcttcaggaggaagtaaccaaaatgaacctgttaaatcagcaaatccaagaagaactctccagagttaccaaactaaaggagacagcagaagaagagaaagatgatttggaagagaggcttatgaatcaattagcagaacttaatggaagcattgggaattactgtcaggatgttacagatgcccaaataaaaaatgagctattggaatctgaaatgaagaaccttaaaaagtgtgtgagtgaattggaagaagaaaagcagcagttagtcaaggaaaaaactaaggtggaatcagaaatacgaaaggaatatttggagaaaatacaaggtgctcagaaagaacccggaaataaaagccatgcaaaggaacttcaggaactgttaaaagaaaaacaacaagaagtaaagcagctacagaaggactgcatcaggtatcaagagaaaattagtgctctggagagaactgttaaagctctagaatttgttcaaactgaatctcaaaaagatttggaaataaccaaagaaaatctggctcaagcagttgaacaccgcaaaaaggcacaagcagaattagctagcttcaaagtcctgctagatgacactcaaagtgaagcagcaagggtcctagcagacaatctcaagttgaaaaaggaacttcagtcaaataaagaatcagttaaaagccagatgaaacaaaaggatgaagatcttgagcgaagactggaacaggcagaagagaagcacctgaaagagaagaagaatatgcaagagaaactggatgctttgcgcagagaaaaagtccacttggaagagacaattggagagattcaggttactttgaacaagaaagacaaggaagttcagcaacttcaggaaaacttggacagtactgtgacccagcttgcagcctttactaagagcatgtcttccctccaggatgatcgtgacagggtgatagatgaagctaagaaatgggagaggaagtttagtgatgcgattcaaagcaaagaagaagaaattagactcaaagaagataattgcagtgttctaaaggatcaacttagacagatgtccatccatatggaagaattaaagattaacatttccaggcttgaacatgacaagcagatttgggagtccaaggcccagacagaggtccagcttcagcagaaggtctgtgatactctacagggggaaaacaaagaacttttgtcccagctagaagagacacgccacctataccacagttctcagaatgaattagctaagttggaatcagaacttaagagtctcaaagaccagttgactgatttaagtaactctttagaaaaatgtaaggaacaaaaaggaaacttggaagggatcataaggcagcaagaggctgatattcaaaattctaagttcagttatgaacaactggagactgatcttcaggcctccagagaactgaccagtaggctgcatgaagaaataaatatgaaagagcaaaagattataagcctgctttctggcaaggaagaggcaatccaagtagctattgctgaactgcgtcagcaacatgataaagaaattaaagagctggaaaacctgctgtcccaggaggaagaggagaatattgttttagaagaggagaacaaaaaggctgttgataaaaccaatcagcttatggaaacactgaaaaccatcaaaaaggaaaacattcagcaaaaggcacagttggattcctttgttaaatccatgtcttctctccaaaatgatcgagaccgcatagtgggtgactatcaacagctggaagagcgacatctctctataatcttggaaaaagaccaactcatccaagaggctgctgcagagaataataagcttaaagaagaaatacgaggcttgagaagtcatatggatgatctcaattctgagaatgccaagctagatgcagaactgatccaatatagagaagacctgaaccaagtgataacaataaaggacagccaacaaaagcagcttcttgaagttcaacttcagcaaaataaggagctggaaaataaatatgctaaattagaagaaaagctgaaggaatctgaggaagcaaatgaggatctgcggaggtcctttaatgccctacaagaagagaaacaagatttatctaaagagattgagagtttgaaagtatctatatcccagctaacaagacaagtaacagccttgcaagaagaaggtactttaggactctatcatgcccagttaaaagtaaaagaagaagaggtacacaggttaagtgctttgttttcctcctctcaaaagagaattgcagaactggaagaagaattggtttgtgttcaaaaggaagctgccaagaaggtaggtgaaattgaagataaactgaagaaagaattaaagcatcttcatcatgatgcagggataatgagaaatgaaactgaaacagcagaagagagagtggcagagctagcaagagatttggtggagatggaacagaaattactcatggtcaccaaagaaaataaaggtctcacagcacaaattcagtcttttggaaggtctatgagttccttgcaaaatagtagagatcatgccaatgaggaacttgatgaactgaaaaggaaatatgatgccagtctgaaggaattggcacagttgaaagaacagggactcttaaacagagagagagatgctcttctttctgaaaccgccttttcaatgaactccactgaggagaatagcttgtctcaccttgagaaacttaaccaacagctcctatccaaagatgagcaattgcttcacttgtcctcacaactagaagattcttataaccaagtgcagtccttttccaaggctatggccagtctgcagaatgagagagatcacctgtggaatgagctggagaaatttcgaaagtcagaggaagggaagcagaggtctgcagctcagccttccaccagcccagctgaagtacagagtttaaaaaaagctatgtcttcactccaaaatgacagagacagactactgaaggaattgaagaatctgcagcagcaatacttacagattaatcaagagatcactgagttacatccactgaaggctcaacttcaggagtatcaagataagacaaaagcatttcagattatgcaagaagagctcaggcaggaaaacctctcctggcagcatgagctgcatcagctcaggatggagaagagttcctgggaaatacatgagaggagaatgaaggaacagtaccttatggctatctcagataaagatcagcagctcagtcatctgcagaatcttataagggaattgaggtcttcttcctcccagactcagcctctcaaagtgcaataccaaagacaggcatccccagagacatcagcttccccagatgggtcacaaaatctggtttatgagacagaacttctcaggacccagctcaatgacagcttaaaggaaattcaccaaaaggagttaagaattcagcaactgaacagcaacttctctcagctactggaagagaaaaacaccctttccattcagctctgcgataccagtcagagtcttcgtgagaaccagcagcactatggtgaccttttaaatcactgtgcagtcttggagaagcaggttcaagagctgcaggcggggccactaaatatagatgttgctccaggagctccccaggaaaagaatggagttcacagaaagagtgaccctgaggaactaagggaaccgcagcaaagcttttctgaagctcagcagcagctatgcaacaccagacaggaagtgaatgaattaaggaagctgctggaagaagaacgagaccaaagagtggctgctgagaatgctctctctgtggccgaggagcagatcagacggttagagcacagtgaatgggactcttcccggactcctatcattggctcctgtggcactcaggagcaggcactgttaatagatcttacaagcaacagttgtcgaaggacccggagtggcgttggatggaagcgagtcctgcgttcactctgtcattcacggacccgagtgccacttctagcagccatctactttctaatgattcatgtcctgctcattctgtgttttacgggccatctatagacttagttgttactctttggaccactcccctcaaaacttggaattctctcacctctaacatcagaacatcaattccagtggaacagtcttcccatttacaggtcttctctccaactcttcacggaaagtgcctgcaaaaacagaggtggatacgaggacaggttggagctgcagggactggcgagtctgctttcttctactgccctgagcctgaacgcttctgcttaatctgagaatcacatttggtttgttgagcctaatatttgttgagattttgcaggaccctgatcttttgtggtcctgtaaaagatactgaggaatgtctttcagccaagccaagaggatggtttcaataaacctaataatctgaagttcagta

SEQ ID NO: 138517 - DNA, 901 bp, Homo sapiens
  Payload ID: 7140
  Gene Symbol: GOLGB1
  Gene Name: golgin B1
  ENST ID: ENST00000491690
  CDS Start-End: 1-330
gcatccccagagacatcagcttccccagatgggtcacaaaatctggtttatgagacagaacttctcaggacccagctcaatgacagcttaaaggaaattcaccaaaaggagttaagaattcagcaactgaacagcaacttctctcagctactggaagagaaaaacaccctttccattcagctctgcgataccagtcagagtcttcgtgagaaccagcagcactatggtgaccttttaaatcactgtgcagtcttggagaagcaggttcaagagctgcaggcgtggagacagggtttcaccatcttggccaggctggtcttgaactcctgatcttgtgatccacccacctcggcctcccaaagtgctgggattacaggcttgagccacggcgcccggcccagacttaacttttaagaggagaaattcaagaatgagaatctgggagaaaaatctaatcaagacaagagttttatgtaggggccactaaatatagatgttgctccaggagctccccaggaaaagaatggagttcacagaaagagtgaccctgaggaactaagggaaccgcagcaaagcttttctgaagctcagcagcagctatgcaacaccagacaggaagtgaatgaattaaggaagctgctggaagaagaacgagaccaaagagtggctgctgagaatgctctctctgtggccgaggagcagatcagacggttagagcacagtgaatgggactcttcccggactcctatcattggctcctgtggcactcaggagcaggcactgttaatagatcttacaagcaacagttgtcgaaggacccggagtggcgttggatggaagcgagtcctgcgttcactctgtcattcacggacccgagtgccacttctagcagccatctact

SEQ ID NO: 138518 - DNA, 11115 bp, Homo sapiens
  Payload ID: 7140
  Gene Symbol: GOLGB1
  Gene Name: golgin B1
  Uniprot ID: Q14789
  ENST ID: ENST00000614479
  CDS Start-End: 284-9838
atcttccgtcccaactgctagtggctgagtccctggcggggcgcggcggtggaaggtgtcgcgtacgggcttcccgagctgacgtggcttgaattgggaggggggcagctggagcctcaggcggcagcgcttctagaaatgctgagccgattatcaggattagcaaatgttgttttgcatgaattatcaggagatgatgacactgatcagaatatgagggctcccctagaccctgtgagtagttctgttctgatttaaactggaattacaccaagaatctgacatggaatttaataatactacacaagaagatgttcaggagcgcctggcttatgcagagcaattggtggtggagctaaaagatattattagacagaaggatgttcaactgcagcagaaagatgaagctctacaggaagagagaaaagctgctgataacaaaattaaaaaactaaaacttcatgcgaaggccaaattaacttctttgaataaatacatagaagaaatgaaagcacaaggagggactgttctgcctacagaacctcagtcagaggagcaactttccaagcatgacaagagttctacagaggaagagatggaaatagaaaagataaaacataagctccaggagaaggaggaactaatcagcactttgcaagcccagcttactcaggcacaggcagaacaacctgcacagagttctacagagatggaagaatttgtaatgatgaagcaacagctccaggagaaggaagaattcattagcactttacaagcccagctcagccagacacaggcagagcaagctgcacagaaattgagggtgctgcaaaggaagcttgaggaacacgaagaatccttggtgggccgtgctcaggtcgttgacttgctgcaacaggagctgactgctgctgagcagagaaaccagattctctctcagcagttacagcagatggaagctgagcataatactttgaggaacactgtggaaacagaaagagaggagtccaagattctactggaaaagatggaacttgaagtggcagagagaaaattatccttccataatctgcaggaagaaatgcatcatcttttagaacagtttgagcaagcaggccaagcccaggctgaactagagtctcggtatagtgctttggagcagaagcacaaagcagaaatggaagagaagacctctcatattttgagtcttcaaaagactggacaagagctgcagtctgcctgtgatgctctaaaggatcaaaattcaaagcttctccaagataagaatgagcaagcagttcagtcagcccagaccattcagcaactggaagatcagctccagcaaaaatccaaagaaattagccaatttctaaatagactgcccttgcaacaacatgaaacagcatctcagacttctttcccagatgtttataatgagggcacacaggcagtcactgaggagaatattgcttctttgcagaagagagtggtagaactagagaatgaaaagggagccttgctccttagttctatagagctggaggagctgaaagctgagaatgaaaaactgtcttctcagattactctcctagaggctcagaatagaactggggaggcagacagagaagtcagtgagatcagcattgttgatattgccaacaagaggagctcttctgctgaggaaagtggacaagatgttctagaaaacacattttctcagaaacataaagaattatcagttttattgttggaaatgaaagaagctcaagaggaaattgcatttcttaaattacagctccagggaaaaagggctgaggaagcagatcatgaggtccttgaccagaaagaaatgaaacagatggagggtgagggaatagctccaattaaaatgaaagtatttcttgaagatacagggcaagattttcccttaatgccaaatgaagagagcagtcttccagcagttgaaaaagaacaggcgagcactgaacatcaaagtagaacatctgaggaaatatctttaaatgatgctggagtagaattgaaatcaacaaagcaggatggtgataaatccctttctgctgtaccagatattggtcagtgtcatcaggatgagttggaaaggttaaaaagtcaaattttggagctcgagctaaactttcataaagcacaagaaatctatgagaaaaatttagatgagaaagctaaggaaattagcaacctaaaccagttgattgaggagtttaagaaaaatgctgacaacaacagcagtgcattcactgctttgtctgaagaaagagaccagcttctctctcaggtgaaggaacttagcatggtaacagaattgagggctcaggtaaagcaactggaaatgaaccttgcagaagcagaaaggcaaagaagacttgattatgaaagccaaactgcccatgacaacctgctcactgaacagatccatagtctcagcatagaagccaaatctaaagatgtgaaaattgaagttttacagaatgaactggatgatgtgcagcttcagttttctgagcagagtaccctgataagaagcctgcaaagccagctgcaaaataaggaaagtgaagtgcttgagggggcagaacgtgtaaggcatatctcaagtaaagtggaagaactgtcccaggctctttcacagaaggaacttgaaataacaaaaatggatcagctcttactagagaaaaagagagatgtggaaaccctccaacaaaccatcgaggagaaggatcaacaagtgacagaaatcagctttagtatgactgagaaaatggttcagcttaatgaagagaagttttctcttggggttgaaattaagactcttaaagaacagctaaatttattatccagagctgaggaagcaaaaaaagagcaggtggaagaagataatgaagtttcttctggccttaaacaaaattatgatgagatgagcccagcaggacaaataagtaaggaagaacttcagcatgaatttgaccttctgaagaaagaaaatgagcagagaaagagaaagctccaggcagctcttattaacagaaaggagcttctgcaaagagtcagtagattggaagaagaattagccaacttgaaagatgaatctaagaaagaaatcccactcagtgagactgagaggggagaagtggaagaagataaagaaaacaaagaatactcagaaaaatgtgtgacttctaagtgccaagaaatagaaatttatttaaaacagacaatatctgagaaagaagtggaactacagcatataaggaaggatttggaagaaaagctggcagctgaagagcaattccaggctctggtcaaacagatgaatcagaccttgcaagataaaacaaaccaaatagatttgctccaagcagaaatcagtgaaaaccaagcaattatccagaagttaatcacaagtaacacggatgcaagtgatggggactccgtagcacttgtaaaggaaacagtggtgataagtccaccttgtacaggtagtagtgaacactggaaaccagaactagaagaaaagatactggcccttgaaaaagaaaaggagcaacttcaaaagaagctacaggaagccttaacctcccgcaaggcaattcttaaaaaggcacaggagaaagaaagacatctcagggaggagctaaagcaacagaaagatgactataatcgcttgcaagaacagtttgatgagcaaagcaaggaaaatgagaatattggagaccagctaaggcaactccagattcaagtaagggaatccatagacggaaaactcccaagcacagaccagcaggaatcgtgttcttccactccaggtttagaagaacctttattcaaagccacagaacagcatcacactcaacctgttttagagtccaacttgtgcccagactggccttctcattctgaagatgcgagtgctctgcagggcggaacttctgttgcccagattaaggcccagctgaaggaaatagaggctgagaaagtagagttagaattgaaagttagttctacaacaagtgagcttactaaaaaatcagaagaggtatttcagttacaagagcagataaataaacagggtttagaaatcgagagtctaaagacagtatcccatgaagctgaagtccatgccgaaagcctgcagcagaaattggaaagcagccaactacaaattgctggcctagaacatctaagagaattgcaacctaaactggatgaactgcaaaaactcataagcaaaaaggaagaagacgttagctacctttctggacaacttagtgagaaagaagcagctctcactaaaatacagacagagataatagaacaagaagatttaattaaggctctgcatacacagctagaaatgcaagccaaagagcatgatgagaggataaagcagctacaggtggaactttgtgaaatgaagcaaaaaccagaagagattggagaagaaagtagagcaaagcaacaaatacaaaggaaactgcaagctgcccttatttcccgaaaagaagcactaaaagaaaacaaaagtctccaagaggaattgtctttggccagaggtaccattgaacgtctcaccaagtctctggcagatgtggaaagccaagtttctgctcaaaataaagaaaaagatacggtcttaggaaggttagctcttcttcaagaagaaagagacaaactcattacagaaatggacaggtctttattggaaaatcagagtctcagcagctcctgtgaaagtctaaaactagctctagagggtcttactgaagacaaggaaaagttagtgaaggaaattgaatctttgaaatcttctaagattgcagaaagtactgagtggcaagagaaacacaaggagctacaaaaagagtatgaaattcttctgcagtcctatgagaatgttagtaatgaagcagaaaggattcagcatgtggtggaagctgtgaggcaagagaaacaagaactgtatggcaagttaagaagcacagaggcaaacaagaaggagacagaaaagcagttgcaggaagctgagcaagaaatggaggaaatgaaagaaaagatgagaaagtttgctaaatctaaacagcagaaaatcctagagctggaagaagagaatgaccggcttagggcagaggtgcaccctgcaggagatacagctaaagagtgtatggaaacacttctttcttccaatgccagcatgaaggaagaacttgaaagggtcaaaatggagtatgaaaccctttctaagaagtttcagtctttaatgtctgagaaagactctctaagtgaagaggttcaagatttaaagcatcagatagaaggtaatgtatctaaacaagctaacctagaggccaccgagaaacatgataaccaaacgaatgtcactgaagagggaacacagtctataccaggtgagactgaagagcaagactctctgagtatgagcacaagacctacatgttcagaatcggttccatcagcgaagagtgccaaccctgctgtaagtaaggatttcagctcacatgatgaaattaataactacctacagcagattgatcagctcaaagaaagaattgctggattagaggaggagaagcagaaaaacaaggaatttagccagactttagaaaatgagaaaaataccttactgagtcagatatcaacaaaggatggtgaactaaaaatgcttcaggaggaagtaaccaaaatgaacctgttaaatcagcaaatccaagaagaactctccagagttaccaaactaaaggagacagcagaagaagagaaagatgatttggaagagaggcttatgaatcaattagcagaacttaatggaagcattgggaattactgtcaggatgttacagatgcccaaataaaaaatgagctattggaatctgaaatgaagaaccttaaaaagtgtgtgagtgaattggaagaagaaaagcagcagttagtcaaggaaaaaactaaggtggaatcagaaatacgaaaggaatatttggagaaaatacaaggtgctcagaaagaacccggaaataaaagccatgcaaaggaacttcaggaactgttaaaagaaaaacaacaagaagtaaagcagctacagaaggactgcatcaggtatcaagagaaaattagtgctctggagagaactgttaaagctctagaatttgttcaaactgaatctcaaaaagatttggaaataaccaaagaaaatctggctcaagcagttgaacaccgcaaaaaggcacaagcagaattagctagcttcaaagtcctgctagatgacactcaaagtgaagcagcaagggtcctagcagacaatctcaagttgaaaaaggaacttcagtcaaataaagaatcagttaaaagccagatgaaacaaaaggatgaagatcttgagcgaagactggaacaggcagaagagaagcacctgaaagagaagaagaatatgcaagagaaactggatgctttgcgcagagaaaaagtccacttggaagagacaattggagagattcaggttactttgaacaagaaagacaaggaagttcagcaacttcaggaaaacttggacagtactgtgacccagcttgcagcctttactaagagcatgtcttccctccaggatgatcgtgacagggtgatagatgaagctaagaaatgggagaggaagtttagtgatgcgattcaaagcaaagaagaagaaattagactcaaagaagataattgcagtgttctaaaggatcaacttagacagatgtccatccatatggaagaattaaagattaacatttccaggcttgaacatgacaagcagatttgggagtccaaggcccagacagaggtccagcttcagcagaaggtctgtgatactctacagggggaaaacaaagaacttttgtcccagctagaagagacacgccacctataccacagttctcagaatgaattagctaagttggaatcagaacttaagagtctcaaagaccagttgactgatttaagtaactctttagaaaaatgtaaggaacaaaaaggaaacttggaagggatcataaggcagcaagaggctgatattcaaaattctaagttcagttatgaacaactggagactgatcttcaggcctccagagaactgaccagtaggctgcatgaagaaataaatatgaaagagcaaaagattataagcctgctttctggcaaggaagaggcaatccaagtagctattgctgaactgcgtcagcaacatgataaagaaattaaagagctggaaaacctgctgtcccaggaggaagaggagaatattgttttagaagaggagaacaaaaaggctgttgataaaaccaatcagcttatggaaacactgaaaaccatcaaaaaggaaaacattcagcaaaaggcacagttggattcctttgttaaatccatgtcttctctccaaaatgatcgagaccgcatagtgggtgactatcaacagctggaagagcgacatctctctataatcttggaaaaagaccaactcatccaagaggctgctgcagagaataataagcttaaagaagaaatacgaggcttgagaagtcatatggatgatctcaattctgagaatgccaagctagatgcagaactgatccaatatagagaagacctgaaccaagtgataacaataaaggacagccaacaaaagcagcttcttgaagttcaacttcagcaaaataaggagctggaaaataaatatgctaaattagaagaaaagctgaaggaatctgaggaagcaaatgaggatctgcggaggtcctttaatgccctacaagaagagaaacaagatttatctaaagagattgagagtttgaaagtatctatatcccagctaacaagacaagtaacagccttgcaagaagaaggtactttaggactctatcatgcccagttaaaagtaaaagaagaagaggtacacaggttaagtgctttgttttcctcctctcaaaagagaattgcagaactggaagaagaattggtttgtgttcaaaaggaagctgccaagaaggtaggtgaaattgaagataaactgaagaaagaattaaagcatcttcatcatgatgcagggataatgagaaatgaaactgaaacagcagaagagagagtggcagagctagcaagagatttggtggagatggaacagaaattactcatggtcaccaaagaaaataaaggtctcacagcacaaattcagtcttttggaaggtctatgagttccttgcaaaatagtagagatcatgccaatgaggaacttgatgaactgaaaaggaaatatgatgccagtctgaaggaattggcacagttgaaagaacagggactcttaaacagagagagagatgctcttctttctgaaaccgccttttcaatgaactccactgaggagaatagcttgtctcaccttgagaaacttaaccaacagctcctatccaaagatgagcaattgcttcacttgtcctcacaactagaagattcttataaccaagtgcagtccttttccaaggctatggccagtctgcagaatgagagagatcacctgtggaatgagctggagaaatttcgaaagtcagaggaagggaagcagaggtctgcagctcagccttccaccagcccagctgaagtacagagtttaaaaaaagctatgtcttcactccaaaatgacagagacagactactgaaggaattgaagaatctgcagcagcaatacttacagattaatcaagagatcactgagttacatccactgaaggctcaacttcaggagtatcaagataagacaaaagcatttcagattatgcaagaagagctcaggcaggaaaacctctcctggcagcatgagctgcatcagctcaggatggagaagagttcctgggaaatacatgagaggagaatgaaggaacagtaccttatggctatctcagataaagatcagcagctcagtcatctgcagaatcttataagggaattgaggtcttcttcctcccagactcagcctctcaaagtgcaataccaaagacaggcatccccagagacatcagcttccccagatgggtcacaaaatctggtttatgagacagaacttctcaggacccagctcaatgacagcttaaaggaaattcaccaaaaggagttaagaattcagcaactgaacagcaacttctctcagctactggaagagaaaaacaccctttccattcagctctgcgataccagtcagagtcttcgtgagaaccagcagcactatggtgaccttttaaatcactgtgcagtcttggagaagcaggttcaagagctgcaggcggggccactaaatatagatgttgctccaggagctccccaggaaaagaatggagttcacagaaagagtgaccctgaggaactaagggaaccgcagcaaagcttttctgaagctcagcagcagctatgcaacaccagacaggaagtgaatgaattaaggaagctgctggaagaagaacgagaccaaagagtggctgctgagaatgctctctctgtggccgaggagcagatcagacggttagagcacagtgaatgggactcttcccggactcctatcattggctcctgtggcactcaggagcaggcactgttaatagatcttacaagcaacagttgtcgaaggacccggagtggcgttggatggaagcgagtcctgcgttcactctgtcattcacggacccgagtgccacttctagcagccatctactttctaatgattcatgtcctgctcattctgtgttttacgggccatctatagacttagttgttactctttggaccactcccctcaaaacttggaattctctcacctctaacatcagaacatcaattccagtggaacagtcttcccatttacaggtcttctctccaactcttcacggaaagtgcctgcaaaaacagaggtggatacgaggacaggttggagctgcagggactggcgagtctgctttcttctactgccctgagcctgaacgcttctgcttaatctgagaatcacatttggtttgttgagcctaatatttgttgagattttgcaggaccctgatcttttgtggtcctgtaaaagatactgaggaatgtctttcagccaagccaagaggatggtttcaataaacctaataatctgaagttcagtatcattttgattgataactttctttgccttgtttgcctgtattttctcctgtttcagggggaaggtggctctgccataaacagagttcagggaaatgaacatgtcacctcataggacatctgatttaggtctcttgcagaatagggtggtgaaagctgaaggaactccctaggggttttagctgttagatcacatgggaggacagcatcttcttccctgccaatttcagatataattggagggagaatttcaggtcttagactataaggatagaatccctttgcttttgcccttgatcacatgtatactaaggtattaagtggcccaagtctttcctttcaccaaagggcagggagaagtgtctatggacagcagggttccaattcttgtcattccaggaatatctgaatattcctggaatgtggaccctgagacagtgctcaggggccactgggagccaatattaggcattgactctcagccaggagtctgactggtctaacaccacactgcaactcctgacctcttgaagtactaagctactttgctgttagtgacagttattacagtttctcagccccattgtctctgccctctgtggcaatggaaggagaatatagagaagacaaaattaaatatagatagacctgagaaggacagccaggatagaattccatttgtgcctattccctgcctcccctcccctcccccatcctaccagttggttattttctcattgcatacgtgatgtgttcactgcctagcctctccctaaagaagagagaagacaagtgggctgactgatctgctctaaatctactgtggtgattaaatcttggttacaacatcctgggaagtttcctgaacaactgtaaaataataaaattattttcagaatg

SEQ ID NO: 138519 - DNA, 1699 bp, Homo sapiens
  Payload ID: 7141
  Gene Symbol: GORAB
  Gene Name: golgin, RAB6-interacting
  Uniprot ID: Q5T7V8
  ENST ID: ENST00000367762
  CDS Start-End: 19-759
ggccggggaaaaacccggatgagctgggcagcagtgttggcagtcgcggctgcgagatttgggcacttttgggggtgccggtggcccgggccgatggcgcaaggttgggcaggattctctgaggaggaactgaggagactaaagcagactaaagatccatttgaaccacagcgacgtctccccgcgaagaaaagtcgacaacaacttcagcgagaaaaagcccttgtagagcaaagccaaaaacttgggcttcaagatggatcaacctcattacttccagagcagctgctttcagcaccaaaacagagagttaacgttcaaaaaccacctttttcttcccctactcttccgagtcatttcactctcacctcccccgttggtgatggacaaccacagggcattgaaagtcagccaaaggaactgggacttgagaattcccatgatggtcacaacaatgttgagattctacctccaaagccagattgcaaattggagaaaaagaaagtggaattgcaagaaaaatctcgttgggaagtcctccaacaagaacaacggctaatggaagagaaaaataaacgtaaaaaagctcttttggctaaagctattgcagaaagatccaaaagaactcaggcagagaccatgaaactaaagcggatccagaaggagttgcaggctttagatgacatggtgtcagctgacattggaattctcaggaaccggattgatcaggccagcttagactattcatacgctcggtgagttggggaaattgaatctgaacaaggagtatgatttaattaatgtttattgccagctgttccaggggcttttatgtatatcatcattgaagcctcaaaacaaccccattcagtgctgtatttattcttcttttgtgctaattcaagtgtctcctcttcagtgaagtcttccttaactctgccctactagttaaccttgttcgtgtgccattagagcagttcttgcattatttatttacgttttagtctttgctgcgaaaccctcagctatttaatgtttggaagtgtttttgctcatctttcagcatctagcaaagtaaatatctgagtggtttcgccaaaactgttactctgacaccaagtctgtgttctttccattaaaatttttgatatctgatatagtcctataggattgaagtctagtcctcactttagctttcatcagagtaagaggatctagtttagtttttaaaagcttatgaatattttaagcatatcctctgtcttggaaatttgaaatattttctctttttttttcctttcaattatactctgtatgaaatggtttaatatatgtttccttggtttcaaccattggcattttttaaaagagaaaaaataccatggagtatttttaaaatgaactaacacatgtaatgaattacatggactttgcagacagataaaagggcaaaaaaatatgtccaatttcagggttttcagccctttcaacattgctttaatcatcctggtttgtcttttttcacaagggaatgctgtgttaatgactcagttttctatcttactctgttacactagaaatgaatcagaatgcctcattaggccagggtaaaccacaacatcagaatgtttatataacaatttattaaagcggaaatgcttgattgtggtttttaataaactgttgagtgtttaagaaa

SEQ ID NO: 138520 - DNA, 2189 bp, Homo sapiens
  Payload ID: 7141
  Gene Symbol: GORAB
  Gene Name: golgin, RAB6-interacting
  Uniprot ID: Q5T7V8
  ENST ID: ENST00000367763
  CDS Start-End: 21-1205
gcggccggggaaaaacccggatgagctgggcagcagtgttggcagtcgcggctgcgagatttgggcacttttgggggtgccggtggcccgggccgatggcgcaaggttgggcaggattctctgaggaggaactgaggagactaaagcagactaaagatccatttgaaccacagcgacgtctccccgcgaagaaaagtcgacaacaacttcagcgagaaaaagcccttgtagagcaaagccaaaaacttgggcttcaagatggatcaacctcattacttccagagcagctgctttcagcaccaaaacagagagttaacgttcaaaaaccacctttttcttcccctactcttccgagtcatttcactctcacctcccccgttggtgatggacaaccacagggcattgaaagtcagccaaaggaactgggacttgagaattcccatgatggtcacaacaatgttgagattctacctccaaagccagattgcaaattggagaaaaagaaagtggaattgcaagaaaaatctcgttgggaagtcctccaacaagaacaacggctaatggaagagaaaaataaacgtaaaaaagctcttttggctaaagctattgcagaaagatccaaaagaactcaggcagagaccatgaaactaaagcggatccagaaggagttgcaggctttagatgacatggtgtcagctgacattggaattctcaggaaccggattgatcaggccagcttagactattcatacgctcggaagcggtttgacagggctgaagcagagtacattgcagcaaagctagatatacagcgcaagactgagataaaagagcaactcactgaacacctttgtacgatcatacagcaaaatgagctccgaaaggccaagaagttggaggagttgatgcaacaactagatgtagaagccgatgaagagactttggagcttgaggtggaggtcgagagattgctacacgaacaagaagtagaatcaaggagaccagtggttcgtttagagaggccatttcagcctgcggaggagagtgtgacattagaatttgctaaagagaacagaaagtgtcaagaacaagctgtttccccaaaggtagatgaccagtgtggaaattccagtagcatcccctttcttagtccaaactgcccaaatcaagaaggtaatgacatttcagctgctttggccacatgaagttctggtattcttttgagctaatatggtattgagtaaagtatactttttgcagtagatcatgccctgacctccaataaaaacctctttaaaacaatgctgatttttgaattcatgattagttttagtaaattaataggtttggccattctaaaatccaaaattatgataactgtatttctaggggtatgtttcaccttgattttggcccggttctttcagtgttccgtttaccctttttactgaaagtaagtgacttaaaaggatggaagaaaaactacatggttggagtgtttttagatcagataaatatagaaaagtaaaatggaaaatgatactcaatacctagttaaactcatttcacttctcctgggagacgtattaagactggaagtcctattttatttaatcagtatcagtaaaaagacaaaaattacagtgtgaacaagagaaaaacaggaatagaagaaaaaagttgcaggttgaattatctatctggatattactagagttgtaaaacacaacttggaaactggaatttatgtgaagaaccaaacaacttaaaccagcatcacttttgtcttcaatttgccttccagtgattttagtttacaacctgcgttttgttatttgaaacacacacacttatatataaacacatgtaattttactattttattgtctttcctttaatcgatgaattgattaaatttagacaattaaaacatttctaaagtgagactgaaaataatatagaaaatctcattgctacttgtgattatcaaaaaaagtatgtattttctttctaaagttatctataaatatgtttttgatatgttggacatgaattaccctgtcatgaagcgtttaaattgttaaaatgctgattttcttattagtttgttaattgcctgttactagtacttgaccaatacattgtgctatatgtaaatgtgtaaataaatattgtaattttctcacaaa

SEQ ID NO: 138521 - DNA, 2467 bp, Homo sapiens
  Payload ID: 7141
  Gene Symbol: GORAB
  Gene Name: golgin, RAB6-interacting
  ENST ID: ENST00000498166
  CDS Start-End: 1-379
gagctgggcagcagtgttggcagtcgcggctgcgagatttgggcacttttgggggtgccggtggcccgggccgatggcgcaaggttgggcaggattctctgaggaggaactgaggagactaaagcagactaaagggtacaagtgccctggcctctggtctgactccagtagactcatgaggagacaaaccacaaagttatgtgatagtagatattgcaagaacttgcttcagagacaagaggaacctcactctgccggggattggatggagcttgggaagatttcacaaagtttgtgtgttagcagaggcgcattttccaggacaaaagaaaagtcaacaaaagacatgaatagatatttcctagaaaaggaaatatgaagagatgctcatcaccaccaaggagcagagaattacaaatcaagaatacagtgagatccatttgaaccacagcgacgtctccccgcgaagaaaagtcgacaacaacttcagcgagaaaaagcccttgtagagcaaagccaaaaacttgggcttcaagatggatcaacctcattacttccagagcagctgctttcagcaccaaaacagagagttaacgttcaaaaaccacctttttcttcccctactcttccgagtcatttcactctcacctcccccgttggtgatggacaaccacagggcattgaaagtcagccaaaggaactgggacttgagaattcccatgatggtcacaacaatgttgagattctacctccaaagccagattgcaaattggagaaaaagaaagtggaattgcaagaaaaatctcgttgggaagtcctccaacaagaacaacggctaatggaagagaaaaataaacgtaaaaaagctcttttggctaaagctattgcagaaagatccaaaagaactcaggcagagaccatgaaactaaagcggatccagaaggagttgcaggctttagatgacatggtgtcagctgacattggaattctcaggaaccggattgatcaggccagcttagactattcatacgctcggaagcggtttgacagggctgaagcagagtacattgcagcaaagctagatatacagcgcaagactgagataaaagagcaactcactgaacacctttgtacgatcatacagcaaaatgagctccgaaaggccaagaagttggaggagttgatgcaacaactagatgtagaagccgatgaagagactttggagcttgaggtggaggtcgagagattgctacacgaacaagaagtagaatcaaggagaccagtggttcgtttagagaggccatttcagcctgcggaggagagtgtgacattagaatttgctaaagagaacagaaagtgtcaagaacaagctgtttccccaaaggtagatgaccagtgtggaaattccagtagcatcccctttcttagtccaaactgcccaaatcaagaaggtaatgacatttcagctgctttggccacatgaagttctggtattcttttgagctaatatggtattgagtaaagtatactttttgcagtagatcatgccctgacctccaataaaaacctctttaaaacaatgctgatttttgaattcatgattagttttagtaaattaataggtttggccattctaaaatccaaaattatgataactgtatttctaggggtatgtttcaccttgattttggcccggttctttcagtgttccgtttaccctttttactgaaagtaagtgacttaaaaggatggaagaaaaactacatggttggagtgtttttagatcagataaatatagaaaagtaaaatggaaaatgatactcaatacctagttaaactcatttcacttctcctgggagacgtattaagactggaagtcctattttatttaatcagtatcagtaaaaagacaaaaattacagtgtgaacaagagaaaaacaggaatagaagaaaaaagttgcaggttgaattatctatctggatattactagagttgtaaaacacaacttggaaactggaatttatgtgaagaaccaaacaacttaaaccagcatcacttttgtcttcaatttgccttccagtgattttagtttacaacctgcgttttgttatttgaaacacacacacttatatataaacacatgtaattttactattttattgtctttcctttaatcgatgaattgattaaatttagacaattaaaacatttctaaagtgagactgaaaataatatagaaaatctcattgctacttgtgattatcaaaaaaagtatgtattttctttctaaagttatctataaatatgtttttgatatgttggacatgaattaccctgtcatgaagcgtttaaattgttaaaatgctgattttcttattagtttgttaattgcctgttactagtacttgaccaatacattgtgctatatgtaaatgtgtaaataaatattgtaattttctcacaaa

SEQ ID NO: 138522 - DNA, 7138 bp, Homo sapiens
  Payload ID: 7142
  Gene Symbol: GON4L
  Gene Name: gon-4-like (C. elegans)
  Uniprot ID: Q3T8J9
  ENST ID: ENST00000271883
  CDS Start-End: 164-6886
tggcgcatagtgttaggcgcatgctccttgatgcactgcggcgcggcgctccgaggctcggggacgcgcacgcaattcgctgttgttggctgacttccggtggtgccaaagccgtttccgtggaatcaggccggctgaatggaacaaaagtgggacttttaaaatgttgccctgtaagaagagaagaactacagtgacagagtccctacagcataaaggcaatcaagaggaaaacaacgtagacctagaatcagccgttaaaccagaatctgaccaggttaaggacttgagttcggtgtcactatcctgggatccaagtcatggcagagtagctggcttcgaagtacagtctttgcaggatgcaggaaatcagcttggtatggaggatacatctctgagctctggaatgctcacccagaacacaaatgtaccaattctagaaggtgttgatgtggccatctctcagggaatcaccctaccttccttggagtcttttcacccccttaatatacacattggtaaaggaaaactccacgctactggctcaaagagagggaaaaaaatgacactcaggcctgggccagttacccaagaagacagatgtgatcatcttaccctaaaggagcctttttcaggagagcctagtgaagaagtcaaggaagaaggagggaaacctcaaatgaattctgaaggggagataccttccctgccatcaggcagccaatctgcaaaaccagtaagccagcccaggaaatcaacccagccagatgtttgtgcctctcctcaagaaaagccactcaggactctgtttcaccaacctgaggaagagatagaagatggtggactcttcattccaatggaagaacaagacaatgaagaaagtgagaaaaggagaaaaaagaaaaagggtaccaagaggaaacgagatggaaggggtcaagaagggaccttggcatatgacctgaaactggatgacatgcttgaccgtaccttggaggatggtgccaagcagcacaatctaacagcagtcaatgtccgaaacatccttcatgaagtaatcacaaatgaacacgtggtagctatgatgaaagcagccatcagtgagacggaagatatgccaatgtttgagcctaaaatgacacgctctaaactgaaggaagtagtggaaaaaggagtggtaattccaacatggaatatttcaccaattaagaaggccaatgaaattaagcctcctcagtttgtggatatccaccttgaagaagatgattcctcagatgaagaataccagccggatgatgaagaagaagatgaaactgctgaagagagcttattggaaagtgatgttgaaagcactgcttcatctccacgtggggcaaagaaatccagattgaggcagtcttctgagatgactgaaacagatgaggagagtggcatattatcagaggctgagaaagtcaccacaccagccatcaggcacatcagtgctgaggtagtgcccatggggcccccgccccctccaaagccgaaacagaccagagatagtactttcatggagaagttacatgcggtagatgaggagctggcttccagtccagtctgcatggattctttccagcccatggatgacagtctcattgcatttcgaacgcgttctaagatgcccctgaaagatgttcccctgggccaattagaggcagagctccaagctccagacatcactccagatatgtatgaccccaatacggcagatgatgaggactggaagatgtggctggggggacttatgaatgatgatgtggggaatgaagatgaagcagatgatgatgatgatccagaatataatttcctggaagacctcgatgaaccagacacagaggatttccggactgaccgggcagtgagaatcaccaaaaaggaagtaaatgagctgatggaagagctgtttgaaactttccaagatgagatgggattctccaacatggaagatgatggcccagaagaggaggagtgtgtagctgagcctcgtcctaactttaacacccctcaagctctacggtttgaggaaccactggccaacctgttaaatgaacaacatcggacagtgaaggagctatttgaacagctgaagatgaagaaatcttcagccaaacagctgcaggaagtagagaaggttaaaccccagagtgagaaagttcatcagactctgattctggacccagcacagaggaagagactccagcagcagatgcagcagcacgttcagctcttgacccaaatccaccttcttgccacctgcaaccccaacctcaatccggaggccactaccaccaggatatttcttaaagagctgggaacctttgctcaaagctccatcgcccttcaccatcagtacaaccccaagtttcagaccctgttccaaccctgtaacttgatgggagctatgcagctgattgaagacttcagcacacatgtcagcattgactgcagccctcataaaactgtcaagaagactgcgaatgaatttccctgtttgccaaagcaagtggcttggattctggccacaagcaaggttttcatgtatccagagttacttccagtgtgttccctgaaggcaaagaatccccaggataagatcgtcttcaccaaggctgaggacaatttgttagctttaggactgaagcattttgaaggaactgagtttcctaatcctctaatcagcaagtaccttctaacctgcaaaactgcccaccaactgacagtgagaatcaagaacctcaacatgaacagagctcctgacaacatcattaaattttataagaagaccaaacagctgccagtcctaggaaaatgctgtgaagagatccagccacatcagtggaagccacctatagagagagaagaacaccggctcccattctggttaaaggccagtctgccatccatccaggaagaactgcggcacatggctgatggtgctagagaggtaggaaatatgactggaaccactgagatcaactcagatcgaagcctagaaaaagacaatttggagttggggagtgaatctcggtacccactgctattgcctaagggtgtagtcctgaaactgaagccagttgccacccgtttccccaggaaggcttggagacagaagcgttcatcagtcctgaagcccctccttatccaacccagcccctctctccagcccagcttcaaccctgggaaaacaccagcccgatcaactcattcagaagcccctccgagcaaaatggtgctccggattcctcacccaatacagccagccactgttttacagacagttccaggtgtccctccactgggggtcagtggaggtgagagttttgagtctcctgcagcactgcctgctgtgccccctgaggccaggacaagcttccctctgtctgagtcccagactttgctctcttctgcccctgtgcccaaggtaatgctgccctcccttgccccttctaagtttcgaaagccatatgtgagacggagaccctcaaagagaagaggagtcaaggcctctccctgtatgaaacctgcccctgttatccaccaccctgcatctgttatcttcactgttcctgctaccactgtgaagattgtgagccttggcggtggctgtaacatgatccagcctgtcaatgcggctgtggcccagagtccccagactattcccatcactaccctcttggttaaccctacttccttcccctgtccattgaaccagtcccttgtggcctcctctgtctcacccttaattgtttctggcaattctgtgaatcttcctataccatccacccctgaagataaggcccacgtgaatgtggacattgcttgtgctgtggctgatggggaaaatgcctttcagggcctagaacccaaattagagccccaggaactatctcctctctctgctactgttttcccgaaagtggaacatagcccagggcctccactagcagatgcagagtgccaagaaggattgtcagagaatagtgcctgtcgctggaccgttgtgaaaacagaggaggggaggcaagctctggagccgctccctcagggcatccaggagtctctaaacaaccctacccctggggatttagaggaaattgtcaagatggaacctgaagaagctagagaggaaatcagtggatcccctgagcgtgatatttgtgatgacatcaaagtggaacatgctgtggaattggacactggtgccccaagcgaggagttgagcagtgctggagaagtaacgaaacagacagtcttacagaaggaagaggagaggagtcagccaactaaaaccccttcatcttctcaagagccccctgatgaaggaacctcagggacagatgtgaacaaaggatcatcaaagaatgctttgtcctcaatggatcctgaagtgaggcttagtagccccccagggaagccagaagattcatccagtgttgatggtcagtcagtggggactccagttgggccagaaactggaggagagaagaatgggccagaagaagaggaagaagaggactttgatgacctcacccaagatgaggaagatgaaatgtcatcagcttctgaggaatctgtgctttctgtcccagaactccaggaaacaatggagaaactgacttggctggcatctgaaaggcgcatgagtcaggagggtgagtctgaagaagagaattctcaggaggagaactctgagccagaagaagaggaggaagaagaagcagaaggaatggaaagcctgcagaaagaggatgaaatgacggatgaagcagttggagactctgctgagaagcctcctacttttgcttcacctgagactgctccagaagtggagaccagcagaactccaccaggagagagcatcaaagctgctggaaaaggccggaacaatcatcgagctcgcaacaagcggggaagtcgggctcgggccagcaaggacacctccaagctgctgttgctgtatgatgaggacattctcgagcgagatccactcagggagcagaaggacttggcctttgcccaagcttatctgaccagggtgcgagaagccctacaacatatccctggcaagtatgaagacttccttcaagtcatctatgaatttgagtcaagtacccagagacggacggctgtagatctctacaaaagcctgcaaattctgctccaagactggcctcagctgttgaaagactttgctgctttcctgttacctgagcaagctctggcctgtggattatttgaggagcagcaggcttttgagaagagccgcaagttccttcggcagctggagatttgctttgcagagaacccctcacaccaccagaagattatcaaggtcctccaaggctgtgcagactgccttccccaggagatcaccgagctcaagacacagatgtggcagctcctcaagggccacgaccacctgcaggatgagttttctatcttctttgaccacttgcgcccagcagctagccggatgggtgactttgaagagatcaattggactgaggaaaaggagtatgagtttgatggctttgaagaagtggccctgcctgatgtggaagaagaggaggagcctcccaagatacccacagcctcaaagaacaagaggaaaaaagagatcggggtccaaaatcatgataaggagactgaatggccagatggggccaaggactgtgcctgctcctgccatgaaggaggtccagattccaagctgaagaagagcaaaaggcggagctgtagccactgtagcagcaaggtctgtgacagcaaatcctacaagagcaaggagccccatgagttggtgggcagcagcccccaccgagaggctagtcctatgcctggtgctaaggaagctgggcagggcaaggatatgatggaagaggaagccccagaggagcgggagagcactgaggccacccagagcaggactgtcaggaccaccagaaagggagagatgcctgtttcaggattggcagtggggagcactttgccatcccctcgagaagtgactgttacagaacggctcctcctggatggcccaccacctcattcaccagagactcctcaatttccccccacaactggagctgtactgtacactgttaagagaaaccaggttgggcctgaggttcgctcctgccccaaggcatcccccagacttcagaaagagagggagggccaaaaggcagtgagtgagtcagaggctttgatgctggtctgggatgcatcagaaactgagaaattgcctggtaccgtggaaccccctgcttccttcctgagtcctgtttcctcaaagaccagagatgcagggagaagacatgtgtccgggaaaccagacactcaagagagatggctgccctcaagcagagctcgggtgaagacaagagacaggacgtgccctgtccatgaatctccatcaggaattgacacctcagagacttctcccaaagcccctagagggggtttggctaaagacagtggaacacaggccaagggtccagagggggagcagcagccaaaggccgcagaagctacggtgtgtgccaacaacagcaaggtcagctccactggggaaaaggttgtcctgtggacaagggaagctgaccgtgtgatcctcaccatgtgccaggagcaaggggcacagccacagaccttcaacatcatctcccagcagctgggaaataagacccctgctgaggtttcccaccgttttcgagaactcatgcagctcttccacactgcctgtgaagccagctctgaggatgaggatgatgcaaccagtaccagcaatgcagaccagctgtctgaccatggggaccttctgtctgaagaggagctggatgaatgagactctgggaatcatctacacaggaccaaacccaacaggcgccctggcaccggggagggggtagttgtactctgcttgtacagtccttgagcccagtttacagatctggagagcaggaggccaggacaaggacaaaggctggaggatggagtaggacccaggggctctgccatcctaggcatcattcaaggtcttttatgaagactttacagatgtcctctgtaaatagcatcgagagtggagttcagctcc

SEQ ID NO: 138523 - DNA, 5118 bp, Homo sapiens
  Payload ID: 7142
  Gene Symbol: GON4L
  Gene Name: gon-4-like (C. elegans)
  Uniprot ID: Q3T8J9
  ENST ID: ENST00000361040
  CDS Start-End: 73-4662
gacttccggtggtgccaaagccgtttccgtggaatcaggccggctgaatggaacaaaagtgggacttttaaaatgttgccctgtaagaagagaagaactacagtgacagagtccctacagcataaaggcaatcaagaggaaaacaacgtagacctagaatcagccgttaaaccagaatctgaccaggttaaggacttgagttcggtgtcactatcctgggatccaagtcatggcagagtagctggcttcgaagtacagtctttgcaggatgcaggaaatcagcttggtatggaggatacatctctgagctctggaatgctcacccagaacacaaatgtaccaattctagaaggtgttgatgtggccatctctcagggaatcaccctaccttccttggagtcttttcacccccttaatatacacattggtaaaggaaaactccacgctactggctcaaagagagggaaaaaaatgacactcaggcctgggccagttacccaagaagacagatgtgatcatcttaccctaaaggagcctttttcaggagagcctagtgaagaagtcaaggaagaaggagggaaacctcaaatgaattctgaaggggagataccttccctgccatcaggcagccaatctgcaaaaccagtaagccagcccaggaaatcaacccagccagatgtttgtgcctctcctcaagaaaagccactcaggactctgtttcaccaacctgaggaagagatagaagatggtggactcttcattccaatggaagaacaagacaatgaagaaagtgagaaaaggagaaaaaagaaaaagggtaccaagaggaaacgagatggaaggggtcaagaagggaccttggcatatgacctgaaactggatgacatgcttgaccgtaccttggaggatggtgccaagcagcacaatctaacagcagtcaatgtccgaaacatccttcatgaagtaatcacaaatgaacacgtggtagctatgatgaaagcagccatcagtgagacggaagatatgccaatgtttgagcctaaaatgacacgctctaaactgaaggaagtagtggaaaaaggagtggtaattccaacatggaatatttcaccaattaagaaggccaatgaaattaagcctcctcagtttgtggatatccaccttgaagaagatgattcctcagatgaagaataccagccggatgatgaagaagaagatgaaactgctgaagagagcttattggaaagtgatgttgaaagcactgcttcatctccacgtggggcaaagaaatccagattgaggcagtcttctgagatgactgaaacagatgaggagagtggcatattatcagaggctgagaaagtcaccacaccagccatcaggcacatcagtgctgaggtagtgcccatggggcccccgccccctccaaagccgaaacagaccagagatagtactttcatggagaagttacatgcggtagatgaggagctggcttccagtccagtctgcatggattctttccagcccatggatgacagtctcattgcatttcgaacgcgttctaagatgcccctgaaagatgttcccctgggccaattagaggcagagctccaagctccagacatcactccagatatgtatgaccccaatacggcagatgatgaggactggaagatgtggctggggggacttatgaatgatgatgtggggaatgaagatgaagcagatgatgatgatgatccagaatataatttcctggaagacctcgatgaaccagacacagaggatttccggactgaccgggcagtgagaatcaccaaaaaggaagtaaatgagctgatggaagagctgtttgaaactttccaagatgagatgggattctccaacatggaagatgatggcccagaagaggaggagtgtgtagctgagcctcgtcctaactttaacacccctcaagctctacggtttgaggaaccactggccaacctgttaaatgaacaacatcggacagtgaaggagctatttgaacagctgaagatgaagaaatcttcagccaaacagctgcaggaagtagagaaggttaaaccccagagtgagaaagttcatcagactctgattctggacccagcacagaggaagagactccagcagcagatgcagcagcacgttcagctcttgacccaaatccaccttcttgccacctgcaaccccaacctcaatccggaggccactaccaccaggatatttcttaaagagctgggaacctttgctcaaagctccatcgcccttcaccatcagtacaaccccaagtttcagaccctgttccaaccctgtaacttgatgggagctatgcagctgattgaagacttcagcacacatgtcagcattgactgcagccctcataaaactgtcaagaagactgcgaatgaatttccctgtttgccaaagcaagtggcttggattctggccacaagcaaggttttcatgtatccagagttacttccagtgtgttccctgaaggcaaagaatccccaggataagatcgtcttcaccaaggctgaggacaatttgttagctttaggactgaagcattttgaaggaactgagtttcctaatcctctaatcagcaagtaccttctaacctgcaaaactgcccaccaactgacagtgagaatcaagaacctcaacatgaacagagctcctgacaacatcattaaattttataagaagaccaaacagctgccagtcctaggaaaatgctgtgaagagatccagccacatcagtggaagccacctatagagagagaagaacaccggctcccattctggttaaaggccagtctgccatccatccaggaagaactgcggcacatggctgatggtgctagagaggtaggaaatatgactggaaccactgagatcaactcagatcgaagcctagaaaaagacaatttggagttggggagtgaatctcggtacccactgctattgcctaagggtgtagtcctgaaactgaagccagttgccacccgtttccccaggaaggcttggagacagaagcgttcatcagtcctgaagcccctccttatccaacccagcccctctctccagcccagcttcaaccctgggaaaacaccagcccgatcaactcattcagaagcccctccgagcaaaatggtgctccggattcctcacccaatacagccagccactgttttacagacagttccaggtgtccctccactgggggtcagtggaggtgagagttttgagtctcctgcagcactgcctgctgtgccccctgaggccaggacaagcttccctctgtctgagtcccagactttgctctcttctgcccctgtgcccaaggtaatgctgccctcccttgccccttctaagtttcgaaagccatatgtgagacggagaccctcaaagagaagaggagtcaaggcctctccctgtatgaaacctgcccctgttatccaccaccctgcatctgttatcttcactgttcctgctaccactgtgaagattgtgagccttggcggtggctgtaacatgatccagcctgtcaatgcggctgtggcccagagtccccagactattcccatcactaccctcttggttaaccctacttccttcccctgtccattgaaccagtcccttgtggcctcctctgtctcacccttaattgtttctggcaattctgtgaatcttcctataccatccacccctgaagataaggcccacgtgaatgtggacattgcttgtgctgtggctgatggggaaaatgcctttcagggcctagaacccaaattagagccccaggaactatctcctctctctgctactgttttcccgaaagtggaacatagcccagggcctccactagcagatgcagagtgccaagaaggattgtcagagaatagtgcctgtcgctggaccgttgtgaaaacagaggaggggaggcaagctctggagccgctccctcagggcatccaggagtctctaaacaaccctacccctggggatttagaggaaattgtcaagatggaacctgaagaagctagagaggaaatcagtggatcccctgagcgtgatatttgtgatgacatcaaagtggaacatgctgtggaattggacactggtgccccaagcgaggagttgagcagtgctggagaagtaacgaaacagacagtcttacagaaggaagaggagaggagtcagccaactaaaaccccttcatcttctcaagagccccctgatgaaggaacctcagggacagatgtgaacaaaggatcatcaaagaatgctttgtcctcaatggatcctgaagtgaggcttagtagccccccagggaagccagaagattcatccagtgttgatggtcagtcagtggggactccagttgggccagaaactggaggagagaagaatgggccagaagaagaggaagaagaggactttgatgacctcacccaagatgaggaagatgaaatgtcatcagcttctgaggaatctgtgctttctgtcccagaactccaggtgagagctggagaatattctcaagtatttcgtggactcagtaatatgtatcacttattgatatgccacctgcttgcttgctgcactatggatagtcctaaaatcatttgtatttgatttgtgaatgcattatgggacatgattgtggagttgaggtgaaatgagatggaaaggatgaaattttacttattatattaaactcgtttacacattaaattgaatcacctgaccatactttaaatgccttaaaaaatagtaataggctgggcttggtggctcactcctgtagtcccagcactttgggaggctgaggtgggtggatcacaaggccaggagtttcagactggcctggccgacgtggtaaaaccccatctatattaaaaataacaaaaattagccaggcatggtggcggacacctgtaatccctgctgcttgggaggcagaggcaggagaattgcttgagcccgagagacagaggttgcagtgagccgagatcacgtcattgctctccagcctgggcaacagagcaaggctctgtctcaaaaaaaaaaaaaaaaaaaaaaaaaaaaaaa

SEQ ID NO: 138524 - DNA, 7823 bp, Homo sapiens
  Payload ID: 7142
  Gene Symbol: GON4L
  Gene Name: gon-4-like (C. elegans)
  Uniprot ID: Q3T8J9
  ENST ID: ENST00000368331
  CDS Start-End: 176-6901
tggcgcatagtgttaggcgcatgctccttgatgcactgcggcgcggcgctccgaggctcggggacgcgcacgcaattcgctgttgttggctgacttccggtggtgccaaagccgtttccgtggaatcaggccggctggtgagggtacagaatggaacaaaagtgggacttttaaaatgttgccctgtaagaagagaagaactacagtgacagagtccctacagcataaaggcaatcaagaggaaaacaacgtagacctagaatcagccgttaaaccagaatctgaccaggttaaggacttgagttcggtgtcactatcctgggatccaagtcatggcagagtagctggcttcgaagtacagtctttgcaggatgcaggaaatcagcttggtatggaggatacatctctgagctctggaatgctcacccagaacacaaatgtaccaattctagaaggtgttgatgtggccatctctcagggaatcaccctaccttccttggagtcttttcacccccttaatatacacattggtaaaggaaaactccacgctactggctcaaagagagggaaaaaaatgacactcaggcctgggccagttacccaagaagacagatgtgatcatcttaccctaaaggagcctttttcaggagagcctagtgaagaagtcaaggaagaaggagggaaacctcaaatgaattctgaaggggagataccttccctgccatcaggcagccaatctgcaaaaccagtaagccagcccaggaaatcaacccagccagatgtttgtgcctctcctcaagaaaagccactcaggactctgtttcaccaacctgaggaagagatagaagatggtggactcttcattccaatggaagaacaagacaatgaagaaagtgagaaaaggagaaaaaagaaaaagggtaccaagaggaaacgagatggaaggggtcaagaagggaccttggcatatgacctgaaactggatgacatgcttgaccgtaccttggaggatggtgccaagcagcacaatctaacagcagtcaatgtccgaaacatccttcatgaagtaatcacaaatgaacacgtggtagctatgatgaaagcagccatcagtgagacggaagatatgccaatgtttgagcctaaaatgacacgctctaaactgaaggaagtagtggaaaaaggagtggtaattccaacatggaatatttcaccaattaagaaggccaatgaaattaagcctcctcagtttgtggatatccaccttgaagaagatgattcctcagatgaagaataccagccggatgatgaagaagaagatgaaactgctgaagagagcttattggaaagtgatgttgaaagcactgcttcatctccacgtggggcaaagaaatccagattgaggcagtcttctgagatgactgaaacagatgaggagagtggcatattatcagaggctgagaaagtcaccacaccagccatcaggcacatcagtgctgaggtagtgcccatggggcccccgccccctccaaagccgaaacagaccagagatagtactttcatggagaagttacatgcggtagatgaggagctggcttccagtccagtctgcatggattctttccagcccatggatgacagtctcattgcatttcgaacgcgttctaagatgcccctgaaagatgttcccctgggccaattagaggcagagctccaagctccagacatcactccagatatgtatgaccccaatacggcagatgatgaggactggaagatgtggctggggggacttatgaatgatgatgtggggaatgaagatgaagcagatgatgatgatgatccagaatataatttcctggaagacctcgatgaaccagacacagaggatttccggactgaccgggcagtgagaatcaccaaaaaggaagtaaatgagctgatggaagagctgtttgaaactttccaagatgagatgggattctccaacatggaagatgatggcccagaagaggaggagtgtgtagctgagcctcgtcctaactttaacacccctcaagctctacggtttgaggaaccactggccaacctgttaaatgaacaacatcggacagtgaaggagctatttgaacagctgaagatgaagaaatcttcagccaaacagctgcaggaagtagagaaggttaaaccccagagtgagaaagttcatcagactctgattctggacccagcacagaggaagagactccagcagcagatgcagcagcacgttcagctcttgacccaaatccaccttcttgccacctgcaaccccaacctcaatccggaggccactaccaccaggatatttcttaaagagctgggaacctttgctcaaagctccatcgcccttcaccatcagtacaaccccaagtttcagaccctgttccaaccctgtaacttgatgggagctatgcagctgattgaagacttcagcacacatgtcagcattgactgcagccctcataaaactgtcaagaagactgcgaatgaatttccctgtttgccaaagcaagtggcttggattctggccacaagcaaggttttcatgtatccagagttacttccagtgtgttccctgaaggcaaagaatccccaggataagatcgtcttcaccaaggctgaggacaatttgttagctttaggactgaagcattttgaaggaactgagtttcctaatcctctaatcagcaagtaccttctaacctgcaaaactgcccaccaactgacagtgagaatcaagaacctcaacatgaacagagctcctgacaacatcattaaattttataagaagaccaaacagctgccagtcctaggaaaatgctgtgaagagatccagccacatcagtggaagccacctatagagagagaagaacaccggctcccattctggttaaaggccagtctgccatccatccaggaagaactgcggcacatggctgatggtgctagagaggtaggaaatatgactggaaccactgagatcaactcagatcgaagcctagaaaaagacaatttggagttggggagtgaatctcggtacccactgctattgcctaagggtgtagtcctgaaactgaagccagttgccacccgtttccccaggaaggcttggagacagaagcgttcatcagtcctgaagcccctccttatccaacccagcccctctctccagcccagcttcaaccctgggaaaacaccagcccgatcaactcattcagaagcccctccgagcaaaatggtgctccggattcctcacccaatacagccagccactgttttacagacagttccaggtgtccctccactgggggtcagtggaggtgagagttttgagtctcctgcagcactgcctgctgtgccccctgaggccaggacaagcttccctctgtctgagtcccagactttgctctcttctgcccctgtgcccaaggtaatgctgccctcccttgccccttctaagtttcgaaagccatatgtgagacggagaccctcaaagagaagaggagtcaaggcctctccctgtatgaaacctgcccctgttatccaccaccctgcatctgttatcttcactgttcctgctaccactgtgaagattgtgagccttggcggtggctgtaacatgatccagcctgtcaatgcggctgtggcccagagtccccagactattcccatcactaccctcttggttaaccctacttccttcccctgtccattgaaccagtcccttgtggcctcctctgtctcacccttaattgtttctggcaattctgtgaatcttcctataccatccacccctgaagataaggcccacgtgaatgtggacattgcttgtgctgtggctgatggggaaaatgcctttcagggcctagaacccaaattagagccccaggaactatctcctctctctgctactgttttcccgaaagtggaacatagcccagggcctccactagcagatgcagagtgccaagaaggattgtcagagaatagtgcctgtcgctggaccgttgtgaaaacagaggaggggaggcaagctctggagccgctccctcagggcatccaggagtctctaaacaaccctacccctggggatttagaggaaattgtcaagatggaacctgaagaagctagagaggaaatcagtggatcccctgagcgtgatatttgtgatgacatcaaagtggaacatgctgtggaattggacactggtgccccaagcgaggagttgagcagtgctggagaagtaacgaaacagacagtcttacagaaggaagaggagaggagtcagccaactaaaaccccttcatcttctcaagagccccctgatgaaggaacctcagggacagatgtgaacaaaggatcatcaaagaatgctttgtcctcaatggatcctgaagtgaggcttagtagccccccagggaagccagaagattcatccagtgttgatggtcagtcagtggggactccagttgggccagaaactggaggagagaagaatgggccagaagaagaggaagaagaggactttgatgacctcacccaagatgaggaagatgaaatgtcatcagcttctgaggaatctgtgctttctgtcccagaactccaggaaacaatggagaaactgacttggctggcatctgaaaggcgcatgagtcaggagggtgagtctgaagaagagaattctcaggaggagaactctgagccagaagaagaggaggaagaagaagcagaaggaatggaaagcctgcagaaagaggatgaaatgacggatgaagcagttggagactctgctgagaagcctcctacttttgcttcacctgagactgctccagaagtggagaccagcagaactccaccaggagagagcatcaaagctgctggaaaaggccggaacaatcatcgagctcgcaacaagcggggaagtcgggctcgggccagcaaggacacctccaagctgctgttgctgtatgatgaggacattctcgagcgagatccactcagggagcagaaggacttggcctttgcccaagcttatctgaccagggtgcgagaagccctacaacatatccctggcaagtatgaagacttccttcaagtcatctatgaatttgagtcaagtacccagagacggacggctgtagatctctacaaaagcctgcaaattctgctccaagactggcctcagctgttgaaagactttgctgctttcctgttacctgagcaagctctggcctgtggattatttgaggagcagcaggcttttgagaagagccgcaagttccttcggcagctggagatttgctttgcagagaacccctcacaccaccagaagattatcaaggtcctccaaggctgtgcagactgccttccccaggagatcaccgagctcaagacacagatgtggcagctcctcaagggccacgaccacctgcaggatgagttttctatcttctttgaccacttgcgcccagcagctagccggatgggtgactttgaagagatcaattggactgaggaaaaggagtatgagtttgatggctttgaagaagtggccctgcctgatgtggaagaagaggaggagcctcccaagatacccacagcctcaaagaacaagaggaaaaaagagatcggggtccaaaatcatgataaggagactgaatggccagatggggccaaggactgtgcctgctcctgccatgaaggaggtccagattccaagctgaagaagagcaaaaggcggagctgtagccactgtagcagcaaggtctgtgacagcaaatcctacaagagcaaggagccccatgagttggtgggcagcagcccccaccgagaggctagtcctatgcctggtgctaaggaagctgggcagggcaaggatatgatggaagaggaagccccagaggagcgggagagcactgaggccacccagagcaggactgtcaggaccaccagaaagggagagatgcctgtttcagcaggattggcagtggggagcactttgccatcccctcgagaagtgactgttacagaacggctcctcctggatggcccaccacctcattcaccagagactcctcaatttccccccacaactggagctgtactgtacactgttaagagaaaccaggttgggcctgaggttcgctcctgccccaaggcatcccccagacttcagaaagagagggagggccaaaaggcagtgagtgagtcagaggctttgatgctggtctgggatgcatcagaaactgagaaattgcctggtaccgtggaaccccctgcttccttcctgagtcctgtttcctcaaagaccagagatgcagggagaagacatgtgtccgggaaaccagacactcaagagagatggctgccctcaagcagagctcgggtgaagacaagagacaggacgtgccctgtccatgaatctccatcaggaattgacacctcagagacttctcccaaagcccctagagggggtttggctaaagacagtggaacacaggccaagggtccagagggggagcagcagccaaaggccgcagaagctacggtgtgtgccaacaacagcaaggtcagctccactggggaaaaggttgtcctgtggacaagggaagctgaccgtgtgatcctcaccatgtgccaggagcaaggggcacagccacagaccttcaacatcatctcccagcagctgggaaataagacccctgctgaggtttcccaccgttttcgagaactcatgcagctcttccacactgcctgtgaagccagctctgaggatgaggatgatgcaaccagtaccagcaatgcagaccagctgtctgaccatggggaccttctgtctgaagaggagctggatgaatgagactctgggaatcatctacacaggaccaaacccaacaggcgccctggcaccggggagggggtagttgtactctgcttgtacagtccttgagcccagtttacagatctggagagcaggaggccaggacaaggacaaaggctggaggatggagtaggacccaggggctctgccatcctaggcatcattcaaggtcttttatgaagactttacagatgtcctctgtaaatagcatcgagagtggagttcagctcctttctctacttttttttggtctgatggcacatatttattgttctgtggtctaatcacagtgtttctaaatgtaaaaagtgcatatgttggtgtagctagtcccgcgacattgagctcctctgcatgaagacactgggctcctgcatccagctgtttttattgcaaactagctcctttctcccacactgggaactttagtccacgaggctgtcaccaccctggtagcactgggccaggctttgtagctcctgcagcagctctgctacgtcatcgtgctccactccagcatccatgaagctggcccagcgccgcaagtcgagtttggtgaggtctctggccaaggcttccagggtctggtgcagggacgaagaggaacacagtgccccaaacactgggatgctctccactgctgtggagggagaggaaacagagacctgtagatggatgattattctgccctgggactcgccaaactgataaggaagtccaaccttagtagacttgattgtaaactcaacaaatttggtgtattgtccccttagtacaccagtactccagaggaagaatgcttttcttgggagccatagggtgaataaaggaatgtttaactgtggactttttcagcacttttaatccaggaatggagatagtaaaacctctcccatacttg

SEQ ID NO: 138525 - DNA, 7713 bp, Homo sapiens
  Payload ID: 7142
  Gene Symbol: GON4L
  Gene Name: gon-4-like (C. elegans)
  Uniprot ID: Q3T8J9
  ENST ID: ENST00000437809
  CDS Start-End: 124-6846
ctctcccggaggggactcctcccaccgccgagttttcccgagaatgaggccgcgcccactgacgcgctgtggttccaaaacgagaaagtactgaaggaatggaacaaaagtgggacttttaaaatgttgccctgtaagaagagaagaactacagtgacagagtccctacagcataaaggcaatcaagaggaaaacaacgtagacctagaatcagccgttaaaccagaatctgaccaggttaaggacttgagttcggtgtcactatcctgggatccaagtcatggcagagtagctggcttcgaagtacagtctttgcaggatgcaggaaatcagcttggtatggaggatacatctctgagctctggaatgctcacccagaacacaaatgtaccaattctagaaggtgttgatgtggccatctctcagggaatcaccctaccttccttggagtcttttcacccccttaatatacacattggtaaaggaaaactccacgctactggctcaaagagagggaaaaaaatgacactcaggcctgggccagttacccaagaagacagatgtgatcatcttaccctaaaggagcctttttcaggagagcctagtgaagaagtcaaggaagaaggagggaaacctcaaatgaattctgaaggggagataccttccctgccatcaggcagccaatctgcaaaaccagtaagccagcccaggaaatcaacccagccagatgtttgtgcctctcctcaagaaaagccactcaggactctgtttcaccaacctgaggaagagatagaagatggtggactcttcattccaatggaagaacaagacaatgaagaaagtgagaaaaggagaaaaaagaaaaagggtaccaagaggaaacgagatggaaggggtcaagaagggaccttggcatatgacctgaaactggatgacatgcttgaccgtaccttggaggatggtgccaagcagcacaatctaacagcagtcaatgtccgaaacatccttcatgaagtaatcacaaatgaacacgtggtagctatgatgaaagcagccatcagtgagacggaagatatgccaatgtttgagcctaaaatgacacgctctaaactgaaggaagtagtggaaaaaggagtggtaattccaacatggaatatttcaccaattaagaaggccaatgaaattaagcctcctcagtttgtggatatccaccttgaagaagatgattcctcagatgaagaataccagccggatgatgaagaagaagatgaaactgctgaagagagcttattggaaagtgatgttgaaagcactgcttcatctccacgtggggcaaagaaatccagattgaggcagtcttctgagatgactgaaacagatgaggagagtggcatattatcagaggctgagaaagtcaccacaccagccatcaggcacatcagtgctgaggtagtgcccatggggcccccgccccctccaaagccgaaacagaccagagatagtactttcatggagaagttacatgcggtagatgaggagctggcttccagtccagtctgcatggattctttccagcccatggatgacagtctcattgcatttcgaacgcgttctaagatgcccctgaaagatgttcccctgggccaattagaggcagagctccaagctccagacatcactccagatatgtatgaccccaatacggcagatgatgaggactggaagatgtggctggggggacttatgaatgatgatgtggggaatgaagatgaagcagatgatgatgatgatccagaatataatttcctggaagacctcgatgaaccagacacagaggatttccggactgaccgggcagtgagaatcaccaaaaaggaagtaaatgagctgatggaagagctgtttgaaactttccaagatgagatgggattctccaacatggaagatgatggcccagaagaggaggagtgtgtagctgagcctcgtcctaactttaacacccctcaagctctacggtttgaggaaccactggccaacctgttaaatgaacaacatcggacagtgaaggagctatttgaacagctgaagatgaagaaatcttcagccaaacagctgcaggaagtagagaaggttaaaccccagagtgagaaagttcatcagactctgattctggacccagcacagaggaagagactccagcagcagatgcagcagcacgttcagctcttgacccaaatccaccttcttgccacctgcaaccccaacctcaatccggaggccactaccaccaggatatttcttaaagagctgggaacctttgctcaaagctccatcgcccttcaccatcagtacaaccccaagtttcagaccctgttccaaccctgtaacttgatgggagctatgcagctgattgaagacttcagcacacatgtcagcattgactgcagccctcataaaactgtcaagaagactgcgaatgaatttccctgtttgccaaagcaagtggcttggattctggccacaagcaaggttttcatgtatccagagttacttccagtgtgttccctgaaggcaaagaatccccaggataagatcgtcttcaccaaggctgaggacaatttgttagctttaggactgaagcattttgaaggaactgagtttcctaatcctctaatcagcaagtaccttctaacctgcaaaactgcccaccaactgacagtgagaatcaagaacctcaacatgaacagagctcctgacaacatcattaaattttataagaagaccaaacagctgccagtcctaggaaaatgctgtgaagagatccagccacatcagtggaagccacctatagagagagaagaacaccggctcccattctggttaaaggccagtctgccatccatccaggaagaactgcggcacatggctgatggtgctagagaggtaggaaatatgactggaaccactgagatcaactcagatcgaagcctagaaaaagacaatttggagttggggagtgaatctcggtacccactgctattgcctaagggtgtagtcctgaaactgaagccagttgccacccgtttccccaggaaggcttggagacagaagcgttcatcagtcctgaagcccctccttatccaacccagcccctctctccagcccagcttcaaccctgggaaaacaccagcccgatcaactcattcagaagcccctccgagcaaaatggtgctccggattcctcacccaatacagccagccactgttttacagacagttccaggtgtccctccactgggggtcagtggaggtgagagttttgagtctcctgcagcactgcctgctgtgccccctgaggccaggacaagcttccctctgtctgagtcccagactttgctctcttctgcccctgtgcccaaggtaatgctgccctcccttgccccttctaagtttcgaaagccatatgtgagacggagaccctcaaagagaagaggagtcaaggcctctccctgtatgaaacctgcccctgttatccaccaccctgcatctgttatcttcactgttcctgctaccactgtgaagattgtgagccttggcggtggctgtaacatgatccagcctgtcaatgcggctgtggcccagagtccccagactattcccatcactaccctcttggttaaccctacttccttcccctgtccattgaaccagtcccttgtggcctcctctgtctcacccttaattgtttctggcaattctgtgaatcttcctataccatccacccctgaagataaggcccacgtgaatgtggacattgcttgtgctgtggctgatggggaaaatgcctttcagggcctagaacccaaattagagccccaggaactatctcctctctctgctactgttttcccgaaagtggaacatagcccagggcctccactagcagatgcagagtgccaagaaggattgtcagagaatagtgcctgtcgctggaccgttgtgaaaacagaggaggggaggcaagctctggagccgctccctcagggcatccaggagtctctaaacaaccctacccctggggatttagaggaaattgtcaagatggaacctgaagaagctagagaggaaatcagtggatcccctgagcgtgatatttgtgatgacatcaaagtggaacatgctgtggaattggacactggtgccccaagcgaggagttgagcagtgctggagaagtaacgaaacagacagtcttacagaaggaagaggagaggagtcagccaactaaaaccccttcatcttctcaagagccccctgatgaaggaacctcagggacagatgtgaacaaaggatcatcaaagaatgctttgtcctcaatggatcctgaagtgaggcttagtagccccccagggaagccagaagattcatccagtgttgatggtcagtcagtggggactccagttgggccagaaactggaggagagaagaatgggccagaagaagaggaagaagaggactttgatgacctcacccaagatgaggaagatgaaatgtcatcagcttctgaggaatctgtgctttctgtcccagaactccaggaaacaatggagaaactgacttggctggcatctgaaaggcgcatgagtcaggagggtgagtctgaagaagagaattctcaggaggagaactctgagccagaagaagaggaggaagaagaagcagaaggaatggaaagcctgcagaaagaggatgaaatgacggatgaagcagttggagactctgctgagaagcctcctacttttgcttcacctgagactgctccagaagtggagaccagcagaactccaccaggagagagcatcaaagctgctggaaaaggccggaacaatcatcgagctcgcaacaagcggggaagtcgggctcgggccagcaaggacacctccaagctgctgttgctgtatgatgaggacattctcgagcgagatccactcagggagcagaaggacttggcctttgcccaagcttatctgaccagggtgcgagaagccctacaacatatccctggcaagtatgaagacttccttcaagtcatctatgaatttgagtcaagtacccagagacggacggctgtagatctctacaaaagcctgcaaattctgctccaagactggcctcagctgttgaaagactttgctgctttcctgttacctgagcaagctctggcctgtggattatttgaggagcagcaggcttttgagaagagccgcaagttccttcggcagctggagatttgctttgcagagaacccctcacaccaccagaagattatcaaggtcctccaaggctgtgcagactgccttccccaggagatcaccgagctcaagacacagatgtggcagctcctcaagggccacgaccacctgcaggatgagttttctatcttctttgaccacttgcgcccagcagctagccggatgggtgactttgaagagatcaattggactgaggaaaaggagtatgagtttgatggctttgaagaagtggccctgcctgatgtggaagaagaggaggagcctcccaagatacccacagcctcaaagaacaagaggaaaaaagagatcggggtccaaaatcatgataaggagactgaatggccagatggggccaaggactgtgcctgctcctgccatgaaggaggtccagattccaagctgaagaagagcaaaaggcggagctgtagccactgtagcagcaaggtctgtgacagcaaatcctacaagagcaaggagccccatgagttggtgggcagcagcccccaccgagaggctagtcctatgcctggtgctaaggaagctgggcagggcaaggatatgatggaagaggaagccccagaggagcgggagagcactgaggccacccagagcaggactgtcaggaccaccagaaagggagagatgcctgtttcaggattggcagtggggagcactttgccatcccctcgagaagtgactgttacagaacggctcctcctggatggcccaccacctcattcaccagagactcctcaatttccccccacaactggagctgtactgtacactgttaagagaaaccaggttgggcctgaggttcgctcctgccccaaggcatcccccagacttcagaaagagagggagggccaaaaggcagtgagtgagtcagaggctttgatgctggtctgggatgcatcagaaactgagaaattgcctggtaccgtggaaccccctgcttccttcctgagtcctgtttcctcaaagaccagagatgcagggagaagacatgtgtccgggaaaccagacactcaagagagatggctgccctcaagcagagctcgggtgaagacaagagacaggacgtgccctgtccatgaatctccatcaggaattgacacctcagagacttctcccaaagcccctagagggggtttggctaaagacagtggaacacaggccaagggtccagagggggagcagcagccaaaggccgcagaagctacggtgtgtgccaacaacagcaaggtcagctccactggggaaaaggttgtcctgtggacaagggaagctgaccgtgtgatcctcaccatgtgccaggagcaaggggcacagccacagaccttcaacatcatctcccagcagctgggaaataagacccctgctgaggtttcccaccgttttcgagaactcatgcagctcttccacactgcctgtgaagccagctctgaggatgaggatgatgcaaccagtaccagcaatgcagaccagctgtctgaccatggggaccttctgtctgaagaggagctggatgaatgagactctgggaatcatctacacaggaccaaacccaacaggcgccctggcaccggggagggggtagttgtactctgcttgtacagtccttgagcccagtttacagatctggagagcaggaggccaggacaaggacaaaggctggaggatggagtaggacccaggggctctgccatcctaggcatcattcaaggtcttttatgaagactttacagatgtcctctgtaaatagcatcgagagtggagttcagctcctttctctacttttttttggtctgatggcacatatttattgttctgtggtctaatcacagtgtttctaaatgtaaaaagtgcatatgttggtgtagctagtcccgcgacattgagctcctctgcatgaagacactgggctcctgcatccagctgtttttattgcaaactagctcctttctcccacactgggaactttagtccacgaggctgtcaccaccctggtagcactgggccaggctttgtagctcctgcagcagctctgctacgtcatcgtgctccactccagcatccatgaagctggcccagcgccgcaagtcgagtttggtgaggtctctggccaaggcttccagggtctggtgcagggacgaagaggaacacagtgccccaaacactgggatgctctccactgctgtggagggagaggaaacagagacctgtagatggatgattattctgccctgggactcgccaaactgataaggaagtccaaccttagtagacttgattgtaaactcaacaaatttggtgtattgtccccttagtacaccagtactccagaggaagaatgcttttcttgggagccatagggtgaataaaggaatgtttaactgtgga

SEQ ID NO: 138526 - DNA, 4801 bp, Homo sapiens
  Payload ID: 7142
  Gene Symbol: GON4L
  Gene Name: gon-4-like (C. elegans)
  ENST ID: ENST00000622608
  CDS Start-End: 176-4801
tggcgcatagtgttaggcgcatgctccttgatgcactgcggcgcggcgctccgaggctcggggacgcgcacgcaattcgctgttgttggctgacttccggtggtgccaaagccgtttccgtggaatcaggccggctggtgagggtacagaatggaacaaaagtgggacttttaaaatgttgccctgtaagaagagaagaactacagtgacagagtccctacagcataaaggcaatcaagaggaaaacaacgtagacctagaatcagccgttaaaccagaatctgaccaggttaaggacttgagttcggtgtcactatcctgggatccaagtcatggcagagtagctggcttcgaagtacagtctttgcaggatgcaggaaatcagcttggtatggaggatacatctctgagctctggaatgctcacccagaacacaaatgtaccaattctagaaggtgttgatgtggccatctctcagggaatcaccctaccttccttggagtcttttcacccccttaatatacacattggtaaaggaaaactccacgctactggctcaaagagagggaaaaaaatgacactcaggcctgggccagttacccaagaagacagatgtgatcatcttaccctaaaggagcctttttcaggagagcctagtgaagaagtcaaggaagaaggagggaaacctcaaatgaattctgaaggggagataccttccctgccatcaggcagccaatctgcaaaaccagtaagccagcccaggaaatcaacccagccagatgtttgtgcctctcctcaagaaaagccactcaggactctgtttcaccaacctgaggaagagatagaagatggtggactcttcattccaatggaagaacaagacaatgaagaaagtgagaaaaggagaaaaaagaaaaagggtaccaagaggaaacgagatggaaggggtcaagaagggaccttggcatatgacctgaaactggatgacatgcttgaccgtaccttggaggatggtgccaagcagcacaatctaacagcagtcaatgtccgaaacatccttcatgaagtaatcacaaatgaacacgtggtagctatgatgaaagcagccatcagtgagacggaagatatgccaatgtttgagcctaaaatgacacgctctaaactgaaggaagtagtggaaaaaggagtggtaattccaacatggaatatttcaccaattaagaaggccaatgaaattaagcctcctcagtttgtggatatccaccttgaagaagatgattcctcagatgaagaataccagccggatgatgaagaagaagatgaaactgctgaagagagcttattggaaagtgatgttgaaagcactgcttcatctccacgtggggcaaagaaatccagattgaggcagtcttctgagatgactgaaacagatgaggagagtggcatattatcagaggctgagaaagtcaccacaccagccatcaggcacatcagtgctgaggtagtgcccatggggcccccgccccctccaaagccgaaacagaccagagatagtactttcatggagaagttacatgcggtagatgaggagctggcttccagtccagtctgcatggattctttccagcccatggatgacagtctcattgcatttcgaacgcgttctaagatgcccctgaaagatgttcccctgggccaattagaggcagagctccaagctccagacatcactccagatatgtatgaccccaatacggcagatgatgaggactggaagatgtggctggggggacttatgaatgatgatgtggggaatgaagatgaagcagatgatgatgatgatccagaatataatttcctggaagacctcgatgaaccagacacagaggatttccggactgaccgggcagtgagaatcaccaaaaaggaagtaaatgagctgatggaagagctgtttgaaactttccaagatgagatgggattctccaacatggaagatgatggcccagaagaggaggagtgtgtagctgagcctcgtcctaactttaacacccctcaagctctacggtttgaggaaccactggccaacctgttaaatgaacaacatcggacagtgaaggagctatttgaacagctgaagatgaagaaatcttcagccaaacagctgcaggaagtagagaaggttaaaccccagagtgagaaagttcatcagactctgattctggacccagcacagaggaagagactccagcagcagatgcagcagcacgttcagctcttgacccaaatccaccttcttgccacctgcaaccccaacctcaatccggaggccactaccaccaggatatttcttaaagagctgggaacctttgctcaaagctccatcgcccttcaccatcagtacaaccccaagtttcagaccctgttccaaccctgtaacttgatgggagctatgcagctgattgaagacttcagcacacatgtcagcattgactgcagccctcataaaactgtcaagaagactgcgaatgaatttccctgtttgccaaagcaagtggcttggattctggccacaagcaaggttttcatgtatccagagttacttccagtgtgttccctgaaggcaaagaatccccaggataagatcgtcttcaccaaggctgaggacaatttgttagctttaggactgaagcattttgaaggaactgagtttcctaatcctctaatcagcaagtaccttctaacctgcaaaactgcccaccaactgacagtgagaatcaagaacctcaacatgaacagagctcctgacaacatcattaaattttataagaagaccaaacagctgccagtcctaggaaaatgctgtgaagagatccagccacatcagtggaagccacctatagagagagaagaacaccggctcccattctggttaaaggccagtctgccatccatccaggaagaactgcggcacatggctgatggtgctagagaggtaggaaatatgactggaaccactgagatcaactcagatcgaagcctagaaaaagacaatttggagttggggagtgaatctcggtacccactgctattgcctaagggtgtagtcctgaaactgaagccagttgccacccgtttccccaggaaggcttggagacagaagcgttcatcagtcctgaagcccctccttatccaacccagcccctctctccagcccagcttcaaccctgggaaaacaccagcccgatcaactcattcagaagcccctccgagcaaaatggtgctccggattcctcacccaatacagccagccactgttttacagacagttccaggtgtccctccactgggggtcagtggaggtgagagttttgagtctcctgcagcactgcctgctgtgccccctgaggccaggacaagcttccctctgtctgagtcccagactttgctctcttctgcccctgtgcccaaggtaatgctgccctcccttgccccttctaagtttcgaaagccatatgtgagacggagaccctcaaagagaagaggagtcaaggcctctccctgtatgaaacctgcccctgttatccaccaccctgcatctgttatcttcactgttcctgctaccactgtgaagattgtgagccttggcggtggctgtaacatgatccagcctgtcaatgcggctgtggcccagagtccccagactattcccatcactaccctcttggttaaccctacttccttcccctgtccattgaaccagtcccttgtggcctcctctgtctcacccttaattgtttctggcaattctgtgaatcttcctataccatccacccctgaagataaggcccacgtgaatgtggacattgcttgtgctgtggctgatggggaaaatgcctttcagggcctagaacccaaattagagccccaggaactatctcctctctctgctactgttttcccgaaagtggaacatagcccagggcctccactagcagatgcagagtgccaagaaggattgtcagagaatagtgcctgtcgctggaccgttgtgaaaacagaggaggggaggcaagctctggagccgctccctcagggcatccaggagtctctaaacaaccctacccctggggatttagaggaaattgtcaagatggaacctgaagaagctagagaggaaatcagtggatcccctgagcgtgatatttgtgatgacatcaaagtggaacatgctgtggaattggacactggtgccccaagcgaggagttgagcagtgctggagaagtaacgaaacagacagtcttacagaaggaagaggagaggagtcagccaactaaaaccccttcatcttctcaagagccccctgatgaaggaacctcagggacagatgtgaacaaaggatcatcaaagaatgctttgtcctcaatggatcctgaagtgaggcttagtagccccccagggaagccagaagattcatccagtgttgatggtcagtcagtggggactccagttgggccagaaactggaggagagaagaatgggccagaagaagaggaagaagaggactttgatgacctcacccaagatgaggaagatgaaatgtcatcagcttctgaggaatctgtgctttctgtcccagaactccaggtgagagctggagaatattctcaagtatttcgtggactcagtaatatgtatcacttattgatatgccacctgcttgcttgctgcactatggatagtcctaaaatcatttgtatttttgtgaatgcattatgggacatgattgtggagttgagg

SEQ ID NO: 138527 - DNA, 5506 bp, Homo sapiens
  Payload ID: 7142
  Gene Symbol: GON4L
  Gene Name: gon-4-like (C. elegans)
  ENST ID: ENST00000620426
  CDS Start-End: 164-3076
tggcgcatagtgttaggcgcatgctccttgatgcactgcggcgcggcgctccgaggctcggggacgcgcacgcaattcgctgttgttggctgacttccggtggtgccaaagccgtttccgtggaatcaggccggctgaatggaacaaaagtgggacttttaaaatgttgccctgtaagaagagaagaactacagtgacagagtccctacagcataaaggcaatcaagaggaaaacaacgtagacctagaatcagccgttaaaccagaatctgaccaggttaaggacttgagttcggtgtcactatcctgggatccaagtcatggcagagtagctggcttcgaagtacagtctttgcaggatgcaggaaatcagcttggtatggaggatacatctctgagctctggaatgctcacccagaacacaaatgtaccaattctagaaggtgttgatgtggccatctctcagggaatcaccctaccttccttggagtcttttcacccccttaatatacacattggtaaaggaaaactccacgctactggctcaaagagagggaaaaaaatgacactcaggcctgggccagttacccaagaagacagatgtgatcatcttaccctaaaggagcctttttcaggagagcctagtgaagaagtcaaggaagaaggagggaaacctcaaatgaattctgaaggggagataccttccctgccatcaggcagccaatctgcaaaaccagtaagccagcccaggaaatcaacccagccagatgtttgtgcctctcctcaagaaaagccactcaggactctgtttcaccaacctgaggaagagatagaagatggtggactcttcattccaatggaagaacaagacaatgaagaaagtgagaaaaggagaaaaaagaaaaagggtaccaagaggaaacgagatggaaggggtcaagaagggaccttggcatatgacctgaaactggatgacatgcttgaccgtaccttggaggatggtgccaagcagcacaatctaacagcagtcaatgtccgaaacatccttcatgaagtaatcacaaatgaacacgtggtagctatgatgaaagcagccatcagtgagacggaagatatgccaatgtttgagcctaaaatgacacgctctaaactgaaggaagtagtggaaaaaggagtggtaattccaacatggaatatttcaccaattaagaaggccaatgaaattaagcctcctcagtttgtggatatccaccttgaagaagatgattcctcagatgaagaataccagccggatgatgaagaagaagatgaaactgctgaagagagcttattggaaagtgatgttgaaagcactgcttcatctccacgtggggcaaagaaatccagattgaggcagtcttctgagatgactgaaacagatgaggagagtggcatattatcagaggctgagaaagtcaccacaccagccatcaggcacatcagtgctgaggtagtgcccatggggcccccgccccctccaaagccgaaacagaccagagatagtactttcatggagaagttacatgcggtagatgaggagctggcttccagtccagtctgcatggattctttccagcccatggatgacagtctcattgcatttcgaacgcgttctaagatgcccctgaaagatgttcccctgggccaattagaggcagagctccaagctccagacatcactccagatatgtatgaccccaatacggcagatgatgaggactggaagatgtggctggggggacttatgaatgatgatgtggggaatgaagatgaagcagatgatgatgatgatccagaatataatttcctggaagacctcgatgaaccagacacagaggatttccggactgaccgggcagtgagaatcaccaaaaaggaagtaaatgagctgatggaagagctgtttgaaactttccaagatgagatgggattctccaacatggaagatgatggcccagaagaggaggagtgtgtagctgagcctcgtcctaactttaacacccctcaagctctacggtttgaggaaccactggccaacctgttaaatgaacaacatcggacagtgaaggagctatttgaacagctgaagatgaagaaatcttcagccaaacagctgcaggaagtagagaaggttaaaccccagagtgagaaagttcatcagactctgattctggacccagcacagaggaagagactccagcagcagatgcagcagcacgttcagctcttgacccaaatccaccttcttgccacctgcaaccccaacctcaatccggaggccactaccaccaggatatttcttaaagagctgggaacctttgctcaaagctccatcgcccttcaccatcagtacaaccccaagtttcagaccctgttccaaccctgtaacttgatgggagctatgcagctgattgaagacttcagcacacatgtcagcattgactgcagccctcataaaactgtcaagaagactgcgaatgaatttccctgtttgccaaagcaagtggcttggattctggccacaagcaaggttttcatgtatccagagttacttccagtgtgttccctgaaggcaaagaatccccaggataagatcgtcttcaccaaggctgaggacaatttgttagctttaggactgaagcattttgaaggaactgagtttcctaatcctctaatcagcaagtaccttctaacctgcaaaactgcccaccaactgacagtgagaatcaagaacctcaacatgaacagagctcctgacaacatcattaaattttataagaagaccaaacagctgccagtcctaggaaaatgctgtgaagagatccagccacatcagtggaagccacctatagagagagaagaacaccggctcccattctggttaaaggccagtctgccatccatccaggaagaactgcggcacatggctgatggtgctagacagtcttacagaaggaagaggagaggagtcagccaactaaaaccccttcatcttctcaagagccccctgatgaaggaacctcagggacagatgtgaacaaaggatcatcaaagaatgctttgtcctcaatggatcctgaagtgaggcttagtagccccccagggaagccagaagattcatccagtgttgatggtcagtcagtggggactccagttgggccagaaactggaggagagaagaatgggccagaagaagaggaagaagaggactttgatgacctcacccaagatgaggaagatgaaatgtcatcagcttctgaggaatctgtgctttctgtcccagaactccaggaaacaatggagaaactgacttggctggcatctgaaaggcgcatgagtcaggagggtgagtctgaagaagagaattctcaggaggagaactctgagccagaagaagaggaggaagaagaagcagaaggaatggaaagcctgcagaaagaggatgaaatgacggatgaagcagttggagactctgctgagaagcctcctacttttgcttcacctgagactgctccagaagtggagaccagcagaactccaccaggagagagcatcaaagctgctggaaaaggccggaacaatcatcgagctcgcaacaagcggggaagtcgggctcgggccagcaaggacacctccaagctgctgttgctgtatgatgaggacattctcgagcgagatccactcagggagcagaaggacttggcctttgcccaagcttatctgaccagggtgcgagaagccctacaacatatccctggcaagtatgaagacttccttcaagtcatctatgaatttgagtcaagtacccagagacggacggctgtagatctctacaaaagcctgcaaattctgctccaagactggcctcagctgttgaaagactttgctgctttcctgttacctgagcaagctctggcctgtggattatttgaggagcagcaggcttttgagaagagccgcaagttccttcggcagctggagatttgctttgcagagaacccctcacaccaccagaagattatcaaggtcctccaaggctgtgcagactgccttccccaggagatcaccgagctcaagacacagatgtggcagctcctcaagggccacgaccacctgcaggatgagttttctatcttctttgaccacttgcgcccagcagctagccggatgggtgactttgaagagatcaattggactgaggaaaaggagtatgagtttgatggctttgaagaagtggccctgcctgatgtggaagaagaggaggagcctcccaagatacccacagcctcaaagaacaagaggaaaaaagagatcggggtccaaaatcatgataagattggcagtggggagcactttgccatcccctcgagaagtgactgttacagaacggctcctcctggatggcccaccacctcattcaccagagactcctcaatttccccccacaactggagctgtactgtacactgttaagagaaaccaggttgggcctgaggttcgctcctgccccaaggcatcccccagacttcagaaagagagggagggccaaaaggcagtgagtgagtcagaggctttgatgctggtctgggatgcatcagaaactgagaaattgcctggtaccgtggaaccccctgcttccttcctgagtcctgtttcctcaaagaccagagatgcagggagaagacatgtgtccgggaaaccagacactcaagagagatggctgccctcaagcagagctcgggtgaagacaagagacaggacgtgccctgtccatgaatctccatcaggaattgacacctcagagacttctcccaaagcccctagagggggtttggctaaagacagtggaacacaggccaagggtccagagggggagcagcagccaaaggccgcagaagctacggtgtgtgccaacaacagcaaggtcagctccactggggaaaaggttgtcctgtggacaagggaagctgaccgtgtgatcctcaccatgtgccaggagcaaggggcacagccacagaccttcaacatcatctcccagcagctgggaaataagacccctgctgaggtttcccaccgttttcgagaactcatgcagctcttccacactgcctgtgaagccagctctgaggatgaggatgatgcaaccagtaccagcaatgcagaccagctgtctgaccatggggaccttctgtctgaagaggagctggatgaatgagactctgggaatcatctacacaggaccaaacccaacaggcgccctggcaccggggagggggtagttgtactctgcttgtacagtccttgagcccagtttacagatctggagagcaggaggccaggacaaggacaaaggctggaggatggagtaggacccaggggctctgccatcctaggcatcattcaaggtcttttatgaagactttacagatgtcctctgtaaatagcatcgagagtggagttcagctcc

SEQ ID NO: 138528 - DNA, 7771 bp, Homo sapiens
  Payload ID: 7142
  Gene Symbol: GON4L
  Gene Name: gon-4-like (C. elegans)
  Uniprot ID: Q3T8J9
  ENST ID: ENST00000615926
  CDS Start-End: 124-6849
ctctcccggaggggactcctcccaccgccgagttttcccgagaatgaggccgcgcccactgacgcgctgtggttccaaaacgagaaagtactgaaggaatggaacaaaagtgggacttttaaaatgttgccctgtaagaagagaagaactacagtgacagagtccctacagcataaaggcaatcaagaggaaaacaacgtagacctagaatcagccgttaaaccagaatctgaccaggttaaggacttgagttcggtgtcactatcctgggatccaagtcatggcagagtagctggcttcgaagtacagtctttgcaggatgcaggaaatcagcttggtatggaggatacatctctgagctctggaatgctcacccagaacacaaatgtaccaattctagaaggtgttgatgtggccatctctcagggaatcaccctaccttccttggagtcttttcacccccttaatatacacattggtaaaggaaaactccacgctactggctcaaagagagggaaaaaaatgacactcaggcctgggccagttacccaagaagacagatgtgatcatcttaccctaaaggagcctttttcaggagagcctagtgaagaagtcaaggaagaaggagggaaacctcaaatgaattctgaaggggagataccttccctgccatcaggcagccaatctgcaaaaccagtaagccagcccaggaaatcaacccagccagatgtttgtgcctctcctcaagaaaagccactcaggactctgtttcaccaacctgaggaagagatagaagatggtggactcttcattccaatggaagaacaagacaatgaagaaagtgagaaaaggagaaaaaagaaaaagggtaccaagaggaaacgagatggaaggggtcaagaagggaccttggcatatgacctgaaactggatgacatgcttgaccgtaccttggaggatggtgccaagcagcacaatctaacagcagtcaatgtccgaaacatccttcatgaagtaatcacaaatgaacacgtggtagctatgatgaaagcagccatcagtgagacggaagatatgccaatgtttgagcctaaaatgacacgctctaaactgaaggaagtagtggaaaaaggagtggtaattccaacatggaatatttcaccaattaagaaggccaatgaaattaagcctcctcagtttgtggatatccaccttgaagaagatgattcctcagatgaagaataccagccggatgatgaagaagaagatgaaactgctgaagagagcttattggaaagtgatgttgaaagcactgcttcatctccacgtggggcaaagaaatccagattgaggcagtcttctgagatgactgaaacagatgaggagagtggcatattatcagaggctgagaaagtcaccacaccagccatcaggcacatcagtgctgaggtagtgcccatggggcccccgccccctccaaagccgaaacagaccagagatagtactttcatggagaagttacatgcggtagatgaggagctggcttccagtccagtctgcatggattctttccagcccatggatgacagtctcattgcatttcgaacgcgttctaagatgcccctgaaagatgttcccctgggccaattagaggcagagctccaagctccagacatcactccagatatgtatgaccccaatacggcagatgatgaggactggaagatgtggctggggggacttatgaatgatgatgtggggaatgaagatgaagcagatgatgatgatgatccagaatataatttcctggaagacctcgatgaaccagacacagaggatttccggactgaccgggcagtgagaatcaccaaaaaggaagtaaatgagctgatggaagagctgtttgaaactttccaagatgagatgggattctccaacatggaagatgatggcccagaagaggaggagtgtgtagctgagcctcgtcctaactttaacacccctcaagctctacggtttgaggaaccactggccaacctgttaaatgaacaacatcggacagtgaaggagctatttgaacagctgaagatgaagaaatcttcagccaaacagctgcaggaagtagagaaggttaaaccccagagtgagaaagttcatcagactctgattctggacccagcacagaggaagagactccagcagcagatgcagcagcacgttcagctcttgacccaaatccaccttcttgccacctgcaaccccaacctcaatccggaggccactaccaccaggatatttcttaaagagctgggaacctttgctcaaagctccatcgcccttcaccatcagtacaaccccaagtttcagaccctgttccaaccctgtaacttgatgggagctatgcagctgattgaagacttcagcacacatgtcagcattgactgcagccctcataaaactgtcaagaagactgcgaatgaatttccctgtttgccaaagcaagtggcttggattctggccacaagcaaggttttcatgtatccagagttacttccagtgtgttccctgaaggcaaagaatccccaggataagatcgtcttcaccaaggctgaggacaatttgttagctttaggactgaagcattttgaaggaactgagtttcctaatcctctaatcagcaagtaccttctaacctgcaaaactgcccaccaactgacagtgagaatcaagaacctcaacatgaacagagctcctgacaacatcattaaattttataagaagaccaaacagctgccagtcctaggaaaatgctgtgaagagatccagccacatcagtggaagccacctatagagagagaagaacaccggctcccattctggttaaaggccagtctgccatccatccaggaagaactgcggcacatggctgatggtgctagagaggtaggaaatatgactggaaccactgagatcaactcagatcgaagcctagaaaaagacaatttggagttggggagtgaatctcggtacccactgctattgcctaagggtgtagtcctgaaactgaagccagttgccacccgtttccccaggaaggcttggagacagaagcgttcatcagtcctgaagcccctccttatccaacccagcccctctctccagcccagcttcaaccctgggaaaacaccagcccgatcaactcattcagaagcccctccgagcaaaatggtgctccggattcctcacccaatacagccagccactgttttacagacagttccaggtgtccctccactgggggtcagtggaggtgagagttttgagtctcctgcagcactgcctgctgtgccccctgaggccaggacaagcttccctctgtctgagtcccagactttgctctcttctgcccctgtgcccaaggtaatgctgccctcccttgccccttctaagtttcgaaagccatatgtgagacggagaccctcaaagagaagaggagtcaaggcctctccctgtatgaaacctgcccctgttatccaccaccctgcatctgttatcttcactgttcctgctaccactgtgaagattgtgagccttggcggtggctgtaacatgatccagcctgtcaatgcggctgtggcccagagtccccagactattcccatcactaccctcttggttaaccctacttccttcccctgtccattgaaccagtcccttgtggcctcctctgtctcacccttaattgtttctggcaattctgtgaatcttcctataccatccacccctgaagataaggcccacgtgaatgtggacattgcttgtgctgtggctgatggggaaaatgcctttcagggcctagaacccaaattagagccccaggaactatctcctctctctgctactgttttcccgaaagtggaacatagcccagggcctccactagcagatgcagagtgccaagaaggattgtcagagaatagtgcctgtcgctggaccgttgtgaaaacagaggaggggaggcaagctctggagccgctccctcagggcatccaggagtctctaaacaaccctacccctggggatttagaggaaattgtcaagatggaacctgaagaagctagagaggaaatcagtggatcccctgagcgtgatatttgtgatgacatcaaagtggaacatgctgtggaattggacactggtgccccaagcgaggagttgagcagtgctggagaagtaacgaaacagacagtcttacagaaggaagaggagaggagtcagccaactaaaaccccttcatcttctcaagagccccctgatgaaggaacctcagggacagatgtgaacaaaggatcatcaaagaatgctttgtcctcaatggatcctgaagtgaggcttagtagccccccagggaagccagaagattcatccagtgttgatggtcagtcagtggggactccagttgggccagaaactggaggagagaagaatgggccagaagaagaggaagaagaggactttgatgacctcacccaagatgaggaagatgaaatgtcatcagcttctgaggaatctgtgctttctgtcccagaactccaggaaacaatggagaaactgacttggctggcatctgaaaggcgcatgagtcaggagggtgagtctgaagaagagaattctcaggaggagaactctgagccagaagaagaggaggaagaagaagcagaaggaatggaaagcctgcagaaagaggatgaaatgacggatgaagcagttggagactctgctgagaagcctcctacttttgcttcacctgagactgctccagaagtggagaccagcagaactccaccaggagagagcatcaaagctgctggaaaaggccggaacaatcatcgagctcgcaacaagcggggaagtcgggctcgggccagcaaggacacctccaagctgctgttgctgtatgatgaggacattctcgagcgagatccactcagggagcagaaggacttggcctttgcccaagcttatctgaccagggtgcgagaagccctacaacatatccctggcaagtatgaagacttccttcaagtcatctatgaatttgagtcaagtacccagagacggacggctgtagatctctacaaaagcctgcaaattctgctccaagactggcctcagctgttgaaagactttgctgctttcctgttacctgagcaagctctggcctgtggattatttgaggagcagcaggcttttgagaagagccgcaagttccttcggcagctggagatttgctttgcagagaacccctcacaccaccagaagattatcaaggtcctccaaggctgtgcagactgccttccccaggagatcaccgagctcaagacacagatgtggcagctcctcaagggccacgaccacctgcaggatgagttttctatcttctttgaccacttgcgcccagcagctagccggatgggtgactttgaagagatcaattggactgaggaaaaggagtatgagtttgatggctttgaagaagtggccctgcctgatgtggaagaagaggaggagcctcccaagatacccacagcctcaaagaacaagaggaaaaaagagatcggggtccaaaatcatgataaggagactgaatggccagatggggccaaggactgtgcctgctcctgccatgaaggaggtccagattccaagctgaagaagagcaaaaggcggagctgtagccactgtagcagcaaggtctgtgacagcaaatcctacaagagcaaggagccccatgagttggtgggcagcagcccccaccgagaggctagtcctatgcctggtgctaaggaagctgggcagggcaaggatatgatggaagaggaagccccagaggagcgggagagcactgaggccacccagagcaggactgtcaggaccaccagaaagggagagatgcctgtttcagcaggattggcagtggggagcactttgccatcccctcgagaagtgactgttacagaacggctcctcctggatggcccaccacctcattcaccagagactcctcaatttccccccacaactggagctgtactgtacactgttaagagaaaccaggttgggcctgaggttcgctcctgccccaaggcatcccccagacttcagaaagagagggagggccaaaaggcagtgagtgagtcagaggctttgatgctggtctgggatgcatcagaaactgagaaattgcctggtaccgtggaaccccctgcttccttcctgagtcctgtttcctcaaagaccagagatgcagggagaagacatgtgtccgggaaaccagacactcaagagagatggctgccctcaagcagagctcgggtgaagacaagagacaggacgtgccctgtccatgaatctccatcaggaattgacacctcagagacttctcccaaagcccctagagggggtttggctaaagacagtggaacacaggccaagggtccagagggggagcagcagccaaaggccgcagaagctacggtgtgtgccaacaacagcaaggtcagctccactggggaaaaggttgtcctgtggacaagggaagctgaccgtgtgatcctcaccatgtgccaggagcaaggggcacagccacagaccttcaacatcatctcccagcagctgggaaataagacccctgctgaggtttcccaccgttttcgagaactcatgcagctcttccacactgcctgtgaagccagctctgaggatgaggatgatgcaaccagtaccagcaatgcagaccagctgtctgaccatggggaccttctgtctgaagaggagctggatgaatgagactctgggaatcatctacacaggaccaaacccaacaggcgccctggcaccggggagggggtagttgtactctgcttgtacagtccttgagcccagtttacagatctggagagcaggaggccaggacaaggacaaaggctggaggatggagtaggacccaggggctctgccatcctaggcatcattcaaggtcttttatgaagactttacagatgtcctctgtaaatagcatcgagagtggagttcagctcctttctctacttttttttggtctgatggcacatatttattgttctgtggtctaatcacagtgtttctaaatgtaaaaagtgcatatgttggtgtagctagtcccgcgacattgagctcctctgcatgaagacactgggctcctgcatccagctgtttttattgcaaactagctcctttctcccacactgggaactttagtccacgaggctgtcaccaccctggtagcactgggccaggctttgtagctcctgcagcagctctgctacgtcatcgtgctccactccagcatccatgaagctggcccagcgccgcaagtcgagtttggtgaggtctctggccaaggcttccagggtctggtgcagggacgaagaggaacacagtgccccaaacactgggatgctctccactgctgtggagggagaggaaacagagacctgtagatggatgattattctgccctgggactcgccaaactgataaggaagtccaaccttagtagacttgattgtaaactcaacaaatttggtgtattgtccccttagtacaccagtactccagaggaagaatgcttttcttgggagccatagggtgaataaaggaatgtttaactgtggactttttcagcacttttaatccaggaatggagatagtaaaacctctcccatacttg

SEQ ID NO: 138529 - DNA, 1760 bp, Homo sapiens
  Payload ID: 7143
  Gene Symbol: GNRH1
  Gene Name: gonadotropin-releasing hormone 1 (luteinizing-releasing hormone)
  Uniprot ID: P01148
  ENST ID: ENST00000276414
  CDS Start-End: 1325-1603
gtcctatatttgttgtatagcctcctttgtggaagttatgtatgcatttgacttcacttaatctaagacatctattttccttgaactcttgataggtctgctggtttcctcaagggaatccaatctagctggattttaatctctttgaattgtgtcctcagctataaaagttttagctgaggttttaatggctgcacttaagtaaatctaacagatataccagggggtgttccaattacatacaccattaaagggctttatgtgaggatttttaaaaattaccattaaaaaaaaaaaagcatagtccatttgcagtataatttaccagcaggaaagatttcaatgtcctggaaaaattccctataaaaaggaagataggaaaacagaaaagtcacagtactcaacctacttcaagggaagattgggatctttttggctctctgcctctaaacaggtaaaaggctttgtattatttctagcacgagtttttcttctttagattgcatgctattgtatgtctacagggcatttgacagcccaagggctaaatccaggtgtgacggtatctaatgatgtcctgtccttcactgtccttgccatcaccagccacagagatccaggctttggggactcccacagcttatcgaccagtgtttgatttagtttttagcctctttcccatcaaatgaaaattaacttggagacacatttcattagaaaattagaggcccccttggctaggaaggcatctggtctgggactaactactttgaacagtgttgagtcctctctcccacagatggttcagccagcagtaatgctaggaagactgaaggataaatagaaaaatgtcattagtaccatggggtagccatgtaatgtcaagcaattttatattagccagagattcctagtaggagctacttttcttaacagatgactcagttctctttatctcaggaatgaaagagttgaagaccaatccacaacaggggaaatgttaaggcaaaatgatgaacttgataagggatgaattatggggtttggataaccaaacaataaaaataaaagtatagactattttagtactaaaaaggtcctgaacatgtgagcttaagtactcattttgtccccagtggctaagaaactaaaggcaagccagcaagtgtctctgagtttcagtgtctgtatgtaaaaactgactctgacttccatcttctgcagggttagtgatacagatgctagctttttcactaaagaggtcttttagtttatactcaaccttgtctggatctaatttgattgtgcattcatgtgccttagaatgaagccaattcaaaaactcctagctggccttattctactgacttggtgcgtggaaggctgctccagccagcactggtcctatggactgcgccctggaggaaagagagatgccgaaaatttgattgattctttccaagagatagtcaaagaggttggtcaactggcagaaacccaacgcttcgaatgcaccacgcaccagccacgttctcccctccgagacctgaaaggagctctggaaagtctgattgaagaggaaactgggcagaagaagatttaaatccattgggccagaaggaatgaccattactaacatgacttaagtataattctgacattgaaaatttataacccattaaatacctgtaaatggtatgaatttcagaaatccttacaccaagttgcacatattccataataaagtgctgtgttgtgaa

SEQ ID NO: 138530 - DNA, 470 bp, Homo sapiens
  Payload ID: 7143
  Gene Symbol: GNRH1
  Gene Name: gonadotropin-releasing hormone 1 (luteinizing-releasing hormone)
  Uniprot ID: P01148
  ENST ID: ENST00000421054
  CDS Start-End: 33-311
gggatctttttggctctctgcctctaaacagaatgaagccaattcaaaaactcctagctggccttattctactgacttggtgcgtggaaggctgctccagccagcactggtcctatggactgcgccctggaggaaagagagatgccgaaaatttgattgattctttccaagagatagtcaaagaggttggtcaactggcagaaacccaacgcttcgaatgcaccacgcaccagccacgttctcccctccgagacctgaaaggagctctggaaagtctgattgaagaggaaactgggcagaagaagatttaaatccattgggccagaaggaatgaccattactaacatgacttaagtataattctgacattgaaaatttataacccattaaatacctgtaaatggtatgaatttcagaaatccttacaccaagttgcacatattccataataaagtgctgtgttgtgaatg

SEQ ID NO: 138531 - DNA, 425 bp, Homo sapiens
  Payload ID: 7144
  Gene Symbol: GNRH2
  Gene Name: gonadotropin-releasing hormone 2
  Uniprot ID: O43555
  ENST ID: ENST00000245983
  CDS Start-End: 52-414
ctgcagctgcctgaaggagccatctcatccacagctcttccttgagcagccatggccagctccaggcgaggcctcctgctcctgctgctgctgactgcccaccttggaccctcagaggctcagcactggtcccatggctggtaccctggaggaaagcgagccctcagctcagcccaggatccccagaatgcccttaggcccccaggaagggccctggacactgcagcaggcagcccagtccagactgcccatggcctcccaagtgatgccctggctcccctggacgacagcatgccctgggagggcaggaccacggcccagtggtcccttcacaggaagcgacacctggcacggacactgctgaccgcagcccgagagccccgccccgccccgccatcctccaataaagtgtgaggttctccgaa

SEQ ID NO: 138532 - DNA, 404 bp, Homo sapiens
  Payload ID: 7144
  Gene Symbol: GNRH2
  Gene Name: gonadotropin-releasing hormone 2
  Uniprot ID: O43555
  ENST ID: ENST00000359100
  CDS Start-End: 52-393
ctgcagctgcctgaaggagccatctcatccacagctcttccttgagcagccatggccagctccaggcgaggcctcctgctcctgctgctgctgactgcccaccttggaccctcagaggctcagcactggtcccatggctggtaccctggaggaaagcgagccctcagctcagcccaggatccccagaatgcccttaggcccccagcaggcagcccagtccagactgcccatggcctcccaagtgatgccctggctcccctggacgacagcatgccctgggagggcaggaccacggcccagtggtcccttcacaggaagcgacacctggcacggacactgctgaccgcagcccgagagccccgccccgccccgccatcctccaataaagtgtgaggttctccgaa

SEQ ID NO: 138533 - DNA, 353 bp, Homo sapiens
  Payload ID: 7144
  Gene Symbol: GNRH2
  Gene Name: gonadotropin-releasing hormone 2
  Uniprot ID: O43555
  ENST ID: ENST00000380346
  CDS Start-End: 4-342
gccatggccagctccaggcgaggcctcctgctcctgctgctgctgactgcccaccttggaccctcagaggctcagcactggtcccatggctggtaccctggaggaaagcgagccctcagctcagcccaggatccccagaatgcccttaggcccccaggcagcccagtccagactgcccatggcctcccaagtgatgccctggctcccctggacgacagcatgccctgggagggcaggaccacggcccagtggtcccttcacaggaagcgacacctggcacggacactgctgaccgcagcccgagagccccgccccgccccgccatcctccaataaagtgtgaggttctccgaa

SEQ ID NO: 138534 - DNA, 758 bp, Homo sapiens
  Payload ID: 7144
  Gene Symbol: GNRH2
  Gene Name: gonadotropin-releasing hormone 2
  Uniprot ID: O43555
  ENST ID: ENST00000380347
  CDS Start-End: 406-747
gagaactcccctgaccatccatctatcctcccatccattggcctgaattcaggtctctgttcccctccaactttcttccacttctggaaactccttgaaggaaagatggatggacctggacaagtgggagggccctcagagctggcaaggcaggtagcctctgtgccccaggctcagggagaaggctcgtcccctggagcatcatcccctgctgggccaggatcccccaggatctggacccctgtatgcttgggatgaggagcggtggcagagagggaagggcataaggagataccaaagctgcccctgagatgccagttttccaaagtggccctggaggaagtagggggatgtgggggtgaggtaagtctccttgaatgctgtaccctgtccattagagcagccatggccagctccaggcgaggcctcctgctcctgctgctgctgactgcccaccttggaccctcagaggctcagcactggtcccatggctggtaccctggaggaaagcgagccctcagctcagcccaggatccccagaatgcccttaggcccccagcaggcagcccagtccagactgcccatggcctcccaagtgatgccctggctcccctggacgacagcatgccctgggagggcaggaccacggcccagtggtcccttcacaggaagcgacacctggcacggacactgctgaccgcagcccgagagccccgccccgccccgccatcctccaataaagtgtgaggttctccgaa

SEQ ID NO: 138535 - DNA, 2164 bp, Homo sapiens
  Payload ID: 7145
  Gene Symbol: GNRHR
  Gene Name: gonadotropin-releasing hormone receptor
  Uniprot ID: P30968
  ENST ID: ENST00000226413
  CDS Start-End: 26-1012
gcttgaagctctgtcctgggaaaatatggcaaacagtgcctctcctgaacagaatcaaaatcactgttcagccatcaacaacagcatcccactgatgcagggcaacctccccactctgaccttgtctggaaagatccgagtgacggttactttcttcctttttctgctctctgcgacctttaatgcttctttcttgttgaaacttcagaagtggacacagaagaaagagaaagggaaaaagctctcaagaatgaagctgctcttaaaacatctgaccttagccaacctgttggagactctgattgtcatgccactggatgggatgtggaacattacagtccaatggtatgctggagagttactctgcaaagttctcagttatctaaagcttttctccatgtatgccccagccttcatgatggtggtgatcagcctggaccgctccctggctatcacgaggcccctagctttgaaaagcaacagcaaagtcggacagtccatggttggcctggcctggatcctcagtagtgtctttgcaggaccacagttatacatcttcaggatgattcatctagcagacagctctggacagacaaaagttttctctcaatgtgtaacacactgcagtttttcacaatggtggcatcaagcattttataactttttcaccttcagctgcctcttcatcatccctcttttcatcatgctgatctgcaatgcaaaaatcatcttcaccctgacacgggtccttcatcaggacccccacgaactacaactgaatcagtccaagaacaatataccaagagcacggctgaagactctaaaaatgacggttgcatttgccacttcatttactgtctgctggactccctactatgtcctaggaatttggtattggtttgatcctgaaatgttaaacaggttgtcagacccagtaaatcacttcttctttctctttgcctttttaaacccatgctttgatccacttatctatggatatttttctctgtgattgatagactacacaagaagtcatatgaagaagggtaaggtaatgaatctctccatctgggaatgattaacacaaatgttggagcatgtttacatacaaacaaagtaggatttacacttaagttatcattcttttagaaactcagtcttcagagcctcaattattaaggaaaagtcttcaggaaaaatactaaaatattttctcttcctcataagcttctaaattaatctctgccttttctgacctcatataacacattatgtaggtttcttatcactttctctttgcataataatgtactaatatttaaaataccttcagcctaaggcacaaggatgccaaaaaaacaaaggtgagaaaccacaacacaggtctaaactcagcatgctttggtgagtttttctccaaaaggggcatattagcaattagagttgtatgctatataatacatagagcacagagccctttgcccataatatcaactttccctcctatagttaaaaagaaaaaaaatgaatctatttttctctttggcttcaaaagcattctgacatttggaggagtcagtaaccaatcccaccaaccactccagcaacctgacaagactatgagtagttctccttcatcctatttatgtggtacaggttgtgaagtatctctatataaagggaaattttagaggggttaggatttggacaggggtttagaacattcctctaagctatctagtctgtggagtttgtggcaattaattgccataaaataacaatgtttccaaatgcaactaagaaaatactcatagtgagtacgctctatgcatagtatgacttctattttaatgtgaagaattttttgtctctctcctgatcttactaaatccatatttcataaataactgagaataattaaaacaaaattaagcaaatgcacaagcaaaaagatgcttgatacacaaaaggaactctggagagaaaactacagcttcagtctgtacagatcaaagaagacagaacatgtcaggggaaggagggaaagatcttgatgcagggtttcttaacctgcagtctatgcacaacactatatttccatgtaatgtttttatttcagccctatttgtattattttgtgcatttaaaaaacacaatcttaagg

SEQ ID NO: 138536 - DNA, 859 bp, Homo sapiens
  Payload ID: 7145
  Gene Symbol: GNRHR
  Gene Name: gonadotropin-releasing hormone receptor
  Uniprot ID: P30968
  ENST ID: ENST00000420975
  CDS Start-End: 1-750
atggcaaacagtgcctctcctgaacagaatcaaaatcactgttcagccatcaacaacagcatcccactgatgcagggcaacctccccactctgaccttgtctggaaagatccgagtgacggttactttcttcctttttctgctctctgcgacctttaatgcttctttcttgttgaaacttcagaagtggacacagaagaaagagaaagggaaaaagctctcaagaatgaagctgctcttaaaacatctgaccttagccaacctgttggagactctgattgtcatgccactggatgggatgtggaacattacagtccaatggtatgctggagagttactctgcaaagttctcagttatctaaagcttttctccatgtatgccccagccttcatgatggtggtgatcagcctggaccgctccctggctatcacgaggcccctagctttgaaaagcaacagcaaagtcggacagtccatggttggcctggcctggatcctcagtagtgtctttgcaggaccacagctgcctcttcatcatccctcttttcatcatgctgatctgcaatgcaaaaatcatcttcaccctgacacgggtccttcatcaggacccccacgaactacaactgaatcagtccaagaacaatataccaagagcacggctgaagactctaaaaatgacggttgcatttgccacttcatttactgtctgctggactccctactatgtcctaggaatttggtattggtttgatcctgaaatgttaaacaggttgtcagacccagtaaatcacttcttctttctctttgcctttttaaacccatgctttgatccacttatctatggatatttttctctgtga

SEQ ID NO: 138537 - DNA, 1264 bp, Homo sapiens
  Payload ID: 7146
  Gene Symbol: GSC
  Gene Name: goosecoid homeobox
  Uniprot ID: P56915
  ENST ID: ENST00000238558
  CDS Start-End: 216-989
tcctacccgcgggttgagttcagcgaacgctgcggctaggggagggcgggaggagggagagcggacgcagggggcggggaggggcgcagggctgcgcgctcgccggcgctctctttcggtttggtcggcggctggaggagagtggacccccccactttaaggctctgtcctcggcgcgttcccgccgccccccggtcccgacgcggggctcggggatgcccgccagcatgttcagcatcgacaacatcctagccgcccggccgcgctgcaaggactcggtgttgccggtggcgcacagcgcggcggctcccgtcgtcttcccggccctgcacggggactcgctctacggcgccagcggcggcgcctcctcggactatggcgccttctacccgcgccccgtggcccccggcggcgcgggcctcccggccgcggtcagcggctcccgcctcggctacaacaactacttctacgggcagctgcacgtgcaggcggcgcccgtgggcccggcctgctgcggggccgtgccgccgctgggcgcccagcagtgctcctgcgtcccgacgcccccaggctacgagggccccggttcggtgctggtgtccccggtaccgcaccagatgctgccctacatgaacgtgggcacgctgtcgcgcaccgagctgcagcttctcaaccagctgcactgtcggcggaagcggcggcaccgcaccatcttcactgacgagcagctcgaagctctcgagaacctcttccaggagaccaagtacccggacgtgggcacgcgcgagcagctggcccggaaagtgcacctccgcgaggagaaagtggaggtctggtttaagaaccgccgcgccaaatggaggcggcagaagcggtcctcatcagaggagtcggagaacgcggagaagtggaacaagacgtcgtcgtcgaaggcgtcaccggagaagagggaagaggaaggtaaaagcgatttggactcggacagctgacggccgcgggacacttgcccgtattacttacctaactcgaaggacttgcacagacagacgatgctactttcttgcacacgcgctgccttgcgggagggggtcgagaaagaggaacgaggagctgtaaatagtgtacagagccgggagggtcggcgtctggggtcagggcgcgcacagcccagcagcccgaggccgcccgcgactagcccccaccgtagtatttatagttaaattaagggtgacagtacaataaagtgatggcgatgtagacgggc

SEQ ID NO: 138538 - DNA, 1033 bp, Homo sapiens
  Payload ID: 7147
  Gene Symbol: GSC2
  Gene Name: goosecoid homeobox 2
  Uniprot ID: O15499
  ENST ID: ENST00000086933
  CDS Start-End: 1-618
atggcggcagcggctgggggcgcggcgagccgccggggtgccgggcggccctgccccttctccatcgagcacatcctctccagcctgcccgagcggagcctcccggcccgggccgcctgcccaccgcagcccgccggtcgccagagccccgcgaagccagaggagcccggggcgcccgaggctgcgccctgcgcctgctgctgctgctgcggcccccgcgcggcgccctgcgggcccccagaggcggccgccgggctgggcgctcgtctggcgtggccgctgaggctgggaccggcggtgcccttgtctctgggtgcgccagccggaggttccggggcgctcccgggcgcggtcggcccgggttcgcagcggcgcacgaggcgccaccgcaccatcttcagcgaagagcagctgcaggcgctcgaggcgcttttcgtgcagaaccagtatcctgacgtgagtacgcgcgagcgcctggccggccgcatccgccttcgcgaggagcgcgtggaggtctggttcaagaaccgccgggccaaatggcgacaccagaagcgcgcgtcggcttccgcgaggctcctgcccggcgtcaagaagtccccgaaggggagctgctgatgactctaggagctgcccctgggctcggccaccctttttgggatctttggagttggcgctgagagaagacaggtctacccgaaaaggagctgggagagtacaccggccgcctccacccgtctccacagcccttgcctcctgcagctcgtgctgccgtggcgctggggacgggcccccggtgcttggtgttccacggcagtgggagtggcgagtcccttgggggtgggctggggcatagagcagtttcctcagctccctaccccccgagagacactaactccaccgcaggaggggaaccaccccgtatcaacacgggacccagaatcctacgcagtggagcgtctctccgcaccctgggacatgctggccaccctcttctcaatgtggacattgacctaacttgacctggctcgtc

SEQ ID NO: 138539 - DNA, 5368 bp, Homo sapiens
  Payload ID: 7148
  Gene Symbol: GPALPP1
  Gene Name: GPALPP motifs containing 1
  Uniprot ID: Q8IXQ4
  ENST ID: ENST00000357537
  CDS Start-End: 422-934
tttttttgagatgaagtctcactctgtagcccagactggaatccggtggcacgatctcagctcactgtagcctctgcctcctaagttcaagtggttctcctgtctcagtctcccaagtagctggaactacagaaaacagaggaaaaatcaggatgatgacgatgatgatgatgatgggttttttggaccagcccttcctcctggatttaaaaagcaggatgattctcctccaaggcccataataggtcctgcattgccacctggtttcattaaatctacacagaaaagtgacaagggcagagatgatccaggacaacaggaaacagacagcagtgaagatgaggatattattggaccaatgcctgcaaaaggaccagttaactataatgtaacgacagagtttgaaaaaagggcccagagaatgaaagaaaaactgaccaaaggagatgatgattcatctaaacccattgtaagagagtcatggatgactgaacttcctccagaaatgaaagactttggtcttgggccaaggacttttaagagaagagctgatgacacatctggagatcgatcaatctggacagatactccagctgatagggaaaggaaagctaaggaaacacaagaagcaaggaagtcatccagtaagaaagatgaagaacatatattatcaggaagagataagagactggctgagcaggtatcttcatacaatgaatcaaaaagatcagaatctcttatggacatacatcataaaaagttaaagagtaaggctgctgaagacaaaaataagcctcaagagagaataccatttgaccgtgataaagatctcaaggttaatcggtttgatgaagctcagaaaaaagccctaataaaaaaatctagagaactaaacaccagattttcacacggcaaaggcaatatgtttttataatgataggtattattagaaaaaagttatttcttgagttacacctaagaggaagaagtaacatgatggaaagtggttggagatagcacccaattaacatcgacagccaagtcttctatttcagaatattgatttatttcgctttggcttttgatgccatcatgagatttaagtctgcagtttcaaaagctcatgctacttagatgatttttgcagcttaaaaaattgcttgtgactgcagtatgtacacagttaaaaagctgttcactgcccctttcaaccttttcattttgagctttactaagagaatgcttttaggaacagaattcctaaagtgtaattttttatgtataaataaagttttatctatatctgagaagttgtagtatttatttttgttttaacattattagcttttctgaagcaggcagtattggtaaagagaatattctgtaaaggtttattccggccaaccagatcattgtaggctattgtaaaaaacaacaacaactttaactccaactcgcttgccaggttttcattatctaatataactatacagatattatctgtttatttagaaacacaagacagacaaactggaaatgttcttgagagcactgtgacactgggttataaccaagattccattgttcttcatatcacaggacctgtaacagtgggtaggttttttctggattgtttgagtatgagtttctttggtttggtttggtttggtctctctaactcccaaattgaaagtgaccaaaagagatgctttgcaacatcaaagctaagcattgaatgataggaatctgaacatgtagggtcaaaaagagagcctttgctttctcagatcatttccctataataagtatttctggaggaacttatatgtttgttcatttattcaataaacatttattaaatgcctcagtgtatgctaggtgctaagaacacaatggtgaaccaggcaggcatagtcttcctccctgggagaagattctgtgctggtcccttatagggtattcacagataagtaaagcagattccttgatttgtgattttatattctagtgggagagcagaaaaagatctgagtaaaaaagatcaagtaattgcacattgttgataggtgttagaaagaaaacacggtagtgaaagactagaacaagtagttgaggatgggaattctatctagttagagtgataagaagtctctgaagatgtgtcatttaagctgaaacctaaaaaaatgaaaagctagcagtgtgaaaagtgactgatcacatatgcaaatgccctgaagctttagttctttggtgtttgaggaactgctccagtatggcgggtatattgtgagaaatatgatggttcagggttgggtcttcatagtgtctactgatactatgaagcctatataggaacatctaacccagtcctgggaggtgaaaggaagcttcctaatggagaatacttttttatttttatttctttttttttttttttattttttttttttgagacagagtctccctctgtcgcccagactggagtgtaatggcgcaatctcggctcactgcaccctccgccttccaggttcaagtgattctcctgcctcagcctcctgatagctgggattacaggcacccgccaccacacccggctgatttctgtatttttagtagagacagggtttcgccatgttggccaggctggtctttttttttttttttttttttgagacggagtctggctctgtctctcaggctggagtgcagtggcgccatctcggctcactgcaagctccgcctctcgggttcacgccattctcctgcctcagcctccccagtagctgggactacaggcgcccaccaccacgcccggctaattttttgtattattagtagagacggggtttcaccgtgttagccaggatggtctcgatctcctgacctgttgatccatccgccttggcctcccaaagtgctgggattacaggcgtgagccaccgcccccggcctccaatggagaatacttcttaaccaagttataaacatgacattggagttggccagatggttcttacaccaaaggtctactctgctggccttccagaattgcccaaatgtgtctgaattcactcttaggcccttgctctgcaaacaccctgtatgtaactccactaataactgtcattagttatcagaacattaatacattgatctgaacattgagcctatactttatcatcaaaaccataaatatttaagaatagctgtttttttaagaagttgttgtaaattacttgtttcctcctgggcctaattattgagggttatttacattctttttaagaactgaatagcaccagatgaattcaacaattattagtcaagtctctagaattctggacatagcagaatgtttttacttagggactgaaaaatacagtagatcagtctgtctcttaatttgtaatccttaaactatttctatcagaatcacctaggagttcatttaaatgcagatctccaggcccaaacctattgaataggaatctttggggttagaatcagagcatcttcacttttaacaattatcccaggccattctttgtaaattcaagtttaagaaccactgcatttatgggcagacaaggtagctcacacctgtaatctcagcactttggagggccaaggtgggaggattgcttgaggccaggagttcaaggctaccctggccaacatggtgaaaccctgactctaaaaagaaatttaaaaaaataataaccaccgcacttacatgtgttcctataaacaatcccctctcctttgttatatgttctgttttcctattatatattcctaaatacataatcactttactttgcatagcaacaaacaccagcaccagcaatacttgcctcttgaagaatggattgtcacttctcttgagtgaatgcctaaaagcattcacccttcaaacatctaccagccagttgctacagtgatcaagattctactgccattgataattcagtttcattgcactttgccctctcttcagcaccttttaaaatagataagtccctaagaggaatagtcagattgtagttccttgtccctggctgacttggggccatttaagactgaatgcctcaggaatgcagaacattgaaaaggcagggagcacaaaaagggagcactggtgggctatagatgatctgcaaaggatggtctctaccttatgactattttccttgggggaattaaccagttaatgttactttgaggtcttagataactgtgctttggcagctaaggtattaacttcagaagcaactgagtttacttttagataccagtttctgtatttgctgacaaagaaaagataacagtaggtaaaagaatgttaaaaagaaacaaaaggccaggcacaatgcctcacatctgtaatcccagcacttcaagaggccaagacaggaggatcacttgagggccaggagttcaagaccaacctgggcaacgtggcatgaccctgtctctacaaaaaaataaaaattaaaaattatctgggcatggtggcatggcatgcatctgtagtcccagctactcaggaagctaaggcaggaggatcacttgagcccaagagttcaaggctgcagtgagctatgaacatgccactgcactccagccagggagacagagagaccccatctctaaaagagaaaaaaagaaagcaataaaattctgcagaactaggtaggaaagacaataaaagctacaagggtgcatcattgttttgagatctagacaaatttcgagaacctattcaagaatattgaaaagtatttcaaagttcattttcatatctctgattacttaccgctgtcctgccctttaaagcacttccatttgttttctttatgatggggtaatgttggccaaacaggctatatgataaagtatttagtcctagttttatcttcatacaatcagagctctgagatgaaaataaacttgttccttttttatcactaggtacaaaacaacaaatgaagttgcttatgtatataatatgatgatttttgtctttttaggtaatggctgaaagcaacacattttgctaacctaaggataaataatactataatacctaattcacactacacacttaacaaaagcaatttatcatcagcctaagattgctaatttttataacaggtacagacataattaacttaatattgaccagcaaataaatctagaaattgtgcttattctttagtattcattttaactgaatttaaattagtgtttttccctaacagccttgtatattgcttaataaaattgtcatatttgaaaacagagattcttaaagtttaaaatgcttgcagtcaaatgacagtttatcaataaagatttaaaacta

SEQ ID NO: 138540 - DNA, 3410 bp, Homo sapiens
  Payload ID: 7148
  Gene Symbol: GPALPP1
  Gene Name: GPALPP motifs containing 1
  ENST ID: ENST00000361121
  CDS Start-End: 92-1108
ccattcttcgctgctgatcgcgggattctttttggatagggttgacgttcgtggatagactcatatctgtgaccagtgtccgccaccgcggatggcaagagacctgatcggaccggccctgccgcccggcttcaaggcccgcggaacagcggaggacgaagagcgggacccgagccctggaccagctctgccccctaattataaaagcagtagttcagattcatcagacagcgatgaagacagtagttctttgtacgaagaaggaaatcaagaatctgaagaagatgacagtggtccaactgcaagaaaacagaggaaaaatcaggatgatgacgatgatgatgatgatgggttttttggaccagcccttcctcctggatttaaaaagcaggatgattctcctccaaggcccataataggtcctgcattgccacctggtttcattaaatctacacagaaaagtgacaagggcagagatgatccaggacaacaggaaacagacagcagtgaagatgaggatattattggaccaatgcctgcaaaaggaccagttaactataatgtaacgacagagtttgaaaaaagggcccagagaatgaaagaaaaactgaccaaaggagatgatgattcatctaaacccattgtaagagagtcatggatgactgaacttcctccagaaatgaaagactttggtcttgggccaaggacttttaagagaagagctgatgacacatctggagatcgatcaatctggacagatactccagctgatagggaaaggaaagctaaggaaacacaagaagcaaggaagtcatccagtaagaaagatgaagaacatatattatcaggaagagataagagactggctgagcaggtatcttcatacaatgaatcaaaaagatcagaatctcttatggacatacatcataaaaagttaaagagtaaggctgctgaagacaaaaataagcctcaagagagaataccatttgaccgtgataaagatctcaaggttaatcggtttgatgaagctcagaaaaaagccctaataaaaaaatctagagaactaaacaccagattttcacacggcaaaggcaatatgtttttataagtaagtatatttcagtgaggtatattttaatactgatcaatgtgaacttttctaaatactctattgtctttaataattgtgctgaaatctatttccttttataatagattaaaaattttatatttttataagtaaacagtgatttttgaaaagtcagccttgtgggatgaaaaatatgtcttactggaaaaatccctcataataacctaatagggcattgctattaaaaatgctaaaataaaaattcagcttatgagaaatggcaaaggaaggtgtggtttgatacttgagtaaatatgcatgctttattaaagatgaagaaaggcttgctggttgtttgtatgttaaacaaaatcccaactaggaaatgtttgttgcttagaaaggtcccctataagttaaggttcaaaactattccaatattcatccatagcccaatctgacaagggttcagaatggtgattaagaaattacataaagctgggtgcagtggctcacgcctgtaatcccaacactttgggaggccaatgtgagaggatcgcttgagcccagtagtttgagaccagcctgcttaagatggtgagaccccgtatctacaaaaaactaaccaggtgcagtggagcacacctatagtcccagctactcagcaggctgaggtgggaggatcccttgagcccaggaattcaaggcagcagtgagctgtgattgtgccattgcactccagtctgggcaacaaagtgagacctcgtctctttagaaaaaaaaaaagaggccagtggctcacacctgtaatcccagcactttgggagggtgaggcgggtggatcacctgaggtcaggagttcgagaccagcctgaacaacatggtgaaaccccatctctattaaaaatatatatatataaaaattagccaggtgtggtggcacgtgcctgtaatctcagctacttgggagcctgaggcaggagaattgcttgaacccgggaggtggaggttacagtgagccgagatcgtgccactgcactctagcctaggtgacaagatcgagagactctgtctcaaaaaagaaagaaaaagagaagaaaagaaattacataaaagctgaggttgcttcttaatatctttatgatttttaattgtattaaacctatatcaatattcaaatgtgatttttgaggaaaatatgttaaatttagaaatattttccaacttactgagttttcttattcttacctcagggggatttccctgtgcaatgaagaaaagttgaagaatactctttgtccatctttatttctttgtttttggcttcttaagattagagattactttaatcttaaaaaacatacaaatttaccttgttctgtatgtccttttaaggtcatgtggaaacataaaacgaatgttttttatgtagaacagaatattctatgtgcctttagcttctgtggaagtatggggaattatgggcttttcttcaaataattattttaagaggcttccattccccctgatttttgtggtgtctcacaagtaccctctaaggtctggtcaggactgaccaccaaatctctaccacagcctggacctccttgtgaaatatacctaacctgccctagagtcagtgtgtcaagtccttactgtaaatccatgactttgaaatttgttgttttttccctttaaactgcagccagtgaatacaaatttacttgaaaatagagggtatggggttttgcctgttttgtaatcagtttgcttgttttagcactcagggctttttatttgttatttaattttttaattgtttttaagtcagaaagatctctgggttatctcatgtgctaaggaaaaactattttgctttttccaactttaatagttagtatttctaggggaggcaatcaagataagatatgccattaactgttagcattgtgaaatctgtaagactcaatctctgatctcaaccaaagctttctgagtcctggaactttgctttgggacaactttactttacccatttatatgctgtacttaacagtttgtagctaatttatggggtcatatcttttttttagctaatttacgggggtcatatcagtcatgaatagccttttttaaaaatttaataatccctgaatacaaaaatggaaatggaaaatttataatcataacccccctaattgggagtattataagtttgtaatgctttaagcactgcctcttaagatgataaatttataagatgagaaattctatttaaactattaaactattgttaaataaatgccaattctataagtta

SEQ ID NO: 138541 - DNA, 1393 bp, Homo sapiens
  Payload ID: 7148
  Gene Symbol: GPALPP1
  Gene Name: GPALPP motifs containing 1
  Uniprot ID: Q8IXQ4
  ENST ID: ENST00000379151
  CDS Start-End: 104-1126
ccgggaaacctgccattcttcgctgctgatcgcgggattctttttggatagggttgacgttcgtggatagactcatatctgtgaccagtgtccgccaccgcggatggcaagagacctgatcggaccggccctgccgcccggcttcaaggcccgcggaacagcggaggacgaagagcgggacccgagccctgttgcaggaccagctctgccccctaattataaaagcagtagttcagattcatcagacagcgatgaagacagtagttctttgtacgaagaaggaaatcaagaatctgaagaagatgacagtggtccaactgcaagaaaacagaggaaaaatcaggatgatgacgatgatgatgatgatgggttttttggaccagcccttcctcctggatttaaaaagcaggatgattctcctccaaggcccataataggtcctgcattgccacctggtttcattaaatctacacagaaaagtgacaagggcagagatgatccaggacaacaggaaacagacagcagtgaagatgaggatattattggaccaatgcctgcaaaaggaccagttaactataatgtaacgacagagtttgaaaaaagggcccagagaatgaaagaaaaactgaccaaaggagatgatgattcatctaaacccattgtaagagagtcatggatgactgaacttcctccagaaatgaaagactttggtcttgggccaaggacttttaagagaagagctgatgacacatctggagatcgatcaatctggacagatactccagctgatagggaaaggaaagctaaggaaacacaagaagcaaggaagtcatccagtaagaaagatgaagaacatatattatcaggaagagataagagactggctgagcaggtatcttcatacaatgaatcaaaaagatcagaatctcttatggacatacatcataaaaagttaaagagtaaggctgctgaagacaaaaataagcctcaagagagaataccatttgaccgtgataaagatctcaaggttaatcggtttgatgaagctcagaaaaaagccctaataaaaaaatctagagaactaaacaccagattttcacacggcaaaggcaatatgtttttataagtaagtatatttcagtgaggtatattttaatactgatcaatgtgaacttttctaaatactctattgtctttaataattgtgctgaaatctatttccttttataatagattaaaaattttatatttttataagtaaacagtgatttttgaaaagtcagccttgtgggatgaaaaatatgtcttactggaaaaatccctcataataacctaatagggcattgctattaaaaatgctaaaataaaaattcagcttatgagaaatggcaaa

SEQ ID NO: 138542 - DNA, 4294 bp, Homo sapiens
  Payload ID: 7148
  Gene Symbol: GPALPP1
  Gene Name: GPALPP motifs containing 1
  Uniprot ID: Q8IXQ4
  ENST ID: ENST00000497558
  CDS Start-End: 36-1058
agactcatatctgtgaccagtgtccgccaccgcggatggcaagagacctgatcggaccggccctgccgcccggcttcaaggcccgcggaacagcggaggacgaagagcgggacccgagccctgttgcaggaccagctctgccccctaattataaaagcagtagttcagattcatcagacagcgatgaagacagtagttctttgtacgaagaaggaaatcaagaatctgaagaagatgacagtggtccaactgcaagaaaacagaggaaaaatcaggatgatgacgatgatgatgatgatgggttttttggaccagcccttcctcctggatttaaaaagcaggatgattctcctccaaggcccataataggtcctgcattgccacctggtttcattaaatctacacagaaaagtgacaagggcagagatgatccaggacaacaggaaacagacagcagtgaagatgaggatattattggaccaatgcctgcaaaaggaccagttaactataatgtaacgacagagtttgaaaaaagggcccagagaatgaaagaaaaactgaccaaaggagatgatgattcatctaaacccattgtaagagagtcatggatgactgaacttcctccagaaatgaaagactttggtcttgggccaaggacttttaagagaagagctgatgacacatctggagatcgatcaatctggacagatactccagctgatagggaaaggaaagctaaggaaacacaagaagcaaggaagtcatccagtaagaaagatgaagaacatatattatcaggaagagataagagactggctgagcaggtatcttcatacaatgaatcaaaaagatcagaatctcttatggacatacatcataaaaagttaaagagtaaggctgctgaagacaaaaataagcctcaagagagaataccatttgaccgtgataaagatctcaaggttaatcggtttgatgaagctcagaaaaaagccctaataaaaaaatctagagaactaaacaccagattttcacacggcaaaggcaatatgtttttataaggggatttccctgtgcaatgaagaaaagttgaagaatactctttgtccatctttatttctttgtttttggcttcttaagattagagattactttaatcttaaaaaacatacaaatttaccttgttctgtatgtccttttaaggtcatgtggaaacataaaacgaatgttttttatgtagaacagaatattctatgtgcctttagcttctgtggaagtatggggaattatgggcttttcttcaaataattattttaagaggcttccattccccctgatttttgtggtgtctcacaagtaccctctaaggtctggtcaggactgaccaccaaatctctaccacagcctggacctccttgtgaaatatacctaacctgccctagagtcagtgtgtcaagtccttactgtaaatccatgactttgaaatttgttgttttttccctttaaactgcagccagtgaatacaaatttacttgaaaatagagggtatggggttttgcctgttttgtaatcagtttgcttgttttagcactcagggctttttatttgttatttaattttttaattgtttttaagtcagaaagatctctgggttatctcatgtgctaaggaaaaactattttgctttttccaactttaatagttagtatttctaggggaggcaatcaagataagatatgccattaactgttagcattgtgaaatctgtaagactcaatctctgatctcaaccaaagctttctgagtcctggaactttgctttgggacaactttactttacccatttatatgctgtacttaacagtttgtagctaatttatggggtcatatcttttttttagctaatttacgggggtcatatcagtcatgaatagccttttttaaaaatttaataatccctgaatacaaaaatggaaatggaaaatttataatcataacccccctaattgggagtattataagtttgtaatgctttaagcactgcctcttaagatgataaatttataagatgagaaattctatttaaactattaaactattgttaaataaatgccaattctataagttatattttcttgcagattaatcccaattgttccactagtattctagttttgatgagacacaaatttttgttgttgtttatttttgtttttttgagagatggagtcttgctctgtcacccaggctggagtagagtggcgtgatctcagcttactgcaacctccgcctcctgggttcaagcgattctcctgcctcagtgtcccaagtagctgggactacaggcgtgcaccaccatgctcagctaatttttgtattttttagtagagatggggtttcactatatattgttccaggctggtctcgaactccagacctcaggtgatctacctgcctcggcctcccaaaatgctgggattacaggcatcagccaccatgcctggccaagacacaaatttttaatggaaaaatattctgattcccagttcatgtaagctttatgaaaattgagtatattgtttatatgatggtacaaattattcttcctctaataatagcagtacagtatattttttccatagcatcagtgtaaaccatagcaaactaaaggagcattgctattaaaaagatgaattagctgggcgcagtggctcatacctataatcccagcactttgggaggccgaggtgggtggatcacctgaggtcaggagttcaagaccagcctgaccaacatggtgaaatcctgtctctattaaaaatataaaaattagtcgggcctggtggcgggtgcctgtaatcccagctactcaggaggctgaagcaggataattgcttgaacctaggaggcggaggttgcagtgagccaagatcacaccattgcattccagcctgggcaacaagagtgaaactccatctctaaataaataagtaaataaatagatgaatttttctcctaagcaaattgaaaaagcttcttgtgtactcaaaattgaacagagctaccttttgactaaaaatgtcatttttaatgagcagtattttctgaacacaaaattttgtacaagagtgtctccattgcattaatttaattttgttataattttttcccaatgaaaggaaaaaagtattttgtagctcctcttccttatgtaaattcttaacatatatttttgagaaatttgcattttttaaagtaaaattgttatctttggatacttacttttctttgttttcctcatttaaagagaatagggatatttctgtattatatatttactgtttcatccctcacctttggagtgaccatgaccttggcatgaaggagagaaacctctgctttccgcctattgcttccaggagttactaccttactggccttggagataatgctcttttgtgccaacctgaggataattttaacaaaatgtaaggccagtttcagaggttgttttgccccacagagagactaatcccaatacaagaatattgacaacaaaaggacaaagtagttattgcacaggacggaaaggtgtctttatttcatcccctccccacttccaaagatgcaaaaggcctaattgaatcaagtctcctttccatctggcaggagacattttaataaggactttttaatttcctacatttcttggccaagtgtcataggaatgtggcctcttttgaaatttaaaaatgaagaagaaaaaaagagcaacactaagttaatataatggagcagatacttttaatgttcttaccattgaatatgccatttaagtttgttatacttgaaattatatgatttttgtccagctctctaaattgtcatctccaatagatttagatgcttcaaatagtaaccacattactgtgataggtattattagaaaaaagttatttcttgagttacacctaagaggaagaagtaacatgatggaaagtggttggagatagcacccaattaacatcgacagccaagtcttctatttcagaatattgatttatttcgctttggcttttgatgccatcatgagatttaagtctgcagtttcaaaagctcatgctacttagatgatttttgcagcttaaaaaattgcttgtgactgcagtatgtacacagttaaaaagctgttcactgcccctttcaaccttttcattttgagctttactaagagaatgcttttaggaacagaattcctaaagtgtaattttttatgtataaataaagttttatctat

SEQ ID NO: 138543 - DNA, 899 bp, Homo sapiens
  Payload ID: 7148
  Gene Symbol: GPALPP1
  Gene Name: GPALPP motifs containing 1
  ENST ID: ENST00000611650
  CDS Start-End: 127-429
aggctttacgtcatttctcggcgccgggaaacctgccattcttcgctgctgatcgcgggattctttttggatagggttgacgttcgtggatagactcatatctgtgaccagtgtccgccaccgcggatggcaagagacctgatcggaccggccctgccgcccggcttcaaggcccgcggaacagcggaggacgaagagcgggacccgagccctggtaagcggcggcgtctccgctgcccaccaggcccatctacccactccctggccgggccctgctcgctgaagaaagtcggaggcctaggagggcggaggagtggggagtgggcgcggcctgacccgagagaacttttctcttcccaaacagtagcaggggggaggaggctgggggaccctcctagaaacgagctttggcgtggtttggcttcgtgatgataatacattctcatttagccttaatatgagctgcacgctgccctaactgactgatacccactcagtcatttaagccgtataagaaaaaaactattttcccatgttgcaaatgggtacgcccaagcccatgccagtgtctagatcatactgctagcaagtgatggagcgcgacttagaaggaagcggttctcttaacctctgtgccatattgccttctgattacaagaaccttgcagatcctgttctctccagcccccgacctgccttcctagcctctcattctgttattgcatctgacaaacacagcccaatactcaatccagtctgagttgctgcgcaattccttaacgctctaggcttctgggcttcctctggttgcattcctaaacataactgacaaacttctccccatccttcaaggcccaacttaaatgtcacaccaataaaacctttccagattccccgaa

SEQ ID NO: 138544 - DNA, 2496 bp, Homo sapiens
  Payload ID: 7149
  Gene Symbol: GPN1
  Gene Name: GPN-loop GTPase 1
  Uniprot ID: Q9HCN4
  ENST ID: ENST00000264718
  CDS Start-End: 22-1188
attgcggaagtttctctacccatgcggtgtctctatggtcgggtgggtggggccaggaggaagatggcggcgtccgcagctgccgctgagctccaggcttctgggggtccgcggcacccagtgtgtctgttggtgttgggaatggcgggatccgggaaaaccacttttgtacagaggctcacaggacacctgcatgcccaaggcactccaccgtatgtgatcaacctggatccagcagtacatgaagttccctttcctgccaatattgatattcgtgatactgtaaagtataaagaagtaatgaaacaatatggacttggacccaatggcggcatagtgacctcactcaatctctttgctaccagatttgatcaggtgatgaaatttattgagaaggcccagaacatgtccaaatatgtgttgattgacacacctggacagattgaggtattcacctggtcagcttctgggacaattatcactgaagcccttgcatcctcatttccaacagttgtcatctatgtaatggacacatcgagaagtaccaacccagtgaccttcatgtccaacatgctctatgcctgcagcatcttatacaaaaccaagctgcctttcattgtggtcatgaataaaactgacatcattgaccacagctttgcagtggaatggatgcaggattttgaggctttccaagatgccttgaatcaagagactacatacgtcagtaacctgactcgttcaatgagcctggtgttagatgagttttacagctcactcagggtggtgggtgtctctgctgttctgggtactggattagatgaactctttgtgcaagttaccagtgctgccgaagaatatgaaagggagtatcgtcctgaatatgaacgtctgaaaaaatcactggccaacgcagagagccaacagcagagagaacaactggaacgccttcgaaaagatatgggttctgtagccttggatgcagggactgccaaagacagcttatctcctgtgctgcacccttctgatttgatcctgactcgaggaaccttggatgaagaggatgaggaagcagacagcgatactgatgacattgaccacagagttacagaggaaagccatgaagagccagcattccagaattttatgcaagaatcgatggcacaatactggaagagaaacaataaataggagactttagcacacttcacttgtttctagaagtccagaattttggacctccacgtgaaagaactgttcttacctctgaactgggggctcccataagggataattttcctcagagtagcaaagtttctcttattagagaaatcttgtgactcagatgaagtcagggatagaagacccttggacctggcaggttaatgctgattattccttggcctttcccttgtatttatgcaaggaaggatatactgagctgatactcttccaagcctacaacttcaagttttatcatttgaactcaagtacttttgctgctgaggaatggaatcaaaagaacgtagtctcctggtgaccacctcagatctctattattaggctagatgtatagcctctactcccccagcttcttgctcttgaccctgcactgtaagttgcccttctattagcagccaaggaaaagggaaacatgagcttatccagaacggtggcagagtctccttggcaatcaaccaacgttgctatgaaatatgcctcacactgtatagctcattataggacgtcaggtttgttgaaaaaagtgggcaagacatgattaatgaatcagaatcctgtttcattggtgacttggataaagactttttaattttaactttgttctaagactgcttgtcatgatttcaaattagaaaattatataattgcaaacagcttcacttctcctgttcaacagaggcttaaggccagatgtccaaacttgtctcaataaggaggtgatattttactaaagtttcccacgtgcacatactgactaaatacagagctaggcccagtttgtattgtactctgaacttaatgcaaagtctccttggtgattttcgcaaagtccgtggatttgggtcagaggcacatttcatacataacagcccttataaacgtttgccctgcctccacattttacagtatcttaaaacagtacatttctttcaaagaattttatctctatgagtcagtactccaacttagtggttctcacattgtggaccaggagcatcagcatcatctggggaattgttcaacttacctcttataacctatgaactcagaaaccctgggggtgggctgagcagtctgttttagaaagccctccatgtgattctgatgcatagtagcctatgacataattccagaccaggtgaatctcaagatactaatcctcacatcatttgccttctcatatttccctcgtcttgaccatctggtgcctgttatgcagtttaacattctgcagcaataaaagtgttttattataaa

SEQ ID NO: 138545 - DNA, 1395 bp, Homo sapiens
  Payload ID: 7149
  Gene Symbol: GPN1
  Gene Name: GPN-loop GTPase 1
  Uniprot ID: Q9HCN4
  ENST ID: ENST00000407583
  CDS Start-End: 51-1139
gagcagccggtcctccagtggctccgctccccgttctctgtgggctcaaaatgacagggcatactcggtccagcttaccacgttgtacaggaattgtcttgctgataaaattgcgtttctcggagaggctcacaggacacctgcatgcccaaggcactccaccgtatgtgatcaacctggatccagcagtacatgaagttccctttcctgccaatattgatattcgtgatactgtaaagtataaagaagtaatgaaacaatatggacttggacccaatggcggcatagtgacctcactcaatctctttgctaccagatttgatcaggtgatgaaatttattgagaaggcccagaacatgtccaaatatgtgttgattgacacacctggacagattgaggtattcacctggtcagcttctgggacaattatcactgaagcccttgcatcctcatttccaacagttgtcatctatgtaatggacacatcgagaagtaccaacccagtgaccttcatgtccaacatgctctatgcctgcagcatcttatacaaaaccaagctgcctttcattgtggtcatgaataaaactgacatcattgaccacagctttgcagtggaatggatgcaggattttgaggctttccaagatgccttgaatcaagagactacatacgtcagtaacctgactcgttcaatgagcctggtgttagatgagttttacagctcactcagggtggtgggtgtctctgctgttctgggtactggattagatgaactctttgtgcaagttaccagtgctgccgaagaatatgaaagggagtatcgtcctgaatatgaacgtctgaaaaaatcactggccaacgcagagagccaacagcagagagaacaactggaacgccttcgaaaagatatgggttctgtagccttggatgcagggactgccaaagacagcttatctcctgtgctgcacccttctgatttgatcctgactcgaggaaccttggatgaagaggatgaggaagcagacagcgatactgatgacattgaccacagagttacagaggaaagccatgaagagccagcattccagaattttatgcaagaatcgatggcacaatactggaagagaaacaataaataggagactttagcacacttcacttgtttctagaagtccagaattttggacctccacgtgaaagaactgttcttacctctgaactgggggctcccataagggataattttcctcagagtagcaaagtttctcttattagagaaatcttgtgactcagatgaagtcagggatagaagacccttggacctggcaggttaatgctgattattccttggcctttcccttgtatttatgcaaggaaggatatactgagctgata

SEQ ID NO: 138546 - DNA, 577 bp, Homo sapiens
  Payload ID: 7149
  Gene Symbol: GPN1
  Gene Name: GPN-loop GTPase 1
  ENST ID: ENST00000436280
  CDS Start-End: 36-257
gtctctatggtcgggtgggtggggccaggaggaagatggcggcgtccgcagctgccgctgagctccaggcttctgggggtccgcggcacccagtgtgtctgttggtgttgggaatggcgggatccgggaaaaccacttttgtacagaggctcacaggacacctgcatgcccaaggcactccaccgtatgtgatcaacctggatccagcagtacatgaagttccctttcctgccaatattggtgatgaaatttattgagaaggcccagaacatgtccaaatatgtgttgattgacacacctggacagattgaggtattcacctggtcagcttctgggacaattatcactgaagcccttgcatcctcatttccaacagttgtcatctatgtaatggacacatcgagaagtaccaacccagtgaccttcatgtccaacatgctctatgcctgcagcatcttatacaaaaccaagctgcctttcattgtggtcatgaataaaactgacatcattgaccacagctttgcagtggaatggatgcaggattttgaggctttccaagatgccttgaatcaagaga

SEQ ID NO: 138547 - DNA, 1725 bp, Homo sapiens
  Payload ID: 7149
  Gene Symbol: GPN1
  Gene Name: GPN-loop GTPase 1
  Uniprot ID: Q9HCN4
  ENST ID: ENST00000424214
  CDS Start-End: 194-1081
gaataagcccgagcagccggtcctccagtggctccgctccccgttctctgtgggctcaaaatgacagaggctcacaggacacctgcatgcccaaggcactccaccgtatgtgatcaacctggatccagcagtacatgaagttccctttcctgccaatattgatattcgtgatactgtaaagtataaagaagtaatgaaacaatatggacttggacccaatggcggcatagtgacctcactcaatctctttgctaccagatttgatcaggtgatgaaatttattgagaaggcccagaacatgtccaaatatgtgttgattgacacacctggacagattgaggtattcacctggtcagcttctgggacaattatcactgaagcccttgcatcctcatttccaacagttgtcatctatgtaatggacacatcgagaagtaccaacccagtgaccttcatgtccaacatgctctatgcctgcagcatcttatacaaaaccaagctgcctttcattgtggtcatgaataaaactgacatcattgaccacagctttgcagtggaatggatgcaggattttgaggctttccaagatgccttgaatcaagagactacatacgtcagtaacctgactcgttcaatgagcctggtgttagatgagttttacagctcactcagggtggtgggtgtctctgctgttctgggtactggattagatgaactctttgtgcaagttaccagtgctgccgaagaatatgaaagggagtatcgtcctgaatatgaacgtctgaaaaaatcactggccaacgcagagagccaacagcagagagaacaactggaacgccttcgaaaagatatgggttctgtagccttggatgcagggactgccaaagacagcttatctcctgtgctgcacccttctgatttgatcctgactcgaggaaccttggatgaagaggatgaggaagcagacagcgatactgatgacattgaccacagagttacagaggaaagccatgaagagccagcattccagaattttatgcaagaatcgatggcacaatactggaagagaaacaataaataggagactttagcacacttcacttgtttctagaagtccagaattttggacctccacgtgaaagaactgttcttacctctgaactgggggctcccataagggataattttcctcagagtagcaaagtttctcttattagagaaatcttgtgactcagatgaagtcagggatagaagacccttggacctggcaggttaatgctgattattccttggcctttcccttgtatttatgcaaggaaggatatactgagctgatactcttccaagcctacaacttcaagttttatcatttgaactcaagtacttttgctgctgaggaatggaatcaaaagaacgtagtctcctggtgaccacctcagatctctattattaggctagatgtatagcctctactcccccagcttcttgctcttgaccctgcactgtaagttgcccttctattagcagccaaggaaaagggaaacatgagcttatccagaacggtggcagagtctccttggcaatcaaccaacgttgctatgaaatatgcctcacactgtatagctcattataggacgtcaggtttgttgaaaaaagtgggcaagacatgattaatgaatcagaatcctgtttcattggtgacttggataaagactttttaatttt

SEQ ID NO: 138548 - DNA, 1618 bp, Homo sapiens
  Payload ID: 7149
  Gene Symbol: GPN1
  Gene Name: GPN-loop GTPase 1
  Uniprot ID: Q9HCN4
  ENST ID: ENST00000458167
  CDS Start-End: 135-974
gaataagcccgagcagccggtcctccagtggctccgctccccgttctctgtgggctcaaaatgacagaggctcacaggacacctgcatgcccaaggcactccaccgtatgtgatcaacctggatccagcagtacatgaagttccctttcctgccaatattggtgatgaaatttattgagaaggcccagaacatgtccaaatatgtgttgattgacacacctggacagattgaggtattcacctggtcagcttctgggacaattatcactgaagcccttgcatcctcatttccaacagttgtcatctatgtaatggacacatcgagaagtaccaacccagtgaccttcatgtccaacatgctctatgcctgcagcatcttatacaaaaccaagctgcctttcattgtggtcatgaataaaactgacatcattgaccacagctttgcagtggaatggatgcaggattttgaggctttccaagatgccttgaatcaagagactacatacgtcagtaacctgactcgttcaatgagcctggtgttagatgagttttacagctcactcagggtggtgggtgtctctgctgttctgggtactggattagatgaactctttgtgcaagttaccagtgctgccgaagaatatgaaagggagtatcgtcctgaatatgaacgtctgaaaaaatcactggccaacgcagagagccaacagcagagagaacaactggaacgccttcgaaaagatatgggttctgtagccttggatgcagggactgccaaagacagcttatctcctgtgctgcacccttctgatttgatcctgactcgaggaaccttggatgaagaggatgaggaagcagacagcgatactgatgacattgaccacagagttacagaggaaagccatgaagagccagcattccagaattttatgcaagaatcgatggcacaatactggaagagaaacaataaataggagactttagcacacttcacttgtttctagaagtccagaattttggacctccacgtgaaagaactgttcttacctctgaactgggggctcccataagggataattttcctcagagtagcaaagtttctcttattagagaaatcttgtgactcagatgaagtcagggatagaagacccttggacctggcaggttaatgctgattattccttggcctttcccttgtatttatgcaaggaaggatatactgagctgatactcttccaagcctacaacttcaagttttatcatttgaactcaagtacttttgctgctgaggaatggaatcaaaagaacgtagtctcctggtgaccacctcagatctctattattaggctagatgtatagcctctactcccccagcttcttgctcttgaccctgcactgtaagttgcccttctattagcagccaaggaaaagggaaacatgagcttatccagaacggtggcagagtctccttggcaatcaaccaacgttgctatgaaatatgcctcacactgtatagctcattataggacgtcaggtttgttgaaaaaagtgggcaagacatgattaatgaatcagaatcctgtttcattggtgacttggataaagactttttaatttt

SEQ ID NO: 138549 - DNA, 1646 bp, Homo sapiens
  Payload ID: 7149
  Gene Symbol: GPN1
  Gene Name: GPN-loop GTPase 1
  Uniprot ID: Q9HCN4
  ENST ID: ENST00000515877
  CDS Start-End: 596-1483
actgtttgcagctacaaagggtcacagaaacagactgggtggtcaggagtagaaataattttctaggctctttcatcatctttcctgagtttctgagggaccttcagtgactggaggggaggaagctcccctccagtacctacttgcacctggaatccaagcattcatcctgaaggtcacggcaactgtgtagttcactgagggtgactgccaaggaatgagcgctagcatcaggaacctgcgtctgcaactcgcgggaacaatgtgcaagtgtggaaagctcccgtagtttattcgttcggtgctcaaagggtctcggtgctgcccagcaaccctggagactgcaccctgctccagtcccggctggtccagccctgaactgtttaaccgcctcggctaccgaataagcccgagcagccggtcctccagtggctccgctccccgttctctgtgggctcaaaatgacaggcatgctcctcgacacctgcatgcccaaggcactccaccgtatgtgatcaacctggatccagcagtacatgaagttccctttcctgccaatattgatattcgtgatactgtaaagtataaagaagtaatgaaacaatatggacttggacccaatggcggcatagtgacctcactcaatctctttgctaccagatttgatcaggtgatgaaatttattgagaaggcccagaacatgtccaaatatgtgttgattgacacacctggacagattgaggtattcacctggtcagcttctgggacaattatcactgaagcccttgcatcctcatttccaacagttgtcatctatgtaatggacacatcgagaagtaccaacccagtgaccttcatgtccaacatgctctatgcctgcagcatcttatacaaaaccaagctgcctttcattgtggtcatgaataaaactgacatcattgaccacagctttgcagtggaatggatgcaggattttgaggctttccaagatgccttgaatcaagagactacatacgtcagtaacctgactcgttcaatgagcctggtgttagatgagttttacagctcactcagggtggtgggtgtctctgctgttctgggtactggattagatgaactctttgtgcaagttaccagtgctgccgaagaatatgaaagggagtatcgtcctgaatatgaacgtctgaaaaaatcactggccaacgcagagagccaacagcagagagaacaactggaacgccttcgaaaagatatgggttctgtagccttggatgcagggactgccaaagacagcttatctcctgtgctgcacccttctgatttgatcctgactcgaggaaccttggatgaagaggatgaggaagcagacagcgatactgatgacattgaccacagagttacagaggaaagccatgaagagccagcattccagaattttatgcaagaatcgatggcacaatactggaagagaaacaataaataggagactttagcacacttcacttgtttctagaagtccagaattttggacctccacgtgaaagaactgttcttacctctgaactgggggctcccataagggataattttcctcagagtagcaaagtttctcttattagagaaatcttgtgactcagatgaagtca

SEQ ID NO: 138550 - DNA, 984 bp, Homo sapiens
  Payload ID: 7149
  Gene Symbol: GPN1
  Gene Name: GPN-loop GTPase 1
  Uniprot ID: Q9HCN4
  ENST ID: ENST00000503738
  CDS Start-End: 136-975
gaataagcccgagcagccggtcctccagtggctccgctccccgttctctgtgggctcaaaatgacaggcatgctcctcgacacctgcatgcccaaggcactccaccgtatgtgatcaacctggatccagcagtacatgaagttccctttcctgccaatattggtgatgaaatttattgagaaggcccagaacatgtccaaatatgtgttgattgacacacctggacagattgaggtattcacctggtcagcttctgggacaattatcactgaagcccttgcatcctcatttccaacagttgtcatctatgtaatggacacatcgagaagtaccaacccagtgaccttcatgtccaacatgctctatgcctgcagcatcttatacaaaaccaagctgcctttcattgtggtcatgaataaaactgacatcattgaccacagctttgcagtggaatggatgcaggattttgaggctttccaagatgccttgaatcaagagactacatacgtcagtaacctgactcgttcaatgagcctggtgttagatgagttttacagctcactcagggtggtgggtgtctctgctgttctgggtactggattagatgaactctttgtgcaagttaccagtgctgccgaagaatatgaaagggagtatcgtcctgaatatgaacgtctgaaaaaatcactggccaacgcagagagccaacagcagagagaacaactggaacgccttcgaaaagatatgggttctgtagccttggatgcagggactgccaaagacagcttatctcctgtgctgcacccttctgatttgatcctgactcgaggaaccttggatgaagaggatgaggaagcagacagcgatactgatgacattgaccacagagttacagaggaaagccatgaagagccagcattccagaattttatgcaagaatcgatggcacaatactggaagagaaacaataaataggagacttta

SEQ ID NO: 138551 - DNA, 1778 bp, Homo sapiens
  Payload ID: 7149
  Gene Symbol: GPN1
  Gene Name: GPN-loop GTPase 1
  Uniprot ID: Q9HCN4
  ENST ID: ENST00000610189
  CDS Start-End: 8-1132
gaggaagatggcggcgtccgcagctgccgctgagctccaggcttctgggggtccgcggcacccagtgtgtctgttggtgttgggaatggcgggatccgggaaaaccacttttgtacagaggctcacaggacacctgcatgcccaaggcactccaccgtatgtgatcaacctggatccagcagtacatgaagttccctttcctgccaatattgatattcgtgatactgtaaagtataaagaagtaatgaaacaatatggacttggacccaatggcggcatagtgacctcactcaatctctttgctaccagatttgatcaggtgatgaaatttattgagaaggcccagaacatgtccaaatatgtgttgattgacacacctggacagattgaggtattcacctggtcagcttctgggacaattatcactgaagcccttgcatcctcatttccaacagttgtcatctatgtaatggacacatcgagaagtaccaacccagtgaccttcatgtccaacatgctctatgcctgcagcatcttatacaaaaccaagctgcctttcattgtggtcatgaataaaactgacatcattgaccacagctttgcagtggaatggatgcaggattttgaggctttccaagatgccttgaatcaagagactacatacgtcagtaacctgactcgttcaatgagcctggtgttagatgagttttacagctcactcagggtggtgggtgtctctgctgttctgggtactggattagatgaactctttgtgcaagttaccagtgctgccgaagaatatgaaagggagtatcgtcctgaatatgaacgtctgaaaaaatcactggccaacgcagagagccaacagcagagagaacaactggaacgccttcgaaaagatatgggttctgtagccttggatgcagggactgccaaagacagcttatctcctgtgctgcacccttctgatttgatcctgactcgaggaaccttggatgaagaggatgaggaagcagacagcgatactgatgacattgaccacagagttacagaggaaagccatgaagagccagcattccagaattttatgcaagaatcgatggcacaatactggaagagaaacaataaataggagactttagcacacttcacttgtttctagaagtccagaattttggacctccacgtgaaagaactgttcttacctctgaactgggggctcccataagggataattttcctcagagtagcaaagtttctcttattagagaaatcttgtgactcagatgaagtcagggatagaagacccttggacctggcaggttaatgctgattattccttggcctttcccttgtatttatgcaaggaaggatatactgagctgatactcttccaagcctacaacttcaagttttatcatttgaactcaagtacttttgctgctgaggaatggaatcaaaagaacgtagtctcctggtgaccacctcagatctctattattaggctagatgtatagcctctactcccccagcttcttgctcttgaccctgcactgtaagttgcccttctattagcagccaaggaaaagggaaacatgagcttatccagaacggtggcagagtctccttggcaatcaaccaacgttgctatgaaatatgcctcacactgtatagctcattataggacgtcaggtttgttgaaaaaagtgggcaagacatgattaatgaatcagaatcctgtttcattggtgacttggataaagactttttaattttaa

SEQ ID NO: 138552 - DNA, 1832 bp, Homo sapiens
  Payload ID: 7149
  Gene Symbol: GPN1
  Gene Name: GPN-loop GTPase 1
  Uniprot ID: Q9HCN4
  ENST ID: ENST00000616939
  CDS Start-End: 22-1188
attgcggaagtttctctacccatgcggtgtctctatggtcgggtgggtggggccaggaggaagatggcggcgtccgcagctgccgctgagctccaggcttctgggggtccgcggcacccagtgtgtctgttggtgttgggaatggcgggatccgggaaaaccacttttgtacagaggctcacaggacacctgcatgcccaaggcactccaccgtatgtgatcaacctggatccagcagtacatgaagttccctttcctgccaatattgatattcgtgatactgtaaagtataaagaagtaatgaaacaatatggacttggacccaatggcggcatagtgacctcactcaatctctttgctaccagatttgatcaggtgatgaaatttattgagaaggcccagaacatgtccaaatatgtgttgattgacacacctggacagattgaggtattcacctggtcagcttctgggacaattatcactgaagcccttgcatcctcatttccaacagttgtcatctatgtaatggacacatcgagaagtaccaacccagtgaccttcatgtccaacatgctctatgcctgcagcatcttatacaaaaccaagctgcctttcattgtggtcatgaataaaactgacatcattgaccacagctttgcagtggaatggatgcaggattttgaggctttccaagatgccttgaatcaagagactacatacgtcagtaacctgactcgttcaatgagcctggtgttagatgagttttacagctcactcagggtggtgggtgtctctgctgttctgggtactggattagatgaactctttgtgcaagttaccagtgctgccgaagaatatgaaagggagtatcgtcctgaatatgaacgtctgaaaaaatcactggccaacgcagagagccaacagcagagagaacaactggaacgccttcgaaaagatatgggttctgtagccttggatgcagggactgccaaagacagcttatctcctgtgctgcacccttctgatttgatcctgactcgaggaaccttggatgaagaggatgaggaagcagacagcgatactgatgacattgaccacagagttacagaggaaagccatgaagagccagcattccagaattttatgcaagaatcgatggcacaatactggaagagaaacaataaataggagactttagcacacttcacttgtttctagaagtccagaattttggacctccacgtgaaagaactgttcttacctctgaactgggggctcccataagggataattttcctcagagtagcaaagtttctcttattagagaaatcttgtgactcagatgaagtcagggatagaagacccttggacctggcaggttaatgctgattattccttggcctttcccttgtatttatgcaaggaaggatatactgagctgatactcttccaagcctacaacttcaagttttatcatttgaactcaagtacttttgctgctgaggaatggaatcaaaagaacgtagtctcctggtgaccacctcagatctctattattaggctagatgtatagcctctactcccccagcttcttgctcttgaccctgcactgtaagttgcccttctattagcagccaaggaaaagggaaacatgagcttatccagaacggtggcagagtctccttggcaatcaaccaacgttgctatgaaatatgcctcacactgtatagctcattataggacgtcaggtttgttgaaaaaagtgggcaagacatgattaatgaatcagaatcctgtttcattggtgacttggataaagactttttaatttt

SEQ ID NO: 138553 - DNA, 715 bp, Homo sapiens
  Payload ID: 7150
  Gene Symbol: GPN2
  Gene Name: GPN-loop GTPase 2
  ENST ID: ENST00000374133
  CDS Start-End: 19-414
gagaaatggagtttcaccatgttggctggtcttgaactcctgacctcagccttcaacctggactactacacagaggttctggacctctcctacctgcttgaccacctggcttctgaccctttcttccgccactaccgccagctcaatgagaagctagtgcagctcatcgaagactatagccttgtctcctttatccctctcaacatccaggacaaggagagcatccagcgagtcctgcaggctgtggataaagccaatggatactgtttcagagcccaagagcagcgaagcttggaagccatgatgtctgccgcaatgggagccgacttccatttctcttccacactgggcatccaggagaagtacctggcaccctcgaaccagtcagtggagcaggaagccatgcagctgtagcaacaaggtggaccctggagagcaggatgcataatccagcactggggaaagtggaggctcctgatgcaggctgcagacccaagagcaagtcctcccagccagagctggcgggctggcaaggggatattcagctctgcaaaggacttctggccaaaaagccagacatggtgccaagcagaacaccccccatactgtcagtggtgtccgtgagctctgggccctgccaccagaaagtcgagcactggtcctagtcaggctgtgatgaaatgtgctacaatacaagagtttattttctactttt

SEQ ID NO: 138554 - DNA, 4678 bp, Homo sapiens
  Payload ID: 7150
  Gene Symbol: GPN2
  Gene Name: GPN-loop GTPase 2
  Uniprot ID: Q9H9Y4
  ENST ID: ENST00000374135
  CDS Start-End: 202-1134
ccggaagtcgagttagtctagttagtatcggcctgttatctccttttgcgcgacacggtctcagctgttccgcctgaggcgagtgacgctggccgccaacgaggtatacgtactgggaccctcgccctcagtctcgtctccggcgcggctacctgccccgttttccctgtgagttgacctgctccgggccgcgggccgccaatggcaggggccgctccgaccacggccttcgggcaggcggtgatcggcccgccgggctcagggaagaccacgtactgcctgggcatgagtgagttcctgcgcgcgctgggccggcgcgtggcggtggtgaacctggacccggccaacgaggggctgccgtacgagtgtgccgtggacgtgggcgagctggtggggctgggcgacgtgatggacgcgctgcgcctggggcccaacggcggcctgctctactgcatggagtacctggaagccaacctggactggctgcgtgccaagctcgaccccctccgcggccactacttcctcttcgactgcccaggccaggtggagctctgcacgcatcacggcgccttgcgcagcatcttctcccaaatggcgcagtgggacctcaggctgactgccgtccacctcgtggattctcactactgcacagaccctgccaagttcatttcagtactgtgtacctccctggccaccatgctgcacgtggaactgccccacatcaacctcctttccaagatggacctcattgagcattatgggaagctggccttcaacctggactactacacagaggttctggacctctcctacctgcttgaccacctggcttctgaccctttcttccgccactaccgccagctcaatgagaagctagtgcagctcatcgaagactatagccttgtctcctttatccctctcaacatccaggacaaggagagcatccagcgagtcctgcaggctgtggataaagccaatggatactgtttcagagcccaagagcagcgaagcttggaagccatgatgtctgccgcaatgggagccgacttccatttctcttccacactgggcatccaggagaagtacctggcaccctcgaaccagtcagtggagcaggaagccatgcagctgtagcaacaaggtggaccctggagagcaggatgcataatccagcactggggaaagtggaggctcctgatgcaggctgcagacccaagagcaagtcctcccagccagagctggcgggctggcaaggggatattcagctctgcaaaggacttctggccaaaaagccagacatggtgccaagcagaacaccccccatactgtcagtggtgtccgtgagctctgggccctgccaccagaaagtcgagcactggtcctagtcaggctgtgatgaaatgtgctacaatacaagagtttattttctactttttgtgacttccaaacttttcttcagtcttccgggcccaggggtttggggaagaatgagggagtgtcacctagccttggaataatcagtatttccccaaagcatataattcacattcagtcacataggatttacattcagtctccagtcatgtgtttttattaatcttcagtttttggttctgaggtttgttttttaaaagatggggtcttgctatatggcccaggctggactcaaactcctgggctcatgtgatcttcccgcctcagacgcctgagtaactgggactacaggtgtgagccaccatgtcccacaattttcagttttaacagagcctcaagcttcagctttcacaggcaacacttcctaactagaactttgttaatgttttatattcactgtatttgttttatggttttattctattgttgacaagtgttaactagttttccatttacagtagtggttaaaagtttacttcaaggctgggtgcggtggctcacgcctgtaatcccagcactttgggaggccgaggcaggcggatcccaaggtcaagagatcgagaccatcctggccaacatggtgaaaccccatctctaccaaaaaatttttttaattagctgggcataggtggcgcgtacctgtagttccagctacttgggaggctgaggcaggagaatcatttgaacccaggagtcagaggttacagtgagctgagattgcaccactgcactccagcctggtgacagagcgagactttgtctcaaaaaaaaggtgtacttcaaaaatgaaatacaaggctgggcgtgttcactcatgcctgtaagcccagcactttgggaggctgaggcgggcggatcacctgaggtcaggagttcgagaccagcctggccaacatggtgaaacccctctctactaaaaacataaaaattagctgggcatggtgttgcacgcctataatcccagctattggggaggctgaggcagaagaattgcttgaacccaggaggcggaggttgcagtgagccaagattgtgcctacattccaacctgggcgacagagcaagactctgtctcaaaaaaaaatagtaagttgtgtaaagaaaaatattaattatataatatggcagttcctatgagagtgtggcaaaaatcaagagggcttggaagttttttctttgctcttgcaactggctggatgcagttcatatatttttcaaccagtaggtggcaccccaacctaattttttgcagttgtaacctggtggcagaaggggcaggactgatggcttgggcaagactgttatgccaagttttatttgcatgtatttggactttctttttttggagacaaagtctctctctgtcgcccaggctggagtccagtggcacaatctcggctcactgcaacctccgcctcccaggttcaagcaattctctgcctcagcctcccgagtagctgggattacaggcgcctaccacatgcccggctaatttttgtatttttagtaaagacggggtttcaccatgttgttcaggctggtcttgaactactgacctcatgatttacccgccttggcctcccaaagtgctgggattacaggcgtgagccactgcacccggccacatttggacttattaacacatatgaagtgcttggtattttagagtgcttccacacacacaatcctcattagagatagacaggatggggagaattaataagccattgcccgtgttacagtgaggaagcagaaagatgagaagtttgaactttggtcagcctggctttctcataacccattttgctgactaaattgcgagtatccctcctttggtatatttattggtgagaagtcacagcccttgtcccacaggttttgcagccaatcaggagaaagaaattaggcacctgtaaagtattactgaatcatagatagttcaccagtggtttgggcagttggcaaattaatttagggacatctgttctgaaacagcattgaaataggactgactgctttgctttctggttgtggcagccagagccaaaggcagatgaatgaggggctatgaggaggctactgtggctggaacagtatgaaagcaacctcagctcccacgcctggctgtaaaggggataataactgggtgctgcttcccagcctctttcatctgagaagttcaaagcacctcacccctattaacaccccacagagtaggtaggaagtaccaatagagcaagccaggaaaactgaggccaggaggcacagcctggggctagctgtgaatcacctgtggggcctagagcccaggaatcctgacgcccaggctactggacaaatcctttatcagggcattagggtgggtgctatgcttttgaaagcagtaccaacggctgtggtcgtgggttttgatgcttgccactcacagaggccccagctctcaccataacaaaccaaatgggggctggaaggcatcctttacaactttatggtctcgtatgcaagcaccctcagcattctctgcacccatggagtggagatgggtgggagtaatccaaggcctttattttcaggccatggtttgacagcaagggtattttcttccccaataaacgtagcttctgtctaccttccactggcagcaaaatgattttctgttctctgcatatactgaggggatctgcacagtgcagaaaggaagatgtccgagatccaagtgaggcctgttcagtgtgaaatgtctagggtagaagaaagaccatcctccattatggctggcatgtggcagtcatccttaagattatttttaaatttcctaataaatataggaaagtaaaaaacttagaaaatgaaagagaaggccgagcacggtggctcacgcctgtaatcccagcactttgggaggccaaggcgggctgatcacctgaggtcaggagtgtaagacaagcctgaccaacatggtgaaaacctgtctctgctaaaaatacaaaaaaatgagcagggcatggtggcatgcgcctgtaattccagctacttaggagactgaggcaggagaatcgcttgaacctgggaggcggaagtttcagtgagcggagatcgcgccattgcactccagcctgggtaacaagatggaaagtacatctcaaaaaaaaaaaaaacgaaaatgagtcacccagaatcccataacggaaactttctatggggtcatctgtttaagagaaaaataaattctatattcaaatgt

SEQ ID NO: 138555 - DNA, 739 bp, Homo sapiens
  Payload ID: 7150
  Gene Symbol: GPN2
  Gene Name: GPN-loop GTPase 2
  ENST ID: ENST00000431781
  CDS Start-End: 165-503
atctccttttgcgcgacacggtctcagctgttccgcctgaggcgagtgacgctggccgccaacgaggtatacgtactgggaccctcgccctcagtctcgtctccggcgcggctacctgccccgttttccctgtgagttgacctgctccgggccgcgggccgccaatggcaggggccgctccgaccacggccttcgggcaggcggtgatcggcccgccgggctcagggaagaccacgtactgcctgggcatgagtgagttcctgcgcgcgctgggccggcgcgtggcggtggtgaacctggacccggccaacgaggggcgccttgcgcagcatcttctcccaaatggcgcagtgggacctcaggctgactgccgtccacctcgtggattctcactactgcacagaccctgccaagttcatttcagtactgtgtacctccctggccaccatgctgcacgtggaactgccccacatcaacctcctttccaagatggacctcattgagcattatgggaagctggccttcaacctggactactacacagaggttctggacctctcctacctgcttgaccacctggcttctgaccctttcttccgccactaccgccagctcaatgagaagctagtgcagctcatcgaagactatagccttgtctcctttatccctctcaacatccaggacaaggagagcatccagcgagtcctgcaggctgtggataaagccaatggatactgtt

SEQ ID NO: 138556 - DNA, 1468 bp, Homo sapiens
  Payload ID: 7151
  Gene Symbol: GPN3
  Gene Name: GPN-loop GTPase 3
  Uniprot ID: Q9UHW5
  ENST ID: ENST00000228827
  CDS Start-End: 64-918
ccggagctcagtgggcgtcgcgcgaaggctaagggagtgtggcgggcggctccgggagccaacatgcctcggtatgcgcagctggtcatgggccccgcgggcagcgggaagagcacctactgtgccaccatggtccagcactgtgaagccctcaaccggtctgtccaagttgtaaacctggatccagcagcagaacacttcaactactccgtgatggctgacatccgggaactgatcgaggtggatgatgtaatggaggatgattctctgcgattcggtcccaacggaggattggtattttgcatggagtactttgccaataattttgactggctggagaactgtcttggccatgtagaggacgactatatcctttttgattgtccaggtcagattgagttgtacactcacctgcctgtgatgaaacagctggtccagcagctcgagcagtgggagttccgagtctgtggagtttttcttgttgattctcagttcatggtggagtcattcaagtttatttctggcatcttggcagccctgagtgccatgatctctctagaaattccgcaagtcaacatcatgacaaaaatggatctgctgagtaaaaaagcaaaaaaggaaattgagaaatttttagatccagacatgtattctttattagaagattctacaagtgacttaagaagcaaaaaattcaagaaactgactaaagctatatgtggactgattgatgactacagcatggttcgatttttaccttacgatcagtcagatgaagaaagcatgaacattgtattgcagcatattgattttgccattcaatatggagaagacctagaatttaaagaaccaaaggaacgtgaagatgagtcttcctctatgtttgacgaatattttcaagaatgccaggatgaatgaagagtttactaaaagtaaccatctaaagagcttgtggccaaaccagcagaacattcttctcttcaaaggatgcaatagtagaaagctacttattttaatgaaaaaaagtaaaacttcgttctttatcagcctcatgcctgaatcaaatttttaattattctgaaactgctgctgtttaaagtggaatcttttagtattataacagcatcactttagattttgtaagtcaaaattgaaatgaatgcacatagatttatatataaattagcacctgagctaaggttaaggctggtctaaacttattttcactttttgtattatttttgagatgcaggaattactgtaacaaaatatgtatgtccgaagggaaaaagctgcaaggatatatataagaccactgcttatctgtatcttcccattttcctatattgaaaatgtatattatttatataacttaaaaagtaaaaataactatgttttgagatatgtatgtgtatatataaaagaaacaaaggtttttaatgattcttggacctagataacaagtaca

SEQ ID NO: 138557 - DNA, 1604 bp, Homo sapiens
  Payload ID: 7151
  Gene Symbol: GPN3
  Gene Name: GPN-loop GTPase 3
  Uniprot ID: Q9UHW5
  ENST ID: ENST00000543199
  CDS Start-End: 86-1057
ggaggggcaggagcgctgcggtcgctgagcgtttgcacgtttgcacctctctgtggaagcagtgcgtcacaggagggaaatatacatgctccccaaaacaagaggtgccttccacttcagtattccagatcctcagcacatttgcaaatcgcgagggtcaccatacaggtcaaacgtctgcacgcaaaccacggaccgaagcacgtggcgcaaggatgcggagctttatctgttgtccgttattactcagagcacctactgtgccaccatggtccagcactgtgaagccctcaaccggtctgtccaagttgtaaacctggatccagcagcagaacacttcaactactccgtgatggctgacatccgggaactgatcgaggtggatgatgtaatggaggatgattctctgcgattcggtcccaacggaggattggtattttgcatggagtactttgccaataattttgactggctggagaactgtcttggccatgtagaggacgactatatcctttttgattgtccaggtcagattgagttgtacactcacctgcctgtgatgaaacagctggtccagcagctcgagcagtgggagttccgagtctgtggagtttttcttgttgattctcagttcatggtggagtcattcaagtttatttctggcatcttggcagccctgagtgccatgatctctctagaaattccgcaagtcaacatcatgacaaaaatggatctgctgagtaaaaaagcaaaaaaggaaattgagaaatttttagatccagacatgtattctttattagaagattctacaagtgacttaagaagcaaaaaattcaagaaactgactaaagctatatgtggactgattgatgactacagcatggttcgatttttaccttacgatcagtcagatgaagaaagcatgaacattgtattgcagcatattgattttgccattcaatatggagaagacctagaatttaaagaaccaaaggaacgtgaagatgagtcttcctctatgtttgacgaatattttcaagaatgccaggatgaatgaagagtttactaaaagtaaccatctaaagagcttgtggccaaaccagcagaacattcttctcttcaaaggatgcaatagtagaaagctacttattttaatgaaaaaaagtaaaacttcgttctttatcagcctcatgcctgaatcaaatttttaattattctgaaactgctgctgtttaaagtggaatcttttagtattataacagcatcactttagattttgtaagtcaaaattgaaatgaatgcacatagatttatatataaattagcacctgagctaaggttaaggctggtctaaacttattttcactttttgtattatttttgagatgcaggaattactgtaacaaaatatgtatgtccgaagggaaaaagctgcaaggatatatataagaccactgcttatctgtatcttcccattttcctatattgaaaatgtatattatttatataacttaaaaagtaaaaataactatgttttgagatatgtatgtgtatatataaaagaaacaaaggtttttaatgattcttggacctagataacaagt

SEQ ID NO: 138558 - DNA, 1491 bp, Homo sapiens
  Payload ID: 7151
  Gene Symbol: GPN3
  Gene Name: GPN-loop GTPase 3
  Uniprot ID: Q9UHW5
  ENST ID: ENST00000537466
  CDS Start-End: 62-946
ggagctcagtgggcgtcgcgcgaaggctaagggagtgtggcgggcggctccgggagccaacatgcctcggtatgcgcagctggtcatgggccccgcgggcagcgggaaggtgaggatctgcggggacaaggagagaaaaagcacctactgtgccaccatggtccagcactgtgaagccctcaaccggtctgtccaagttgtaaacctggatccagcagcagaacacttcaactactccgtgatggctgacatccgggaactgatcgaggtggatgatgtaatggaggatgattctctgcgattcggtcccaacggaggattggtattttgcatggagtactttgccaataattttgactggctggagaactgtcttggccatgtagaggacgactatatcctttttgattgtccaggtcagattgagttgtacactcacctgcctgtgatgaaacagctggtccagcagctcgagcagtgggagttccgagtctgtggagtttttcttgttgattctcagttcatggtggagtcattcaagtttatttctggcatcttggcagccctgagtgccatgatctctctagaaattccgcaagtcaacatcatgacaaaaatggatctgctgagtaaaaaagcaaaaaaggaaattgagaaatttttagatccagacatgtattctttattagaagattctacaagtgacttaagaagcaaaaaattcaagaaactgactaaagctatatgtggactgattgatgactacagcatggttcgatttttaccttacgatcagtcagatgaagaaagcatgaacattgtattgcagcatattgattttgccattcaatatggagaagacctagaatttaaagaaccaaaggaacgtgaagatgagtcttcctctatgtttgacgaatattttcaagaatgccaggatgaatgaagagtttactaaaagtaaccatctaaagagcttgtggccaaaccagcagaacattcttctcttcaaaggatgcaatagtagaaagctacttattttaatgaaaaaaagtaaaacttcgttctttatcagcctcatgcctgaatcaaatttttaattattctgaaactgctgctgtttaaagtggaatcttttagtattataacagcatcactttagattttgtaagtcaaaattgaaatgaatgcacatagatttatatataaattagcacctgagctaaggttaaggctggtctaaacttattttcactttttgtattatttttgagatgcaggaattactgtaacaaaatatgtatgtccgaagggaaaaagctgcaaggatatatataagaccactgcttatctgtatcttcccattttcctatattgaaaatgtatattatttatataacttaaaaagtaaaaataactatgttttgagatatgtatgtgtatatataaaagaaacaaaggtttttaatgattcttggacctagataacaa

SEQ ID NO: 138559 - DNA, 564 bp, Homo sapiens
  Payload ID: 7151
  Gene Symbol: GPN3
  Gene Name: GPN-loop GTPase 3
  ENST ID: ENST00000550974
  CDS Start-End: 88-564
ggagctcagtgggcgtcgcgcgaaggctaagggagtgtggcgggcggctccgggagccaacatgcctcgagcacctactgtgccaccatggtccagcactgtgaagccctcaaccggtctgtccaagttgtaaacctggatccagcagcagaacacttcaactactccgtgatggctgacatccgggaactgatcgaggtggatgatgtaatggaggatgattctctgcgattcggtcccaacggaggattggtattttgcatggagtactttgccaataattttgactggctggagaactgtcttggccatgtagaggacgactatatcctttttgattgtccaggtcagattgagttgtacactcacctgcctgtgatgaaacagctggtccagcagctcgagcagtgggagttccgagtctgtggagtttttcttgttgattctcagttcatggtggagtcattcaagtttatttctggcatcttggcagccctgagtgccatgatctctctagaaattccgcaagtcaacatcatgacaaaaatggatctgctgagtaaa

SEQ ID NO: 138560 - DNA, 833 bp, Homo sapiens
  Payload ID: 7151
  Gene Symbol: GPN3
  Gene Name: GPN-loop GTPase 3
  ENST ID: ENST00000551079
  CDS Start-End: 1-363
tttatttctggcatcttggcagccctgagtgccatgatctctctagaaattccgcaagtcaacatcatgacaaaaatggatctgctgagtaaaaaagcaaaaaaggaaattgagaaatttttagatccagacatgtattctttattagaagattctacaagtgacttaagaagcaaaaaattcaagaaactgactaaagctatatgtggactgtcagatgaagaaagcatgaacattgtattgcagcatattgattttgccattcaatatggagaagacctagaatttaaagaaccaaaggaacgtgaagatgagtcttcctctatgtttgacgaatattttcaagaatgccaggatgaatgaagagtttactaaaagtaaccatctaaagagcttgtggccaaaccagcagaacattcttctcttcaaaggatgcaatagtagaaagctacttattttaatgaaaaaaagtaaaacttcgttctttatcagcctcatgcctgaatcaaatttttaattattctgaaactgctgctgtttaaagtggaatcttttagtattataacagcatcactttagattttgtaagtcaaaattgaaatgaatgcacatagatttatatataaattagcacctgagctaaggttaaggctggtctaaacttattttcactttttgtattatttttgagatgcaggaattactgtaacaaaatatgtatgtccgaagggaaaaagctgcaaggatatatataagaccactgcttatctgtatcttcccattttcctatattgaaaatgtatattatttatataacttaaaaagtaaaaata

SEQ ID NO: 138561 - DNA, 353 bp, Homo sapiens
  Payload ID: 7151
  Gene Symbol: GPN3
  Gene Name: GPN-loop GTPase 3
  ENST ID: ENST00000550228
  CDS Start-End: 1-353
acatccgggaactgatcgaggtggatgatgtaatggaggatgattctctgcgattcggtcccaacggaggattggtattttgcatggagtactttgccaataattttgactggctggagaactgtcttggccatgtagaggacgactatatcctttttgattgtccaggtcagattgagttgtacactcacctgcctgtgatgaaacagctggtccagcagctcgagcagtgggagttccgagtctgtggagtttttcttgttgattctcagttcatggtggagtcattcaagattgatgactacagcatggttcgatttttaccttacgatcagtcagatgaagaaagcatg

SEQ ID NO: 138562 - DNA, 497 bp, Homo sapiens
  Payload ID: 7151
  Gene Symbol: GPN3
  Gene Name: GPN-loop GTPase 3
  ENST ID: ENST00000549963
  CDS Start-End: 421-497
aggggcaggagcgctgcggtcgctgagcgtttgcacgtttgcacctctctgtggaagcagtgcgtcacaggagggaaatatacatgctccccaaaacaagaggtgccttccacttcagtattccagatcctcagcacatttgcaaatcgcgagggtcaccatacaggtcaaacgtctgcacgcaaaccacggaccgaagcacgtggcgcaaggatgcggagctttatctgttgtccgttattactcaggacgcgtttctcacgggatttggcccgcgggctgccccgtagtaggaggtgtggtagaactggaggcgtagaaagaatgtggattgcgattggttcgcacttcactttcccggagctcagtgggcgtcgcgcgaaggctaagggagtgtggcgggcggctccgggagccaacatgcctcggtatgcgcagctggtcatgggccccgcgggcagcgggaagagcacctactgtgccaccatggtccagca

SEQ ID NO: 138563 - DNA, 2113 bp, Homo sapiens
  Payload ID: 7152
  Gene Symbol: GPR75-ASB3
  Gene Name: GPR75-ASB3 readthrough
  ENST ID: ENST00000406625
  CDS Start-End: 233-1903
aaaactgcgagcctgaaaaacctggctcaagcgcccctcgtgaggcgggcagcgggagtggccgggctctgggccccaggaggcaggcgacggaggcgcggagggtgcggggcgcaggcgggacgccaggcccgggtgtccggcggagggggcggtgccctcggcgtctccgtgactgcgcctctgcgcccgcgtcttgccgcggctcccgggatgcgcggaggcggtggcgatggcgatgatgcctctagtcctgcatcatccagagcggcaggcggagctggggtccggactgcgagatggaggaggggcggcgctgcggccacccggcagactggtcaaacaaatggattttacagaggcttacgcggacacgtgctctacagttggacttgctgccagggaaggcaatgttaaagtcttaaggaaactgctcaaaaagggccgaagtgtcgatgttgctgataacaggggatggatgccaattcatgaagcagcttatcacaactctgtagaatgtttgcaaatgttaattaatgcagattcatctgaaaactacattaagatgaagacctttgaaggtttctgtgctttgcatctcgctgcaagtcaaggacattggaaaatcgtacagattcttttagaagctggggcagatcctaatgcaactactttagaagaaacgacaccattgtttttagctgttgaaaatggacagatagatgtgttaaggctgttgcttcaacacggagcaaatgttaatggatcccattctatgtgtggatggaactccttgcaccaggcttcttttcaggaaaatgctgagatcataaaattgcttcttagaaaaggagcaaacaaggaatgccaggatgactttggaatcacacctttatttgtggctgctcagtatggcaagctagaaagcttgagcatacttatttcatcgggtgcaaatgtcaattgtcaagccttggacaaagctacacccttgttcattgctgctcaagagggacacacaaaatgtgtggagcttttgctctccagtggggcagatcctgatctttactgtaatgaggacagttggcagttacctattcatgcagctgcacaaatgggccatacaaaaatcttggacttgttaataccacttactaaccgggcctgtgacactgggctaaacaaagtaagccctgtttactcagcagtgtttgggggacatgaagattgcctagaaatattactccggaatggctacagcccagacgcccaggcgtgccttgtttttggattcagttctcctgtgtgcatggctttccaaaaggactgtgagttctttggaattgtgaacattcttttgaaatatggagcccagataaatgaacttcatttggcatactgcctgaagtacgagaagttttcgatatttcgctactttttgaggaaaggttgctcattgggaccatggaaccatatatatgaatttgtaaatcatgcaattaaagcacaagcaaaatataaggagtggttgccacatcttctggttgctggatttgacccactgattctactgtgcaattcttggattgactcagtcagcattgacacccttatcttcactttggagtttactaattggaagacacttgcaccagctgttgaaaggatgctctctgctcgtgcctcaaacgcttggattctacagcaacatattgccactgttccatccctgacccatctttgtcgtttggaaattcggtccagtctaaaatcagaacgtctacggtctgacagttatattagtcagctgccacttcccagaagcctacataattatttgctctatgaagacgttctgaggatgtatgaagttccagaactggcagctattcaagatggataaatcagtgaaactacttaacacagctaatttttttctctgaaaaatcatcgagacaaaagagccacagagtacaagtttttatgattttatagtcaaaagatgattattgattgtgagataggttaggttttggggggccagtagttcagtgagaatgtttatgtttacaactagccttcccagtaaaaaaaaaaaaaaaaaaaaaaaaaa

SEQ ID NO: 138564 - DNA, 6260 bp, Homo sapiens
  Payload ID: 7153
  Gene Symbol: GPRIN3
  Gene Name: GPRIN family member 3
  Uniprot ID: Q6ZVF9
  ENST ID: ENST00000333209
  CDS Start-End: 1085-3415
ggttacttaaatttcgtatcttgtaaactatgtttttatatttgttatccattttttcaatggattatttgatctcctcataaatgttaaagagctcctgctatattataggtatttttgcctgccctctagggttatacactttttatttcccccaaaatcttgtattttttatagcatcttttgtcatgccataaaattcaggttttgaattttatttagtcacctatgtttgttttctcttacagtgtttctaccatctcagaaaaagcctagctcacctgtctctagattacatttatgattcgtaggttttcttatatgattttatttatttattttatattttaacctttaatccactgcatccatctaggatttatttttggaattggtataatataaacatctacttttcttttcttccagatgcatgaacagtttgccaactccttctatgaaataactcagcctttcaccaccaaattgtaatacttcttttgtcatagattaagtccccatttatatttggatctatccctagatttcttatttcacatatctgtttatgcctacttcaatacttacttattgatttaattagagtggctttacaggattttctgacatctgctaagtcagattacaccaataacttttgaggtagttagcaaacttaggtagatacatgaaaaacctatttgctagacattagtgggatgcaagcagaaactaatatatcaaaataatattttcgtaattataatttttttcaaaatctttttctcaagtctatttttatttatttatttttcttctccctccccacaaggtctatttttatatcaacaggtatgggaagaaaagtttttaatgtgctcttataaaaacgacagtttggtttatttttcaatccttaagcgacgtactgtattaatgatgctgtttccttgattcacaggctggttcttcagaggaatcatccctgactgtgtcatcactctgagctctgactgcgctcccctcccccaccagtgggaccagtactcaagagagctctggagtgctcctgaagagaaattccatggggactgtacctgaccctctgagatcagctaaaacttccctgattgcagcttccggaaaagaagacgatctaggagagccacaggctgcctcacctcggcatcgaccagctctcctgtgtaagaatgccaatggcttttcaggtgcccctgcagaaccagacctcagccccagggcagctgccgaagccctgatgcaggtttgtgagcatgagaccacccaaccagatatgtcttctcctggtgtgttcaatgaagtgcagaaagcacctgccacattcaactctcccggcaatccccagctgccagggagcagccagcccgcagcatcagccccgagttctgcagcaggaagggatcttatacacacaccattgacaatgcccgccaatcagcacacctgccagtccatcccaggtgatcagcccaatgccatcacctcatccatgcctgaagattccctgatgagatcacagagaacctcaaatagagagcaacctgagaaaccaagttgtcctgtgggaggcgtcctcagtagcagcaaagatcaggtgtcctgtgagtttccttctccagaaacaatccagggaacagtgcagactccagtgacagcagccagggtggtcagtcactcatcctctcctgtaggtggacctgaaggggaaaggcagggagccatctgtgactctgaaatgaggtcctgtaaacctctaactagagaatctggatgttcagagaacaagcagccctctgtcactgcctcgggcccccaaggcacaacttctgtgacacctcaaccaacccccctcactagcgaaccttcggcatgtcccccaggtccagagaaggtgccgctgccagcacagcgtcagatgtcaaggttcaaagaagccagtacgatgaccaaccaagctgaaagtgaaatcaaggaagttcccagcagggcttggcaagatgcggaggtgcaggcagtggcgagtgtcgagagcagatccgtctccaccagccccagtatcctcactgcatttctgaaggaaagccgtgctcctgagcattttgaacaagagcagctgcgtgtcatttgccacagcagtgggagccacacactggagctctctgacagcacgctagccccccaggagtccagccagtgccctggcatcatgccacaggtgcacattcaggcagctgcagctgagtctacagctttccaacgggaaaataaacttgcgagcctaccaggtggggtccttaaaacctcatcaatcaatttggtctccagtaatgcccagcatacgtgtaaagaagatgggaggttagcaggaatgactccagtgagggaagagtcaactgctaaaaagctcgcaggtactaattctagctccctgaaagctaccgccattgaccagatttctatcagtgcatgcagtcaagctgaaacaagttatggattggggaaatttgaaaccaggccatctgagtttgcagagaaaacgacaaacggccacaaaacagacccagattgcaaactatctgactcttgtggctctatcagcaaagctgatcattctgggagcttggatcccactaataaaggagatgcaagggaaaagaagcctgcatctcctcaggtagtaaaagaaaaagagtctactggcactgatacctcggatgccaaaaccctactgctcaatcctaaatcccaagaaagtggaggcacagaatcagctgctaatcctacaccctccccaattaggaagaaccaggagagcaccttagaagaaaacagacagaccaagacagccaccagcctgagcctgccatctgatcccatgggtgactccagcccaggttctggcaagaagaccccatctcgctccgtcaaagccagcccacgcaggcccagccgcgtcagcgagttcctcaaggagcaaaagttaaatgtgacagcagctgctgctcaggtaggactcactccaggagataagaaaaagcagcttggcgcagactccaagctccagctgaaacagtccaagcgtgtcagggacgtcgtgtgggatgagcagggaatgacctgggaagtgtatggtgcatccttggacgcagagtccctgggaatcgcgatccagaaccatttgcaaagacaaatcagggaacatgagaaattaatcaaaactcaaaatagccagacccggagatccatttcctcagatacttcttcaaataagaagctcagaggaaggcagcacagtgttttccagtccatgctgcagaacttccgacgccccaactgctgcgtccgtcctgccccgtcttctgtgttagattgaaagggagtatttatgggagtttgtgtataaatttacggtattcacatgcgtccctctatgtcaaagcttgcttagttttttgctgcaagactaggaagaaaaagcaagtattcactataggaaattgctattaaaaattgttagatcctttgacctggagctctataaacaaaaatgtcatttcaatttgaaagaaggaacaagaaaagagaaacaagcttcactgaaggtttgcaaccttaacaaattgaaaataatactcactgggtttttaaaaatatgatgttgttcatagaaatagcattattgtatcattatacatgtattattttgtataactgcctcaatttatcacacagtagtagttccattaaaatccctgcttcatattgaaagtagcaaaaacactattggcgaaaacattgttataatttctagtcttattgcagtaagaatgctgtaaccacacaaattataaataggtgataagaaccataatgaaaaaaatgagaacatatttgattcattcctaggccagataacattaaataaaaacagttaaatgtgtaaaatatgaaatatgaattaatgtttataaacatctgcagacaactctttttataaaccttcttattgctgttaataaatataagaaagttatattaggaacattagctaagcttttgactatgaaaactgcctacattaaacatggatttatatagacccattttcctgcactgaaggcaaggcgcatctctgtgattctgaccagacatattcatattttcttaccctagaggaagtacatgggactgaattcttgaaaagagccatcaaattagggataatactaaattgatactgtgcaggtgttctccagtgatattctactgagaatgctaaggttctggtcaggaactataaatagcagattaccaaacactgctttttctgtgatgataaaagcctcataagtaacaaaaacaatgtttaatttagactcctgtaaacaggatgcaattagtgattttttttaattgggttcagtaacttccagtaacaaatgtagtcaacaccaaattagaatgtgagcttccttacaatttttgtacatagactactatcatctaattgcttaaatatatatgctggagtaaaaaggtaacttctgcaaacttattgattttaagagaaatacccataatatccttcaaacccaatgaaagaagaggcctttacgaaaacatggcttgtgatttgggtggattatacttcctgggaccttggccctcccgtgtctccagaagagacgtgtgtcccgagacacatgagtatcctccaaggcactggcctggatgagcagcatcgccttgagaattggggtagtgtggaaaggaagaatgaacaacggccctgggaagccttcccttcctgcagatattgttgggggagtgctggtctccattttgcgtttagaaaaccagacttagatgctggaggggcaccggttgtcttctttgaactcattccccgtaatgagctagaaaagagtacctaaccataggtattctctctagagactcatgtgtcccgtgggtacagtcaattcacagtatctgttctggcttttttcactttaattctgttctgcacattctgaacatatgcaggaaaaaaaatcattcctgaacttagcacaagctacactcgacacaacctaaattagtaaaaagcctttgatttattttgaagcaatttaactgtagacaaagcttgcatatatggaacagtattctcagagcctgagagttgttacagttgttctatttggaaattagaaggaattttttaataaggcacatttttcagtttcttacccattggtgtctattaagaatactatgtaatgttgaaatttccatcaaattaccaagcaaattactattaatgattagagatttagcctaacactctctctttgggccttaaatacccatttgtagttgtgttcgtgtcacttctgtctcagatgcctctgccaggacataatctctctaactcttgctagctggcttctccctcccacatgggcatacatgctgtgtatacacagagtacagcctgtgtacacagtagcagctgtcaacagggcctactccagatgggtggccccaggtaatcctctgctgtaaagtggctagaacaggctgtccctgcattaaaataggtgagaataaggaatttcgcctctgataataatatttattttcatgactttagagtaaccacatgatttgtaaacagttaaatgaagcagaggcctgagagagttgttggcatttgtctcacattaaatacattaaaattgctagatttgctattgtggttatgtctatcaaaactttaagaaaatttgtttaatgtactgagtttaactgattttctttggtgctgggaccaaattcttcacttctacaacactcaagagattgtcacaaaatattacaaaaatattgtttgttttgtggctcattaaaccctatataactaacagcttttaaggacattaacagaaatatatcttcagatggataaataagatagggacctattcaagacagcagcatttttgtattgtgatacctcccctaagttactctcacaataaaaccttatttgagaattttccttcacttcaatctgtgacatagcattaggcatttagtataccttatttgtgaaacctaaggttcattcaacagatgaagctgcaaaacagttttcttggtagactcttggaacttgctcagttttttccttactttacctgcatgacacacat

SEQ ID NO: 138565 - DNA, 14244 bp, Homo sapiens
  Payload ID: 7153
  Gene Symbol: GPRIN3
  Gene Name: GPRIN family member 3
  Uniprot ID: Q6ZVF9
  ENST ID: ENST00000609438
  CDS Start-End: 520-2850
aaagctgtcgcccctctctcggatgctcaggctgggcagcgctggacagatgggtacaccccgggcctgacggatgaacagtcgggcaagtgaactctcacctccaaactggctctgcgcccggcgggggcggcggcggcgtctgcagccccgcggtgggggcagccccctcggtctacgcccgactgctgcgcgccgcctctgctcttggcatagtaatttcagttcctgaacgcacggagctcgctccgggaccgggctgagaaggacctcagctcgcgggcccgccggagccatcggtgtggcgccgagagacggtgcttgggatatgcgacgggaagcccccgccacagcgcaggcagtggccccgccgcgccgcggagccgggcagagcaggctggttcttcagaggaatcatccctgactgtgtcatcactctgagctctgactgcgctcccctcccccaccagtgggaccagtactcaagagagctctggagtgctcctgaagagaaattccatggggactgtacctgaccctctgagatcagctaaaacttccctgattgcagcttccggaaaagaagacgatctaggagagccacaggctgcctcacctcggcatcgaccagctctcctgtgtaagaatgccaatggcttttcaggtgcccctgcagaaccagacctcagccccagggcagctgccgaagccctgatgcaggtttgtgagcatgagaccacccaaccagatatgtcttctcctggtgtgttcaatgaagtgcagaaagcacctgccacattcaactctcccggcaatccccagctgccagggagcagccagcccgcagcatcagccccgagttctgcagcaggaagggatcttatacacacaccattgacaatgcccgccaatcagcacacctgccagtccatcccaggtgatcagcccaatgccatcacctcatccatgcctgaagattccctgatgagatcacagagaacctcaaatagagagcaacctgagaaaccaagttgtcctgtgggaggcgtcctcagtagcagcaaagatcaggtgtcctgtgagtttccttctccagaaacaatccagggaacagtgcagactccagtgacagcagccagggtggtcagtcactcatcctctcctgtaggtggacctgaaggggaaaggcagggagccatctgtgactctgaaatgaggtcctgtaaacctctaactagagaatctggatgttcagagaacaagcagccctctgtcactgcctcgggcccccaaggcacaacttctgtgacacctcaaccaacccccctcactagcgaaccttcggcatgtcccccaggtccagagaaggtgccgctgccagcacagcgtcagatgtcaaggttcaaagaagccagtacgatgaccaaccaagctgaaagtgaaatcaaggaagttcccagcagggcttggcaagatgcggaggtgcaggcagtggcgagtgtcgagagcagatccgtctccaccagccccagtatcctcactgcatttctgaaggaaagccgtgctcctgagcattttgaacaagagcagctgcgtgtcatttgccacagcagtgggagccacacactggagctctctgacagcacgctagccccccaggagtccagccagtgccctggcatcatgccacaggtgcacattcaggcagctgcagctgagtctacagctttccaacgggaaaataaacttgcgagcctaccaggtggggtccttaaaacctcatcaatcaatttggtctccagtaatgcccagcatacgtgtaaagaagatgggaggttagcaggaatgactccagtgagggaagagtcaactgctaaaaagctcgcaggtactaattctagctccctgaaagctaccgccattgaccagatttctatcagtgcatgcagtcaagctgaaacaagttatggattggggaaatttgaaaccaggccatctgagtttgcagagaaaacgacaaacggccacaaaacagacccagattgcaaactatctgactcttgtggctctatcagcaaagctgatcattctgggagcttggatcccactaataaaggagatgcaagggaaaagaagcctgcatctcctcaggtagtaaaagaaaaagagtctactggcactgatacctcggatgccaaaaccctactgctcaatcctaaatcccaagaaagtggaggcacagaatcagctgctaatcctacaccctccccaattaggaagaaccaggagagcaccttagaagaaaacagacagaccaagacagccaccagcctgagcctgccatctgatcccatgggtgactccagcccaggttctggcaagaagaccccatctcgctccgtcaaagccagcccacgcaggcccagccgcgtcagcgagttcctcaaggagcaaaagttaaatgtgacagcagctgctgctcaggtaggactcactccaggagataagaaaaagcagcttggcgcagactccaagctccagctgaaacagtccaagcgtgtcagggacgtcgtgtgggatgagcagggaatgacctgggaagtgtatggtgcatccttggacgcagagtccctgggaatcgcgatccagaaccatttgcaaagacaaatcagggaacatgagaaattaatcaaaactcaaaatagccagacccggagatccatttcctcagatacttcttcaaataagaagctcagaggaaggcagcacagtgttttccagtccatgctgcagaacttccgacgccccaactgctgcgtccgtcctgccccgtcttctgtgttagattgaaagggagtatttatgggagtttgtgtataaatttacggtattcacatgcgtccctctatgtcaaagcttgcttagttttttgctgcaagactaggaagaaaaagcaagtattcactataggaaattgctattaaaaattgttagatcctttgacctggagctctataaacaaaaatgtcatttcaatttgaaagaaggaacaagaaaagagaaacaagcttcactgaaggtttgcaaccttaacaaattgaaaataatactcactgggtttttaaaaatatgatgttgttcatagaaatagcattattgtatcattatacatgtattattttgtataactgcctcaatttatcacacagtagtagttccattaaaatccctgcttcatattgaaagtagcaaaaacactattggcgaaaacattgttataatttctagtcttattgcagtaagaatgctgtaaccacacaaattataaataggtgataagaaccataatgaaaaaaatgagaacatatttgattcattcctaggccagataacattaaataaaaacagttaaatgtgtaaaatatgaaatatgaattaatgtttataaacatctgcagacaactctttttataaaccttcttattgctgttaataaatataagaaagttatattaggaacattagctaagcttttgactatgaaaactgcctacattaaacatggatttatatagacccattttcctgcactgaaggcaaggcgcatctctgtgattctgaccagacatattcatattttcttaccctagaggaagtacatgggactgaattcttgaaaagagccatcaaattagggataatactaaattgatactgtgcaggtgttctccagtgatattctactgagaatgctaaggttctggtcaggaactataaatagcagattaccaaacactgctttttctgtgatgataaaagcctcataagtaacaaaaacaatgtttaatttagactcctgtaaacaggatgcaattagtgattttttttaattgggttcagtaacttccagtaacaaatgtagtcaacaccaaattagaatgtgagcttccttacaatttttgtacatagactactatcatctaattgcttaaatatatatgctggagtaaaaaggtaacttctgcaaacttattgattttaagagaaatacccataatatccttcaaacccaatgaaagaagaggcctttacgaaaacatggcttgtgatttgggtggattatacttcctgggaccttggccctcccgtgtctccagaagagacgtgtgtcccgagacacatgagtatcctccaaggcactggcctggatgagcagcatcgccttgagaattggggtagtgtggaaaggaagaatgaacaacggccctgggaagccttcccttcctgcagatattgttgggggagtgctggtctccattttgcgtttagaaaaccagacttagatgctggaggggcaccggttgtcttctttgaactcattccccgtaatgagctagaaaagagtacctaaccataggtattctctctagagactcatgtgtcccgtgggtacagtcaattcacagtatctgttctggcttttttcactttaattctgttctgcacattctgaacatatgcaggaaaaaaaatcattcctgaacttagcacaagctacactcgacacaacctaaattagtaaaaagcctttgatttattttgaagcaatttaactgtagacaaagcttgcatatatggaacagtattctcagagcctgagagttgttacagttgttctatttggaaattagaaggaattttttaataaggcacatttttcagtttcttacccattggtgtctattaagaatactatgtaatgttgaaatttccatcaaattaccaagcaaattactattaatgattagagatttagcctaacactctctctttgggccttaaatacccatttgtagttgtgttcgtgtcacttctgtctcagatgcctctgccaggacataatctctctaactcttgctagctggcttctccctcccacatgggcatacatgctgtgtatacacagagtacagcctgtgtacacagtagcagctgtcaacagggcctactccagatgggtggccccaggtaatcctctgctgtaaagtggctagaacaggctgtccctgcattaaaataggtgagaataaggaatttcgcctctgataataatatttattttcatgactttagagtaaccacatgatttgtaaacagttaaatgaagcagaggcctgagagagttgttggcatttgtctcacattaaatacattaaaattgctagatttgctattgtggttatgtctatcaaaactttaagaaaatttgtttaatgtactgagtttaactgattttctttggtgctgggaccaaattcttcacttctacaacactcaagagattgtcacaaaatattacaaaaatattgtttgttttgtggctcattaaaccctatataactaacagcttttaaggacattaacagaaatatatcttcagatggataaataagatagggacctattcaagacagcagcatttttgtattgtgatacctcccctaagttactctcacaataaaaccttatttgagaattttccttcacttcaatctgtgacatagcattaggcatttagtataccttatttgtgaaacctaaggttcattcaacagatgaagctgcaaaacagttttcttggtagactcttggaacttgctcagttttttccttactttacctgcatgacacacattgggttgaaagttgtttggttttacccttcatttctcttagatatgatttggttctttttcatgcattatatttttgaaatatatggaggaaatattttattgaatcaagaaatagaaaatattccttaaaccagtagtaaaaaggtgagttagaactccatgtctggaagacaattcaacatttaaaatattaagatgctataccacttaacaagtgaatactaaaatttttaatttaaagattgattgttctgtttttatgaccatgagaaaaatgtgacagcttcagctgtcatatgtttatcttgaatgcttttctaattatgtatttctggattattgactttgaatgccacagaccaactactttacatagagtaaaatattgattaacctttgtgctttgggtcactggcaaaagttgaacatcctgataagtcaatgttaaccagaaacctttttgttcacgtctgaaattgaatatttataaaatgtgttagtatgtttcctgccttgataagttcacctatattgaatgtaatttgatctttgataattttttttaatcttgagaattctctgatactgttttgaataccagtgttcaccatgttataaagttaaacataaaaattgaaataaattgaactaaatatgcatgtgtaacatataccttagaggttggatttcagaaccaaattcataataggagcttgctgtcttaaagtagaaagcagaagaggaaaatagcatttgtttgtattctagcatattgaggtttcactgttcctagcttatactaatgtttttcctctcatttctgggaatgcctgtcattctgagaatccctatatatagcataccaagaacagagtatgatgttactttaaaatgtgtttacagaggatatatgcaagtgtgctgttaatataaattgtttgtccttttctgcatccactttgttactgttttgctgccaaaatgtgtgaaatgtgtgtcttctcttcctcctacatattgtgccaagtgtttaaaattttgtctactcctagtaacacataattaaccacatcccttgtctacttttatgaatcagtataaagaaaaacaatacattaggataaggtttgcatatatgtatatgtgtttttattgaaaactgggcacttgtagccttgtgtagacctctacctgcctgatttactaattatctgtaatgctgccatggagatgatgctgtttactctctcctgctttgttctaagtggtgtttgagaagtgaggcctgtgaatttccctttgtggtagaacagtgaactcagcagtatcttgcataagtgagccgactaccttattcccactctgtttttgtgtacatggtgaaatcagaagtcaaacatcccctttagtgtttgttattttacatatgtatctgagcattttgttttctgttagcaatgcttcctgatgttgtgcgtggccctttttggttgattctctccaaattcgggtcagctgctgccacctggcaaataacagaggatatgctgaatctcctgtccatccttgtaacgatatccttcttaatgaaattcttcaactggctgagcaattacaaatgtcatctgtccagacacatgggcttaaggatgtctacaaaattttagacatttttgcaaatgggaaaaaaaatagtcttgtaaatactgaaacagatttccatgaactttatcctactcttggaaagaaaacaattctccttggctgcagaaatcaaataagctgggtttgcaatgaccaaggacataaatgaagatggattgaagtggaaaaattctgtctcccaagtgatcagtgacatctgccagaggtcattacagctacttttaactgtgaacagtcaccagctaaactactcacttgccacaacaaaataacctctctcaaaataaatccagtgcatctgtatatatgtgtagatagcagcaacaaacaatcctgaaacattatttttggctgttaggtaagtaaacgtgatgataattataaacaacattcaaataaccttggaccttggtgaaatgacttgtggtggccagaatggtgcaacaagatgttatttgcaagtttttttaagacacaaatatctcagatactaataatgagaataaagactgttgaatatgaaattaaagccaagcaataatgtgccaaaaagaggcagttataccagcaaatgcatctattatgggcacaccattatataatgatggtttgctttatgaagactgactgtaacccacaggataaaataagcaaaggcatagtttctgctttcttcctggaaaaacttgtttagaagcttcataaagaggtacagcactaatgagcattagtcaggatacagttggcatctatgtttttatgtgagcccagagggaagaggagccactcaaagtcttgctggcttaaaactcaagacagctgcaaccagaagttttgttgaaatggagactttaaacttatggtaattactctttctggacactagcatgtagaaagcaattcagttaactctgcccagaggattaccagctttagctgtgaaaaaatgggctcccggatgtaaaatcactaaaacatgagatcttgtatccaaagaggcttcaaatgatgccttacagaaaacgatgctccagatgggcacttctaaatgctaactcttcatcaagtatctttctggattcaagctcaaaattaattggctgcaaaatagtaggaataaaaatcacatattttacactttagaaaaggatattgatgatcaacctgcatggtgataattatgatgagataccccagtgatttaatgatgttagaaagaattaaatgggagagaattgctaacagctttcttgatctcttaactatggagatgtcattcatttatttctggggtgaaaattatagcttgctttttgacattgctgctagtattgttctttgttgctttaaaaattgtctctctttagaaaaactcttgagcagttaaacagttttttttctgattcatatcattgcttttaataacatgtaaaggctgtgtgtagagcaaactatataaaatgagtagaaagggcttactcatgttaattggcatccttgatgattttagttgagattccttaacatttattttagatcacatctttacgtaacttatttttcctaatgttttccatcgtgtcttaaaatgatgctggtatatcaggagattgcagtattatagtcatactccccaatccctagaggagaggaaagactaattcttgttttaagggcccctggagataccttttattaaggttgaaaaaggtcaacacagcctgaaaataagaaaaatatatactagcaattactaattttctaaatgtgtgtatctctgctgtactaatgtgtgaacaatatgtcgtgcataatactgtagctggtcgtggtatgtcaatacattctgtgagtgtgtacagtctgagtgatcagttttctatttttatgtgtaaaaaaaataacttgtcgtatcccatttaaaggccaatttctgtattcaggcaggcatatgtacatacatgaataaagccaacaaaagtgtgcacatgtattcagtaacagaatttgtccttttatttttgaaggtcagaaagggctgtttgatttgtgttttttttttatcatctccttgagtaggtaacataattatcacaaaggctgaatatagtaatcagtacattggcatattattaaatatgccagggctaagtaaccatgccattagtcacaggtaaggtcagttctttgaccactgggataatttacattcctcacacatcctctccgtgttaagtgtgtgactaggatgtacatactatgggtgtgattgtgtacataccttgtatgaattatctaaatcctcaaagcagttgcaggaaagaaggaagatgaaacagttgttcaaaagcctcaaaagggctaatcaatatatatttttcattttctacacataaaaatgtaaatagcttatccacatatataggcacacataatacattttatttatactagtatattcagataaatcacaaattaaaaccactaattgaaagttgcatatttccatgactgctctgttttacaaatattattattgaatgagatgcccccccaattaatggtgttactccctggtagcagattttgtgcttagaaaactccagcaactgaagcacagactggtaactgagtagctacagggaattaatgcttctctttaagcacctaatttcatatctggaaatggcaaacagggatgaaaatcgattatgttttggagactccttttggacatgtatcagtgtgttgatttgcacaaaccaataaaagccctacattttttggaaatggatccctagatttcaagcatgtataatcactcaaagtggatatgatcacaggcattcttctcttgagctcagcaaaactatgcctaccaacaccgaagagaagtcaaagatttaaatgaaaaaaaattgcagatgatgttggtgagataataggatatgagcaatgaacccttgggtggggttccagggcacttaaattgcctcgtgtcttgagttccttaagatggactcaaacaaaaaattagtattatcaataacaggtaatactgtgtggattctaacaacattagaatcattagctggcaagtgtcaactctgaacaagatttgtcagcttatcataattccaaccagttaattgatattgttcgaatttatctcattttttctcaaaggaagtgctctattagggatcaaaaagtctcacctggttcttaaaacctaacacaatttgaccttgaatcctcgacactaaaaattacgttggttgggtatcagattgaaaatatgcatggaggctgggcgtggtggctcacacctgcaatcccagcactttgggaggccaaggcaggcagatcacctgaggtcaggagttcaagaccagcctggccaacatggcaaaaccccgtctctactaaaaatacaaaaactagccgggcatggtggtgtgtgcctgtaatcccagctactcgggaggctgaggtgggagaatcacttgaacctgggaagcagaggttgcagtgagccaagttcgcgccattgcactccagcctgggagacagggcaaggctctgtctcaaaaaaaagaaaatataaatggaaataccagaatcaccccttgatagagaattccatttggcaaagtacaaacaaccacttctcagtagaaagttaagaataacatttaaaaacatattcatgttttagagaacgaatgtgccatcgttgtatattaaataaaaataaaagattaaccagctataagaacactacaattacaactagagtggcagtgttttttaactaataaaagtatacatgtttataagtgcagcatacctgaaatcttgatgtttgtcaatacttatggttgcttcaaagataaatttatgtgattatttttgaaagatgtgtattaatttgaataatacccagaaaaattataacttaaaaattgcagttttcaatatgagaatcatttatgtgtgtaaatactcaactaagaaagatcaaaagtgtggtataatattacaagaaaaaatattcaaaatggaaagtccatttatgaatgtattaatattaaaatccaaagttatgtttttttataatgtctacattataatgtttacaaaggccataaaatcatttcagaaagttctcatcctccagatattgaccaataaaacttcatttcctagaaaaaagaagaaatgttataatttatacaaagatgaagtaagattttggaattacgtatacttacaccttcattttggatttgatttttgaatggatgcttaaaattctgatattcaactaatgacttagttttaccatcaaaaaatttagattatgatttttttgcatctcacttttcataataaatgtaatatagatacaatttattctgttttttgttgatgttattattgtttccactgctattgaaatcgttcttttaaccatgaatgtgcagaatcagttgattttccatgtgacagcttctgctaggaatctgcagtggaactggaagtatttgcaatgaaagaacttttttctttaattaaaatagaattcccatagaatcaacaattcctcctggtcatcaaacgcgaggtttttcctgtacttggtagagcagagtgtgtgtgtgtttgtgcgttgtgtgtgtgttgtttggtgagaatgatgagagctgagcattgtgaaaatacaggcgggggtggggtaacagagctgggtaggggtccagggcgcttagattgccttattgtccaggcttagatgcctcttacccagagccatcaggtgtaccctatatagctccagcctttctgcctactcctgagaagataaactgggatcctgcagtctggattcctagaaggagatggaaagcccagccatatccccagtttgacttgaccagtagtaaaactagcactacagtttgatccctttttacctccttgaatatcttcaattcatcaaggatctgtaaagaaggagaggtacaagatatatgaaacccaaatctcaaaacaatgatttagtgaatttcccatgaactttaaacagtgattgcttcaaaatttccaagagccatactctccctccagctgctgtgtgtgtgtgtgtgtataaatgcacactattttaacctaaaatggtgccctgtggctgccattctctaactcttgcatacttaaacatttattcttggtcaaattaaaacctcatgcatttccaaagatataaatgccttgcctggagaagttagatcttgcaagtctcaggagggccgagatggtttgtcttatgcctatagctgtttatgtcccaccagtgggtgtttgtttcattaggtgccgtttccagccaaatgttctcattcttcacatcttcaatgttgagtagcaaacagaagaacatccttcttagcataatattgcttcactggactgattgtgaactcaaaatacctcttgtttcttgtgaagggtttgccttttgtaaacaatataagatcacttttggtcaaccaccctgtctgaatttatctgggctgctataataaagtatcataaactgggaggcttgtaaataaatttatttcttacagttttggaagctgggaaccccaaaatcaaggccaatttggtgtctggtgagggcctacttgccggctcacgtgtggtgcctgtttgctgtgtcctcacacagtaaaagggatgaagtgtcccctcccgggccactttcaaaagggcactaatctcactcatgagggctctgtgaccaccatctaatcaccacccaaagcccccactttctaacaccatcgccttaggagttcagacttcaacatgagttttggagggatacagacatttagaccatggcatacacattcttaatgaacttctgaatgccaccattattaaattttcttcaacaccattctacacaaccactgagctaattgacagagttctaaaatgtttagacccttgtaactaccttagcaatgttctgaagctggtttttctaaatatatcacagaggtctaacatagttgaaattcaaattgtctggatggaagctgaaagtgcttgcagagatttctggtgggagtactggcatctcaagaatggtatttccctacaccttttttagtcccgcttgacgtctctcaatcaaactgcaaaagagccttgacctgccattaaaaataataataagcagaatgtcattgccaaagattattataggtgtttaaaagcaagataagacttcttaaagggctccaaagcatttgcttgttatctatgtttttttagcccaaagccaaaacaaaaaataatgcctttgtgccagacgttttgctgggcacttccatctatgtctcaaccttaggaggtataatgtatacatgcacagttttacaatttgtcaatggcacagatacttgagacatataaattggatgatcacagagatattgtggtaaatatctgggcttggaatcaaaggaccctgggttcaaatctcagcttcgaatcaaagaagctaaattctttggctgagtaaaccaaaacacctcccaccagaccccacctccaaatttcaacatgaaatttggagaggataaatatccaaattatttcagtgcattcatctggaaactgagaataacaatgctcactttgcaaatttgtgggaattaaatggcataggcaaaatattgttcttttcttctcttactcctctgagttttgctttcttccacttgaactttaccactcaattgttaaaagccttgaattttgccattgtattctatttaataaacttttgataaatctggataaataa

SEQ ID NO: 138566 - DNA, 2114 bp, Homo sapiens
  Payload ID: 7154
  Gene Symbol: GPSM1
  Gene Name: G-protein signaling modulator 1
  Uniprot ID: Q86YR5
  ENST ID: ENST00000291775
  CDS Start-End: 233-733
gtgacacgttctgggggaggggtagccgacagggggcaggttagagtcccgatcttggccagggtctcagaagtgtgtgtggcctgggcaagcagcccccggtctcgtctgggggtctgcggggctagctttggctgcggtgaccccactccctccccagagcatcccgagggccccgtcttcggacgaggagtgcttctttgacctgttgaccaagttccagagcagccgcatggacgaccagcgttgtcccctggacgatggccaggccggggctgccgaggccacggccgcccccaccctggaggacaggatcgcccagccctcgatgacggcctcgccccagaccgaggaattcttcgacctcatcgccagctcccagagccgccggctggacgaccagcgggccagcgtgggcagcctgccggggctgcgaatcacccacagcaatgcagggcacctccgaggccacggcgagccccaggagccgggggacgacttcttcaacatgctcatcaagtaccagtcctccaggatcgatgaccagcgctgcccgccacctgacgtactgccccggggccctaccatgccggacgaggacttcttcagcctcattcagagggtgcaggctaagcgcatggacgagcagcgggtggacctcgccgggggcccggagcagggggcaggcggcccgcccgagccccagcagcagtgccagcctggtgcgagctaaggccctgtgcccaccgccaggcccaccctgcccccactcctggacgccggtctcacagtcacagccacgtcctcccgaggccattgccgaggacaggcactgggcatgcagccccacggcctccccgacccagggcgacaggctcaggccaagctgcccgtggtgggagggcgtgcttccatcccgggctggcccccatggccctcagcttcctcccttctgcccctgccgcaggccggacggggccttcggcatgtcggccccgacctggtgctgtcagactcccgcatcctctcccccaagcccttcccgttctgccctgccctgccaaatgtgaaaccctgctgtctcccccaccctccccaaaggtgtctctgagccgcctcttggggccaccaaggacagggccatgttctgtccccccagagctggtcttgggatggccgtgtgacaggcatgctccacccctccagcttcgtcctggggcagggctccctccaagcctgtctccccactccccggccagaggtcagcaaccacagaaggccccccagaccacgcatggcagaccaggctgcagtggcagccctgaggtgccccccgccgagtcccagggccctgcaggggcctcgacaggagccgggcctatctctaaagcagagggaatggctgggcatgaacttcgacattccaaaaccccaagccaggaaaaagggcagggcctggtcctagggatgcttactggcagcaagagcagtgcccagtcagggtgggaggtagcaccaggctctgtgaccctcacccaagtgggggggtggtcagtggaagctggggaggcttcactcagctcaaccctgcagaccccccatatgagaacccccctcctcccaccagctgggggagatgacatcactgctctctccatggggagggggctcacagggcaccaagttcgggatcctaggactggcaggacctgctggagcctgagatgggccccaggggcctgaggttgcctcctcctgtccagacccagccttggcacctcccaagactgccaagggccctaccatggccccacagcccccagggctggcagttccatctaggagggtgcctctaggccccactctcaggctaggatggagaggcagatctgggcctggtgaggtgacctgcttctggaggggcagggccgcacccgagagcagggacaggtgcccgaacacagggtctccaggacgtagcgcccccccgcatacttgaatgtatgtgcgtatttattgctcacgtctgtgccatgttgtcaatgggtcctttccaacccaagaggtacatttgtttttctgtttttcctgaaaaataaagtcggccaagtgag

SEQ ID NO: 138567 - DNA, 3345 bp, Homo sapiens
  Payload ID: 7154
  Gene Symbol: GPSM1
  Gene Name: G-protein signaling modulator 1
  ENST ID: ENST00000354753
  CDS Start-End: 1-1960
gatggaggcgtcctgcctagagctggcgctggagggcgagcgtctgtgcaaggcgggcgacttcaagacaggcgtggccttctttgaggctgctgtgcaggtgggcaccgaggacctgaagacactgagtgccatctacagccagctgggcaacgcctacttctacctgaaggagcacggccgggcgctggaataccacaagcatgacctcctgctggcgcggaccatcggtgaccgcatgggggaggccaaggccagtggaaacctgggaaacacactcaaggtcctggggcgcttcgacgaggctgccgtctgctgccagcggcatctgagcatcgcccaagagcagggagacaaggttggggaggcgagggccctctacaacatcgggaacgtgtaccacgccaaaggcaagcaactgtcctggaacgccgcaaacgccacgcaggaccccgggcacctgccgcccgatgtccgagagaccctgtgcaaggcctccgagttctacgagaggaacctgtccctggtgaaggagctgggcgaccgtgcggcgcagggcagggcctacggcaacctgggcaacacccactatttgttggggaacttcacagaggccacgaccttccacaaggagcgcctggccattgctaaggagtttggagacaaggcagccgagaggagggcctacagcaacctggggaacgcccacgtcttcctggggcgctttgacgtggccgccgagtactacaagaagacgctgcaactgtctcggcagctcagggaccaggcagtggaggcgcaggcctgctacagtctgggcaacacctacacgctgctgcaggactacgagcgcgcggccgagtaccacctgcggcacctgctcattgcccaggagctggccgacagagtgggcgagggccgggcgtgctggagcctgggaaatgcctacgtgtccatggggcgcccagcgcaggccctgaccttcgccaagaagcacctgcagatctcccaggagatcggggaccgccatggggagctcacggcccgcatgaacgtggcgcagctgcagctggtgctcggccgcctgaccagcccggcagcctcagagaagcctgacctggccggctatgaggcccagggggccagacccaagaggacgcagaggctgagcgcggagacctgggacctgctgagactccccctggagcgggagcagaatggagacagccaccattcaggggactggcgggggcccagcagggactcgctacccctccccgtgaggagcaggaagtaccaggaaggcccggacgctgagaggaggccccgggagggcagccactccccgctggacagcgccgacgtccgggtgcacgtgccacgcacgagcatcccgagggccccgtcttcggacgaggagtgcttctttgacctgttgaccaagttccagagcagccgcatggacgaccagcgttgtcccctggacgatggccaggccggggctgccgaggccacggccgcccccaccctggaggacaggatcgcccagccctcgatgacggcctcgccccagaccgaggaattcttcgacctcatcgccagctcccagagccgccggctggacgaccagcgggccagcgtgggcagcctgccggggctgcgaatcacccacagcaatgcagggcacctccgaggccacggcgagccccaggagccgggggacgacttcttcaacatgctcatcaagtaccagtcctccaggatcgatgaccagcgctgcccgccacctgacgtactgccccggggccctaccatgccggacgaggacttcttcagcctcattcagagggtgcaggctaagcgcatggacgagcagcgggtggacctcgccgggggcccggagcagggggcaggcggcccgcccgagccccagcagcagtgccagcctggtgcgagctaaggccctgtgcccaccgccaggcccaccctgcccccactcctggacgccggtctcacagtcacagccacgtcctcccgaggccattgccgaggacaggcactgggcatgcagccccacggcctccccgacccagggcgacaggctcaggccaagctgcccgtggtgggagggcgtgcttccatcccgggctggcccccatggccctcagcttcctcccttctgcccctgccgcaggccggacggggccttcggcatgtcggccccgacctggtgctgtcagactcccgcatcctctcccccaagcccttcccgttctgccctgccctgccaaatgtgaaaccctgctgtctcccccaccctccccaaaggtgtctctgagccgcctcttggggccaccaaggacagggccatgttctgtccccccagagctggtcttgggatggccgtgtgacaggcatgctccacccctccagcttcgtcctggggcagggctccctccaagcctgtctccccactccccggccagaggtcagcaaccacagaaggccccccagaccacgcatggcagaccaggctgcagtggcagccctgaggtgccccccgccgagtcccagggccctgcaggggcctcgacaggagccgggcctatctctaaagcagagggaatggctgggcatgaacttcgacattccaaaaccccaagccaggaaaaagggcagggcctggtcctagggatgcttactggcagcaagagcagtgcccagtcagggtgggaggtagcaccaggctctgtgaccctcacccaagtgggggggtggtcagtggaagctggggaggcttcactcagctcaaccctgcagaccccccatatgagaacccccctcctcccaccagctgggggagatgacatcactgctctctccatggggagggggctcacagggcaccaagttcgggatcctaggactggcaggacctgctggagcctgagatgggccccaggggcctgaggttgcctcctcctgtccagacccagccttggcacctcccaagactgccaagggccctaccatggccccacagcccccagggctggcagttccatctaggagggtgcctctaggccccactctcaggctaggatggagaggcagatctgggcctggtgaggtgacctgcttctggaggggcagggccgcacccgagagcagggacaggtgcccgaacacagggtctccaggacgtagcgcccccccgcatacttgaatgtatgtgcgtatttattgctcacgtctgtgccatgttgtcaatgggtcctttccaacccaagaggtacatttgtttttctgtttttcctgaaaaataaagtcggccaagtgagtgtg

SEQ ID NO: 138568 - DNA, 1111 bp, Homo sapiens
  Payload ID: 7154
  Gene Symbol: GPSM1
  Gene Name: G-protein signaling modulator 1
  Uniprot ID: Q86YR5
  ENST ID: ENST00000392944
  CDS Start-End: 288-788
ctgtgtagggcatggacacagggagctcatggcagggctgacacagggtgtggtgggcacagggacaggaggcacgggaggcttcccgggatgtctgggaagtgttccaggccaaggctggggaggctggcccagggcaggtgacggacagaggcctggactggggtagcacccatgagaggggagaagtccggggcagtcggcgggtgccgaggagcatcccgagggccccgtcttcggacgaggagtgcttctttgacctgttgaccaagttccagagcagccgcatggacgaccagcgttgtcccctggacgatggccaggccggggctgccgaggccacggccgcccccaccctggaggacaggatcgcccagccctcgatgacggcctcgccccagaccgaggaattcttcgacctcatcgccagctcccagagccgccggctggacgaccagcgggccagcgtgggcagcctgccggggctgcgaatcacccacagcaatgcagggcacctccgaggccacggcgagccccaggagccgggggacgacttcttcaacatgctcatcaagtaccagtcctccaggatcgatgaccagcgctgcccgccacctgacgtactgccccggggccctaccatgccggacgaggacttcttcagcctcattcagagggtgcaggctaagcgcatggacgagcagcgggtggacctcgccgggggcccggagcagggggcaggcggcccgcccgagccccagcagcagtgccagcctggtgcgagctaaggccctgtgcccaccgccaggcccaccctgcccccactcctggacgccggtctcacagtcacagccacgtcctcccgaggccattgccgaggacaggcactgggcatgcagccccacggcctccccgacccagggcgacaggctcaggccaagctgcccgtggtgggagggcgtgcttccatcccgggctggcccccatggccctcagcttcctcccttctgcccctgccgcaggccggacggggccttcggcatgtcggccccgacctggtgctgtcagactcccgcatcctctcccccaagcccttcccgttctgccctgc

SEQ ID NO: 138569 - DNA, 2057 bp, Homo sapiens
  Payload ID: 7154
  Gene Symbol: GPSM1
  Gene Name: G-protein signaling modulator 1
  Uniprot ID: Q86YR5
  ENST ID: ENST00000429455
  CDS Start-End: 172-672
ggcggtggtggccctgggcaccttgtgtcctgcctgcgctctgtgtggccaagcacccagcgtggctccctgctgctgtggagacagcctgtgatccgcagcatcccgagggccccgtcttcggacgaggagtgcttctttgacctgttgaccaagttccagagcagccgcatggacgaccagcgttgtcccctggacgatggccaggccggggctgccgaggccacggccgcccccaccctggaggacaggatcgcccagccctcgatgacggcctcgccccagaccgaggaattcttcgacctcatcgccagctcccagagccgccggctggacgaccagcgggccagcgtgggcagcctgccggggctgcgaatcacccacagcaatgcagggcacctccgaggccacggcgagccccaggagccgggggacgacttcttcaacatgctcatcaagtaccagtcctccaggatcgatgaccagcgctgcccgccacctgacgtactgccccggggccctaccatgccggacgaggacttcttcagcctcattcagagggtgcaggctaagcgcatggacgagcagcgggtggacctcgccgggggcccggagcagggggcaggcggcccgcccgagccccagcagcagtgccagcctggtgcgagctaaggccctgtgcccaccgccaggcccaccctgcccccactcctggacgccggtctcacagtcacagccacgtcctcccgaggccattgccgaggacaggcactgggcatgcagccccacggcctccccgacccagggcgacaggctcaggccaagctgcccgtggtgggagggcgtgcttccatcccgggctggcccccatggccctcagcttcctcccttctgcccctgccgcaggccggacggggccttcggcatgtcggccccgacctggtgctgtcagactcccgcatcctctcccccaagcccttcccgttctgccctgccctgccaaatgtgaaaccctgctgtctcccccaccctccccaaaggtgtctctgagccgcctcttggggccaccaaggacagggccatgttctgtccccccagagctggtcttgggatggccgtgtgacaggcatgctccacccctccagcttcgtcctggggcagggctccctccaagcctgtctccccactccccggccagaggtcagcaaccacagaaggccccccagaccacgcatggcagaccaggctgcagtggcagccctgaggtgccccccgccgagtcccagggccctgcaggggcctcgacaggagccgggcctatctctaaagcagagggaatggctgggcatgaacttcgacattccaaaaccccaagccaggaaaaagggcagggcctggtcctagggatgcttactggcagcaagagcagtgcccagtcagggtgggaggtagcaccaggctctgtgaccctcacccaagtgggggggtggtcagtggaagctggggaggcttcactcagctcaaccctgcagaccccccatatgagaacccccctcctcccaccagctgggggagatgacatcactgctctctccatggggagggggctcacagggcaccaagttcgggatcctaggactggcaggacctgctggagcctgagatgggccccaggggcctgaggttgcctcctcctgtccagacccagccttggcacctcccaagactgccaagggccctaccatggccccacagcccccagggctggcagttccatctaggagggtgcctctaggccccactctcaggctaggatggagaggcagatctgggcctggtgaggtgacctgcttctggaggggcagggccgcacccgagagcagggacaggtgcccgaacacagggtctccaggacgtagcgcccccccgcatacttgaatgtatgtgcgtatttattgctcacgtctgtgccatgttgtcaatgggtcctttccaacccaagaggtacatttgtttttctgtttttcctgaaaaataaagtcggccaagtgagtgtg

SEQ ID NO: 138570 - DNA, 3633 bp, Homo sapiens
  Payload ID: 7154
  Gene Symbol: GPSM1
  Gene Name: G-protein signaling modulator 1
  ENST ID: ENST00000440944
  CDS Start-End: 221-2248
gcgcgggcggcggtgacatcacggccacggcggcgggaggggcggcggcgccccgcgcacatcacttcctcggcgcctccccgggggaggacgggcgaacgaggcgcggacggacaggcggacagcagggcggacagcagggaggacagcagggcgggcagggggcggacggccacggcgcggggggcgctcccggctcccgctcccgcgtccccgacccatggcgggcccggccccgcccgcggccgacgagctcccgggcccggccgccaggcgcctctactccaggatggaggcgtcctgcctagagctggcgctggagggcgagcgtctgtgcaaggcgggcgacttcaagacaggcgtggccttctttgaggctgctgtgcaggtgggcaccgaggacctgaagacactgagtgccatctacagccagctgggcaacgcctacttctacctgaaggagcacggccgggcgctggaataccacaagcatgacctcctgctggcgcggaccatcggtgaccgcatgggggaggccaaggccagtggaaacctgggaaacacactcaaggtcctggggcgcttcgacgaggctgccgtctgctgccagcggcatctgagcatcgcccaagagcagggagacaaggttggggaggcgagggccctctacaacatcgggaacgtgtaccacgccaaaggcaagcaactgtcctggaacgccgcaaacgccacgcaggaccccgggcacctgccgcccgatgtccgagagaccctgtgcaaggcctccgagttctacgagaggaacctgtccctggtgaaggagctgggcgaccgtgcggcgcagggcagggcctacggcaacctgggcaacacccactatttgttggggaacttcacagaggccacgaccttccacaaggagcgcctggccattgctaaggagtttggagacaaggcagccgagaggagggcctacagcaacctggggaacgcccacgtcttcctggggcgctttgacgtggccgccgagtactacaagaagacgctgcaactgtctcggcagctcagggaccaggcagtggaggcgcaggcctgctacagtctgggcaacacctacacgctgctgcaggactacgagcgcgcggccgagtaccacctgcggcacctgctcattgcccaggagctggccgacagagtgggcgagggccgggcgtgctggagcctgggaaatgcctacgtgtccatggggcgcccagcgcaggccctgaccttcgccaagaagcacctgcagatctcccaggagatcggggaccgccatggggagctcacggcccgcatgaacgtggcgcagctgcagctggtgctcggccgcctgaccagcccggcagcctcagagaagcctgacctggccggctatgaggcccagggggccagacccaagaggacgcagaggctgagcgcggagacctgggacctgctgagactccccctggagcgggagcagaatggagacagccaccattcaggggactggcgggggcccagcagggactcgctacccctccccgtgaggagcaggaagtaccaggaaggcccggacgctgagaggaggccccgggagggcagccactccccgctggacagcgccgacgtccgggtgcacgtgccacgcacgagcatcccgagggccccgtcttcggacgaggagtgcttctttgacctgttgaccaagttccagagcagccgcatggacgaccagcgttgtcccctggacgatggccaggccggggctgccgaggccacggccgcccccaccctggaggacaggatcgcccagccctcgatgacggcctcgccccagaccgaggaattcttcgacctcatcgccagctcccagagccgccggctggacgaccagcgggccagcgtgggcagcctgccggggctgcgaatcacccacagcaatgcagggcacctccgaggccacggcgagccccaggagccgggggacgacttcttcaacatgctcatcaagtaccagtcctccaggatcgatgaccagcgctgcccgccacctgacgtactgccccggggccctaccatgccggacgaggacttcttcagcctcattcagagggtgcaggctaagcgcatggacgagcagcgggtggacctcgccgggggcccggagcagggggcaggcggcccgcccgagccccagcagcagtgccagcctggtgcgagctaaggccctgtgcccaccgccaggcccaccctgcccccactcctggacgccggtctcacagtcacagccacgtcctcccgaggccattgccgaggacaggcactgggcatgcagccccacggcctccccgacccagggcgacaggctcaggccaagctgcccgtggtgggagggcgtgcttccatcccgggctggcccccatggccctcagcttcctcccttctgcccctgccgcaggccggacggggccttcggcatgtcggccccgacctggtgctgtcagactcccgcatcctctcccccaagcccttcccgttctgccctgccctgccaaatgtgaaaccctgctgtctcccccaccctccccaaaggtgtctctgagccgcctcttggggccaccaaggacagggccatgttctgtccccccagagctggtcttgggatggccgtgtgacaggcatgctccacccctccagcttcgtcctggggcagggctccctccaagcctgtctccccactccccggccagaggtcagcaaccacagaaggccccccagaccacgcatggcagaccaggctgcagtggcagccctgaggtgccccccgccgagtcccagggccctgcaggggcctcgacaggagccgggcctatctctaaagcagagggaatggctgggcatgaacttcgacattccaaaaccccaagccaggaaaaagggcagggcctggtcctagggatgcttactggcagcaagagcagtgcccagtcagggtgggaggtagcaccaggctctgtgaccctcacccaagtgggggggtggtcagtggaagctggggaggcttcactcagctcaaccctgcagaccccccatatgagaacccccctcctcccaccagctgggggagatgacatcactgctctctccatggggagggggctcacagggcaccaagttcgggatcctaggactggcaggacctgctggagcctgagatgggccccaggggcctgaggttgcctcctcctgtccagacccagccttggcacctcccaagactgccaagggccctaccatggccccacagcccccagggctggcagttccatctaggagggtgcctctaggccccactctcaggctaggatggagaggcagatctgggcctggtgaggtgacctgcttctggaggggcagggccgcacccgagagcagggacaggtgcccgaacacagggtctccaggacgtagcgcccccccgcatacttgaatgtatgtgcgtatttattgctcacgtctgtgccatgttgtcaatgggtcctttccaacccaagaggtacatttgtttttctgtttttcctgaaaaataaagtcggccaagtgagtgtg

SEQ ID NO: 138571 - DNA, 2270 bp, Homo sapiens
  Payload ID: 7154
  Gene Symbol: GPSM1
  Gene Name: G-protein signaling modulator 1
  ENST ID: ENST00000616132
  CDS Start-End: 221-1594
gcgcgggcggcggtgacatcacggccacggcggcgggaggggcggcggcgccccgcgcacatcacttcctcggcgcctccccgggggaggacgggcgaacgaggcgcggacggacaggcggacagcagggcggacagcagggaggacagcagggcgggcagggggcggacggccacggcgcggggggcgctcccggctcccgctcccgcgtccccgacccatggcgggcccggccccgcccgcggccgacgagctcccgggcccggccgccaggcgcctctactccaggatggaggcgtcctgcctagagctggcgctggagggcgagcgtctgtgcaaggcgggcgacttcaagacaggcgtggccttctttgaggctgctgtgcaggtgggcaccgaggacctgaagacactgagtgccatctacagccagctgggcaacgcctacttctacctgaaggagcacggccgggcgctggaataccacaagcatgacctcctgctggcgcggaccatcggtgaccgcatgggggaggccaaggccagtggaaacctgggaaacacactcaaggtcctggggcgcttcgacgaggctgccgtctgctgccagcggcatctgagcatcgcccaagagcagggagacaaggttggggaggcgagggccctctacaacatcgggaacgtgtaccacgccaaaggcaagcaactgtcctggaacgccgcaaacgccacgcaggaccccgggcacctgccgcccgatgtccgagagaccctgtgcaaggcctccgagttctacgagaggaacctgtccctggtgaaggagctgggcgaccgtgcggcgcagggcagggcctacggcaacctgggcaacacccactatttgttggggaacttcacagaggccacgaccttccacaaggagcgcctggccattgctaaggagtttggagacaaggcagccgagaggagggcctacagcaacctggggaacgcccacgtcttcctggggcgctttgacgtggccgccgagtactacaagaagacgctgcaactgtctcggcagctcagggaccaggcagtggaggcgcaggcctgctacagtctgggcaacacctacacgctgctgcaggactacgagcgcgcggccgagtaccacctgcggcacctgctcattgcccaggagctggccgacagagtgggcgagggccgggcgtgctggagcctgggaaatgcctacgtgtccatggggcgcccagcgcaggccctgaccttcgccaagaagcacctgcagatctcccaggagatcggggaccgccatggggagctcacggcccgcatgaacgtggcgcagctgcagctggtgctcggccgcctgaccagcccggcagcctcagagaagcctgacctggccggctatgaggcccagggtgagttccagggttgtgggggggtcttgctccccacaggcacggaccgcatcaggagctgcggaggggtgggatcgaggccaggccagcatggcggaggtggcagccgccagaaaatggcgcctacaagccagttcttcttggcctcagggacagcacaggcctgaggttcaccctgagcccttcccacccgcatcctgagtggcgctgcagggctgctggatgaaggacaggaggtggtcgcctgttgccccactggctgctccagggcctccacccccacctccccctggagccctcggtgcagggagggcttctgtcctcagacccaagtaggagagggctgctgggaggcgagagggcatcagccagagggctgggctgggctgggctgggctgggctgtgggagccctatgtgcctggggcagtaatcaggcaaggcccaaggccatgcgaggccaccgtggtgacctcattcatggaccgctggtcgtcccatgccggtcagcagtgctgcagacacaggacagaacgtcccctgcaaagcgaaaagactaataggtgccaggggggtggtgccaggttgggccgacttcctgaggtggctggcaggtgggtgaggggcaggcttggggggagcagctgccccacccatgtgtcccccactcccaaaggtcttgagtttgccagcccccgagaagggatgcctgcctcccagaacgtacctggtgccccccaggcctgctaaggaccaggctgggaacaccaggcttggatgtggtgctgggctgccggagtttctttttcttatcttatttttaataattaaatgtttttataga

SEQ ID NO: 138572 - DNA, 3032 bp, Homo sapiens
  Payload ID: 7155
  Gene Symbol: GPSM2
  Gene Name: G-protein signaling modulator 2
  Uniprot ID: P81274
  ENST ID: ENST00000264126
  CDS Start-End: 497-2551
aggcgcagaggagggcggtgttgagaccggcggagcggcgggacccctaggtggcggagggacgctccgggaaagcgaggggcgctacgagctctggcccacgtgacctgccgggggcgggagcagggggcgcgccggcctcctgcggtgcccctgccttggggaggggccgtgaccacccgtctgtcgcccgaggcggccgccgctgcaccttcaccgcgtacccgggacccgcccgcccgcgggagaaatgttgctgaagtgctgctgaaagggccagagatgcaaggatttgggatacattttgaacctttaagctgtctgacattgacctcctttcattattaataaagaagaatcaggagcttaggatgtattaacaccaactcattaatatactaaccggacaatgttctacaaacaattctacattgtaaaggactggattggcacaaaataaaataattttattttattcagcttataatatgactcgatggaggaaaatttgataagcatgagagaagaccattcttttcatgttcgttacagaatggaagcttcttgcctagagctggccttggaaggggaacgtctatgtaaatcaggagactgccgcgctggcgtgtcattctttgaagctgcagttcaagttggaactgaagacctaaaaacacttagcgctatttacagccagttgggcaatgcttatttctatttgcatgattatgccaaagcattagaatatcaccatcatgatttaacccttgcaaggactattggagaccagctgggggaagcgaaagctagtggtaatctgggaaacaccttaaaagttcttgggaattttgacgaagccatagtttgttgtcagcgacacctagatatttccagagagcttaatgacaaggtgggagaagcaagagcactttacaatcttgggaatgtgtatcatgccaaagggaaaagttttggttgccctggtccccaggatgtaggagaatttccagaagaagtgagagatgctctgcaggcagccgtggatttttatgaggaaaacctatcattagtgactgctttgggtgaccgagcggcacaaggacgtgcctttggaaatcttggaaacacacattacctccttggcaacttcagggatgcagttatagctcatgagcagcgtctccttattgcaaaagaatttggagataaagcagctgaaagaagagcatatagcaaccttggaaatgcatatatatttcttggtgaatttgaaactgcctcggaatactacaagaagacactactgttggcccgacagcttaaagaccgagctgtagaagcacagtcttgttacagtcttggaaatacatatactttacttcaagactatgaaaaggccattgattatcatctgaagcacttagcaattgctcaagagctgaatgatagaattggtgaaggaagagcatgttggagcttaggaaatgcatacacagcactaggaaatcatgatcaagcaatgcattttgctgaaaagcacttggaaatttcaagagaggttggggataaaagtggtgaactaacagcacgacttaatctctcagaccttcaaatggttcttggtctgagctacagcacaaataactccataatgtctgaaaatactgaaattgatagcagtttgaatggtgtacgccccaagttgggacgccggcatagtatggaaaatatggaacttatgaagttaacaccagaaaaggtacagaactggaacagtgaaattcttgctaagcaaaaacctcttattgccaaaccttctgcaaagctactctttgtcaacagactgaaggggaaaaaatacaaaacgaattcctccactaaagttctccaagatgccagtaattctattgaccaccgaattccaaattctcagaggaaaatcagtgcagatactattggagatgaagggttctttgacttattaagccgatttcaaagcaataggatggatgatcagagatgttgcttacaagaaaagaactgccatacagcttcaacaacaacttcttccactccccctaaaatgatgctaaaaacatcatctgttcctgtggtatcccccaacacggatgagtttttagatcttcttgccagctcacagagtcgccgtctggatgaccagagggctagtttcagtaatttgccagggcttcgtctaacacaaaacagccagtcggtacttagccacctgatgactaatgacaacaaagaggctgatgaagatttctttgacatccttgtaaaatgtcaaggatccagattagatgatcaaagatgtgctccaccacctgctaccacaaagggtccgacagtaccagatgaagactttttcagccttattttacggtcccagggaaagagaatggatgaacagagagttcttttacaaagagatcaaaacagagacactgactttgggctaaaggactttttgcaaaataatgctttgttggagtttaaaaattcagggaaaaaatcggcagaccattagttactatggatttattttttttcctttcaaacacggtaaggaaacaatctattacttttttccttaaaaggagaatttatagcactgtaatacagcttaaaatatttttagaatgatgtaaatagttaaccttcagtagtctattaaggcattaatacttctctggacatgcgcgtttgagggtggaggggtcctgtaaggtgcttcatcgtctgtgattactgcttgggatgtgttctttggcagcttgtgagattactttacctagtgtttataaagtaggaagttaagtgaatcatagattagaatttaatactcttatggaaataattttttaacatcttaattgacaatggcgtttttttatacataaccatggatgtagtgggaaacaatgttgtttggtaaaaataatgtacttgatcaatgtaaaaaagtatataaaatagtcttactaaaaatctaggtttttttttcctcc

SEQ ID NO: 138573 - DNA, 7433 bp, Homo sapiens
  Payload ID: 7155
  Gene Symbol: GPSM2
  Gene Name: G-protein signaling modulator 2
  Uniprot ID: P81274
  ENST ID: ENST00000406462
  CDS Start-End: 774-2828
aaagaagataactcattcaaggtcaatcagcaatgtctgaagaagaaagaagaggacaggaaagaaacttcagtctgagggttgaggacacgtcccggagcagaggaggaccaagctcccaagccccctgtcaccttgacacgcagacggttccccaggactgcgaagaggggggcaaccagcgccccgccccgccccgctgcgccgcccgccattggccggtccgaaagacgcggggcgttgtcggtttgaatgagagcgcctggagccggggcgcaggcgcagaggagggcggtgttgagaccggcggagcggcgggacccctaggtggcggagggacgctccgggaaagcgaggggcgctacgagctctggcccacgtgacctgccgggggcgggagcagggggcgcgccggcctcctgcggtgcccctgccttggggaggggccgtgaccacccgtctgtcgcccgaggcggccgccgctgcaccttcaccgcgtacccgggacccgcccgcccgcgggagaaatgttgctgaagtgctgctgaaagggccagagatgcaaggatttgggatacattttgaacctttaagctgtctgacattgacctcctttcattattaataaagaagaatcaggagcttaggatgtattaacaccaactcattaatatactaaccggacaatgttctacaaacaattctacattgtaaaggactggattggcacaaaataaaataattttattttattcagcttataatatgactcgatggaggaaaatttgataagcatgagagaagaccattcttttcatgttcgttacagaatggaagcttcttgcctagagctggccttggaaggggaacgtctatgtaaatcaggagactgccgcgctggcgtgtcattctttgaagctgcagttcaagttggaactgaagacctaaaaacacttagcgctatttacagccagttgggcaatgcttatttctatttgcatgattatgccaaagcattagaatatcaccatcatgatttaacccttgcaaggactattggagaccagctgggggaagcgaaagctagtggtaatctgggaaacaccttaaaagttcttgggaattttgacgaagccatagtttgttgtcagcgacacctagatatttccagagagcttaatgacaaggtgggagaagcaagagcactttacaatcttgggaatgtgtatcatgccaaagggaaaagttttggttgccctggtccccaggatgtaggagaatttccagaagaagtgagagatgctctgcaggcagccgtggatttttatgaggaaaacctatcattagtgactgctttgggtgaccgagcggcacaaggacgtgcctttggaaatcttggaaacacacattacctccttggcaacttcagggatgcagttatagctcatgagcagcgtctccttattgcaaaagaatttggagataaagcagctgaaagaagagcatatagcaaccttggaaatgcatatatatttcttggtgaatttgaaactgcctcggaatactacaagaagacactactgttggcccgacagcttaaagaccgagctgtagaagcacagtcttgttacagtcttggaaatacatatactttacttcaagactatgaaaaggccattgattatcatctgaagcacttagcaattgctcaagagctgaatgatagaattggtgaaggaagagcatgttggagcttaggaaatgcatacacagcactaggaaatcatgatcaagcaatgcattttgctgaaaagcacttggaaatttcaagagaggttggggataaaagtggtgaactaacagcacgacttaatctctcagaccttcaaatggttcttggtctgagctacagcacaaataactccataatgtctgaaaatactgaaattgatagcagtttgaatggtgtacgccccaagttgggacgccggcatagtatggaaaatatggaacttatgaagttaacaccagaaaaggtacagaactggaacagtgaaattcttgctaagcaaaaacctcttattgccaaaccttctgcaaagctactctttgtcaacagactgaaggggaaaaaatacaaaacgaattcctccactaaagttctccaagatgccagtaattctattgaccaccgaattccaaattctcagaggaaaatcagtgcagatactattggagatgaagggttctttgacttattaagccgatttcaaagcaataggatggatgatcagagatgttgcttacaagaaaagaactgccatacagcttcaacaacaacttcttccactccccctaaaatgatgctaaaaacatcatctgttcctgtggtatcccccaacacggatgagtttttagatcttcttgccagctcacagagtcgccgtctggatgaccagagggctagtttcagtaatttgccagggcttcgtctaacacaaaacagccagtcggtacttagccacctgatgactaatgacaacaaagaggctgatgaagatttctttgacatccttgtaaaatgtcaaggatccagattagatgatcaaagatgtgctccaccacctgctaccacaaagggtccgacagtaccagatgaagactttttcagccttattttacggtcccagggaaagagaatggatgaacagagagttcttttacaaagagatcaaaacagagacactgactttgggctaaaggactttttgcaaaataatgctttgttggagtttaaaaattcagggaaaaaatcggcagaccattagttactatggatttattttttttcctttcaaacacggtaaggaaacaatctattacttttttccttaaaaggagaatttatagcactgtaatacagcttaaaatatttttagaatgatgtaaatagttaaccttcagtagtctattaaggcattaatacttctctggacatgcgcgtttgagggtggaggggtcctgtaaggtgcttcatcgtctgtgattactgcttgggatgtgttctttggcagcttgtgagattactttacctagtgtttataaagtaggaagttaagtgaatcatagattagaatttaatactcttatggaaataattttttaacatcttaattgacaatggcgtttttttatacataaccatggatgtagtgggaaacaatgttgtttggtaaaaataatgtacttgatcaatgtaaaaaagtatataaaatagtcttactaaaaatctaggtttttttttcctccatgaaaatctgtttttttaggccaaagtcagtataaaagaaactctacttcttgggctgggcatggtggctcattcctgtaatcccagcacattgggaggctgaggcaggaggatcgcttgaggctaggagttcaagaccaacctgggcaacatagacccccgtgtctatgaaaaataaatcagcagccaggcgcagtggctcacacctgtaatcccagcactttgggaggccgaagcgggcggatcacttgaggtcgggagtttgagaccagcctggccaacatagtgaaaccctgtctctactaaaaatacaaaaattagctgggcatggtggcatgcgcctgtagtttcagctacttgggaggctgaggcaggagaatcacttgaacccctgggaggcagagattgcagtgagctgagaccaagccactggactccagcctgagtgacagagcaagactctgtctcaaaaaaaaaaaaaacagcaagcatgctggcacacacctgtagtcccaactgcttaagaggctgaggcaggaggaccacttgagcccaggaggtggaggctgcactgagctatgatcgtgccactgcactccagcctgggtgacagagcaagaccctgtctctagaaaacaagtatcttttgtgtgttttgggctgtttaaaaaaattatttaaaatggtctcttctgttccataatactgctgtaaaacaaacttttctaagttctaatataaaaacaaaaaacaaaacccatgtggttaggtcaagaacctaggacacataaacaaacagaaaacagatgaaaactcacaaaaattaaatatgaaagaaagatgtcagctagaaccttagttgtcattaagctttgtcttccttatcccagatattgaaggcagtttacaaggggatgataacaaagtaactaactaactgtagcaaaagacaagtatgggacagactgggacctggagtaacactggatcacagactgcaaaggcccacgcttggaacaagttgccaacttgtttcactctgcttgcttcagactgtgcacagctgggatgggatctggggatgtggacccctattctttcaaaaagtcattcaggtgatttggatgggcaaatagaactatttctctaatggccaatgttttttaagagtcataacctggaattaattacattaagtgctcagctaaaaaaaaaaaaaaagttctaaattacaacctggattacattatgtttcatgtatactataaggtatgatgtcctggatagcattttaaaaactcaggtaagtttcatggggttcttataagaaaattcagttaagacaatataccaaaccacaacgtaaaaagtttgtgtatacaaactttttgtattatttgtacacaaagtacaaatttgtatttgtacacaaagtacaaactttgtgtattattttgtgtatacaatagttcttacagcctgtaaacattcaacattattccatttaaacattgtttttaacagctgtctaccctgttctgattttcctaaaagcttcacactatataggctgggcacaatggctcatgcctgtaatcccagcactttgggaggccgacaagggcgggtcacttgaggtcaggagttcgagaccagcctgaccaacatggtgaaaccccatctctactaaaaaatacaaaaattagccaggcatggtgatgcacatctgtaatcctagctactcgggagactgaggcaggagaatctcttgaacctgggaggtggaggttgcagtgagccgagattgtaccacctcactccagcctgggtgacagagcaaaactctcaaaaaaaagtaaaatttcaaaaaagcttcacaatataaaccttaattttaatgacatattggctagtcaataaacaagtcttatctcatctcatctcttttctgataacaaacacccgatgtgttcaatttgctttcatatttaagtctttcctgaattgctgtcatcattcaacaacagttgcatgtcgccttgctagctgtcaaagtagacttcatccccaaatggatatctgtaatgaaagaatacaaaggtgaaattttatttaaaaattttttaaaagaatttggttttggattaaaaggcatgcaagcagcattaattccactcacagttacagtctatcacctggggcattcactacttttcagagtcagatcacagttcaaaagacagctctcaccttgggggcatattccccaagtcagtgtgaacatgtcttgtcccaagaggacactttatacgcatggatgttcacaaatttattctaaactgcaggtgtctgtcaggattcatttgttaaacatgtcctctgtgttaaaaatcctaaaatccttttgcatttcttagaaaaaatcacgtttctgatgaaattctaaagatgtttgcaatattaaactagaatatattaacatgtataattttgagacaaggtcttgctctgtcacccaggctggagtacagtggctcgatcataactcactgccacctcacgatcctcttgcctcagccctccaagtagctgggactacaggcgtgtaccaccatgcctggctagttttatttttagtacatagccttgaacaactgagcttaagcgatcatcctccctcaaccttccaaagtgctaggactgtaggcatgagccactgcacctggcctaaaattacattgttacaggcacgtaagtaacacttcctggatccaaaaatgtgtattctgcatttcaacaactgaacttaagcgatcatcctccctcaaccttccaaagtgctaggactgtaggcatgagccactgcacctggcctaaaattacattgttacaggcacgtaagtaacacttcctggatccaaaaatgtgtattctgcatttcaacaactgaacttaagcgatcatcctccctcaaccttccaaagtgctaggactgtaggcatgagccactgcacctggcctaaaattacattgttacaggcacgtaagtaacacttcctggatccaaaaatgtgtattctgcatttcatattaaaataaaaaagcaagtgcttgggatacaaatatctgcatgaaaatttaaagactttattcctgactggtatcacttttagtaagcagttgaacataacttgtagtgtgaatatggttaaaacaaaggacacctgatgtctgtgaagtctgctaaggacaggtacaaaatttatgcattgctttttaaaaagtttaaaatgaggaatgcttttgataatcagaaagactaatgtaaagtgctgactgatgtcctgtctgcagttaaggaagacacccaactctcttcttcctcatcatggtattctctatgtatagatctctaaaaatgcaaacttcctatggacaagacaatatgatttgctataatatgaattaagatatggtaatatctaatagtctccactgctaggattctgagtaacacaaaaaataggttttataaaaagcccatgcacttcaattggtgggggaaaagaataaagtcattttcagtcgactgactctgtaaaacagattaccaatataacaagctatgttatctaaattgccctggcagtcttcagttttctctaagtaaacaaagtaaaaggaacaataaggatgcaggcgtagtaatagctgtggaaaagatgaaactacagccacagtgacctgtgggcagcctgcgtagagataagctgaggtgtcagtcagactgatcctggtaacgatactccatggctgcatgaagatgctggaggcatcaagtgggtggccttaactctagtggattcactaggcaatgtaaattggttagtgggttcccgtaagtgcctgtaacaataaaatttctttttcaatgtccccaattcaaactggcctccttaactatccagaatcagtgatgcctgtcatctgttcatcttaaaataaacacttcttactttatgggatgtaaatatcaaagagaagatgaaatgaaaagcttttacatatataacgtgtttgttaattctaattgtcagtaaaaatgtgaatgttgaagttgaaa

SEQ ID NO: 138574 - DNA, 731 bp, Homo sapiens
  Payload ID: 7155
  Gene Symbol: GPSM2
  Gene Name: G-protein signaling modulator 2
  ENST ID: ENST00000441735
  CDS Start-End: 1-653
atatggaacttatgaagttaacaccagaaaaggtacagaactggaacagtgaaattcttgctaagcaaaaacctcttattgccaaaccttctgcaaagctactctttgtcaacagactgaaggggaaaaaatacaaaacgaattcctccactaaagttctccaagatgccagtaattctattgaccaccgaattccaaattctcagaggaaaatcagtgcagatactattggagatgaagggttctttgacttattaagccgatttcaaagcaataggatggatgatcagagatgttgcttacaagaaaagaactgccatacagcttcaacaacaacttcttccactccccctaaaatgatgctaaaaacatcatctgttcctgtggtatcccccaacacggatgagtttttagatcttcttgccagctcacagagtcgccgtctggatgaccagagggctagtttcagtaatttgccagggcttcgtctaacacaaaacagccagtcggtacttagccacctgatgactaatgacaacaaagaggctgatgaagatttctttgacatccttgtaaaatgtcaagtatgtctgtatatttttttcgttctgcatacagctcagataccactgaaaacattggtagtgttataattctcattcaggaagggcttattttgtattagagagttattattgtccatcattcagtaaaaaattattgaacaccga

SEQ ID NO: 138575 - DNA, 571 bp, Homo sapiens
  Payload ID: 7155
  Gene Symbol: GPSM2
  Gene Name: G-protein signaling modulator 2
  ENST ID: ENST00000446797
  CDS Start-End: 416-571
gcggcgtcgatgctcaagaaaccagaaactcggcttgaggagttgctgcttttttgtcggaaggtcttcaaatgagagtaaagcgttaagagcctcactcctgagtctttttttttttttaagataaaaactatactagagtccagcgacttcttaccactctgaataaatgttgctgaagtgctgctgaaagggccagagatgcaaggatttgggatacattttgaacctttaagctgtctgacattgacctcctttcattattaataaagaagaatcaggagcttaggatgtattaacaccaactcattaatatactaaccggacaatgttctacaaacaattctacattgtaaaggactggattggcacaaaataaaataattttattttattcagcttataatatgactcgatggaggaaaatttgataagcatgagagaagaccattcttttcatgttcgttacagaatggaagcttcttgcctagagctggccttggaaggggaacgtctatgtaaatcaggagactgccgcgctggcgtgtcattctttgaagctgcagttcaa

SEQ ID NO: 138576 - DNA, 992 bp, Homo sapiens
  Payload ID: 7155
  Gene Symbol: GPSM2
  Gene Name: G-protein signaling modulator 2
  ENST ID: ENST00000435475
  CDS Start-End: 768-992
aggcgtttgaggggctctcggagggaggtgacagggaggggtgcgtgtgcgtgcgtgtggggcttctgtgtccagaggtctgggggtgacgtcctttgttttgggcaggaggcgggctgggggcttgcgggacctgtgggcgctgcggggacgcggcgtcgatgctcaagaaaccagaaactcggcttgaggagttgctgcttttttgtcggaaggtcttcaaatgagagtaaagcgttaagagcctcactcctgagtctttttttttttttaagataaaaactatactagagtccagcgacttcttaccactctgaatgtgagtaacaaattgtgaatcaaagcccgaatccccgtggaattcattccgaggctgattgcaatcacttggagtcgggcgcgtcctacctaaaccaggcagtttatggcaaatacctgccttgaccgtgcttaaattagtgaacttttgggcaccaactggtcgatttaccatagaaattggtagttgctgcaaaaagaaaatgttgctgaagtgctgctgaaagggccagagatgcaaggatttgggatacattttgaacctttaagctgtctgacattgacctcctttcattattaataaagaagaatcaggagcttaggatgtattaacaccaactcattaatatactaaccggacaatgttctacaaacaattctacattgtaaaggactggattggcacaaaataaaataattttattttattcagcttataatatgactcgatggaggaaaatttgataagcatgagagaagaccattcttttcatgttcgttacagaatggaagcttcttgcctagagctggccttggaaggggaacgtctatgtaaatcaggagactgccgcgctggcgtgtcattctttgaagctgcagttcaagttggaactgaagacctaaaaacacttagcgctatttacagccagttgggcaatgcttatttctatttg

SEQ ID NO: 138577 - DNA, 904 bp, Homo sapiens
  Payload ID: 7155
  Gene Symbol: GPSM2
  Gene Name: G-protein signaling modulator 2
  ENST ID: ENST00000435987
  CDS Start-End: 265-904
aggcgcagaggagggcggtgttgagaccggcggagcggcgggacccctaggtggcggagggacgctccgggaaagcgaggggcgctacgagctctggcccacgtgacctgccgggggcgggagcagggggcgcgccggcctcctgcggtgcccctgccttggggaggggccgtgaccacccgtctgtcgcccgaggcggccgccgctgcaccttcaccgcgtacccgggacccgcccgcccgcgggagcttataatatgactcgatggaggaaaatttgataagcatgagagaagaccattcttttcatgttcgttacagaatggaagcttcttgcctagagctggccttggaaggggaacgtctatgtaaatcaggagactgccgcgctggcgtgtcattctttgaagctgcagttcaagttggaactgaagacctaaaaacacttagcgctatttacagccagttgggcaatgcttatttctatttgcatgattatgccaaagcattagaatatcaccatcatgatttaacccttgcaaggactattggagaccagctgggggaagcgaaagctagtggtaatctgggaaacaccttaaaagttcttgggaattttgacgaagccatagtttgttgtcagcgacacctagatatttccagagagcttaatgacaaggtgggagaagcaagagcactttacaatcttgggaatgtgtatcatgccaaagggaaaagttttggttgccctggtccccaggatgtaggagaatttccagaagaagtgagagatgctctgcaggcagccgtggatttttatgaggaaaacctatcattagtgactgctttgggtgaccgagcggcacaaggacgtgcctttggaaatcttggaaacacacattacc

SEQ ID NO: 138578 - DNA, 1476 bp, Homo sapiens
  Payload ID: 7156
  Gene Symbol: GPSM3
  Gene Name: G-protein signaling modulator 3
  Uniprot ID: Q9Y4H4
  ENST ID: ENST00000375040
  CDS Start-End: 394-876
gaaagagcagaagaggaggtggggtggagggagcagagccagggattaggggactactgaggctctggagatgagaccgccaggagtccttccccaccatgagccccctccactcctgcagctggaggagtttttcccagtctcagtgctgccctggggcgagagagactgaacaagctgtttgggtgggaagagaatggaggaagttgacagggatgggcggggcccgtgggggggctgaccaggaacccagcttcctgctcagtacccaggcatccagcccccagctcacccccaccccttccagcccccactcccctcaggaacccaaggttccagccctcctcccaaatcccagccacccctcccccaccagtttctcccctctaggggatggaggctgagagaccccaggaagaagaggatggtgagcagggcccccctcaggatgaggaaggctggccccctccaaactccaccactcggccttggcgatctgctcctccatcccctcctcctccagggacccgccacacagccctgggaccccgctcggcctccctgctctccctgcagactgaactccttctggacctggtggctgaagcccagtcccgccgcctggaggagcagagggccaccttctacaccccccaaaacccctcaagcctagcccctgccccactccgtcctctcgaggacagagaacagctttacagcactatcctcagtcaccagtgccagcggatggaagcccagcggtcagagcctcccctccctccaggggggcaagagctcctggagttgctgctgagagttcagggtgggggtcgaatggaggagcaaaggtcccggccccccacacacacctgctgagacttgagccccaaccagcccttccttgccactggtctcaaagctgggcagcccattgcatgccctcaactcttgcttggcaggggtaccagagactgaaagacacggcacaaatctcaatattcatctcccacatcaccttccctgggaactggacagggtgaaagtcctcaaactctgggaacaggcgagatggaacagggatttaactccccgcccacaggtccatgggagcttgaggcagtaagggggatcccaggcacccatctcaaggagtggctgggagtcttttccctaacttgtggggacaccaccagttgtcaagctactaggcagtagggtctgagggctcaggcctccacctgagaggttataacctgagagacagctctacccttcctcccagtaagaagggaaggtgggtgggcacctgagagattaagactattctcccagtcccactaccagcacccccgatccctgagactgaggggtttacgggctgtgaatggaccttcagccctgcccaccctccctccccactgctgctgagtctgtctgatgttttggttgtgtgaataaatataattcccctctgga

SEQ ID NO: 138579 - DNA, 1456 bp, Homo sapiens
  Payload ID: 7156
  Gene Symbol: GPSM3
  Gene Name: G-protein signaling modulator 3
  Uniprot ID: Q9Y4H4
  ENST ID: ENST00000375043
  CDS Start-End: 374-856
ccggagcggggatcacctcaacttgactgtggtcccccagccctccaagaaatgcccataaaccaaggaggagagggtaaaaaatagaagaatacatggaattggggagaagaatgggaaaaaagatgggagtgactgcataatgtcagcattttgtgcttttggctcagcatttggattggatggaggattttcatcctgaaaccagccctccgtcgccaccgaccatggaataattgtcttccacgaaactcttccctggtgccaaaaagggttttatgtatatatttgagagctccacatccctggatctgaatcctccacttcccactggaaccatgcccctcccagtcccgtttctcccctctaggggatggaggctgagagaccccaggaagaagaggatggtgagcagggcccccctcaggatgaggaaggctggccccctccaaactccaccactcggccttggcgatctgctcctccatcccctcctcctccagggacccgccacacagccctgggaccccgctcggcctccctgctctccctgcagactgaactccttctggacctggtggctgaagcccagtcccgccgcctggaggagcagagggccaccttctacaccccccaaaacccctcaagcctagcccctgccccactccgtcctctcgaggacagagaacagctttacagcactatcctcagtcaccagtgccagcggatggaagcccagcggtcagagcctcccctccctccaggggggcaagagctcctggagttgctgctgagagttcagggtgggggtcgaatggaggagcaaaggtcccggccccccacacacacctgctgagacttgagccccaaccagcccttccttgccactggtctcaaagctgggcagcccattgcatgccctcaactcttgcttggcaggggtaccagagactgaaagacacggcacaaatctcaatattcatctcccacatcaccttccctgggaactggacagggtgaaagtcctcaaactctgggaacaggcgagatggaacagggatttaactccccgcccacaggtccatgggagcttgaggcagtaagggggatcccaggcacccatctcaaggagtggctgggagtcttttccctaacttgtggggacaccaccagttgtcaagctactaggcagtagggtctgagggctcaggcctccacctgagaggttataacctgagagacagctctacccttcctcccagtaagaagggaaggtgggtgggcacctgagagattaagactattctcccagtcccactaccagcacccccgatccctgagactgaggggtttacgggctgtgaatggaccttcagccctgcccaccctccctccccactgctgctgagtctgtctgatgttttggttgtgtgaataaatataattcccctctgga

SEQ ID NO: 138580 - DNA, 1476 bp, Homo sapiens; identical to SEQ ID NO: 138578
  Payload ID: 7156
  Gene Symbol: GPSM3
  Gene Name: G-protein signaling modulator 3
  Uniprot ID: Q9Y4H4
  ENST ID: ENST00000383265
  CDS Start-End: 394-876

SEQ ID NO: 138581 - DNA, 1456 bp, Homo sapiens; identical to SEQ ID NO: 138579
  Payload ID: 7156
  Gene Symbol: GPSM3
  Gene Name: G-protein signaling modulator 3
  Uniprot ID: Q9Y4H4
  ENST ID: ENST00000383269
  CDS Start-End: 374-856

SEQ ID NO: 138582 - DNA, 1476 bp, Homo sapiens; identical to SEQ ID NO: 138578
  Payload ID: 7156
  Gene Symbol: GPSM3
  Gene Name: G-protein signaling modulator 3
  Uniprot ID: Q9Y4H4
  ENST ID: ENST00000429209
  CDS Start-End: 394-876

SEQ ID NO: 138583 - DNA, 1456 bp, Homo sapiens; identical to SEQ ID NO: 138579
  Payload ID: 7156
  Gene Symbol: GPSM3
  Gene Name: G-protein signaling modulator 3
  Uniprot ID: Q9Y4H4
  ENST ID: ENST00000441705
  CDS Start-End: 374-856

SEQ ID NO: 138584 - DNA, 1456 bp, Homo sapiens; identical to SEQ ID NO: 138579
  Payload ID: 7156
  Gene Symbol: GPSM3
  Gene Name: G-protein signaling modulator 3
  Uniprot ID: Q9Y4H4
  ENST ID: ENST00000448684
  CDS Start-End: 374-856

SEQ ID NO: 138585 - DNA, 1476 bp, Homo sapiens; identical to SEQ ID NO: 138578
  Payload ID: 7156
  Gene Symbol: GPSM3
  Gene Name: G-protein signaling modulator 3
  Uniprot ID: Q9Y4H4
  ENST ID: ENST00000414839
  CDS Start-End: 394-876

SEQ ID NO: 138586 - DNA, 1456 bp, Homo sapiens; identical to SEQ ID NO: 138579
  Payload ID: 7156
  Gene Symbol: GPSM3
  Gene Name: G-protein signaling modulator 3
  Uniprot ID: Q9Y4H4
  ENST ID: ENST00000445326
  CDS Start-End: 374-856

SEQ ID NO: 138587 - DNA, 1456 bp, Homo sapiens; identical to SEQ ID NO: 138579
  Payload ID: 7156
  Gene Symbol: GPSM3
  Gene Name: G-protein signaling modulator 3
  Uniprot ID: Q9Y4H4
  ENST ID: ENST00000457070
  CDS Start-End: 374-856

SEQ ID NO: 138588 - DNA, 1476 bp, Homo sapiens; identical to SEQ ID NO: 138578
  Payload ID: 7156
  Gene Symbol: GPSM3
  Gene Name: G-protein signaling modulator 3
  Uniprot ID: Q9Y4H4
  ENST ID: ENST00000424520
  CDS Start-End: 394-876

SEQ ID NO: 138589 - DNA, 1456 bp, Homo sapiens
  Payload ID: 7156
  Gene Symbol: GPSM3
  Gene Name: G-protein signaling modulator 3
  Uniprot ID: Q9Y4H4
  ENST ID: ENST00000420041
  CDS Start-End: 374-856
ccggagcggggatcacctcaacttgactgtggtcccccagccctccaagaaatgcccataaaccaaggaggagagggtaaaaaatagaagaatacatggaattggggagaagaatgggaaaaaagatgggagtgactgcataatgtcagcattttgtgcttttggctcagcatttggattggatggaggattttcatcctgaaaccagccctccgtcgccaccgaccatggaataattgtcttccacgaaactcttccctggtgccaaaaagggttttatgtatatatttgagagctccacatccctggatctgaatcctccacttcccactggaaccatgcccctcccagtcccgtttctcccctctaggggatggaggctgagagaccccaggaagaagaggatggtgagcagggcccccctcaggatgaggaaggctggccccctccaaactccaccactcggccttggcgatctgctcctccgtcccctcctcctccagggacccgccacacagccctgggaccccgctcggcctccctgctctccctgcagactgaactccttctggacctggtggctgaagcccagtcccgccgcctggaggagcagagggccaccttctacaccccccaaaacccctcaagcctagcccctgccccactccgtcctctcgaggacagagaacagctttacagcactatcctcagtcaccagtgccagcggatggaagcccagcggtcagagcctcccctccctccaggggggcaagagctcctggagttgctgctgagagttcagggtgggggtcgaatggaggagcaaaggtcccggccccccacacacacctgctgagacttgagccccaaccagcccttccttgccactggtctcaaagctgggcagcccattgcatgccctcaactcttgcttggcaggggtaccagagactgaaagacacggcacaaatctcaatattcatctcccacatcaccttccctgggaactggacagggtgaaagtcctcaaactctgggaacaggcgagatggaacagggatttaactccccgcccacaggtccatgggagcttgaggcagtaagggggatcccaggcacccatctcaaggagtggctgggagtcttttccctaacttgtggggacaccaccagttgtcaagctactaggcagtagggtctgagggctcaggcctccacctgagaggttataacctgagagacagctctacccttcctcccagtaagaagggaaggtgggtgggcacctgagagattaagactattctcccagtcccactaccagcacccccgatccctgagactgaggggtttacgggctgtgaatggaccttcagccctgcccaccctccctccccactgctgctgagtctgtctgatgttttggttgtgtgaataaatataattcccctctgga

SEQ ID NO: 138590 - DNA, 1476 bp, Homo sapiens
  Payload ID: 7156
  Gene Symbol: GPSM3
  Gene Name: G-protein signaling modulator 3
  Uniprot ID: Q9Y4H4
  ENST ID: ENST00000453667
  CDS Start-End: 394-876
gaaagagcagaagaggaggtggggtggagggagcagagccagggattaggggactactgaggctctggagatgagaccgccaggagtccttccccaccatgagccccctccactcctgcagctggaggagtttttcccagtctcagtgctgccctggggcgagagagactgaacaagctgtttgggtgggaagagaatggaggaagttgacagggatgggcggggcccgtgggggggctgaccaggaacccagcttcctgctcagtacccaggcatccagcccccagctcacccccaccccttccagcccccactcccctcaggaacccaaggttccagccctcctcccaaatcccagccacccctcccccaccagtttctcccctctaggggatggaggctgagagaccccaggaagaagaggatggtgagcagggcccccctcaggatgaggaaggctggccccctccaaactccaccactcggccttggcgatctgctcctccgtcccctcctcctccagggacccgccacacagccctgggaccccgctcggcctccctgctctccctgcagactgaactccttctggacctggtggctgaagcccagtcccgccgcctggaggagcagagggccaccttctacaccccccaaaacccctcaagcctagcccctgccccactccgtcctctcgaggacagagaacagctttacagcactatcctcagtcaccagtgccagcggatggaagcccagcggtcagagcctcccctccctccaggggggcaagagctcctggagttgctgctgagagttcagggtgggggtcgaatggaggagcaaaggtcccggccccccacacacacctgctgagacttgagccccaaccagcccttccttgccactggtctcaaagctgggcagcccattgcatgccctcaactcttgcttggcaggggtaccagagactgaaagacacggcacaaatctcaatattcatctcccacatcaccttccctgggaactggacagggtgaaagtcctcaaactctgggaacaggcgagatggaacagggatttaactccccgcccacaggtccatgggagcttgaggcagtaagggggatcccaggcacccatctcaaggagtggctgggagtcttttccctaacttgtggggacaccaccagttgtcaagctactaggcagtagggtctgagggctcaggcctccacctgagaggttataacctgagagacagctctacccttcctcccagtaagaagggaaggtgggtgggcacctgagagattaagactattctcccagtcccactaccagcacccccgatccctgagactgaggggtttacgggctgtgaatggaccttcagccctgcccaccctccctccccactgctgctgagtctgtctgatgttttggttgtgtgaataaatataattcccctctgga

SEQ ID NO: 138591 - DNA, 1476 bp, Homo sapiens; identical to SEQ ID NO: 138578
  Payload ID: 7156
  Gene Symbol: GPSM3
  Gene Name: G-protein signaling modulator 3
  Uniprot ID: Q9Y4H4
  ENST ID: ENST00000432871
  CDS Start-End: 394-876

SEQ ID NO: 138592 - DNA, 1460 bp, Homo sapiens
  Payload ID: 7156
  Gene Symbol: GPSM3
  Gene Name: G-protein signaling modulator 3
  ENST ID: ENST00000474364
  CDS Start-End: 387-860
ccagggattaggggactactgaggctctggagatgagaccgccaggagtccttccccaccatgagccccctccactcctgcagctggaggagtttttcccagtctcagtgctgccctggggcgagagagactgaacaagctgtttgggtgggaagagaatggaggaagttgacagggatgggcggggcccgtgggggggctgaccaggaacccagcttcctgctcagtacccaggcatccagcccccagctcacccccaccccttccagcccccactcccctcaggaacccaaggttccagccctcctcccaaatcccagccacccctcccccaccagtttctcccctctaggggatggaggctgagagaccccaggaagaagaggatggtgagcagaatggacatattttggcatcagggcccccctcaggatgaggaaggctggccccctccaaactccaccactcggccttggcgatctgctcctccatcccctcctcctccagggacccgccacacagccctgggaccccgctcggcctccctgctctccctgcagactgaactccttctggacctggtggctgaagcccagtcccgccgcctggaggagcagagggccaccttctacaccccccaaaacccctcaagcctagcccctgccccactccgtcctctcgaggacagagaacagctttacagcactatcctcagtcaccagtgccagcggatggaagcccagcggtcagagcctcccctccctccaggggggcaagagctcctggagttgctgctgagagttcagggtgggggtcgaatggaggagcaaaggtcccggccccccacacacacctgctgagacttgagccccaaccagcccttccttgccactggtctcaaagctgggcagcccattgcatgccctcaactcttgcttggcaggggtaccagagactgaaagacacggcacaaatctcaatattcatctcccacatcaccttccctgggaactggacagggtgaaagtcctcaaactctgggaacaggcgagatggaacagggatttaactccccgcccacaggtccatgggagcttgaggcagtaagggggatcccaggcacccatctcaaggagtggctgggagtcttttccctaacttgtggggacaccaccagttgtcaagctactaggcagtagggtctgagggctcaggcctccacctgagaggttataacctgagagacagctctacccttcctcccagtaagaagggaaggtgggtgggcacctgagagattaagactattctcccagtcccactaccagcacccccgatccctgagactgaggggtttacgggctgtgaatggaccttcagccctgcccaccctccctccccactgctgctgagtctgtctgatgttttggttgtgtgaataaatataattcccctctgga

SEQ ID NO: 138593 - DNA, 1417 bp, Homo sapiens
  Payload ID: 7156
  Gene Symbol: GPSM3
  Gene Name: G-protein signaling modulator 3
  ENST ID: ENST00000473977
  CDS Start-End: 373-522
gggtggagggagcagagccagggattaggggactactgaggctctggagatgagaccgccaggagtccttccccaccatgagccccctccactcctgcagctggaggagtttttcccagtctcagtgctgccctggggcgagagagactgaacaagctgtttgggtgggaagagaatggaggaagttgacagggatgggcggggcccgtgggggggctgaccaggaacccagcttcctgctcagtacccaggcatccagcccccagctcacccccaccccttccagcccccactcccctcaggaacccaaggttccagccctcctcccaaatcccagccacccctcccccaccagtttctcccctctaggggatggaggctgagagaccccaggaagaagaggatggtgagcagggcccccctcaggatgaggaaggctggccccctccaaactccaccactcggccttggcgatctgctcctccatcccctcctcctccagggacccgccacacagactgaactccttctggacctggtggctgaagcccagtcccgccgcctggaggagcagagggccaccttctacaccccccaaaacccctcaagcctagcccctgccccactccgtcctctcgaggacagagaacagctttacagcactatcctcagtcaccagtgccagcggatggaagcccagcggtcagagcctcccctccctccaggggggcaagagctcctggagttgctgctgagagttcagggtgggggtcgaatggaggagcaaaggtcccggccccccacacacacctgctgagacttgagccccaaccagcccttccttgccactggtctcaaagctgggcagcccattgcatgccctcaactcttgcttggcaggggtaccagagactgaaagacacggcacaaatctcaatattcatctcccacatcaccttccctgggaactggacagggtgaaagtcctcaaactctgggaacaggcgagatggaacagggatttaactccccgcccacaggtccatgggagcttgaggcagtaagggggatcccaggcacccatctcaaggagtggctgggagtcttttccctaacttgtggggacaccaccagttgtcaagctactaggcagtagggtctgagggctcaggcctccacctgagaggttataacctgagagacagctctacccttcctcccagtaagaagggaaggtgggtgggcacctgagagattaagactattctcccagtcccactaccagcacccccgatccctgagactgaggggtttacgggctgtgaatggaccttcagccctgcccaccctccctccccactgctgctgagtctgtctgatgttttggttgtgtgaataaatataattcccctctgga

SEQ ID NO: 138594 - DNA, 1417 bp, Homo sapiens; identical to SEQ ID NO: 138593
  Payload ID: 7156
  Gene Symbol: GPSM3
  Gene Name: G-protein signaling modulator 3
  ENST ID: ENST00000472768
  CDS Start-End: 373-522

SEQ ID NO: 138595 - DNA, 1460 bp, Homo sapiens; identical to SEQ ID NO: 138592
  Payload ID: 7156
  Gene Symbol: GPSM3
  Gene Name: G-protein signaling modulator 3
  ENST ID: ENST00000494847
  CDS Start-End: 387-860

SEQ ID NO: 138596 - DNA, 1417 bp, Homo sapiens; identical to SEQ ID NO: 138593
  Payload ID: 7156
  Gene Symbol: GPSM3
  Gene Name: G-protein signaling modulator 3
  ENST ID: ENST00000476582
  CDS Start-End: 373-522

SEQ ID NO: 138597 - DNA, 1417 bp, Homo sapiens; identical to SEQ ID NO: 138593
  Payload ID: 7156
  Gene Symbol: GPSM3
  Gene Name: G-protein signaling modulator 3
  ENST ID: ENST00000478656
  CDS Start-End: 373-522

SEQ ID NO: 138598 - DNA, 1460 bp, Homo sapiens; identical to SEQ ID NO: 138592
  Payload ID: 7156
  Gene Symbol: GPSM3
  Gene Name: G-protein signaling modulator 3
  ENST ID: ENST00000479498
  CDS Start-End: 387-860

SEQ ID NO: 138599 - DNA, 1417 bp, Homo sapiens; identical to SEQ ID NO: 138593
  Payload ID: 7156
  Gene Symbol: GPSM3
  Gene Name: G-protein signaling modulator 3
  ENST ID: ENST00000481251
  CDS Start-End: 373-522

SEQ ID NO: 138600 - DNA, 1460 bp, Homo sapiens
  Payload ID: 7156
  Gene Symbol: GPSM3
  Gene Name: G-protein signaling modulator 3
  ENST ID: ENST00000472154
  CDS Start-End: 387-860
ccagggattaggggactactgaggctctggagatgagaccgccaggagtccttccccaccatgagccccctccactcctgcagctggaggagtttttcccagtctcagtgctgccctggggcgagagagactgaacaagctgtttgggtgggaagagaatggaggaagttgacagggatgggcggggcccgtgggggggctgaccaggaacccagcttcctgctcagtacccaggcatccagcccccagctcacccccaccccttccagcccccactcccctcaggaacccaaggttccagccctcctcccaaatcccagccacccctcccccaccagtttctcccctctaggggatggaggctgagagaccccaggaagaagaggatggtgagcagaatggacatattttggcatcagggcccccctcaggatgaggaaggctggccccctccaaactccaccactcggccttggcgatctgctcctccgtcccctcctcctccagggacccgccacacagccctgggaccccgctcggcctccctgctctccctgcagactgaactccttctggacctggtggctgaagcccagtcccgccgcctggaggagcagagggccaccttctacaccccccaaaacccctcaagcctagcccctgccccactccgtcctctcgaggacagagaacagctttacagcactatcctcagtcaccagtgccagcggatggaagcccagcggtcagagcctcccctccctccaggggggcaagagctcctggagttgctgctgagagttcagggtgggggtcgaatggaggagcaaaggtcccggccccccacacacacctgctgagacttgagccccaaccagcccttccttgccactggtctcaaagctgggcagcccattgcatgccctcaactcttgcttggcaggggtaccagagactgaaagacacggcacaaatctcaatattcatctcccacatcaccttccctgggaactggacagggtgaaagtcctcaaactctgggaacaggcgagatggaacagggatttaactccccgcccacaggtccatgggagcttgaggcagtaagggggatcccaggcacccatctcaaggagtggctgggagtcttttccctaacttgtggggacaccaccagttgtcaagctactaggcagtagggtctgagggctcaggcctccacctgagaggttataacctgagagacagctctacccttcctcccagtaagaagggaaggtgggtgggcacctgagagattaagactattctcccagtcccactaccagcacccccgatccctgagactgaggggtttacgggctgtgaatggaccttcagccctgcccaccctccctccccactgctgctgagtctgtctgatgttttggttgtgtgaataaatataattcccctctgga

SEQ ID NO: 138601 - DNA, 1460 bp, Homo sapiens; identical to SEQ ID NO: 138592
  Payload ID: 7156
  Gene Symbol: GPSM3
  Gene Name: G-protein signaling modulator 3
  ENST ID: ENST00000472817
  CDS Start-End: 387-860

SEQ ID NO: 138602 - DNA, 1417 bp, Homo sapiens
  Payload ID: 7156
  Gene Symbol: GPSM3
  Gene Name: G-protein signaling modulator 3
  ENST ID: ENST00000496307
  CDS Start-End: 373-522
gggtggagggagcagagccagggattaggggactactgaggctctggagatgagaccgccaggagtccttccccaccatgagccccctccactcctgcagctggaggagtttttcccagtctcagtgctgccctggggcgagagagactgaacaagctgtttgggtgggaagagaatggaggaagttgacagggatgggcggggcccgtgggggggctgaccaggaacccagcttcctgctcagtacccaggcatccagcccccagctcacccccaccccttccagcccccactcccctcaggaacccaaggttccagccctcctcccaaatcccagccacccctcccccaccagtttctcccctctaggggatggaggctgagagaccccaggaagaagaggatggtgagcagggcccccctcaggatgaggaaggctggccccctccaaactccaccactcggccttggcgatctgctcctccgtcccctcctcctccagggacccgccacacagactgaactccttctggacctggtggctgaagcccagtcccgccgcctggaggagcagagggccaccttctacaccccccaaaacccctcaagcctagcccctgccccactccgtcctctcgaggacagagaacagctttacagcactatcctcagtcaccagtgccagcggatggaagcccagcggtcagagcctcccctccctccaggggggcaagagctcctggagttgctgctgagagttcagggtgggggtcgaatggaggagcaaaggtcccggccccccacacacacctgctgagacttgagccccaaccagcccttccttgccactggtctcaaagctgggcagcccattgcatgccctcaactcttgcttggcaggggtaccagagactgaaagacacggcacaaatctcaatattcatctcccacatcaccttccctgggaactggacagggtgaaagtcctcaaactctgggaacaggcgagatggaacagggatttaactccccgcccacaggtccatgggagcttgaggcagtaagggggatcccaggcacccatctcaaggagtggctgggagtcttttccctaacttgtggggacaccaccagttgtcaagctactaggcagtagggtctgagggctcaggcctccacctgagaggttataacctgagagacagctctacccttcctcccagtaagaagggaaggtgggtgggcacctgagagattaagactattctcccagtcccactaccagcacccccgatccctgagactgaggggtttacgggctgtgaatggaccttcagccctgcccaccctccctccccactgctgctgagtctgtctgatgttttggttgtgtgaataaatataattcccctctgga

SEQ ID NO: 138603 - DNA, 1460 bp, Homo sapiens; identical to SEQ ID NO: 138592
  Payload ID: 7156
  Gene Symbol: GPSM3
  Gene Name: G-protein signaling modulator 3
  ENST ID: ENST00000487761
  CDS Start-End: 387-860

SEQ ID NO: 138604 - DNA, 1417 bp, Homo sapiens; identical to SEQ ID NO: 138593
  Payload ID: 7156
  Gene Symbol: GPSM3
  Gene Name: G-protein signaling modulator 3
  ENST ID: ENST00000472993
  CDS Start-End: 373-522

SEQ ID NO: 138605 - DNA, 1177 bp, Homo sapiens
  Payload ID: 7156
  Gene Symbol: GPSM3
  Gene Name: G-protein signaling modulator 3
  ENST ID: ENST00000619085
  CDS Start-End: 1-375
atgtatatatttgagagctccacatccctggatctgaatcctccacttcccactggaaccatgcccctcccagtcccgtttctcccctctaggggatggaggctgagagaccccaggaagaagaggatggtgagcagggcccccctcaggatgaggaaggctggccccctccaaactccaccactcggccttggcgatctgctcctccatcccctcctcctccagggacccgccacacagccctgggaccccgctcggcctccctgctctccctgcagactgaactccttctggacctggtggctgaagcccagtcccgccgcctggaggagcagagggccaccttctacaccccccaaaacccctcaagcctagcccctgccccactccgtcctctcgaggacagagaacagctttacagcactatcctcagtcaccagtgccagcggatggaagcccagcggtcagagcctcccctccctccaggggggcaagagctcctggagttgctgctgagagttcagggtgggggtcgaatggaggagcaaaggtcccggccccccacacacacctgctgagacttgagccccaaccagcccttccttgccactggtctcaaagctgggcagcccattgcatgccctcaactcttgcttggcaggggtaccagagactgaaagacacggcacaaatctcaatattcatctcccacatcaccttccctgggaactggacagggtgaaagtcctcaaactctgggaacaggcgagatggaacagggatttaactccccgcccacaggtccatgggagcttgaggcagtaagggggatcccaggcacccatctcaaggagtggctgggagtcttttccctaacttgtggggacaccaccagttgtcaagctactaggcagtagggtctgagggctcaggcctccacctgagaggttataacctgagagacagctctacccttcctcccagtaagaagggaaggtgggtgggcacctgagagattaagactattctcccagtcccactaccagcacccccgatccctgagactgaggggtttacgggctgtgaatggaccttcagccctgcccaccctccctccccactgctgctgagtctgtctgatgttttggttgtgtgaataaatataattcccctctgg

SEQ ID NO: 138606 - DNA, 1177 bp, Homo sapiens; identical to SEQ ID NO: 138605
  Payload ID: 7156
  Gene Symbol: GPSM3
  Gene Name: G-protein signaling modulator 3
  ENST ID: ENST00000619014
  CDS Start-End: 1-375

SEQ ID NO: 138607 - DNA, 1177 bp, Homo sapiens; identical to SEQ ID NO: 138605
  Payload ID: 7156
  Gene Symbol: GPSM3
  Gene Name: G-protein signaling modulator 3
  ENST ID: ENST00000622679
  CDS Start-End: 1-375

SEQ ID NO: 138608 - DNA, 1177 bp, Homo sapiens; identical to SEQ ID NO: 138605
  Payload ID: 7156
  Gene Symbol: GPSM3
  Gene Name:: G-protein signaling modulator 3
  ENST ID: ENST00000614086
  CDS Start-End: 1-375

SEQ ID NO: 138609 - DNA, 1177 bp, Homo sapiens; identical to SEQ ID NO: 138605
  Payload ID: 7156
  Gene Symbol: GPSM3
  Gene Name: G-protein signaling modulator 3
  ENST ID: ENST00000615815
  CDS Start-End: 1-375

SEQ ID NO: 138610 - DNA, 1177 bp, Homo sapiens; identical to SEQ ID NO: 138605
  Payload ID: 7156
  Gene Symbol: GPSM3
  Gene Name: G-protein signaling modulator 3
  ENST ID: ENST00000616454
  CDS Start-End: 1-375

SEQ ID NO: 138611 - DNA, 3563 bp, Homo sapiens
  Payload ID: 7157
  Gene Symbol: GRHL1
  Gene Name: grainyhead-like transcription factor 1
  Uniprot ID: Q9NZI5
  ENST ID: ENST00000324907
  CDS Start-End: 137-1993
gagaaaagcaaacccaacccgtcggggccgccgctccggacccgcagccgccgccgccgcctcctccccccggatcgggtgtactgtcccaacccgaaagtccagttctgcggcccggcagcggcgagcgggcgcgatgacacaggagtacgacaacaaacggccagtgttggttcttcagaatgaagcactttatccacagcggcggtcctacactagtgaggatgaggcctggaaatccttcctggaaaaccctctcactgcagcgaccaaagcgatgatgagcatcaatggagatgaagacagcgccgctgcgctgggcctgctctatgactactacaaggttccaagagagagaaggtcatcaacagcaaagccagaggtggagcaccctgagccagatcacagcaaaagaaacagcataccaattgtgacagagcagcccctcatctctgctggagaaaacagagtgcaagtactgaaaaatgtgccatttaacattgtccttccccatggcaaccagctgggcattgataagagaggccatctgacagctccagatacgacagtcactgtctccatagcaacgatgcctacccactccatcaagacagaaacccagccacatggcttcgctgtgggaatccccccagcagtgtatcatcctgagcccactgagcgggtggtggttttcgatcggaatctcaatactgaccagttcagctctggtgctcaagccccaaatgctcaaaggcgaactccagactcgaccttctcagagaccttcaaggaaggcgttcaggaggttttcttcccctcggatctcagtctgcggatgcctggcatgaattcagaggactatgtttttgacagtgtttctgggaacaactttgaatataccctagaagcttcaaaatcacttcgacagaagccaggagacagtaccatgacgtacctgaacaaaggccagttctatcccatcaccttgaaggaggtgagcagcagtgaaggaatccatcatcccatcagcaaagttcgaagtgtgatcatggtggtttttgctgaagacaaaagcagagaagatcagttaaggcattggaagtactggcactcccggcagcacaccgctaaacaaagatgcattgacatagctgactataaagaaagcttcaacactatcagtaacatcgaggagattgcgtataacgccatttccttcacatgggacatcaacgatgaagcaaaggttttcatctctgtgaactgcttaagcacagatttctcttcccagaagggagtgaaggggttgcctcttaacattcaagttgatacctatagttacaacaaccgcagcaacaagcctgtgcaccgggcctactgccagatcaaggtcttctgtgacaagggagctgagcggaaaatcagggatgaagaacgaaagcaaagcaaaagaaaagtttctgatgttaaagtgccactgcttccctctcacaagcgaatggatatcacagttttcaaacccttcattgatctcgatactcagcctgtcctcttcattcctgacgtgcactttgccaacttgcagcggggcactcatgtccttcccattgcctctgaagaattggagggtgaaggctctgtcttgaaaagggggccgtacggcacagaagatgactttgctgtccctccttctaccaagctggcccggatagaagaaccaaagagagtgctgctctacgttcgaaaggagtcagaagaagtctttgatgccctgatgctcaaaaccccatctttgaagggcttgatggaagctatctcagacaaatacgatgttccccatgacaagattgggaaaatattcaagaagtgtaaaaaggggatcctggtgaacatggacgacaacattgtgaagcattactccaatgaggacaccttccagctgcagattgaagaagccggggggtcttacaagctcaccctgacggagatctaaaggcctgcgggccacagctccccaggagttcagtgcaggtgtttctagatcttacggtttggcaactgcaggtaaccccagtcagccatgtcgccagcacaggtctatgtcgagggaatgggttccttgcaggttggaggcggggctgcatctggcttggtggtagcatttaatctattgcattggtgtttttcagatgaaagagaaatccatataccattatgtttgaatttcctgatatatacaggatttaaagtgaaaactttattccaagagttaacagagtctctgggaagctttaggacatctgctacgttatttatcaaaatattgggatctctgccttgtgcctacagtgtcgtgggcctgctcgctagcagaagtcagaaaaggcgataggcttggctttaaggatttcgtgcccttgcctgaattcagtacaactccactgcctcacgttagcgggagcgcacctgaagagtacggggggagccctctctcccttaccctctcactctccaccagatgtttactaaacagggcatgttactgaaatcttcctttgcgactttctcggacatatcaactgcctttctcatgaagaattttaatgggttacagtatgaaatcagttaagataaagctgcattgtatataagtgcaatatatttttgaaggtctgtaaatgtgtacatacatgtcttatataaatatataatatataaatatggtgtctgtgtacatatagtgaagatatgcagtaagagctaccttaaagactttccctagacaaaggttaagttattttttgatcgtgtataccaagcagatagaatactgtgcttagtggaacccgctaaaaacctttttctctgtttttccaaacacaggcattctgtagcatagcaaaaccttctcaaatgacagagattctgtttgctgttgagaatgttgttatttggatttctgcactgtttaacaaatgaagtaaaagaaaaacactactgcaatcacgtcttttgttatgctagtatcagtcagatgcacttagagtgaagaaacactgtaattacagcacacagattgcaagtattgcgtaccaagtgatacaactcgaaatgcagttctcatcttcctgttttgagaaatgattattttatcacgcatcagagccttcgtgctttgattatcttgtatgttaacaattctagaaaacattcatgaattcacaaaaatatgttactatggcaggggaacattttgtacacatttaagtatataaaaatactaaaatatgtaattttataacaaagtcacgggtatctttaggttcagggaactagactaggtcattcgtgtaaatggactggtagttacagtcttaggttaaagtattctaatgaagtatgggaactaaattgctggttttctaagataagatatgggatatgggtcatataacttttgtattttttatgaagttgattttgtcttgcgtgttatttttaattgtatcattgaagatgtattttaaaccaaaggaattaaattttatatgtctatttcgtaa

SEQ ID NO: 138612 - DNA, 1881 bp, Homo sapiens
  Payload ID: 7157
  Gene Symbol: GRHL1
  Gene Name: grainyhead-like transcription factor 1
  Uniprot ID: Q9NZI5
  ENST ID: ENST00000405379
  CDS Start-End: 94-1383
ataagagaggccatctgacagctccagatacgacagtcactgtctccatagcaacgatgcctacccactccatcaagacagaaacccagccacatggcttcgctgtgggaatccccccagcagtgtatcatcctgagcccactgagcgggtggtggttttcgatcggaatctcaatactgaccagttcagctctggtgctcaagccccaaatgctcaaaggcgaactccagactcgaccttctcagagaccttcaaggaaggcgttcaggaggaacaactttgaatataccctagaagcttcaaaatcacttcgacagaagccaggagacagtaccatgacgtacctgaacaaaggccagttctatcccatcaccttgaaggaggtgagcagcagtgaaggaatccatcatcccatcagcaaagttcgaagtgtgatcatggtggtttttgctgaagacaaaagcagagaagatcagttaaggcattggaagtactggcactcccggcagcacaccgctaaacaaagatgcattgacatagctgactataaagaaagcttcaacactatcagtaacatcgaggagattgcgtataacgccatttccttcacatgggacatcaacgatgaagcaaaggttttcatctctgtgaactgcttaagcacagatttctcttcccagaagggagtgaaggggttgcctcttaacattcaagttgatacctatagttacaacaaccgcagcaacaagcctgtgcaccgggcctactgccagatcaaggtcttctgtgacaagggagctgagcggaaaatcagggatgaagaacgaaagcaaagcaaaagaaaagtttctgatgttaaagtgccactgcttccctctcacaagcgaatggatatcacagttttcaaacccttcattgatctcgatactcagcctgtcctcttcattcctgacgtgcactttgccaacttgcagcggggcactcatgtccttcccattgcctctgaagaattggagggtgaaggctctgtcttgaaaagggggccgtacggcacagaagatgactttgctgtccctccttctaccaagctggcccggatagaagaaccaaagagagtgctgctctacgttcgaaaggagtcagaagaagtctttgatgccctgatgctcaaaaccccatctttgaagggcttgatggaagctatctcagacaaatacgatgttccccatgacaagattgggaaaatattcaagaagtgtaaaaaggggatcctggtgaacatggacgacaacattgtgaagcattactccaatgaggacaccttccagctgcagattgaagaagccggggggtcttacaagctcaccctgacggagatctaaaggcctgcgggccacagctccccaggagttcagtgcaggtgtttctagatcttacggtttggcaactgcaggtaaccccagtcagccatgtcgccagcacaggtctatgtcgagggaatgggttccttgcaggttggaggcggggctgcatctggcttggtggtagcatttaatctattgcattggtgtttttcagatgaaagagaaatccatataccattatgtttgaatttcctgatatatacaggatttaaagtgaaaactttattccaagagttaacagagtctctgggaagctttaggacatctgctacgttatttatcaaaatattgggatctctgccttgtgcctacagtgtcgtgggcctgctcgctagcagaagtcagaaaaggcgataggcttggctttaaggatttcgtgcccttgcctgaattcagtacaactccactgcctcacgttagcgggagcgcacctgaagagtacggggggagccctct

SEQ ID NO: 138613 - DNA, 564 bp, Homo sapiens
  Payload ID: 7157
  Gene Symbol: GRHL1
  Gene Name: grainyhead-like transcription factor 1
  ENST ID: ENST00000439493
  CDS Start-End: 142-423
agagcgagaaaagcaaacccaacccgtcggggccgccgctccggacccgcagccgccgccgccgcctcctccccccggatcgggtgtactgtcccaacccgaaagtccagttctgcggcccggcagcggcgagcgggcgcgatgacacaggagtacgacaacaaacggccagtgttggttcttcagaatgaagcactttatccacagcggcggtcctacactagtgaggatgaggcctggaaatccttcctggaaaaccctctcactgcagcgaccaaagcgatgatgagcatcaatggagatgaagacagcgccgctgcgctgggcctgctctatgactactacaaggttccaagagagagaaggtcatcaacagcaaagccagaggtggagcaccctgagccagatcacagcaaaaggtaacattcagtgcctaacagcataaagagtgcagggggaaatgccacgtttctgtaacagcaaaatgggagtttgtttaaatgaacaaccactagtgaaagagatagaaacagcataccaattgtgacagagcagcccctcatc

SEQ ID NO: 138614 - DNA, 2060 bp, Homo sapiens
  Payload ID: 7157
  Gene Symbol: GRHL1
  Gene Name: grainyhead-like transcription factor 1
  Uniprot ID: Q9NZI5
  ENST ID: ENST00000472167
  CDS Start-End: 53-1588
tgtcccaacccgaaagtccagttctgcggcccggcagcggcgagcgggcgcgatgacacaggagtacgacaacaaacggccagtgttggttcttcagaatgaagcactttatccacagcggcggtcctacactagtgaggatgaggcctggaaatccttcctggaaaaccctctcactgcagcgaccaaagcgatgatgagcatcaatggagatgaagacagcgccgctgcgctgggcctgctctatgactactacaaggttccaagagagagaaggtcatcaacagcaaagccagaggtggagcaccctgagccagatcacagcaaaagaaacagcataccaattgtgacagagcagcccctcatctctgctggagaaaacagagtgcaagtactgaaaaatgtgccatttaacattgtccttccccatggcaaccagctgggcattgataagagaggccatctgacagctccagatacgacagtcactgtctccatagcaacgatgcctacccactccatcaagacagaaacccagccacatggcttcgctgtgggaatccccccagcagtgtatcatcctgagcccactgagcgggtggtggttttcgatcggaatctcaatactgaccagttcagctctggtgctcaagccccaaatgctcaaaggcgaactccagactcgaccttctcagagaccttcaaggaaggcgttcaggaggttttcttcccctcggatctcagtctgcggatgcctggcatgaattcagaggactatgtttttgacagtgtttctgggaacaactttgaatataccctagaagcttcaaaatcacttcgacagaagccaggagacagtaccatgacgtacctgaacaaaggccagttctatcccatcaccttgaaggaggtgagcagcagtgaaggaatccatcatcccatcagcaaagttcgaagtgtgatcatggtggtttttgctgaagacaaaagcagagaagatcagttaaggcattggaagtactggcactcccggcagcacaccgctaaacaaagatgcattgacatagctgactataaagaaagcttcaacactatcagtaacatcgaggagattgcgtataacgccatttccttcacatgggacatcaacgatgaagcaaaggttttcatctctgtgaactgcttaagcacagatttctcttcccagaagggagtgaaggggttgcctcttaacattcaagttgatacctatagttacaacaaccgcagcaacaagcctgtgcaccgggcctactgccagatcaaggtcttctgtgacaagggagctgagcggaaaatcagggatgaagaacgaaagcaaagcaaaagaaaaggcaagtgtcctgaccccagctcccagtttctgatgttaaagtgccactgcttccctctcacaagcgaatggatatcacagttttcaaacccttcattgatctcgatactcagcctgtcctcttcattcctgacgtgcactttgccaacttgcagcggggcactcatgtccttcccattgcctctgaagaattggagggtgaaggctctgtcttgaaaagggggccgtacggcacagaagatgactttgctgtccctccttctaccaagctggcccggatagaagaaccaaagagagtgctgctctacgttcgaaaggagtcagaagaagtctttgatgccctgatgctcaaaaccccatctttgaagggcttgatggaagctatctcagacaaatacgatgttccccatgacaagattgggaaaatattcaagaagtgtaaaaaggggatcctggtgaacatggacgacaacattgtgaagcattactccaatgaggacaccttccagctgcagattgaagaagccggggggtcttacaagctcaccctgacggagatctaaaggcctgcgggccacagctccccaggagttcagtgcaggtgtttctagatcttacggtttggcaactgcaggtaaccccagtcagccatgtcgccagcacaggtctatgtcgagggaatgggttc

SEQ ID NO: 138615 - DNA, 572 bp, Homo sapiens
  Payload ID: 7157
  Gene Symbol: GRHL1
  Gene Name: grainyhead-like transcription factor 1
  ENST ID: ENST00000480736
  CDS Start-End: 195-413
agacagccaggcgtggtggatcatgcctataattccagcactttgggaggccaagctctgtcttgaaaagggggccgtacggcacagaagatgactttgctgtccctccttctaccaagctggcccggatagaagaaccaaagagagtgctgctctacgttcgaaaggagtcagaagaagtctttgatgccctgatgctcaaaaccccatctttgaagggcttgatggaagctatctcagacaaatacgatgttccccatgacaagattgggaaaatattcaagaagtgtaaaaaggggatcctggtgaacatggacgacaacattgtgaagcattactccaatgaggacaccttccagctgcagattgaagaagccggggggtcttacaagctcaccctgacggagatctaaaggcctgcgggccacagctccccaggagttcagtgcaggtgtttctagatcttacggtttggcaactgcaggtaaccccagtcagccatgtcgccagcacaggtctatgtcgagggaatgggttccttgcaggttggaggcggggctgcatctggcttg

SEQ ID NO: 138616 - DNA, 2099 bp, Homo sapiens
  Payload ID: 7157
  Gene Symbol: GRHL1
  Gene Name: grainyhead-like transcription factor 1
  ENST ID: ENST00000464418
  CDS Start-End: 287-976
agagcgagaaaagcaaacccaacccgtcggggccgccgctccggacccgcagccgccgccgccgcctcctccccccggatcgggtgtactgtcccaacccgaaagtccagttctgcggcccggcagcggcgagcgggcgcgatgacacaggagtacgacaaaatatgcagttaaattattgcctgaaacatatttcagaagtctgagagatcgcagacgcggagtttaaggctcacctgaaagtgatgatgagccttcggcgactgaagcctacttcctgactgtcatgaggaagtggactaagaaaggcaactgcaaacggccagtgttggttcttcagaatgaagcactttatccacagcggcggtcctacactagtgaggatgaggcctggaaatccttcctggaaaaccctctcactgcagcgaccaaagcgatgatgagcatcaatggagatgaagacagcgccgctgcgctgggcctgctctatgactactacaaggttccaagagagagaaggtcatcaacagcaaagccagaggtggagcaccctgagccagatcacagcaaaagaaacagcataccaattgtgacagagcagcccctcatctctgctggagaaaacagagtgcaagtactgaaaaatgtgccatttaacattgtccttccccatggcaaccagctgggcattgataagagaggccatctgacagctccagatacgacagtcactgtctccatagcaacgatgcctacccactccatcaagacagaaacccagccacatggcttcgctgtgggaatccccccagcagtgtatcatcctgagcccactgagcgggtggtggttttcgatcggaatctcaatactgaccagttcagctctggtgctcaagccccaaatgctcaaaggcgaactccagactcgaccttctcagagaccttcaaggaaggcgttcaggaggaacaactttgaatataccctagaagcttcaaaatcacttcgacagaagccaggagacagtaccatgacgtacctgaacaaaggccagttctatcccatcaccttgaaggaggtgagcagcagtgaaggaatccatcatcccatcagcaaagttcgaagtgtgatcatggtggtttttgctgaagacaaaagcagagaagatcagttaaggcattggaagtactggcactcccggcagcacaccgctaaacaaagatgcattgacatagctgactataaagaaagcttcaacactatcagtaacatcgaggagattgcgtataacgccatttccttcacatgggacatcaacgatgaagcaaaggttttcatctctgtgaactgcttaagcacagatttctcttcccagaagggagtgaaggggttgcctcttaacattcaagttgatacctatagttacaacaaccgcagcaacaagcctgtgcaccgggcctactgccagatcaaggtcttctgtgacaagggagctgagcggaaaatcagggatgaagaacgaaagcaaagcaaaagaaaagtttctgatgttaaagtgccactgcttccctctcacaagcgaatggatatcacagttttcaaacccttcattgatctcgatactcagcctgtcctcttcattcctgacgtgcactttgccaacttgcagcggggcactcatgtccttcccattgcctctgaagaattggagggtgaaggctctgtcttgaaaagggggccgtacggcacagaagatgactttgctgtccctccttctaccaagctggcccggatagaagaaccaaagagagtgctgctctacgttcgaaaggagtcagaagaagtctttgatgccctgatgctcaaaaccccatctttgaagggcttgatggaagctatctcagacaaatacgatgttccccatgacaagattgggaaaatattcaagaagtgtaaaaaggggatcctggtgaacatggacgacaacattgtgaagcattactccaatgaggacaccttccagctgcagattgaagaagccggggggtcttacaagctcaccctgacggagatctaaaggcctgcgggccacagctcccca

SEQ ID NO: 138617 - DNA, 5239 bp, Homo sapiens
  Payload ID: 7158
  Gene Symbol: GRHL2
  Gene Name: grainyhead-like transcription factor 2
  Uniprot ID: Q6ISB3
  ENST ID: ENST00000251808
  CDS Start-End: 339-2216
tccttgcgagaaagttacctgtggccgcccaagtccgccactttctgctctgtgtctgcccattgccacgatccaggaggactccgcgccgcccggccgcctccgagctcgggccccatgtgaggggcccccccttatcccacctttccggctaggtgagggcgcgagcgggcgagcgagcgagagtggtgaggggggacggaaaagcagaattacctgtagctcttgttctgccatctcgggcgctctcacacaccttcacctgcacagacttgaaagtccagtttcaccagaggctgaggctccaggaaaagcggagcaagttcattggatcaaacatgtcacaagagtcggacaataataaaagactagtggccttagtgcccatgcccagtgaccctccattcaatacccgaagagcctacaccagtgaggatgaagcctggaagtcatacttggagaatcccctgacagcagccaccaaggccatgatgagcattaatggtgatgaggacagtgctgctgccctcggcctgctctatgactactacaaggttcctcgagacaagaggctgctgtctgtaagcaaagcaagtgacagccaagaagaccaggagaaaagaaactgccttggcaccagtgaagcccagagtaatttgagtggaggagaaaaccgagtgcaagtcctaaagactgttccagtgaacctttccctaaatcaagatcacctggagaattccaagcgggaacagtacagcatcagcttccccgagagctctgccatcatcccggtgtcgggaatcacggtggtgaaagctgaagatttcacaccagttttcatggccccacctgtgcactatccccggggagatggggaagagcaacgagtggttatctttgaacagactcagtatgacgtgccctcgctggccacccacagcgcctatctcaaagacgaccagcgcagcactccggacagcacatacagcgagagcttcaaggacgcagccacagagaaatttcggagtgcttcagttggggctgaggagtacatgtatgatcagacatcaagtggcacatttcagtacaccctggaagccaccaaatctctccgtcagaagcagggggagggccccatgacctacctcaacaaaggacagttctatgccataacactcagcgagaccggagacaacaaatgcttccgacaccccatcagcaaagtcaggagtgtggtgatggtggtcttcagtgaagacaaaaacagagatgaacagctcaaatactggaaatactggcactctcggcagcatacggcgaagcagagggtccttgacattgccgattacaaggagagctttaatacgattggaaacattgaagagattgcatataatgctgtttcctttacctgggacgtgaatgaagaggcgaagattttcatcaccgtgaattgcttgagcacagatttctcctcccaaaaaggggtgaaaggacttcctttgatgattcagattgacacatacagttataacaatcgtagcaataaacccattcatagagcttattgccagatcaaggtcttctgtgacaaaggagcagaaagaaaaatccgagatgaagagcggaagcagaacaggaagaaagggaaaggccaggcctcccaaactcaatgcaacagctcctctgatgggaagttggctgccatacctttacagaagaagagtgacatcacctacttcaaaaccatgcctgatctccactcacagccagttctcttcatacctgatgttcactttgcaaacctgcagaggaccggacaggtgtattacaacacggatgatgaacgagaaggtggcagtgtccttgttaaacggatgttccggcccatggaagaggagtttggtccagtgccttcaaagcagatgaaagaagaagggacaaagcgagtgctcttgtacgtgaggaaggagactgacgatgtgttcgatgcattgatgttgaagtctcccacagtgaagggcctgatggaagcgatatctgagaaatatgggctgcccgtggagaagatagcaaagctttacaagaaaagcaaaaaaggcatcttggtgaacatggatgacaacatcatcgagcactactcgaacgaggacaccttcatcctcaacatggagagcatggtggagggcttcaaggtcacgctcatggaaatctagccctgggtttggcatccgctttggctggagctctcagtgcgttcctccctgagagagacagaagccccagccccagaacctggagacccatctcccccatctcacaactgctgttacaagaccgtgctggggagtggggcaagggacaggccccactgtcggtgtgcttggcccatccactggcacctaccacggagctgaagcctgagcccctcaggaaggtgccttaggcctgttggattcctatttattgcccaccttttcctggagcccaggtccaggcccgccaggactctgcaggtcactgctagctccagatgagaccgtccagcgttcccccttcaagagaaacactcatcccgaacagcctaaaaaattcccatcccttctctctcacccctccatatctatctcccgagtggctggacaaaatgagctacgtctgggtgcagtagttataggtggggcaagaggtggatgcccactttctggtcagacacctttaggttgctctggggaaggctgtcttgctaaatacctccagggttcccagcaagtggccaccaggccttgtacaggaagacattcagtcaccgtgtaattagtaacacagaaagtctgcctgtctgcattgtacatagtgtttataatattgtaataatatattttacctgtggtatgtgggcatgtttactgccactggcctagaggagacacagacctggagaccgttttaatgggggtttttgcctctgtgcctgttcaagagacttgcagggctaggtagagggcctttgggatgttaaggtgactgcagctgatgccaagatggactctgcaatgggcatacctgggggctcgttccctgtccccagaggaagccccctctccttctccatgggcatgactctccttcgaggccaccacgtttatctcacaatgatgtgttttgcttgactttccctttgcgctgtctcgtgggaaaggtcattctgtctgagaccccagctccttctccagctttggctgcgggcatggcctgagctttctggagagcctctgcagggggtttgccatcagggccctgtggctgggtctgctgcagagctccttggctatcaggagaatcctggacactgtactgtgcctcccagtttacaaacacgcccttcatctcaagtggccctttaaaaggcctgctgccatgtgagagctgtgaacagctcagctctgagtcggcaggctggggcttcctcctgggccaccagatggaaagggggtattgtttgcctcactcctggatgctgcgttttaaggaagtgagtgagaaagaatgtgccaagatacctggctcctgtgaaaccagcctcaggagggaaactgggagagagaagctgtggtctcctgctacatgccctgggagctggaagagaaaaacactcccctaaacaatcgcaaaatgatgaaccatcatgggccactgttctctttgaggggacaggtttaggggtttgcgttcgcccttgtgggctgaagcactagctttttggtagctagacacatcctgcacccaaaggttctctacaaaggcccagatttgtttgtaaagcactttgactcttacctggaggcccgctctctaagggcttcctgcgctcccacctcatctgtccctgagatgcagagcaggatggagggtctgcttctagctcagctgtttctccttgaggttgcggaggaattgaattgaatgggacagagggcaggtgctgtggccaagaagatctccgagcagcagtgacggggcaccttgctgtgtgtcctctgggcatgttaacccttctgtggggccaaaggtttgcatcgtggatccagctgtgctccagtctgtcccctcctcctccactctgactgccacgccccggaccagcagcttggggaccctccagggtactaatggggctctgttctgagatggacaaattcagtgttggaaatacatgttgtactatgcacttcccatgctcctagggttaggaatagtttcaaacatgattggcagacataacaacggcaaatactcggactggggcataggactccagagtaggaaaaagacaaaagatttggcagcctgacacaggcaacctacccctctctctccagcctctttatgaaactgtttgtttgccagtcctgccctaaggcagaagatgaattgaagatgctgtgcatgtttcctaagtccttgagcaatcatggtggtgacaattgccacaagggatatgaggccagtgccaccagagggtggtgccaagtgccacatcccttccgatccattcccctctgcatcctcggagcaccccagtttgcctttgatgtgtccgctgtgtatgttagctgaactttgatgagcaaaatttcctgagcgaaacactccaaagagataggaaaacttgccgcctcttcttttttgtcccttaatcaaactcaaataagcttaaaaaaaatccatggaagatcatggacatgtgaaatgagcatttttttcttttttttttttaacaaagtctgaactgaacagaacaagactttttcctcatacatctccaaattgtttaaacttactttatgagtgtttgtttagaagttcggaccaacagaaaaatgcagtcagatgtcatcttggaattggtttctaaaagagtaaggcatgtccctgcccagaaacttaggaagcatgaaataaatcaaatgtttattttccttcttatttaaaatcatgcaaatgcaacagaaatagagggtttgtgccaaatgctatgaacggccctttcttaaagacaagcaagggagattgatatatgtacaatttgctctcatgttttaaaaaaaaaaaggtaaatgtaacttaatagttttgtaaatgggagagggggaatctataaactataaatacagttattttattttttgtacatttttaaggagaaaaaataaatattcataacataagagtaaaa

SEQ ID NO: 138618 - DNA, 2140 bp, Homo sapiens
  Payload ID: 7158
  Gene Symbol: GRHL2
  Gene Name: grainyhead-like transcription factor 2
  Uniprot ID: Q6ISB3
  ENST ID: ENST00000395927
  CDS Start-End: 121-1950
attggatcaaacatgtcacaagagtcggacaagtaagtggatcacacgcgccggctgctgctactactaccactttgggctgatggcaactgtaataaaagactagtggccttagtgcccatgcccagtgaccctccattcaatacccgaagagcctacaccagtgaggatgaagcctggaagtcatacttggagaatcccctgacagcagccaccaaggccatgatgagcattaatggtgatgaggacagtgctgctgccctcggcctgctctatgactactacaaggttcctcgagacaagaggctgctgtctgtaagcaaagcaagtgacagccaagaagaccaggagaaaagaaactgccttggcaccagtgaagcccagagtaatttgagtggaggagaaaaccgagtgcaagtcctaaagactgttccagtgaacctttccctaaatcaagatcacctggagaattccaagcgggaacagtacagcatcagcttccccgagagctctgccatcatcccggtgtcgggaatcacggtggtgaaagctgaagatttcacaccagttttcatggccccacctgtgcactatccccggggagatggggaagagcaacgagtggttatctttgaacagactcagtatgacgtgccctcgctggccacccacagcgcctatctcaaagacgaccagcgcagcactccggacagcacatacagcgagagcttcaaggacgcagccacagagaaatttcggagtgcttcagttggggctgaggagtacatgtatgatcagacatcaagtggcacatttcagtacaccctggaagccaccaaatctctccgtcagaagcagggggagggccccatgacctacctcaacaaaggacagttctatgccataacactcagcgagaccggagacaacaaatgcttccgacaccccatcagcaaagtcaggagtgtggtgatggtggtcttcagtgaagacaaaaacagagatgaacagctcaaatactggaaatactggcactctcggcagcatacggcgaagcagagggtccttgacattgccgattacaaggagagctttaatacgattggaaacattgaagagattgcatataatgctgtttcctttacctgggacgtgaatgaagaggcgaagattttcatcaccgtgaattgcttgagcacagatttctcctcccaaaaaggggtgaaaggacttcctttgatgattcagattgacacatacagttataacaatcgtagcaataaacccattcatagagcttattgccagatcaaggtcttctgtgacaaaggagcagaaagaaaaatccgagatgaagagcggaagcagaacaggaagaaagggaaaggccaggcctcccaaactcaatgcaacagctcctctgatgggaagttggctgccatacctttacagaagaagagtgacatcacctacttcaaaaccatgcctgatctccactcacagccagttctcttcatacctgatgttcactttgcaaacctgcagaggaccggacaggtgtattacaacacggatgatgaacgagaaggtggcagtgtccttgttaaacggatgttccggcccatggaagaggagtttggtccagtgccttcaaagcagatgaaagaagaagggacaaagcgagtgctcttgtacgtgaggaaggagactgacgatgtgttcgatgcattgatgttgaagtctcccacagtgaagggcctgatggaagcgatatctgagaaatatgggctgcccgtggagaagatagcaaagctttacaagaaaagcaaaaaaggcatcttggtgaacatggatgacaacatcatcgagcactactcgaacgaggacaccttcatcctcaacatggagagcatggtggagggcttcaaggtcacgctcatggaaatctagccctgggtttggcatccgctttggctggagctctcagtgcgttcctccctgagagagacagaagccccagccccagaacctggagacccatctcccccatctcacaactgctgttacaagaccgtgctggggagtggggcaagggacaggccccactgtcggtgtgcttggcccatccactggcacctac

SEQ ID NO: 138619 - DNA, 236 bp, Homo sapiens
  Payload ID: 7158
  Gene Symbol: GRHL2
  Gene Name: grainyhead-like transcription factor 2
  ENST ID: ENST00000521085
  CDS Start-End: 217-236
gagaaagttacctgtggccgcccaagtccgccactttctgctctgtgtctgcccattgccacgatccaggaggactccgcgccgcccggccgcctccgagctcgggccccatgtgaggggcccccccttatcccacctttccggctagacttgaaagtccagtttcaccagaggctgaggctccaggaaaagcggagcaagttcattggatcaaacatgtcacaagagtcggacaa

SEQ ID NO: 138620 - DNA, 1870 bp, Homo sapiens
  Payload ID: 7159
  Gene Symbol: GRHL3
  Gene Name: grainyhead-like transcription factor 3
  Uniprot ID: Q8TE85
  ENST ID: ENST00000236255
  CDS Start-End: 47-1870
aggagatgtgccaaactgttaagagtggttatttctgagcagaagaatgtggatgaattccattcttcctatttttcttttcaggtctgtgcggctgctaaagaacgacccagtcaacttgcagaaattctcttacactagtgaggatgaggcctggaagacgtacctagaaaacccgttgacagctgccacaaaggccatgatgagagtcaatggagatgatgacagtgttgcggccttgagcttcctctatgattactacatgggtcccaaggagaagcggatattgtcctccagcactgggggcaggaatgaccaaggaaagaggtactaccatggcatggaatatgagacggacctcactccccttgaaagccccacacacctcatgaaattcctgacagagaacgtgtctggaaccccagagtacccagatttgctcaagaagaataacctgatgagcttggagggggccttgcccacccctggcaaggcagctcccctccctgcaggccccagcaagctggaggccggctctgtggacagctacctgttacccaccactgatatgtatgataatggctccctcaactccttgtttgagagcattcatggggtgccgcccacacagcgctggcagccagacagcaccttcaaagatgacccacaggagtcgatgctcttcccagatatcctgaaaacctccccggaacccccatgtccagaggactaccccagcctcaaaagtgactttgaatacaccctgggctcccccaaagccatccacatcaagtcaggcgagtcacccatggcctacctcaacaaaggccagttctaccccgtcaccctgcggaccccagcaggtggcaaaggccttgccttgtcctccaacaaagtcaagagtgtggtgatggttgtcttcgacaatgagaaggtcccagtagagcagctgcgcttctggaagcactggcattcccggcaacccactgccaagcagcgggtcattgacgtggctgactgcaaagaaaacttcaacactgtggagcacattgaggaggtggcctataatgcactgtcctttgtgtggaacgtgaatgaagaggccaaggtgttcatcggcgtaaactgtctgagcacagacttttcctcacaaaagggggtgaagggtgtccccctgaacctgcagattgacacctatgactgtggcttgggcactgagcgcctggtacaccgtgctgtctgccagatcaagatcttctgtgacaagggagctgagaggaagatgcgcgatgacgagcggaagcagttccggaggaaggtcaagtgccctgactccagcaacagtggcgtcaagggctgcctgctgtcgggcttcaggggcaatgagacgacctaccttcggccagagactgacctggagacgccacccgtgctgttcatccccaatgtgcacttctccagcctgcagcgctctggaggggcagccccctcggcaggacccagcagctccaacaggctgcctctgaagcgtacctgctcgcccttcactgaggagtttgagcctctgccctccaagcaggccaaggaaggcgaccttcagagagttctgctgtatgtgcggagggagactgaggaggtgtttgacgcgctcatgttgaagaccccagacctgaaggggctgaggaatgcgatctctgagaagtatgggttccctgaagagaacatttacaaagtctacaagaaatgcaagcgaggaatcttagtcaacatggacaacaacatcattcagcattacagcaaccacgtcgccttcctgctggacatgggggagctggacggcaaaattcagatcatccttaaggagctgtaa

SEQ ID NO: 138621 - DNA, 2119 bp, Homo sapiens
  Payload ID: 7159
  Gene Symbol: GRHL3
  Gene Name: grainyhead-like transcription factor 3
  Uniprot ID: Q8TE85
  ENST ID: ENST00000350501
  CDS Start-End: 128-2008
ctcgacacccaaacctcaacataaatcaaacactttcccgggcagagaatgtctgtgtcaggcaagaattagagacaagcggtcagcagagcctcagtgctgatcgtcggagcttgggagcaggaagatgtcgaatgaacttgatttcaggtctgtgcggctgctaaagaacgacccagtcaacttgcagaaattctcttacactagtgaggatgaggcctggaagacgtacctagaaaacccgttgacagctgccacaaaggccatgatgagagtcaatggagatgatgacagtgttgcggccttgagcttcctctatgattactacatgggtcccaaggagaagcggatattgtcctccagcactgggggcaggaatgaccaaggaaagaggtactaccatggcatggaatatgagacggacctcactccccttgaaagccccacacacctcatgaaattcctgacagagaacgtgtctggaaccccagagtacccagatttgctcaagaagaataacctgatgagcttggagggggccttgcccacccctggcaaggcagctcccctccctgcaggccccagcaagctggaggccggctctgtggacagctacctgttacccaccactgatatgtatgataatggctccctcaactccttgtttgagagcattcatggggtgccgcccacacagcgctggcagccagacagcaccttcaaagatgacccacaggagtcgatgctcttcccagatatcctgaaaacctccccggaacccccatgtccagaggactaccccagcctcaaaagtgactttgaatacaccctgggctcccccaaagccatccacatcaagtcaggcgagtcacccatggcctacctcaacaaaggccagttctaccccgtcaccctgcggaccccagcaggtggcaaaggccttgccttgtcctccaacaaagtcaagagtgtggtgatggttgtcttcgacaatgagaaggtcccagtagagcagctgcgcttctggaagcactggcattcccggcaacccactgccaagcagcgggtcattgacgtggctgactgcaaagaaaacttcaacactgtggagcacattgaggaggtggcctataatgcactgtcctttgtgtggaacgtgaatgaagaggccaaggtgttcatcggcgtaaactgtctgagcacagacttttcctcacaaaagggggtgaagggtgtccccctgaacctgcagattgacacctatgactgtggcttgggcactgagcgcctggtacaccgtgctgtctgccagatcaagatcttctgtgacaagggagctgagaggaagatgcgcgatgacgagcggaagcagttccggaggaaggtcaagtgccctgactccagcaacagtggcgtcaagggctgcctgctgtcgggcttcaggggcaatgagacgacctaccttcggccagagactgacctggagacgccacccgtgctgttcatccccaatgtgcacttctccagcctgcagcgctctggaggggcagccccctcggcaggacccagcagctccaacaggctgcctctgaagcgtacctgctcgcccttcactgaggagtttgagcctctgccctccaagcaggccaaggaaggcgaccttcagagagttctgctgtatgtgcggagggagactgaggaggtgtttgacgcgctcatgttgaagaccccagacctgaaggggctgaggaatgcgatctctgagaagtatgggttccctgaagagaacatttacaaagtctacaagaaatgcaagcgaggggaaacttctctcctccacccacgcctgtctcgccaccccccacctgactgtcttgaatgttcccatcctgtgactcaagtgaggaacatgggttttggagatggattttggaggcagagggacctggattcaaatcccagccccaccaccgtcaacagcctgcacttcactgtaaactcggaatgacacacccacctggaggagaggtggaaggacgacggcaggtcacatctgagagctctcagctcagagtatgtggcccctgaatacattctggctattactttgcatttaaaa

SEQ ID NO: 138622 - DNA, 2804 bp, Homo sapiens
  Payload ID: 7159
  Gene Symbol: GRHL3
  Gene Name: grainyhead-like transcription factor 3
  Uniprot ID: Q8TE85
  ENST ID: ENST00000356046
  CDS Start-End: 304-1974
tgagtgagtaaacatcggtggatacctgccgctctcagagcgtggaggctggatggggtttcctggagggggaagagcggggaggccggcaccgggattcacagagcaatttgtaagggtaaatgaatgggctgacgatcttactttggcgtgtcaaggcaagccccagtctcaagctagagtttcaggtctgtgcggctgctaaagaacgacccagtcaacttgcagaaattctcttacactagtgaggatgaggcctggaagacgtacctagaaaacccgttgacagctgccacaaaggccatgatgagagtcaatggagatgatgacagtgttgcggccttgagcttcctctatgattactacatgggtcccaaggagaagcggatattgtcctccagcactgggggcaggaatgaccaaggaaagaggtactaccatggcatggaatatgagacggacctcactccccttgaaagccccacacacctcatgaaattcctgacagagaacgtgtctggaaccccagagtacccagatttgctcaagaagaataacctgatgagcttggagggggccttgcccacccctggcaaggcagctcccctccctgcaggccccagcaagctggaggccggctctgtggacagctacctgttacccaccactgatatgtatgataatggctccctcaactccttgtttgagagcattcatggggtgccgcccacacagcgctggcagccagacagcaccttcaaagatgacccacaggagtcgatgctcttcccagatatcctgaaaacctccccggaacccccatgtccagaggactaccccagcctcaaaagtgactttgaatacaccctgggctcccccaaagccatccacatcaagtcaggcgagtcacccatggcctacctcaacaaaggccagttctaccccgtcaccctgcggaccccagcaggtggcaaaggccttgccttgtcctccaacaaagtcaagagtgtggtgatggttgtcttcgacaatgagaaggtcccagtagagcagctgcgcttctggaagcactggcattcccggcaacccactgccaagcagcgggtcattgacgtggctgactgcaaagaaaacttcaacactgtggagcacattgaggaggtggcctataatgcactgtcctttgtgtggaacgtgaatgaagaggccaaggtgttcatcggcgtaaactgtctgagcacagacttttcctcacaaaagggggtgaagggtgtccccctgaacctgcagattgacacctatgactgtggcttgggcactgagcgcctggtacaccgtgctgtctgccagatcaagatcttctgtgacaagggagctgagaggaagatgcgcgatgacgagcggaagcagttccggaggaaggtcaagtgccctgactccagcaacagtggcgtcaagggctgcctgctgtcgggcttcaggggcaatgagacgacctaccttcggccagagactgacctggagacgccacccgtgctgttcatccccaatgtgcacttctccagcctgcagcgctctggaggggcagccccctcggcaggacccagcagctccaacaggctgcctctgaagcgtacctgctcgcccttcactgaggagtttgagcctctgccctccaagcaggccaaggaaggcgaccttcagagagttctgctgtatgtgcggagggagactgaggaggtgtttgacgcgctcatgttgaagaccccagacctgaaggggctgaggaatgcgatctctgagaagtatgggttccctgaagagaacatttacaaagtctacaagaaatgcaagcgaggaatcttagtcaacatggacaacaacatcattcagcattacagcaaccacgtcgccttcctgctggacatgggggagctggacggcaaaattcagatcatccttaaggagctgtaaggcctctcgagcatccaaaccctcacgacctgcaaggggccagcagggacgtggccccacgccacacacaacctctccacatgcctcagcgctgttacttgaatgccttccctgagggaagaggcccttgagtcacagacccacagacgtcagggccagggagagacctagggggtcccctggcctggatccccatggtatgcttgaatctgctccctgaacttcctgccagtgcctccccgtaccccaaaacaatgtcaccatggttaccacctacccagaagactgttccctcctcccaagacccttgtctgcagtggtgctcctgcaggctgcccgttaagatggtggcggcacacgctccctcccgcagcaccacgccagctggtgcggcccccactctctgtcttccttcaacttcagacaaaggatttctcaacctttggtcagttaacttgaaaactcttgattttcagtgcaaatgacttttaaaagacactatattggagtctctttctcagacttcctcagcgcaggatgtaaatagcactaacgatcgactggaacaaagtgaccgctgtgtaaaactactgccttgccactcactgttgtatacatttcttatttacgattttcatttgttatatatatatataaatatactgtatatatatgcaacattttatatttttcatggatatgtttttatcatttcaaaaaatgtgtatttcacatttcttggactttttttagctgttattcagtgatgcattttgtatactcacgtggtatttagtaataaaaatctatctatgtattacgtcacatta

SEQ ID NO: 138623 - DNA, 2869 bp, Homo sapiens
  Payload ID: 7159
  Gene Symbol: GRHL3
  Gene Name: grainyhead-like transcription factor 3
  Uniprot ID: Q8TE85
  ENST ID: ENST00000361548
  CDS Start-End: 231-2039
agagttaacagctgcacctgttgaggtatacctccagtcgccggcacctgtacctgtagccaatcagcgccagcgctgctgggaacctacctgtcagcaaaatctcgacacccaaacctcaacataaatcaaacactttcccgggcagagaatgtctgtgtcaggcaagaattagagacaagcggtcagcagagcctcagtgctgatcgtcggagcttgggagcaggaagatgtcgaatgaacttgatttcaggtctgtgcggctgctaaagaacgacccagtcaacttgcagaaattctcttacactagtgaggatgaggcctggaagacgtacctagaaaacccgttgacagctgccacaaaggccatgatgagagtcaatggagatgatgacagtgttgcggccttgagcttcctctatgattactacatgggtcccaaggagaagcggatattgtcctccagcactgggggcaggaatgaccaaggaaagaggtactaccatggcatggaatatgagacggacctcactccccttgaaagccccacacacctcatgaaattcctgacagagaacgtgtctggaaccccagagtacccagatttgctcaagaagaataacctgatgagcttggagggggccttgcccacccctggcaaggcagctcccctccctgcaggccccagcaagctggaggccggctctgtggacagctacctgttacccaccactgatatgtatgataatggctccctcaactccttgtttgagagcattcatggggtgccgcccacacagcgctggcagccagacagcaccttcaaagatgacccacaggagtcgatgctcttcccagatatcctgaaaacctccccggaacccccatgtccagaggactaccccagcctcaaaagtgactttgaatacaccctgggctcccccaaagccatccacatcaagtcaggcgagtcacccatggcctacctcaacaaaggccagttctaccccgtcaccctgcggaccccagcaggtggcaaaggccttgccttgtcctccaacaaagtcaagagtgtggtgatggttgtcttcgacaatgagaaggtcccagtagagcagctgcgcttctggaagcactggcattcccggcaacccactgccaagcagcgggtcattgacgtggctgactgcaaagaaaacttcaacactgtggagcacattgaggaggtggcctataatgcactgtcctttgtgtggaacgtgaatgaagaggccaaggtgttcatcggcgtaaactgtctgagcacagacttttcctcacaaaagggggtgaagggtgtccccctgaacctgcagattgacacctatgactgtggcttgggcactgagcgcctggtacaccgtgctgtctgccagatcaagatcttctgtgacaagggagctgagaggaagatgcgcgatgacgagcggaagcagttccggaggaaggtcaagtgccctgactccagcaacagtggcgtcaagggctgcctgctgtcgggcttcaggggcaatgagacgacctaccttcggccagagactgacctggagacgccacccgtgctgttcatccccaatgtgcacttctccagcctgcagcgctctggaggggcagccccctcggcaggacccagcagctccaacaggctgcctctgaagcgtacctgctcgcccttcactgaggagtttgagcctctgccctccaagcaggccaaggaaggcgaccttcagagagttctgctgtatgtgcggagggagactgaggaggtgtttgacgcgctcatgttgaagaccccagacctgaaggggctgaggaatgcgatctctgagaagtatgggttccctgaagagaacatttacaaagtctacaagaaatgcaagcgaggaatcttagtcaacatggacaacaacatcattcagcattacagcaaccacgtcgccttcctgctggacatgggggagctggacggcaaaattcagatcatccttaaggagctgtaaggcctctcgagcatccaaaccctcacgacctgcaaggggccagcagggacgtggccccacgccacacacaacctctccacatgcctcagcgctgttacttgaatgccttccctgagggaagaggcccttgagtcacagacccacagacgtcagggccagggagagacctagggggtcccctggcctggatccccatggtatgcttgaatctgctccctgaacttcctgccagtgcctccccgtaccccaaaacaatgtcaccatggttaccacctacccagaagactgttccctcctcccaagacccttgtctgcagtggtgctcctgcaggctgcccgttaagatggtggcggcacacgctccctcccgcagcaccacgccagctggtgcggcccccactctctgtcttccttcaacttcagacaaaggatttctcaacctttggtcagttaacttgaaaactcttgattttcagtgcaaatgacttttaaaagacactatattggagtctctttctcagacttcctcagcgcaggatgtaaatagcactaacgatcgactggaacaaagtgaccgctgtgtaaaactactgccttgccactcactgttgtatacatttcttatttacgattttcatttgttatatatatatataaatatactgtatatatatgcaacattttatatttttcatggatatgtttttatcatttcaaaaaatgtgtatttcacatttcttggactttttttagctgttattcagtgatgcattttgtatactcacgtggtatttagtaataaaaatctatctatgtattacgtcacatta

SEQ ID NO: 138624 - DNA, 494 bp, Homo sapiens
  Payload ID: 7159
  Gene Symbol: GRHL3
  Gene Name: grainyhead-like transcription factor 3
  ENST ID: ENST00000524724
  CDS Start-End: 250-494
gaaacacaagactgaaactgtgaaggtttctggcaccactttttgatcctctgaaggggccttggaaatcagacgaccccaatcccatcgaggctttctatcttcttgccaaaaggaacttctttaagtttcaggtctgtgcggctgctaaagaacgacccagtcaacttgcagaaattctcttacactagtgaggatgaggcctggaagacgtacctagaaaacccgttgacagctgccacaaaggccatgatgagagtcaatggagatgatgacagtgttgcggccttgagcttcctctatgattactacatgggtcccaaggagaagcggatattgtcctccagcactgggggcaggaatgaccaaggaaagaggtactaccatggcatggaatatgagacggacctcactccccttgaaagccccacacacctcatgaaattcctgacagagaacgtgtctggaaccccagagtacccagatttgctcaa

SEQ ID NO: 138625 - DNA, 1683 bp, Homo sapiens
  Payload ID: 7159
  Gene Symbol: GRHL3
  Gene Name: grainyhead-like transcription factor 3
  ENST ID: ENST00000528064
  CDS Start-End: 47-205
aggagatgtgccaaactgttaagagtggttatttctgagcagaagaatgtggatgaattccattcttcctatttttctggtcccaaggagaagcggatattgtcctccagcactgggggcaggaatgaccaaggaaagaggtactaccatggcatggaatatgagacggacctcactccccttgaaagccccacacacctcatgaaattcctgacagagaacgtgtctggaaccccagagtacccagatttgctcaagaagaataacctgatgagcttggagggggccttgcccacccctggcaaggcagctcccctccctgcaggccccagcaagctggaggccggctctgtggacagctacctgttacccaccactgatatgtatgataatggctccctcaactccttgtttgagagcattcatggggtgccgcccacacagcgctggcagccagacagcaccttcaaagatgacccacaggagtcgatgctcttcccagatatcctgaaaacctccccggaacccccatgtccagaggactaccccagcctcaaaagtgactttgaatacaccctgggctcccccaaagccatccacatcaagtcaggcgagtcacccatggcctacctcaacaaaggccagttctaccccgtcaccctgcggaccccagcaggtggcaaaggccttgccttgtcctccaacaaagtcaagagtgtggtgatggttgtcttcgacaatgagaaggtcccagtagagcagctgcgcttctggaagcactggcattcccggcaacccactgccaagcagcgggtcattgacgtggctgactgcaaagaaaacttcaacactgtggagcacattgaggaggtggcctataatgcactgtcctttgtgtggaacgtgaatgaagaggccaaggtgttcatcggcgtaaactgtctgagcacagacttttcctcacaaaagggggtgaagggtgtccccctgaacctgcagattgacacctatgactgtggcttgggcactgagcgcctggtacaccgtgctgtctgccagatcaagatcttctgtgacaagggagctgagaggaagatgcgcgatgacgagcggaagcagttccggaggaaggtcaagtgccctgactccagcaacagtggcgtcaagggctgcctgctgtcgggcttcaggggcaatgagacgacctaccttcggccagagactgacctggagacgccacccgtgctgttcatccccaatgtgcacttctccagcctgcagcgctctggaggggcagccccctcggcaggacccagcagctccaacaggctgcctctgaagcgtacctgctcgcccttcactgaggagtttgagcctctgccctccaagcaggccaaggaaggcgaccttcagagagttctgctgtatgtgcggagggagactgaggaggtgtttgacgcgctcatgttgaagaccccagacctgaaggggctgaggaatgcgatctctgagaagtatgggttccctgaagagaacatttacaaagtctacaagaaatgcaagcgaggaatcttagtcaacatggacaacaacatcattcagcattacagcaaccacgtcgccttcctgctggacatgggggagctggacggcaaaattcagatcatccttaaggagctgtaa

SEQ ID NO: 138626 - DNA, 2523 bp, Homo sapiens
  Payload ID: 7160
  Gene Symbol: GRAMD1A
  Gene Name: GRAM domain containing 1A
  Uniprot ID: Q96CP6
  ENST ID: ENST00000411896
  CDS Start-End: 54-2195
ctgccctgccctgccctgccctgcgcccggggcgcgcccaccgcgccgcatccatgttcgacaccacaccccactctggccggagcacgccaagcagctccccatcgctccggaaacggctgcagctcctgcccccaagccggcccccacctgagccagaaccaggcaccatggtggagaagggatcagatagctcctcagagaagggtggggtgcctgggacccccagcacccagagcctaggcagccggaacttcatccgcaacagcaagatgctgagccccacttataagcagcgtaatgaggacttccggaaactgttcagcaaactccccgaagcagaacgcctcattgtggattactcctgcgccctgcagcgtgagatcctgctccagggccgcctctacctctctgagaactggatctgcttctacagcaacatcttccgctgggagaccacgatctccatccagctgaaggaagtgacatgtctgaagaaggaaaagacggccaagctgatccccaacgccatccagatctgcacggagagcgagaagcatttcttcacttcctttggggcccgtgaccgctgcttcctcctcatcttccgcctctggcagaatgcactgcttgaaaagacgctgagtccccgcgagctctggcacctggtgcatcagtgctacggctcagagctgggcctcaccagtgaggatgaggactatgtctcccccttgcagctgaacggtctggggacccccaaggaagtgggagatgtgatcgccctgagcgacatcacctcctcgggggcagctgaccgcagccaggagccaagcccagtgggttcgcgccgtggccatgtcacgcccaacctttcccgagccagcagcgacgcagaccatggggcagaggaggacaaggaggagcaggtagacagccagccagacgcctcctccagccagacagtgaccccggtggctgaacccccgagcacagagcccacccagcctgacgggcccaccaccctgggccccttggatctgctgcccagtgaggagctattgacagacacaagtaactcctcttcatccactggggaggaagcggacttggctgccctgcttcccgacctctccggccgcctcctcatcaactctgtcttccatgtgggcgctgagcggctccagcagatgctcttctcggactcgcccttcctccagggcttcctacagcagtgcaagttcacagacgtgacgctgagcccctggagtggggacagcaagtgccaccagcgccgggtgctgacgtacaccatccccatcagcaacccactgggccccaagagcgcctccgtggtggagacacagacgctgttccggcgcggcccccaggccggcgggtgtgtggtggactccgaggtgctgacgcagggcatcccctaccaggactacttctacactgcccaccgctactgcatcctgggtctggcccggaacaaggcgcggctccgagtgtcttctgagatccgctaccgaaagcagccgtggagcctggtgaagtcgctcattgagaagaactcgtggagcggcattgaagactatttccaccatctggagcgagagctcgccaaggctgagaagctgtctctggaggaaggcgggaaggatgcccggggcttgctatccggcctgcggcggcggaagcggcccctgagctggcgggctcacggggacgggccccagcacccagatcctgacccctgtgcccgggccggcattcacacctcgggctccctcagctcccgcttctccgaaccatctgtggaccagggccccggggcaggcatccccagtgccctggttctcatcagcattgtccttatcatcctcatcgccctcaacgtcctgctcttctaccgcctctggtccctggaaaggacagcccacacctttgagtcctggcacagcctggccctggccaagggcaagttcccccagacggccacagagtgggccgagatcctggcgctgcagaagcaattccacagcgtggaggtgcacaagtggaggcagatcctgcgggcctccgtggagctcctggatgagatgaagttctcgctggagaagctgcaccaaggcatcacagtctcagaccctccctttgacacccagccccggcccgatgacagcttttcctgaggaccccggccacgcagctgttcccccacatggacagatggacacacagagcctcggcggccactgctggcacggtgtgagcgccaggcatctcccacccgcccctcccgacggcccaaccaggggctgtgcagacgtggggaccacggaaccgagatgcactttagaccagggagctggcccggcctctggcaggccccccactaacttattttgcccggctgaggttgtggggggcgcctcctggggtgcacgattccctcagctctgggtttaatgtattatatttatttggggccgacagtgccccaataaagggtcagaagtg

SEQ ID NO: 138627 - DNA, 2695 bp, Homo sapiens
  Payload ID: 7160
  Gene Symbol: GRAMD1A
  Gene Name: GRAM domain containing 1A
  Uniprot ID: Q96CP6
  ENST ID: ENST00000317991
  CDS Start-End: 193-2367
gtcgctgacgccgcggcggcctccggcggctccggccttttgtgcgggcggttgggtcgggtgggggcggcggccgcggaaggccaggccggtgccctgcggggacgcccagcgcagcccagccccgcgcagcccagccctgccctgccctgccctgccctgcgcccggggcgcgcccaccgcgccgcatccatgttcgacaccacaccccactctggccggagcacgccaagcagctccccatcgctccggaaacggctgcagctcctgcccccaagccggcccccacctgagccagaaccaggcaccatggtggagaagggatcagatagctcctcagagaagggtggggtgcctgggacccccagcacccagagcctaggcagccggaacttcatccgcaacagcaagaagatgcagagctggtacagtatgctgagccccacttataagcagcgtaatgaggacttccggaaactgttcagcaaactccccgaagcagaacgcctcattgtggattactcctgcgccctgcagcgtgagatcctgctccagggccgcctctacctctctgagaactggatctgcttctacagcaacatcttccgctgggagaccacgatctccatccagctgaaggaagtgacatgtctgaagaaggaaaagacggccaagctgatccccaacgccatccagatctgcacggagagcgagaagcatttcttcacttcctttggggcccgtgaccgctgcttcctcctcatcttccgcctctggcagaatgcactgcttgaaaagacgctgagtccccgcgagctctggcacctggtgcatcagtgctacggctcagagctgggcctcaccagtgaggatgaggactatgtctcccccttgcagctgaacggtctggggacccccaaggaagtgggagatgtgatcgccctgagcgacatcacctcctcgggggcagctgaccgcagccaggagccaagcccagtgggttcgcgccgtggccatgtcacgcccaacctttcccgagccagcagcgacgcagaccatggggcagaggaggacaaggaggagcaggtagacagccagccagacgcctcctccagccagacagtgaccccggtggctgaacccccgagcacagagcccacccagcctgacgggcccaccaccctgggccccttggatctgctgcccagtgaggagctattgacagacacaagtaactcctcttcatccactggggaggaagcggacttggctgccctgcttcccgacctctccggccgcctcctcatcaactctgtcttccatgtgggcgctgagcggctccagcagatgctcttctcggactcgcccttcctccagggcttcctacagcagtgcaagttcacagacgtgacgctgagcccctggagtggggacagcaagtgccaccagcgccgggtgctgacgtacaccatccccatcagcaacccactgggccccaagagcgcctccgtggtggagacacagacgctgttccggcgcggcccccaggccggcgggtgtgtggtggactccgaggtgctgacgcagggcatcccctaccaggactacttctacactgcccaccgctactgcatcctgggtctggcccggaacaaggcgcggctccgagtgtcttctgagatccgctaccgaaagcagccgtggagcctggtgaagtcgctcattgagaagaactcgtggagcggcattgaagactatttccaccatctggagcgagagctcgccaaggctgagaagctgtctctggaggaaggcgggaaggatgcccggggcttgctatccggcctgcggcggcggaagcggcccctgagctggcgggctcacggggacgggccccagcacccagatcctgacccctgtgcccgggccggcattcacacctcgggctccctcagctcccgcttctccgaaccatctgtggaccagggccccggggcaggcatccccagtgccctggttctcatcagcattgtgatctgtgtgagccttatcatcctcatcgccctcaacgtcctgctcttctaccgcctctggtccctggaaaggacagcccacacctttgagtcctggcacagcctggccctggccaagggcaagttcccccagacggccacagagtgggccgagatcctggcgctgcagaagcaattccacagcgtggaggtgcacaagtggaggcagatcctgcgggcctccgtggagctcctggatgagatgaagttctcgctggagaagctgcaccaaggcatcacagtctcagaccctccctttgacacccagccccggcccgatgacagcttttcctgaggaccccggccacgcagctgttcccccacatggacagatggacacacagagcctcggcggccactgctggcacggtgtgagcgccaggcatctcccacccgcccctcccgacggcccaaccaggggctgtgcagacgtggggaccacggaaccgagatgcactttagaccagggagctggcccggcctctggcaggccccccactaacttattttgcccggctgaggttgtggggggcgcctcctggggtgcacgattccctcagctctgggtttaatgtattatatttatttggggccgacagtgccccaataaagggtcagaagtg

SEQ ID NO: 138628 - DNA, 2825 bp, Homo sapiens
  Payload ID: 7160
  Gene Symbol: GRAMD1A
  Gene Name: GRAM domain containing 1A
  ENST ID: ENST00000599564
  CDS Start-End: 72-2495
aagtctgaatgctgtgtggacagaggaggaggacccaataagagaccacaccgctgttccagaccctctccatggatgatgtcctgcccctgatgccttgggagaccctgttggcacagggcagtccccagggctcgcctgacctcccagcagggcagcggaagcagcagccacagggtgacagggcccagggcctggcctctgagtcctggaagctcctggaggtgcccatcattcacataacgccatccagtgatggggagtcccccgcctgcaccccaaccccccgacgccggcagcagcagaggatgccagacccgcagagtctgtcccaggacagcaccacaccccactctggccggagcacgccaagcagctccccatcgctccggaaacggctgcagctcctgcccccaagccggcccccacctgagccagaaccaggcaccatggtggagaagggatcagatagctcctcagagaagggtggggtgcctgggacccccagcacccagagcctaggcagccggaacttcatccgcaacagcaagaagatgcagagctggtacagtatgctgagccccacttataagcagcgtaatgaggacttccggaaactgttcagcaaactccccgaagcagaacgcctcattgtggattactcctgcgccctgcagcgtgagatcctgctccagggccgcctctacctctctgagaactggatctgcttctacagcaacatcttccgctgggagaccacgatctccatccagctgaaggaagtgacatgtctgaagaaggaaaagacggccaagctgatccccaacgccatccagatctgcacggagagcgagaagcatttcttcacttcctttggggcccgtgaccgctgcttcctcctcatcttccgcctctggcagaatgcactgcttgaaaagacgctgagtccccgcgagctctggcacctggtgcatcagtgctacggctcagagctgggcctcaccagtgaggatgaggactatgtctcccccttgcagctgaacggtctggggacccccaaggaagtgggagatgtgatcgccctgagcgacatcacctcctcgggggcagctgaccgcagccaggagccaagcccagtgggttcgcgccgtggccatgtcacgcccaacctttcccgagccagcagcgacgcagaccatggggcagaggaggacaaggaggagcaggtagacagccagccagacgcctcctccagccagacagtgaccccggtggctgaacccccgagcacagagcccacccagcctgacgggcccaccaccctgggccccttggatctgctgcccagtgaggagctattgacagacacaagtaactcctcttcatccactggggaggaagcggacttggctgccctgcttcccgacctctccggccgcctcctcatcaactctgtcttccatgtgggcgctgagcggctccagcagatgctcttctcggactcgcccttcctccagggcttcctacagcagtgcaagttcacagacgtgacgctgagcccctggagtggggacagcaagtgccaccagcgccgggtgctgacgtacaccatccccatcagcaacccactgggccccaagagcgcctccgtggtggagacacagacgctgttccggcgcggcccccaggccggcgggtgtgtggtggactccgaggtgctgacgcagggcatcccctaccaggactacttctacactgcccaccgctactgcatcctgggtctggcccggaacaaggcgcggctccgagtgtcttctgagatccgctaccgaaagcagccgtggagcctggtgaagtcgctcattgagaagaactcgtggagcggcattgaagactatttccaccatctggagcgagagctcgccaaggctgagaagctgtctctggaggaaggcgggaaggatgcccggggcttgctatccggcctgcggcggcggaagcggcccctgagctggcgggctcacggggacgggccccagcacccagatcctgacccctgtgcccgggccggcattcacacctcgggctccctcagctcccgcttctccgaaccatctgtggaccagggccccggggcaggcatccccagtgccctggttctcatcagcattgtccttatcatcctcatcgccctcaacgtcctgctcttctaccgcctctggtccctggaaaggacagcccacacctttgagtcctggcacagcctggccctggccaagggcaagttcccccagacggccacagagtgggccgagatcctggcgctgcagaagcaattccacagcgtggaggtgcacaagtggaggcagatcctgcgggcctccgtggagctcctggatgagatgaagttctcgctggagaagctgcaccaaggcatcacagtctcagaccctccctttgacacccagccccggcccgatgacagcttttcctgaggaccccggccacgcagctgttcccccacatggacagatggacacacagagcctcggcggccactgctggcacggtgtgagcgccaggcatctcccacccgcccctcccgacggcccaaccaggggctgtgcagacgtggggaccacggaaccgagatgcactttagaccagggagctggcccggcctctggcaggccccccactaacttattttgcccggctgaggttgtggggggcgcctcctggggtgcacgattccctcagctctgggtttaatgtattatatttatttggggccgacagtgccccaataaagggtcagaagtggc

SEQ ID NO: 138629 - DNA, 2534 bp, Homo sapiens
  Payload ID: 7160
  Gene Symbol: GRAMD1A
  Gene Name: GRAM domain containing 1A
  ENST ID: ENST00000600231
  CDS Start-End: 157-825
cttttgtgcgggcggttgggtcgggtgggggcggcggccgcggaaggccaggccggtgccctgcggggacgcccagcgcagcccagccccgcgcagcccagccctgccctgccctgccctgccctgcgcccggggcgcgcccaccgcgccgcatccatgttcgacaccacaccccactctggccggagcacgccaagcagctccccatcgctccggaaacggctgcagctcctgcccccaagccggcccccacctgagccagaaccaggcaccatggtggagaagggatcagatagctcctcagagaagggtggggtgcctgggacccccagcacccagagcctaggcagccggaacttcatccgcaacagcaagaagatgcagagctggtacagtatgctgagccccacttataagcagcgtaatgaggacttccggaaactgttcagcaaactccccgaagcagaacgcctcattgtggattactcctgcgccctgcagcgtgagatcctgctccagggccgcctctacctctctgagaactggatctgcttctacagcaacatcttccgctgggagaccacgatctccatccagctgaaggaagtgacatgtctgaagaaggaaaagacggccaagctgatccccaacgccatccagatctgcacggagagcgagaagcatttcttcacttcctttggggcccgtgaccgctgcttcctcctcatcttccgcctctggcagaatgcactgcttgaaaaggacccccaaggaagtgggagatgtgatcgccctgagcgacatcacctcctcgggggcagctgaccgcagccaggagccaagcccagtgggttcgcgccgtggccatgtcacgcccaacctttcccgagccagcagcgacgcagaccatggggcagaggaggacaaggaggagcaggtagacagccagccagacgcctcctccagccagacagtgaccccggtggctgaacccccgagcacagagcccacccagcctgacgggcccaccaccctgggccccttggatctgctgcccagtgaggagctattgacagacacaagtaactcctcttcatccactggggaggaagcggacttggctgccctgcttcccgacctctccggccgcctcctcatcaactctgtcttccatgtgggcgctgagcggctccagcagatgctcttctcggactcgcccttcctccagggcttcctacagcagtgcaagttcacagacgtgacgctgagcccctggagtggggacagcaagtgccaccagcgccgggtgctgacgtacaccatccccatcagcaacccactgggccccaagagcgcctccgtggtggagacacagacgctgttccggcgcggcccccaggccggcgggtgtgtggtggactccgaggtgctgacgcagggcatcccctaccaggactacttctacactgcccaccgctactgcatcctgggtctggcccggaacaaggcgcggctccgagtgtcttctgagatccgctaccgaaagcagccgtggagcctggtgaagtcgctcattgagaagaactcgtggagcggcattgaagactatttccaccatctggagcgagagctcgccaaggctgagaagctgtctctggaggaaggcgggaaggatgcccggggcttgctatccggcctgcggcggcggaagcggcccctgagctggcgggctcacggggacgggccccagcacccagatcctgacccctgtgcccgggccggcattcacacctcgggctccctcagctcccgcttctccgaaccatctgtggaccagggccccggggcaggcatccccagtgccctggttctcatcagcattgtccttatcatcctcatcgccctcaacgtcctgctcttctaccgcctctggtccctggaaaggacagcccacacctttgagtcctggcacagcctggccctggccaagggcaagttcccccagacggccacagagtgggccgagatcctggcgctgcagaagcaattccacagcgtggaggtgcacaagtggaggcagatcctgcgggcctccgtggagctcctggatgagatgaagttctcgctggagaagctgcaccaaggcatcacagtctcagaccctccctttgacacccagccccggcccgatgacagcttttcctgaggaccccggccacgcagctgttcccccacatggacagatggacacacagagcctcggcggccactgctggcacggtgtgagcgccaggcatctcccacccgcccctcccgacggcccaaccaggggctgtgcagacgtggggaccacggaaccgagatgcactttagaccagggagctggcccggcctctggcaggccccccactaacttattttgcccggctgaggttgtggggggcgcctcctggggtgcacgattccctcagctctgggtttaatgtattatatttatttggggccgacagtgccccaataaagggtcagaagtg

SEQ ID NO: 138630 - DNA, 808 bp, Homo sapiens
  Payload ID: 7160
  Gene Symbol: GRAMD1A
  Gene Name: GRAM domain containing 1A
  ENST ID: ENST00000424536
  CDS Start-End: 24-641
ggcgcgcccaccgcgccgcatccatgttcgacaccacaccccactctggccggagcacgccaagcagctccccatcgctccggaaacggctgcagctcctgcccccaagccggcccccacctgagccagaaccaggcaccatggtggagaagggatcagatagctcctcagagaagggtggggtgcctgggacccccagcacccagagcctaggcagccggaacttcatccgcaacagcaagaagatgcagagctggtacagtatgctgagccccacttataagcagcgtaatgaggacttccggaaactgttcagcaaactccccgaagcagaacgcctcattgtggattactcctgcgccctgcagcgtgagatcctgctccagggccgcctctacctctctgagaactggatctgcttctacagcaacatcttccgctgggagaccacgatctccatccagctgaaggaagtgacatgtctgaagaaggaaaagacggccaagctgatccccaacgccatccagatctgcacggagagcgagaaggtgacggaggacccggtgacgggaccacgcggtcccccgctcagcaggccgcctcccccaaacatgcaaagccccatttgttctgcaccctgagttctctccgagctgtccccttctctctgttctcccggcccaggcgcccatcacccctgacctgatccccgcaccagcctctcctctctttccctgcaacctgttacctcacacagctgctcaggaacagcagaaatagtaaaactcttccatgtatgtggcacctc

SEQ ID NO: 138631 - DNA, 2571 bp, Homo sapiens
  Payload ID: 7161
  Gene Symbol: GRAMD1B
  Gene Name: GRAM domain containing 1B
  ENST ID: ENST00000322282
  CDS Start-End: 328-2544
cagccttgccagcattacccatcctcatcagaaactggcagcggcagccacagctcgggcaggcggctccagccccaggctggatttgcagaatctgtcctttgcctccaagcccagctttcagctgggagagggggaagaaggggcagtggcagcagttcttctggctctttctccctttctctctttctctttctgtgttcaagtcacattacatgggattctgttcttttgggacttcgtcatcttttccaatatgtcctgggacctccggagctgtaacggggatgctaaggacacggtcagtggattatcgtgactgtactaatgaaaggattcaagctctcctgcactgccagtaactccaaccgcagcacgccggcctgctcgcccatcctccggaagcggtctcgctcgccaaccccgcagaaccaggacggagacaccatggtggagaagggctcagatcactcctcggacaagtccccgtccacaccggagcagggcgtgcagcgcagctgctcctcccagtccggccggagcggcggcaagaattccaagaaaagccagagttggtataatgtgttaagccccacctacaagcagagaaatgaagacttcagaaagctctttaagcagcttccagacacggagcgcctcattgttgattactcatgtgcactccaaagagacattctccttcagggccgactctacctctctgaaaattggatctgcttctacagcaacatcttccgctgggaaactctgctgacagtccgtttgaaagacatctgttccatgactaaagaaaaaacagctcgcctcattcccaatgccatccaagtttgcactgattcagaaaagcacttcttcacttcgtttggggcccgggataggacatatatgatgatgttccggctctggcagaatgctctccttgaaaagcctctgtgtcccaaggagctctggcactttgttcaccagtgctatgggaacgaattgggcctgaccagtgatgacgaggactacgtgccccctgacgacgacttcaacacaatgggatactgtgaagagatccctgtggaagagaatgaagtgaatgacagctcatccaagagcagcatagagaccaagccagatgccagtccacagctgcccaagaaatccatcaccaacagcacactaacatccacagggagcagtgaggcccccgtctcgtttgatgggctgcccctggaggaagaggcgctggagggagacgggtccctggaaaaggagctcgccattgacaacatcatgggggagaagattgagatgatcgctcctgtgaactccccttcactggacttcaatgacaatgaggacatccccactgagctcagtgactcttccgacacacacgatgaaggagaggtccaggccttctatgaggacctgagtggccggcagtacgtgaatgaagtcttcaacttcagcgtggacaagctctatgacctcctcttcaccaactcgcccttccagcgggatttcatggagcagcggcgcttctctgatatcatcttccatccatggaaaaaggaggagaatggaaaccagagccgagtgattctttacaccatcacccttaccaaccctctggctcccaaaactgccactgtcagggagacacagaccatgtacaaggcgagccaggagagtgaatgttacgtgatagatgccgaagtcctcacccacgacgtgccctaccatgactacttctacacaatcaatcgctacacgctcacccgtgtggctcggaacaagagccgactcagggtctccacagagctgcgctatcgaaaacagccctgggggttagtgaaaacgttcatcgagaagaacttctggagtgggctggaggactacttccgccatttagagagcgagctggccaaaacggagagcacttatttggctgagatgcacagacaatctcccaaagagaaggccagcaagactacaacggtgcggaggaggaagcgtccccatgcccacctgcgagtccctcacctggaagaggtgatgagcccggtcaccacgcccacagatgaggatgtgggccacaggatcaaacatgtggcaggttccacacagacgcggcatatcccggaggacacccccaacggtttccacctgcagagcgtgtccaagctgctgctggttatcagctgtgtggtctccttcagtctggtgctgctggtcatccttaacatgatgctcttctacaaactctggatgttggaatacaccacgcagaccctcactgcctggcagggtctaaggctccaagaaaggttaccccagtctcagacagaatgggcccagctcttagagtcccaacaaaagtaccacgatactgagctccaaaaatggagggaaatcatcaaatcctcagtgatgctccttgaccagatgaaggactcgctcatcaaccttcagaacggcatcaggtcccgcgactacacgtcggaaagtgaagaaaagaggaatcgctatcattgacaaggcaggaacagggtggctgcaaga

SEQ ID NO: 138632 - DNA, 2431 bp, Homo sapiens
  Payload ID: 7161
  Gene Symbol: GRAMD1B
  Gene Name: GRAM domain containing 1B
  Uniprot ID: Q3KR37
  ENST ID: ENST00000450171
  CDS Start-End: 694-1971
ggtgccaagggttcgggggggagcactgaggctttagcagctctcctgtatcctcatttgcatcctcctgtagcagctggaaaattcagattacaggtgaaattccctggctggcaatcttctgtatatggacacagtgatgtgccagaagggctttgcatccctgagactgaaggaagctccatttttggagccctcccacaccttgctctgtgtgcctctcattctgatttgaattcttattttgctatatgatgaagctgtaatcctaagtttaaaaaggggagtaggtattgacatcatggtagaaataggctgtcttatggaactgtagttagggatcacagcctattggaccagccccagccttagcagcagttctgtacactgattcttccagattagtctacgttccctcgaacagacctatgccatgggttacaactacaatttgttgtcgattagagttaacttacagactctcaaaaccccattctttgggtttaggcaacttccagaagtagtcatttatttgaattttagtctaagatcaactgaattagggaggtttgaaagtgtaaaagcaaatcgtacattcccaaacactttgtaaagaaggaatgggtagtgtcagctaaaggaaatggtgtgcatcccagcaaaagaaagagaccgaaagcaaagtcataaaccatgcccacgagctcagctgtcctgctccgtgtcctctccatacccttgttgactgtgctcatattagccagagacctaagtgctcttggaggatgtccctggggccccctccccctccgctgtcactgtctacttcctgatcctctcttctgtgcaggagaggtccaggccttctatgaggacctgagtggccggcagtacgtgaatgaagtcttcaacttcagcgtggacaagctctatgacctcctcttcaccaactcgcccttccagcgggatttcatggagcagcggcgcttctctgatatcatcttccatccatggaaaaaggaggagaatggaaaccagagccgagtgattctttacaccatcacccttaccaaccctctggctcccaaaactgccactgtcagggagacacagaccatgtacaaggcgagccaggagagtgaatgttacgtgatagatgccgaagtcctcacccacgacgtgccctaccatgactacttctacacaatcaatcgctacacgctcacccgtgtggctcggaacaagagccgactcagggtctccacagagctgcgctatcgaaaacagccctgggggttagtgaaaacgttcatcgagaagaacttctggagtgggctggaggactacttccgccatttagagagcgagctggccaaaacggagagcacttatttggctgagatgcacagacaatctcccaaagagaaggccagcaagactacaacggtgcggaggaggaagcgtccccatgcccacctgcgagtccctcacctggaagaggtgatgagcccggtcaccacgcccacagatgaggatgtgggccacaggatcaaacatgtggcaggttccacacagacgcggcatatcccggaggacacccccaacggtttccacctgcagagcgtgtccaagctgctgctggttatcagctgtgttctggtgctgctggtcatccttaacatgatgctcttctacaaactctggatgttggaatacaccacgcagaccctcactgcctggcagggtctaaggctccaagaaaggttaccccagtctcagacagaatgggcccagctcttagagtcccaacaaaagtaccacgatactgagctccaaaaatggagggaaatcatcaaatcctcagtgatgctccttgaccagatgaaggactcgctcatcaaccttcagaacggcatcaggtcccgcgactacacgtcggaaagtgaagaaaagaggaatcgctatcattgacaaggcaggaacagggtggctgcaagaggcctgtgcaatacatgtacatagaccatataaatatatatatataaatatatatatatacagaatataaatatatatattatatacagattttaaaaaagagataatgcctatgtaccagggagaaggagcgggccctcccgcgccctgtgctggccggagcagcgttttcttatggtggagcagctgaggagggcaggaaccgcctctcagcaccgacctcccctgatctccctcctcccaccctctgttccccaccccttcccttgctggccattcttggcttttagaagggaaatgttgagccaaagttatgcctgcgaagaccctaaggtctcaaaaagaagtcttaagacggcattgcttaaggtgcttcattccctaatccccttttgatttgtttccaaaataaaagagaatcttttcttcccta

SEQ ID NO: 138633 - DNA, 2805 bp, Homo sapiens
  Payload ID: 7161
  Gene Symbol: GRAMD1B
  Gene Name: GRAM domain containing 1B
  Uniprot ID: Q3KR37
  ENST ID: ENST00000456860
  CDS Start-End: 514-2751
agattatatggagctgcgggagctgccgcctgggggaagagaggtgcagcttctgctaggtttgtgctctcctcccagggtctccttggcttccttccccaaagcagctcagagctggtatgaggtgagggtggggggcagccggccagcctggctgttgacggcaactccagggcttgtttcgcgcagccttgccagcattacccatcctcatcagaaactggcagcggcagccacagctcgggcaggcggctccagccccaggctggatttgcagaatctgtcctttgcctccaagcccagctttcagctgggagagggggaagaaggggcagtggcagcagttcttctggctctttctccctttctctctttctctttctgtgttcaagtcacattacatgggattctgttcttttgggacttcgtcatcttttccaatatgtcctgggacctccggagctgtaacggggatgctaaggacacggtcagtggattatcgtgactgtactaatgaaaggattcaagctctcctgcactgccagtaactccaaccgcagcacgccggcctgctcgcccatcctccggaagcggtctcgctcgccaaccccgcagaaccaggacggagacaccatggtggagaagggctcagatcactcctcggacaagtccccgtccacaccggagcagggcgtgcagcgcagctgctcctcccagtccggccggagcggcggcaagaattccaagtctcacaagcgcctctcaaaaaaaagccagagttggtataatgtgttaagccccacctacaagcagagaaatgaagacttcagaaagctctttaagcagcttccagacacggagcgcctcattgttgattactcatgtgcactccaaagagacattctccttcagggccgactctacctctctgaaaattggatctgcttctacagcaacatcttccgctgggaaactctgctgacagtccgtttgaaagacatctgttccatgactaaagaaaaaacagctcgcctcattcccaatgccatccaagtttgcactgattcagaaaagcacttcttcacttcgtttggggcccgggataggacatatatgatgatgttccggctctggcagaatgctctccttgaaaagcctctgtgtcccaaggagctctggcactttgttcaccagtgctatgggaacgaattgggcctgaccagtgatgacgaggactacgtgccccctgacgacgacttcaacacaatgggatactgtgaagagatccctgtggaagagaatgaagtgaatgacagctcatccaagagcagcatagagaccaagccagatgccagtccacagctgcccaagaaatccatcaccaacagcacactaacatccacagggagcagtgaggcccccgtctcgtttgatgggctgcccctggaggaagaggcgctggagggagacgggtccctggaaaaggagctcgccattgacaacatcatgggggagaagattgagatgatcgctcctgtgaactccccttcactggacttcaatgacaatgaggacatccccactgagctcagtgactcttccgacacacacgatgaaggagaggtccaggccttctatgaggacctgagtggccggcagtacgtgaatgaagtcttcaacttcagcgtggacaagctctatgacctcctcttcaccaactcgcccttccagcgggatttcatggagcagcggcgcttctctgatatcatcttccatccatggaaaaaggaggagaatggaaaccagagccgagtgattctttacaccatcacccttaccaaccctctggctcccaaaactgccactgtcagggagacacagaccatgtacaaggcgagccaggagagtgaatgttacgtgatagatgccgaagtcctcacccacgacgtgccctaccatgactacttctacacaatcaatcgctacacgctcacccgtgtggctcggaacaagagccgactcagggtctccacagagctgcgctatcgaaaacagccctgggggttagtgaaaacgttcatcgagaagaacttctggagtgggctggaggactacttccgccatttagagagcgagctggccaaaacggagagcacttatttggctgagatgcacagacaatctcccaaagagaaggccagcaagactacaacggtgcggaggaggaagcgtccccatgcccacctgcgagtccctcacctggaagaggtgatgagcccggtcaccacgcccacagatgaggatgtgggccacaggatcaaacatgtggcaggttccacacagacgcggcatatcccggaggacacccccaacggtttccacctgcagagcgtgtccaagctgctgctggttatcagctgtgtgatctgtttcagtctggtgctgctggtcatccttaacatgatgctcttctacaaactctggatgttggaatacaccacgcagaccctcactgcctggcagggtctaaggctccaagaaaggttaccccagtctcagacagaatgggcccagctcttagagtcccaacaaaagtaccacgatactgagctccaaaaatggagggaaatcatcaaatcctcagtgatgctccttgaccagatgaaggactcgctcatcaaccttcagaacggcatcaggtcccgcgactacacgtcggaaagtgaagaaaagaggaatcgctatcattgacaaggcaggaacagggtggctgcaagaggcctgtgcaatacatgtacatagacc

SEQ ID NO: 138634 - DNA, 6266 bp, Homo sapiens
  Payload ID: 7161
  Gene Symbol: GRAMD1B
  Gene Name: GRAM domain containing 1B
  Uniprot ID: Q3KR37
  ENST ID: ENST00000529432
  CDS Start-End: 364-2460
gagctcagaacagctgtctgtgagggagtcagagggagagagagaaagggagccaggcagagagagagagggacttctgtaaggcggcacgaccacaccaaataacagcagcagagggaggtgggggagagggaaataaaggggagtcatgcttaaaatgctacagcggtgtgaaacagcagagcaaagaagcgcccccagcttctgagagccctggcccgagtcccctcccccgttagaaacagggctttgggatggtcatggagcactgccagtaactccaaccgcagcacgccggcctgctcgcccatcctccggaagcggtctcgctcgccaaccccgcagaaccaggacggagacaccatggtggagaagggctcagatcactcctcggacaagtccccgtccacaccggagcagggcgtgcagcgcagctgctcctcccagtccggccggagcggcggcaagaattccaagaaaagccagagttggtataatgtgttaagccccacctacaagcagagaaatgaagacttcagaaagctctttaagcagcttccagacacggagcgcctcattgttgattactcatgtgcactccaaagagacattctccttcagggccgactctacctctctgaaaattggatctgcttctacagcaacatcttccgctgggaaactctgctgacagtccgtttgaaagacatctgttccatgactaaagaaaaaacagctcgcctcattcccaatgccatccaagtttgcactgattcagaaaagcacttcttcacttcgtttggggcccgggataggacatatatgatgatgttccggctctggcagaatgctctccttgaaaagcctctgtgtcccaaggagctctggcactttgttcaccagtgctatgggaacgaattgggcctgaccagtgatgacgaggactacgtgccccctgacgacgacttcaacacaatgggatactgtgaagagatccctgtggaagagaatgaagtgaatgacagctcatccaagagcagcatagagaccaagccagatgccagtccacagctgcccaagaaatccatcaccaacagcacactaacatccacagggagcagtgaggcccccgtctcgtttgatgggctgcccctggaggaagaggcgctggagggagacgggtccctggaaaaggagctcgccattgacaacatcatgggggagaagattgagatgatcgctcctgtgaactccccttcactggacttcaatgacaatgaggacatccccactgagctcagtgactcttccgacacacacgatgaaggagaggtccaggccttctatgaggacctgagtggccggcagtacgtgaatgaagtcttcaacttcagcgtggacaagctctatgacctcctcttcaccaactcgcccttccagcgggatttcatggagcagcggcgcttctctgatatcatcttccatccatggaaaaaggaggagaatggaaaccagagccgagtgattctttacaccatcacccttaccaaccctctggctcccaaaactgccactgtcagggagacacagaccatgtacaaggcgagccaggagagtgaatgttacgtgatagatgccgaagtcctcacccacgacgtgccctaccatgactacttctacacaatcaatcgctacacgctcacccgtgtggctcggaacaagagccgactcagggtctccacagagctgcgctatcgaaaacagccctgggggttagtgaaaacgttcatcgagaagaacttctggagtgggctggaggactacttccgccatttagagagcgagctggccaaaacggagagcacttatttggctgagatgcacagacaatctcccaaagagaaggccagcaagactacaacggtgcggaggaggaagcgtccccatgcccacctgcgagtccctcacctggaagaggtgatgagcccggtcaccacgcccacagatgaggatgtgggccacaggatcaaacatgtggcaggttccacacagacgcggcatatcccggaggacacccccaacggtttccacctgcagagcgtgtccaagctgctgctggttatcagctgtgtgatctgtttcagtctggtgctgctggtcatccttaacatgatgctcttctacaaactctggatgttggaatacaccacgcagaccctcactgcctggcagggtctaaggctccaagaaaggttaccccagtctcagacagaatgggcccagctcttagagtcccaacaaaagtaccacgatactgagctccaaaaatggagggaaatcatcaaatcctcagtgatgctccttgaccagatgaaggactcgctcatcaaccttcagaacggcatcaggtcccgcgactacacgtcggaaagtgaagaaaagaggaatcgctatcattgacaaggcaggaacagggtggctgcaagaggcctgtgcaatacatgtacatagaccatataaatatatatatataaatatatatatatacagaatataaatatatatattatatacagattttaaaaaagagataatgcctatgtaccagggagaaggagcgggccctcccgcgccctgtgctggccggagcagcgttttcttatggtggagcagctgaggagggcaggaaccgcctctcagcaccgacctcccctgatctccctcctcccaccctctgttccccaccccttcccttgctggccattcttggcttttagaagggaaatgttgagccaaagttatgcctgcgaagaccctaaggtctcaaaaagaagtcttaagacggcattgcttaaggtgcttcattccctaatccccttttgatttgtttccaaaataaaagagaatcttttcttccctaccccaggcttccccaggcattctcttgggaacacagaagcatcaagggagcccagtctaaactcctagggttggccgcccacttgatccagaccgtactgagtgtcagatggagaggatgcttggaaagctaggaaggctgcattgtgtggtggcaggctcccgagactcgtgttctgaaggatactctcctccatcacccctgcaccttcctccgacctgtgtagggtgtggacccagtaagggctgggaatttcttactttcccacccgctttctctctggtcttctcccaggctggatctgggcgaagtgtcactttttagtgcctaaagtcctattgtttctctgtgccctaagagcacattgtttattagccagggtggagcgttttcgaccttattaaacctcttttagtgcttctaagcaagtcaggtctgtggctctgaggccttcacttagagctgtcagtgtgatttccaggatgagtcagggtgtgctgggccctccaggatttgagagagggagagaaggcccttgccacgtccggggtgcagggtctacccacagaacactgtgagtggtgagcaccaagatgggttgccagcctcatttgctctttgaacgaaccaacattagccagtggagacgactgtctgagacagtttgcacatagaaaaagcatctgagccactggagggaaggatttggcaaaggtgcatgtgtttgggcaggaaaaggccaagtgaaatctatgccctacgggagccattcccaatcctgagtttctcagacttggcaatgggggttctggcgggggttggagtacaaatcctgctctggtctctggccccacagaggtgtaagatcattaagaagtagaaggcactagcttcaaagagtgagacattcagggccttttcagcattggcccactagcaccatgcatttatctgaattcacggggccctctgggcacattcatcatccctcatacactaactactgtttcttcatgtaatgaccaaaagagtcccaccagctccaggcagagcttgtggagattcatgaaagagtcatagccagtttggcatgcagaggtcttcagtcttgcttattcttctcctgggcttcttgacacaggggcagaagaaaccccagatgtcccagatgtcccagaacatcagcccaaaagacagaagattttatcactcatctaccccaaagataaagttgtatttttttcttagaatggcctttaattccctgtggcaattacagtttttgacttttccatgtgagaataaggccttggtatttccctaagggcaggatcagaaaacaggaaggtccatgcccaggtgatcctccaagggaggagggtgaggaggctccagggcatgagctagagtggatattcctcccctagaagaggagatgggaggaaatgcagtttcatgtaatccctgtgaagagtgcctatgcccacagcccagtgggtccttgttcagttcttgtccaggcctttgggtgagggacactggtagggatcaaggctcatgggctctgagccaaagaaggaggcatggtgcagactgctggaaatctcccccttggcacagccagaagccaaaactattcccagaaagttttgaatgcaaaacttgtagattcctgaatttattccatacataattatttccttaagttatttaattattaaaggtgccacggtgggacctttgggatgacttaaaaagggttctttgttgggagtcaagtgacagagcagacctggccgcagggagttgttctgcttctgctttacctctcaggaccattcccaggaggaaaaggtggcagagagggcagtactgagtatgtcagaagagccctcctggttttttagcgatttgaacccactagacaatgtgtgcacatagggaatgtcctttaagaatcatggatctcttgtaggctctctgtgttccaataattttttgactatcataccaggaaaaaaccaacaactctattcattcccaaacaaaatctcttcccccttagtcaatagcttgcgaaagacatcttaactcacccttgcagataagtcttggagtgaaacaaataaatagcattgtattcctggccatttgcctggctagttgctgtctacaagggagcatcaaaacatcactacttcttatgtaacttcttccagccagtgcttttattgttcgttttagtttactggggacacacaggagtctttctgtaatgacttatgtggtaaaatgtttgagagtttgcactcaattttaaagaatttgcagtttctaacaaggtgaagaacagctataggatctaaagttccattacagcttactgtgaaagaattgacaagactggcctcagacaagctaatcatggtgcgactctctcccttcctcatccacctctttggggacaagaggattacatctcaggccagcaagatcagctgcttgaagctctgtgtaagagcactgcactgacggtttggagacctgagcctgggtcctgacttttccattgactaagctctgtggccttgggcaagtcactccccctctctgagcttcagtatcctcctgtcacaggagggagttgggctagatcatctttaaggtaggttctagctttgacatcatcttgggggttaggccagaggctgggaagactgggtggactttctcaattgctctgccaggagggaacaagcccagaggctgaagcttcccagtatttagaggtgtggtagggcagtgtctgcattcccaggagacccagggtgattaaaatttattctttaggtggctaggagggctggggaggcccagtggaagagagagagagagagagagagagagagagagagagagagagagatcgagcttgatgtattgctcagtattcacttagaagggtttctttctctttggcctagtttgtgaagggatcttcctttggactttctctaagttgggagaagaacattcttttcaatggagctcatcttctatctctagggtctgttcagcctttcatctatccatccttcctctttattggtagaagaaacagtggagagtagccacttctggttctagcacttctcttttgttaagatagggtttggatttagtatgaagctttggctaaaacccttgggtttgccttagaacactgacactaagaacctggaatgacatggggaggacaaagagagctcaagaggaatgctttgtgagaagtggattctctccgtgtccctgccccccacccaaacttgaactatacctattacat

SEQ ID NO: 138635 - DNA, 1689 bp, Homo sapiens
  Payload ID: 7161
  Gene Symbol: GRAMD1B
  Gene Name: GRAM domain containing 1B
  ENST ID: ENST00000534764
  CDS Start-End: 366-1689
gtctgtgagggagtcagagggagagagagaaagggagccaggcagagagagagagggacttctgtaaggcggcacgaccacaccaaataacagcagcagagggaggtgggggagagggaaataaaggggagtcatgcttaaaatgctacagcggtgtgaaacagcagagcaaagaagcgcccccagcttctgagagccctggcccgagtcccctcccccgttagaaacagggctttgggatggtcatggaggtgagtgccctccagcctcctcagggcccccgctccccgcccccgccccccactgcccaatgcatgaatgaatgagttcctctctgcactgcactctgctactgttcctacctaatggcttccagcactgccagtaactccaaccgcagcacgccggcctgctcgcccatcctccggaagcggtctcgctcgccaaccccgcagaaccaggacggagacaccatggtggagaagggctcagatcactcctcggacaagtccccgtccacaccggagcagggcgtgcagcgcagctgctcctcccagtccggccggagcggcggcaagaattccaagaaaagccagagttggtataatgtgttaagccccacctacaagcagagaaatgaagacttcagaaagctctttaagcagcttccagacacggagcgcctcattgttgattactcatgtgcactccaaagagacattctccttcagggccgactctacctctctgaaaattggatctgcttctacagcaacatcttccgctgggaaactctgctgacagtccgtttgaaagacatctgttccatgactaaagaaaaaacagctcgcctcattcccaatgccatccaagtttgcactgattcagaaaagcacttcttcacttcgtttggggcccgggataggacatatatgatgatgttccggctctggcagaatgctctccttgaaaagcctctgtgtcccaaggagctctggcactttgttcaccagtgctatgggaacgaattgggcctgaccagtgatgacgaggactacgtgccccctgacgacgacttcaacacaatgggatactgtgaagagatccctgtggaagagaatgaagtgaatgacagctcatccaagagcagcatagagaccaagccagatgccagtccacagctgcccaagaaatccatcaccaacagcacactaacatccacagggagcagtgaggcccccgtctcgtttgatgggctgcccctggaggaagaggcgctggagggagacgggtccctggaaaaggagctcgccattgacaacatcatgggggagaagattgagatgatcgctcctgtgaactccccttcactggacttcaatgacaatgaggacatccccactgagctcagtgactcttccgacacacacgatgaaggagaggtccaggccttctatgaggacctgagtggccggcagtacgtgaatgaagtcttcaacttcagcgtggacaagctctatgacctcctcttcaccaactcgcccttccagcgggatttcatggagcagcggcgcttctctgatatcatcttccatccatggaaaaaggaggagaatggaaaccagagccgagtgattctttacaccatcacccttaccaaccctctggctcccaaaactgccactgtca

SEQ ID NO: 138636 - DNA, 7723 bp, Homo sapiens
  Payload ID: 7161
  Gene Symbol: GRAMD1B
  Gene Name: GRAM domain containing 1B
  Uniprot ID: Q3KR37
  ENST ID: ENST00000529750
  CDS Start-End: 328-2544
cagccttgccagcattacccatcctcatcagaaactggcagcggcagccacagctcgggcaggcggctccagccccaggctggatttgcagaatctgtcctttgcctccaagcccagctttcagctgggagagggggaagaaggggcagtggcagcagttcttctggctctttctccctttctctctttctctttctgtgttcaagtcacattacatgggattctgttcttttgggacttcgtcatcttttccaatatgtcctgggacctccggagctgtaacggggatgctaaggacacggtcagtggattatcgtgactgtactaatgaaaggattcaagctctcctgcactgccagtaactccaaccgcagcacgccggcctgctcgcccatcctccggaagcggtctcgctcgccaaccccgcagaaccaggacggagacaccatggtggagaagggctcagatcactcctcggacaagtccccgtccacaccggagcagggcgtgcagcgcagctgctcctcccagtccggccggagcggcggcaagaattccaagaaaagccagagttggtataatgtgttaagccccacctacaagcagagaaatgaagacttcagaaagctctttaagcagcttccagacacggagcgcctcattgttgattactcatgtgcactccaaagagacattctccttcagggccgactctacctctctgaaaattggatctgcttctacagcaacatcttccgctgggaaactctgctgacagtccgtttgaaagacatctgttccatgactaaagaaaaaacagctcgcctcattcccaatgccatccaagtttgcactgattcagaaaagcacttcttcacttcgtttggggcccgggataggacatatatgatgatgttccggctctggcagaatgctctccttgaaaagcctctgtgtcccaaggagctctggcactttgttcaccagtgctatgggaacgaattgggcctgaccagtgatgacgaggactacgtgccccctgacgacgacttcaacacaatgggatactgtgaagagatccctgtggaagagaatgaagtgaatgacagctcatccaagagcagcatagagaccaagccagatgccagtccacagctgcccaagaaatccatcaccaacagcacactaacatccacagggagcagtgaggcccccgtctcgtttgatgggctgcccctggaggaagaggcgctggagggagacgggtccctggaaaaggagctcgccattgacaacatcatgggggagaagattgagatgatcgctcctgtgaactccccttcactggacttcaatgacaatgaggacatccccactgagctcagtgactcttccgacacacacgatgaaggagaggtccaggccttctatgaggacctgagtggccggcagtacgtgaatgaagtcttcaacttcagcgtggacaagctctatgacctcctcttcaccaactcgcccttccagcgggatttcatggagcagcggcgcttctctgatatcatcttccatccatggaaaaaggaggagaatggaaaccagagccgagtgattctttacaccatcacccttaccaaccctctggctcccaaaactgccactgtcagggagacacagaccatgtacaaggcgagccaggagagtgaatgttacgtgatagatgccgaagtcctcacccacgacgtgccctaccatgactacttctacacaatcaatcgctacacgctcacccgtgtggctcggaacaagagccgactcagggtctccacagagctgcgctatcgaaaacagccctgggggttagtgaaaacgttcatcgagaagaacttctggagtgggctggaggactacttccgccatttagagagcgagctggccaaaacggagagcacttatttggctgagatgcacagacaatctcccaaagagaaggccagcaagactacaacggtgcggaggaggaagcgtccccatgcccacctgcgagtccctcacctggaagaggtgatgagcccggtcaccacgcccacagatgaggatgtgggccacaggatcaaacatgtggcaggttccacacagacgcggcatatcccggaggacacccccaacggtttccacctgcagagcgtgtccaagctgctgctggttatcagctgtgtgatctgtttcagtctggtgctgctggtcatccttaacatgatgctcttctacaaactctggatgttggaatacaccacgcagaccctcactgcctggcagggtctaaggctccaagaaaggttaccccagtctcagacagaatgggcccagctcttagagtcccaacaaaagtaccacgatactgagctccaaaaatggagggaaatcatcaaatcctcagtgatgctccttgaccagatgaaggactcgctcatcaaccttcagaacggcatcaggtcccgcgactacacgtcggaaagtgaagaaaagaggaatcgctatcattgacaaggcaggaacagggtggctgcaagaggcctgtgcaatacatgtacatagaccatataaatatatatatataaatatatatatatacagaatataaatatatatattatatacagattttaaaaaagagataatgcctatgtaccagggagaaggagcgggccctcccgcgccctgtgctggccggagcagcgttttcttatggtggagcagctgaggagggcaggaaccgcctctcagcaccgacctcccctgatctccctcctcccaccctctgttccccaccccttcccttgctggccattcttggcttttagaagggaaatgttgagccaaagttatgcctgcgaagaccctaaggtctcaaaaagaagtcttaagacggcattgcttaaggtgcttcattccctaatccccttttgatttgtttccaaaataaaagagaatcttttcttccctaccccaggcttccccaggcattctcttgggaacacagaagcatcaagggagcccagtctaaactcctagggttggccgcccacttgatccagaccgtactgagtgtcagatggagaggatgcttggaaagctaggaaggctgcattgtgtggtggcaggctcccgagactcgtgttctgaaggatactctcctccatcacccctgcaccttcctccgacctgtgtagggtgtggacccagtaagggctgggaatttcttactttcccacccgctttctctctggtcttctcccaggctggatctgggcgaagtgtcactttttagtgcctaaagtcctattgtttctctgtgccctaagagcacattgtttattagccagggtggagcgttttcgaccttattaaacctcttttagtgcttctaagcaagtcaggtctgtggctctgaggccttcacttagagctgtcagtgtgatttccaggatgagtcagggtgtgctgggccctccaggatttgagagagggagagaaggcccttgccacgtccggggtgcagggtctacccacagaacactgtgagtggtgagcaccaagatgggttgccagcctcatttgctctttgaacgaaccaacattagccagtggagacgactgtctgagacagtttgcacatagaaaaagcatctgagccactggagggaaggatttggcaaaggtgcatgtgtttgggcaggaaaaggccaagtgaaatctatgccctacgggagccattcccaatcctgagtttctcagacttggcaatgggggttctggcgggggttggagtacaaatcctgctctggtctctggccccacagaggtgtaagatcattaagaagtagaaggcactagcttcaaagagtgagacattcagggccttttcagcattggcccactagcaccatgcatttatctgaattcacggggccctctgggcacattcatcatccctcatacactaactactgtttcttcatgtaatgaccaaaagagtcccaccagctccaggcagagcttgtggagattcatgaaagagtcatagccagtttggcatgcagaggtcttcagtcttgcttattcttctcctgggcttcttgacacaggggcagaagaaaccccagatgtcccagatgtcccagaacatcagcccaaaagacagaagattttatcactcatctaccccaaagataaagttgtatttttttcttagaatggcctttaattccctgtggcaattacagtttttgacttttccatgtgagaataaggccttggtatttccctaagggcaggatcagaaaacaggaaggtccatgcccaggtgatcctccaagggaggagggtgaggaggctccagggcatgagctagagtggatattcctcccctagaagaggagatgggaggaaatgcagtttcatgtaatccctgtgaagagtgcctatgcccacagcccagtgggtccttgttcagttcttgtccaggcctttgggtgagggacactggtagggatcaaggctcatgggctctgagccaaagaaggaggcatggtgcagactgctggaaatctcccccttggcacagccagaagccaaaactattcccagaaagttttgaatgcaaaacttgtagattcctgaatttattccatacataattatttccttaagttatttaattattaaaggtgccacggtgggacctttgggatgacttaaaaagggttctttgttgggagtcaagtgacagagcagacctggccgcagggagttgttctgcttctgctttacctctcaggaccattcccaggaggaaaaggtggcagagagggcagtactgagtatgtcagaagagccctcctggttttttagcgatttgaacccactagacaatgtgtgcacatagggaatgtcctttaagaatcatggatctcttgtaggctctctgtgttccaataattttttgactatcataccaggaaaaaaccaacaactctattcattcccaaacaaaatctcttcccccttagtcaatagcttgcgaaagacatcttaactcacccttgcagataagtcttggagtgaaacaaataaatagcattgtattcctggccatttgcctggctagttgctgtctacaagggagcatcaaaacatcactacttcttatgtaacttcttccagccagtgcttttattgttcgttttagtttactggggacacacaggagtctttctgtaatgacttatgtggtaaaatgtttgagagtttgcactcaattttaaagaatttgcagtttctaacaaggtgaagaacagctataggatctaaagttccattacagcttactgtgaaagaattgacaagactggcctcagacaagctaatcatggtgcgactctctcccttcctcatccacctctttggggacaagaggattacatctcaggccagcaagatcagctgcttgaagctctgtgtaagagcactgcactgacggtttggagacctgagcctgggtcctgacttttccattgactaagctctgtggccttgggcaagtcactccccctctctgagcttcagtatcctcctgtcacaggagggagttgggctagatcatctttaaggtaggttctagctttgacatcatcttgggggttaggccagaggctgggaagactgggtggactttctcaattgctctgccaggagggaacaagcccagaggctgaagcttcccagtatttagaggtgtggtagggcagtgtctgcattcccaggagacccagggtgattaaaatttattctttaggtggctaggagggctggggaggcccagtggaagagagagagagagagagagagagagagagagagagagagagagatcgagcttgatgtattgctcagtattcacttagaagggtttctttctctttggcctagtttgtgaagggatcttcctttggactttctctaagttgggagaagaacattcttttcaatggagctcatcttctatctctagggtctgttcagcctttcatctatccatccttcctctttattggtagaagaaacagtggagagtagccacttctggttctagcacttctcttttgttaagatagggtttggatttagtatgaagctttggctaaaacccttgggtttgccttagaacactgacactaagaacctggaatgacatggggaggacaaagagagctcaagaggaatgctttgtgagaagtggattctctccgtgtccctgccccccacccaaacttgaactatacctattacatttccaggcagtatccctaagatgagatcctggagaaaggactaggggaagtatctttctggatgcttgtggtcccagaagggtactttctgtgtcataccatgccacttctttaagctcttcagggcagccaaagccagcccttttctcctactgcccccaggagaaatagcactcttctcccttcccccagatggcagggctctggcctccctacacctcataccctgcctgcctcctccaggaggaatctccggggccccttcctgactctccccaccttcgccacttgtctctaggctatgggacaatcatcccattcaccacttgacatccttgacatccttgactttcattcccccaacctccagcaggttggccccaatcctcttcacctctgtgttttcttctagaagatgcattttgggtctgagaggagcattttcctggaaggccatcttttaaggcccctgcttgctgtcatagtgcagagcagaaacttgcacactatttagagagctcccttcccacctctctgcccagccttgttacctcacttctgctctggccatggctgtgaagggcccagccagctccctgttttgatgttctgtgcaacagctccggggtcttgtgactggagatcctcaacaggccctggagccaggactggagtcttggcagctgatgagcagcaccttgccggccaggaggagctgatgctgacgatctccccaacatctgaaggcttaaagaacattgtcgttcttcagccctccttgcttctctcaatacaataagacattgcagaagcaaaagggtggcctctgctccaggcaaggcagctggctctgtctggggcatcggcctggggcttgggtgccacgtgctgagattgcatagtcaaaacagccatttttgccaacaatagcttgtggctccccacattttcctaccctgcactcaagggccagaccactctctgcatggaccagaccatcttcccaaacccatggtgctttttccccaactcaacctagactccaaggtggggagggatgggtcagaggccatagtggcccctggataatcctgacgtggggtggagtggggtgaggcagagggagcagccccaacacctgcactgggccatctatgggaaagaacacgggtcgagtgcagtcgagttgtctggccatctgtatttggatctataactgtactttgcctggcgctgtgcgcaaggtcagaaaacttactgctagtacctagaaacacacaaggctgcccagccaaatcttaatgtaaagtagctagagccatggaagtacagtatgaattaaaaagaaaaaagtattgaactacaataataaa

SEQ ID NO: 138637 - DNA, 847 bp, Homo sapiens
  Payload ID: 7161
  Gene Symbol: GRAMD1B
  Gene Name: GRAM domain containing 1B
  ENST ID: ENST00000633646
  CDS Start-End: 348-847
gccaccaggctctgcggagggccctaagtgaatagagggcagcagtgtcttccaaatttgaaatgagtgacagtgggttataattaggggagaagatgctcttgatgctactgagaagatacagagtgagaacttttcttagaaaagtctgaggttgtaaagaagaaccaagcagccaacagagcagtcagcagagcagccacgatgatgattctagcaggttcctgagtcctcgagcgcgggaagaaagcactgccagtaactccaaccgcagcacgccggcctgctcgcccatcctccggaagcggtctcgctcgccaaccccgcagaaccaggacggagacaccatggtggagaagggctcagatcactcctcggacaagtccccgtccacaccggagcagggcgtgcagcgcagctgctcctcccagtccggccggagcggcggcaagaattccaagaaaagccagagttggtataatgtgttaagccccacctacaagcagagaaatgaagacttcagaaagctctttaagcagcttccagacacggagcgcctcattgttgattactcatgtgcactccaaagagacattctccttcagggccgactctacctctctgaaaattggatctgcttctacagcaacatcttccgctgggaaactctgctgacagtccgtttgaaagacatctgttccatgactaaagaaaaaacagctcgcctcattcccaatgccatccaagtttgcactgattcagaaaagcacttcttcacttcgtttggggcccgggataggacatatatgatgatgttccggctctggcagaatgctctccttgaaaa

SEQ ID NO: 138638 - DNA, 577 bp, Homo sapiens
  Payload ID: 7161
  Gene Symbol: GRAMD1B
  Gene Name: GRAM domain containing 1B
  ENST ID: ENST00000633087
  CDS Start-End: 65-577
agttgaagtctaagtgacctcccccagggttgagaaagaagctgaagttaacggttgatatcctatgtctttcctcagcagccaacagagcagtcagcagagcagccacgatgatgattctagcaggttcctgagtcctcgagcgcgggaagaaagcactgccagtaactccaaccgcagcacgccggcctgctcgcccatcctccggaagcggtctcgctcgccaaccccgcagaaccaggacggagacaccatggtggagaagggctcagatcactcctcggacaagtccccgtccacaccggagcagggcgtgcagcgcagctgctcctcccagtccggccggagcggcggcaagaattccaagaaaagccagagttggtataatgtgttaagccccacctacaagcagagaaatgaagacttcagaaagctctttaagcagcttccagacacggagcgcctcattgttgattactcatgtgcactccaaagagacattctccttcagggccgactctacctctctgaaaattggatctgcttctacagcaacatcttccgctgggaaactctg

SEQ ID NO: 138639 - DNA, 541 bp, Homo sapiens
  Payload ID: 7161
  Gene Symbol: GRAMD1B
  Gene Name: GRAM domain containing 1B
  ENST ID: ENST00000632815
  CDS Start-End: 218-541
cggctgctctcatgtacctttagacagaggctgtgagtctctgggagtggagtgggggggtgtgaaccgcccgctcctggctcctgtgtaggcctcagtcagtctgaatgttattgcaagcactgccagtaactccaaccgcagcacgccggcctgctcgcccatcctccggaagcggtctcgctcgccaaccccgcagaaccaggacggagacaccatggtggagaagggctcagatcactcctcggacaagtccccgtccacaccggagcagggcgtgcagcgcagctgctcctcccagtccggccggagcggcggcaagaattccaagaaaagccagagttggtataatgtgttaagccccacctacaagcagagaaatgaagacttcagaaagctctttaagcagcttccagacacggagcgcctcattgttgattactcatgtgcactccaaagagacattctccttcagggccgactctacctctctgaaaattggatctgcttctacagcaacatcttccgctgggaaactctg

SEQ ID NO: 138640 - DNA, 4177 bp, Homo sapiens
  Payload ID: 7162
  Gene Symbol: GRAMD1C
  Gene Name: GRAM domain containing 1C
  Uniprot ID: Q8IYS0
  ENST ID: ENST00000358160
  CDS Start-End: 493-2481
aaaaattatccgggcgtggtggcaggcgcctgtaaccacagctactcgggaggctgaggcaggagaatcgcttgaactgggaggcggaggttgcagttagccgagacggggccttggcactccatccagcctgaggaatgagagcgaaactccgtctcaaaaaaaaaaaaaaaaagtttccgagcaattcaccttttcgcacattggggcagggtatgccatttcctgggaggcacagtagtttgaggttgggaatagggaagtctcattgtgacccctagaaagacaagccttcaggctaacccggtaacacccatcgtcaggaatccttcacggccgccagagggcgcaaggagctgcggctggaagtactcggagggccggcggaggaggcgcgcggagcctgtaactcgcagcgcgcgctggaggtgggcgcggggcggtgcggtgcggtgcgcgcggggcggtgccgcggcggcggagggagccgcgatggagggcgctccgactgtccgtcaggtgatgaatgaaggggattcaagccttgccaccgacttacaggaagatgtagaggaaaatcctagtccaactgtggaagagaataatgtggtagttaaaaaacaggggccaaatttacataattggagtggtgactggagcttttggatttcaagttccacctataaagacaggaatgaggaatacagaagacagttcacacatctacctgatacagagaggctgatagcagattatgcttgtgctcttcagagggacattttgcttcagggacgactatacctttcagaaaactggctatgtttctatagcaacatcttcagatgggaaactacaatttctattgctttaaagaatataaccttcatgaccaaggaaaaaactgctcgactcatcccaaacgctatccagatagttacagaaagtgaaaagtttttcttcacatcttttggtgccagggatagaagttacctcagtatctttaggttgtggcagaatgtattattagataagagcctgactagacaggaattctggcaactgctccagcagaactatggcactgagctaggtttaaatgctgaggagatggaaaacttgtcactgtcgattgaggatgtgcagccaagaagtccaggaagaagcagcttggatgactctggggagagagatgaaaaattatccaagtcaatcagttttaccagtgaatcaattagtcgggtttcagaaacagagtcattcgatggaaattcatcaaaaggaggattaggcaaagaggagtcccaaaatgagaaacagaccaaaaagagtctcttaccaactttggaaaagaagttaactagagtgccatcaaagtcactggacttgaataaaaatgaatatctttctctggacaaaagcagcacttcagattctgttgatgaagaaaatgttcctgagaaagatcttcatggaagactttttatcaaccgtatttttcatatcagtgctgacagaatgtttgaattgctctttaccagttcacgctttatgcagaaatttgccagttctagaaatataatagatgtagtatctaccccttggactgcagaacttggaggtgatcagctgagaacgatgacctacactatagtccttaatagtccacttactggaaaatgcactgctgccactgaaaagcagacactgtataaagaaagtcgggaagcacgattttatttggtagattcagaagtactgacacatgatgtcccctaccatgattacttctataccgtgaacagatactgtatcatccgatcttcaaaacagaaatgcaggctaagagtttccacagatttgaaatacagaaaacagccatggggccttgtcaaatctttaattgaaaagaattcctggagttctttggaggactatttcaaacagcttgaatcagatttgttaattgaagaatctgtattaaatcaggccattgaagaccctggaaaacttactggcctacgaaggagaaggcgaaccttcaaccgaacagcagaaacagttcctaaactttcctctcagcattcctctggagatgtgggcttaggtgccaaaggggatattacaggaaagaaaaaggaaatggaaaactataacgtcactcttattgtggtaatgagtatttttgtgttgttattagttttgttgaatgtgacactgtttctgaagctgtcaaagatagaacatgctgctcagtccttttaccgtctccgcctccaagaagagaaatctttaaatttagcctctgatatggtgtcaagagcagaaactattcagaagaataaagatcaggcccatcgtttaaagggagtgctccgagactccatagtgatgcttgaacagctgaagagctcactcattatgcttcagaaaacgtttgatctactaaataagaataagactggcatggctgttgaaagctagtgatctgaaggactaaaaccgcagagatacttggaacttaaagaaaatacctggaagaaaaccagacgaatgaaggattttggcatagaacatttctatgttttttcattattgagatttctaatatgaacatttctttcagtaacatttatttgataattagtttctgctggccttaataatccatcctttcacttcttatagatatttttaagctgtgaatttcttcagtgaaccatgaaatatattatagaactgaatttctctgatacaaaaagaaaatgacacaccctgaattgagtggtatggtctcatttctacagtgaagtctgatgctttgttagcacagaatccgtacatgtccaataggtcgcttttgtaactgagataagaccaagaggataaacaggacaatataagaagaaacctctatgtcattactgattttaaaggttctgttttcaggcatataacatttccaggtttgtgtactgtaaagattataatgtcttcatttatttagcatgcaaatttaatagtcaaactttttgaatctgcatgttgatgatgattatcagaaagggtcttctgccatgctgtatctttatgaaagaaatagttgttttttcttaaggtaactatcagaggtgggattatcttgcctcctcacttagaataccaacagtcaaaaggaagaaccatcctctgagttttaaaaaccagaaggttatgttaaaatctgggcatttagtgacagatcaaatgcatacttgaactaagattggcttcagcttagcagtctttcatggtggaagtgacacatctggttgaaaataatttgtgtattttcagtaaccatgtatggcttccttctttatgtatgtgtgtgacttgttttgattggtaagttataagccagacatagattttagctctttaataaaaacttcaggggcacgtatgtcccagtacaagtgtactgactatcaagttttaactcagatgcaagctttggctctttcataaaaagtttttatgcatatgtgtctccatacaagtggctcattaaaataagaactttgtaaactgacttaaaatcagatattttttcaagagttagggaaagttgaagtgttttactgttttgtctcttgagccctttctctggggaaaaaatacatatccatctatctatctatatataaactgtgtatacattcttactgtttgaacaactattgcctttaattaaatgtttcatttttctccagagtccccaaagccacatggcattattatagtcatttttgagatgcctgtagagaatgaaagtattgactccgttagagggaaaatgggtttctctgggtgaattccaacgaagcatacctaggggtaacagtgaacctacctgggtttgttttgttttggtaaggatttatgtagtgtctggctgtaagcaagaatgagtggattataaacttgaagatttctctgttaaagtcacaaaaatgatcgacaaacaatatttttgtgatgtttatttaaacgttgtattttataacatacttcaaggaagagtatcgaagtaagttgctttataaattaagactaaattcgtatggatgcagaattcaattaataaaatttgagcctgttacgtaaattgaatattaataaaattgaaaatttctga

SEQ ID NO: 138641 - DNA, 3475 bp, Homo sapiens
  Payload ID: 7162
  Gene Symbol: GRAMD1C
  Gene Name: GRAM domain containing 1C
  Uniprot ID: Q8IYS0
  ENST ID: ENST00000440446
  CDS Start-End: 420-1793
tgtagagtgaggtataacttccaattctgcattctgacctgcaaccttggaaagagtgctggtactacaaccaggaagtgacagataatgtgctttaaactacattagaaaagcttctcatagcaaaactgagagattgaagcagtgattatttttacatagttgtcattaaatatttggagctctgctgtgcatagagatggcaacatacttagaatacacagctttctgggccagaaattgatcttctgacttttgagccttatctgattactgcttggttcatctttattttgttaaactactctgtaggctgaaagggagagactctccttggtttgcagagcctgactagacaggaattctggcaactgctccagcagaactatggcactgagctaggtttaaatgctgaggagatggaaaacttgtcactgtcgattgaggatgtgcagccaagaagtccaggaagaagcagcttggatgactctggggagagagatgaaaaattatccaagtcaatcagttttaccagtgaatcaattagtcgggtttcagaaacagagtcattcgatggaaattcatcaaaaggaggattaggcaaagaggagtcccaaaatgagaaacagaccaaaaagagtctcttaccaactttggaaaagaagttaactagagtgccatcaaagtcactggacttgaataaaaatgaatatctttctctggacaaaagcagcacttcagattctgttgatgaagaaaatgttcctgagaaagatcttcatggaagactttttatcaaccgtatttttcatatcagtgctgacagaatgtttgaattgctctttaccagttcacgctttatgcagaaatttgccagttctagaaatataatagatgtagtatctaccccttggactgcagaacttggaggtgatcagctgagaacgatgacctacactatagtccttaatagtccacttactggaaaatgcactgctgccactgaaaagcagacactgtataaagaaagtcgggaagcacgattttatttggtagattcagaagtactgacacatgatgtcccctaccatgattacttctataccgtgaacagatactgtatcatccgatcttcaaaacagaaatgcaggctaagagtttccacagatttgaaatacagaaaacagccatggggccttgtcaaatctttaattgaaaagaattcctggagttctttggaggactatttcaaacagcttgaatcagatttgttaattgaagaatctgtattaaatcaggccattgaagaccctggaaaacttactggcctacgaaggagaaggcgaaccttcaaccgaacagcagaaacagttcctaaactttcctctcagcattcctctggagatgtgggcttaggtgccaaaggggatattacaggaaagaaaaaggaaatggaaaactataacgtcactcttattgtggtaatgagtatttttgtgttgttattagttttgttgaatgtgacactgtttctgaagctgtcaaagatagaacatgctgctcagtccttttaccgtctccgcctccaagaagagaaatctttaaatttagcctctgatatggtgtcaagagcagaaactattcagaagaataaagatcaggcccatcgtttaaagggagtgctccgagactccatagtgatgcttgaacagctgaagagctcactcattatgcttcagaaaacgtttgatctactaaataagaataagactggcatggctgttgaaagctagtgatctgaaggactaaaaccgcagagatacttggaacttaaagaaaatacctggaagaaaaccagacgaatgaaggattttggcatagaacatttctatgttttttcattattgagatttctaatatgaacatttctttcagtaacatttatttgataattagtttctgctggccttaataatccatcctttcacttcttatagatatttttaagctgtgaatttcttcagtgaaccatgaaatatattatagaactgaatttctctgatacaaaaagaaaatgacacaccctgaattgagtggtatggtctcatttctacagtgaagtctgatgctttgttagcacagaatccgtacatgtccaataggtcgcttttgtaactgagataagaccaagaggataaacaggacaatataagaagaaacctctatgtcattactgattttaaaggttctgttttcaggcatataacatttccaggtttgtgtactgtaaagattataatgtcttcatttatttagcatgcaaatttaatagtcaaactttttgaatctgcatgttgatgatgattatcagaaagggtcttctgccatgctgtatctttatgaaagaaatagttgttttttcttaaggtaactatcagaggtgggattatcttgcctcctcacttagaataccaacagtcaaaaggaagaaccatcctctgagttttaaaaaccagaaggttatgttaaaatctgggcatttagtgacagatcaaatgcatacttgaactaagattggcttcagcttagcagtctttcatggtggaagtgacacatctggttgaaaataatttgtgtattttcagtaaccatgtatggcttccttctttatgtatgtgtgtgacttgttttgattggtaagttataagccagacatagattttagctctttaataaaaacttcaggggcacgtatgtcccagtacaagtgtactgactatcaagttttaactcagatgcaagctttggctctttcataaaaagtttttatgcatatgtgtctccatacaagtggctcattaaaataagaactttgtaaactgacttaaaatcagatattttttcaagagttagggaaagttgaagtgttttactgttttgtctcttgagccctttctctggggaaaaaatacatatccatctatctatctatatataaactgtgtatacattcttactgtttgaacaactattgcctttaattaaatgtttcatttttctccagagtccccaaagccacatggcattattatagtcatttttgagatgcctgtagagaatgaaagtattgactccgttagagggaaaatgggtttctctgggtgaattccaacgaagcatacctaggggtaacagtgaacctacctgggtttgttttgttttggtaaggatttatgtagtgtctggctgtaagcaagaatgagtggattataaacttgaagatttctctgttaaagtcacaaaaatgatcgacaaacaatatttttgtgatgtttatttaaacgttgtattttataacatacttcaaggaagagtatcgaagtaagttgctttataaattaagactaaattcgtatggatgcagaattcaattaataaaatttgagcctgttacgtaaattgaatattaataaaa

SEQ ID NO: 138642 - DNA, 1162 bp, Homo sapiens
  Payload ID: 7162
  Gene Symbol: GRAMD1C
  Gene Name: GRAM domain containing 1C
  ENST ID: ENST00000472384
  CDS Start-End: 30-650
gcggtgccgcggcggcggagggagccgcgatggagggcgctccgactgtccgtcaggtgatgaatgaaggggattcaagccttgccaccgacttacaggaagatgtagaggaaaatcctagtccaactgtggaagagaataatgtggtagttaaaaaacaggggccaaatttacataattggagtggtgactggagcttttggatttcaagttccacctataaagacaggaatgaggaatacagaagacagttcacacatctacctgatacagagaggctgatagcagattatgcttgtgctcttcagagggacattttgcttcagggacgactatacctttcagaaaactggctatgtttctatagcaacatcttcagatgggaaactacatttttcttcacatcttttggtgccagggatagaagttacctcagtatctttaggttgtggcagaatgtattattagataagagcctgactagacaggaattctggcaactgctccagcagaactatggcactgagctaggtttaaatgctgaggagatggaaaacttgtcactgtcgattgaggatgtgcagccaaggagtcccaaaatgagaaacagaccaaaaagagtctcttaccaactttggaaaagaagttaactagagtgccatcaaagtcactggacttgaataaaaatgaatatctttctctggacaaaagcagcacttcagattctgttgatgaagaaaatgttcctgagaaagatcttcatggaagactttttatcaaccgtatttttcatatcagtgctgacagaatgtttgaattgctctttaccagttcacgctttatgcagaaatttgccagttctagaaatataatagatgtagtatctaccccttggactgcagaacttggaggtgatcagctgagaacgatgacctacactatagtccttaatagtccacttactggaaaatgcactgctgccactgaaaagcagacactgtataaagaaagtcgggaagcacgattttatttggtagattcagaagtactgacacatgatgtcccctaccatgattacttctataccgtgaacagatactgtatcatccgatcttcaaaacagaaatgcaggctaagagtttccacagatttgaaatacaga

SEQ ID NO: 138643 - DNA, 1576 bp, Homo sapiens
  Payload ID: 7162
  Gene Symbol: GRAMD1C
  Gene Name: GRAM domain containing 1C
  ENST ID: ENST00000462838
  CDS Start-End: 436-1576
attctagcaaggcaccagcgacatcgcagactatgcttggttatatactgtattgaatgtccttccaatgtcacatttgtgcttatcacacacatgtgagttgggatatgtccttataaaaacaaatatctccagggaagtgataaagttcaggtttacagatgagccaagggagaaactaagttcttcactttaatgaagaagaaagctctctgaagtgagaagaagaaagggaattccagaatactggaggccacccaccatagccaagaaacactgcatttactggctggaagtaaaatttacccttctttgaaaagatcctgatattatctgtgtttctgatgtatacacacggagagcctgactagacaggaattctggcaactgctccagcagaactatggcactgagctaggtttaaatgctgaggagatggaaaacttgtcactgtcgattgaggatgtgcagccaagaagtccaggaagaagcagcttggatgactctggggagagagatgaaaaattatccaagtcaatcagttttaccagtgaatcaattagtcgggtttcagaaacagagtcattcgatggaaattcatcaaaaggaggattaggcaaagaggagtcccaaaatgagaaacagaccaaaaagagtctcttaccaactttggaaaagaagttaactagagtgccatcaaagtcactggacttgaataaaaatgaatatctttctctggacaaaagcagcacttcagattctgttgatgaagaaaatgttcctgagaaagatcttcatggaagactttttatcaaccgtatttttcatatcagtgctgacagaatgtttgaattgctctttaccagttcacgctttatgcagaaatttgccagttctagaaatataatagatgtagtatctaccccttggactgcagaacttggaggtgatcagctgagaacgatgacctacactatagtccttaatagtccacttactggaaaatgcactgctgccactgaaaagcagacactgtataaagaaagtcgggaagcacgattttatttggtagattcagaagtactgacacatgatgtcccctaccatgattacttctataccgtgaacagatactgtatcatccgatcttcaaaacagaaatgcaggctaagagtttccacagatttgaaatacagaaaacagccatggggccttgtcaaatctttaattgaaaagaattcctggagttctttggaggactatttcaaacagcttgaatcagatttgttaattgaagaatctgtattaaatcaggccattgaagaccctggaaaacttactggcctacgaaggagaaggcgaaccttcaaccgaacagcagaaacagttcctaaactttcctctcagcattcctctggagatgtgggcttaggtgccaaaggggatattacaggaaagaaaaaggaaatggaaaactataacgtcactcttattgtggtaatgagtatttttgtgttgttattagttttgttgaatgtgacactgtttctgaagctgtcaaagatagaacatgctg

SEQ ID NO: 138644 - DNA, 814 bp, Homo sapiens
  Payload ID: 7162
  Gene Symbol: GRAMD1C
  Gene Name: GRAM domain containing 1C
  ENST ID: ENST00000484714
  CDS Start-End: 6-275
ccgcgatggagggcgctccgactgtccgtcaggtgatgaatgaaggggattcaagccttgccaccgacttacaggaagatgtagaggaaaatcctagtccaactgtggaagagaataatgtggtagttaaaaaacaggggccaaatttacataattggagtggtgactggagcttttggatttcaagttccacctataaagacaggaatgaggaatacagaagacagttcacacatctacctgatacagagaggctgatagcagagcctgactagacaggaattctggcaactgctccagcagaactatggcactgagctaggtttaaatgctgaggagatggaaaacttgtcactgtcgattgaggatgtgcagccaagaagtccaggaagaagcagcttggatgactctggggagagagatgaaaaattatccaagtcaatcagttttaccagtgaatcaattagtcgggtttcagaaacagagtcattcgatggaaattcatcaaaaggaggattaggcaaagaggagtcccaaaatgagaaacagaccaaaaagagtctcttaccaactttggaaaagaagttaactagagtgccatcaaagtcactggacttgaataaaaatgaatatctttctctggacaaaagcagcacttcagattctgttgatgaagaaaatgttcctgagaaagatcttcatggaagactttttatcaaccgtatttttcatatcagtgctgacagaatgtttgaattgctctttaccagttcacgctttatgcagaaatttgccagttctagaaatataatag

SEQ ID NO: 138645 - DNA, 1876 bp, Homo sapiens
  Payload ID: 7162
  Gene Symbol: GRAMD1C
  Gene Name: GRAM domain containing 1C
  ENST ID: ENST00000472026
  CDS Start-End: 97-1584
aacttgttgagtgctcagaatccgtgaggtgcattctctcattctagcaaggcaccagcgacatcgcagactatgcttggttatatactgtattgaatgtccttccaatgtcacatttgtgcttatcacacacatagcctgactagacaggaattctggcaactgctccagcagaactatggcactgagctaggtttaaatgctgaggagatggaaaacttgtcactgtcgattgaggatgtgcagccaagaagtccaggaagaagcagcttggatgactctggggagagagatgaaaaattatccaagtcaatcagttttaccagtgaatcaattagtcgggtttcagaaacagagtcattcgatggaaattcatcaaaaggaggattaggcaaagaggagtcccaaaatgagaaacagaccaaaaagagtctcttaccaactttggaaaagaagttaactagagtgccatcaaagtcactggacttgaataaaaatgaatatctttctctggacaaaagcagcacttcagattctgttgatgaagaaaatgttcctgagaaagatcttcatggaagactttttatcaaccgtatttttcatatcagtgctgacagaatgtttgaattgctctttaccagttcacgctttatgcagaaatttgccagttctagaaatataatagatgtagtatctaccccttggactgcagaacttggaggtgatcagctgagaacgatgacctacactatagtccttaatagtccacttactggaaaatgcactgctgccactgaaaagcagacactgtataaagaaagtcgggaagcacgattttatttggtagattcagaagtactgacacatgatgtcccctaccatgattacttctataccgtgaacagatactgtatcatccgatcttcaaaacagaaatgcaggctaagagtttccacagatttgaaatacagaaaacagccatggggccttgtcaaatctttaattgaaaagaattcctggagttctttggaggactatttcaaacagcttgaatcagatttgttaattgaagaatctgtattaaatcaggccattgaagaccctggaaaacttactggcctacgaaggagaaggcgaaccttcaaccgaacagcagaaacagttcctaaactttcctctcagcattcctctggagatgtgggcttaggtgccaaaggggatattacaggaaagaaaaaggaaatggaaaactataacgtcactcttattgtggtaatgagtatttttgtgttgttattagttttgttgaatgtgacactgtttctgaagctgtcaaagatagaacatgctgctcagtccttttaccgtctccgcctccaagaagagaaatctttaaatttagcctctgatatggtgtcaagagcagaaactattcagaagaataaagatcaggcccatcgtttaaagggagtgctccgagactccatagtgatgcttgaacagctgaagagctcactcattatgcttcagaaaacgtttgatctactaaataagaataagactggcatggctgttgaaagctagtgatctgaaggactaaaaccgcagagatacttggaacttaaagaaaatacctggaagaaaaccagacgaatgaaggattttggcatagaacatttctatgttttttcattattgagatttctaatatgaacatttctttcagtaacatttatttgataattagtttctgctggccttaataatccatcctttcacttcttatagatatttttaagctgtgaatttcttcagtgaaccatgaaatatattatagaactgaatttctctgatacaaaaagaaaatgacacaccc

SEQ ID NO: 138646 - DNA, 567 bp, Homo sapiens
  Payload ID: 7162
  Gene Symbol: GRAMD1C
  Gene Name: GRAM domain containing 1C
  ENST ID: ENST00000488680
  CDS Start-End: 435-567
aattctgcattctgacctgcaaccttggaaagagtgctggtactacaaccaggaagtgacagataatgtgctttaaactacattagaaaagcttctcatagcaaaactgagagattgaagcagtgattatttttacatagttgtcattaaatatttggagctctgctgtgcatagagatggcaacatacttagaatacacagctttctgggccagaaattgatcttctgacttttgagccttatctgattactgcttggttcatctttattttgttaaactactctgtaggctgaaagggagagactctccttggtttgcagggattaggcaaagaggagtcccaaaatgagaaacagaccaaaaagagtctcttaccaactttggaaaagaagttaactagagtgccatcaaagtcactggacttgaataaaaatgaatatctttctctggacaaaagcagcacttcagattctgttgatgaagaaaatgttcctgagaaagatcttcatggaagactttttatcaaccgtatttttcatatcagtgctgacagaatgtttgaatt

SEQ ID NO: 138647 - DNA, 3281 bp, Homo sapiens
  Payload ID: 7163
  Gene Symbol: GRAMD2
  Gene Name: GRAM domain containing 2
  Uniprot ID: Q8IUY3
  ENST ID: ENST00000309731
  CDS Start-End: 15-1079
gtgcaggcgccgggatgaccgctttaagccggagcgaggccaccgaggagggcggcaaccaacaaatgcacagaaagacagcttctctgaacagtcctgtgtcctgcaaagagaaaccagacagagttgaggagcccccggactacagtctgcactggccagaaggcttgaagggtgaagagataaagaagtgtggccgagaagggataacactgaataaatacaaccagcaataccacaagctgtttaaggatgttcccttggaggaagtggttctcaaagtgtgttcctgtgccctccagagggacttcctcctccagggccggctctacatctcccccaactggctctgcttccatgccagcctctttggcaaggatatcaaggtggtcattcctgtggtgtctgtgcaaatgatcaaaaaacacaagatggcacggctccttcccaatggactggccatcaccaccaacaccagccagaagtatatctttgtgtcactgctctcccgggacagtgtatatgacctgctgaggagagtctgcacccacctacagccttccagcaagaagagtctgagtgtaagagaattttcaggggaacctgagtctctggaagtcctcatccctgagatgaagtggagaaaggtatgcccttcctccaggtccctgtctctcccagacaacatcccttgtatccctccatcatccgtggactccacagacagtttcttcccctccaggaagcctccaatgtctgaaaagtcaagagcccaagtagcttcagaaaatggtgggaggtgggcatggcccatgccaggctggggtcctgcctgccctaagaagatgccgaactgctctcccactgcaaagaatgctgtctatgaggaggatgagctggaggaggagcccaggagcactggggagctgaggctctgggattaccggctcctcaaggtcttctttgtgctgatctgcttcctggtcatgtcctcatcctacctggcgttccgtatttctcggctagagcagcagttatgctccttgagttgggatgacccagtccctgggcacaggtaacagccacttggcctttgtccccattccttctccaagaagaatgttctgggtgctaagtctccaccaatgatccctgtggtttatgctgctgctgtgctaagactgcctatgaaggaaaatattccagatccctcctcctccccgcagctcttctcttccctctatgagagatctgaagtacgtgtttacaaagtaactggcttctacaatttttggactcaagcaaaaagccagattttttggaaccaactgaggaattctgtacacaaagcttcagcaaacacttagagaaaacaaacaaacaaacaaactgggtccttggaaacagttctggcacacaggcagaacactggaggccacctcaaaggacagaggccatgctttcgcatttggaatgtggctctgccacacagctcactcctatggtggggtcagaggtcagaacacaaaccacccatgtgggctctgctccctcccaacactctgtgttcccacagggcttctctgcgggcagccaggcacctgtcaggcttgggcaggggcctgctgagaatctgtgaatgcagaggggagggctcatggccaggattccagccagagatgaatttccatgctctgggccagggctctgtgccggcccctcatgaggtggctggctgcattatggggagatgctgcccacggcggagatggtggcagtggctgtgaagaacagaggtacctgaattctgtgtcctcagctgtcactttccggtgagacaagtggagcagggcctttgatcactgtggtcacagacctggtactgggttttgcccttgtgtgctcaaacatttctaaggtgtcccaagccctggaaatagggaagggaagggtggaggcttggatctgaggtcttgctgtccactccctgcctgcctgcccgcatctcaggcatggccaacagcagcccgttgaggggggcttgtctggacagttgcgtgtgatggtgttgagccatcacagggcagaggtcacttgtgtcacccccatagtcattgggttgcaggccatggaggagggacctccactccatggggcctattctccattaaggtggaagtgtccactgtgggcctagcacagtgcaggaaccaggccagggggtctatctcatacctctggggacaggaaaggtagaggatgaggaggttggacgtggtggtggctttgccttggatattcctcttcctctatcaaggccttctcttcttctctgtgtcccacaactctggcctcatcgccctgggactcccatctgctaagatagtggctttggaggttctggaagggcttagtgaggaggccagaagtatcagggaaagttgctggtgatggggtgggcggtgtcagaagcagccactgttttcccctcttcagacactgagagattaatcagggaatgaaatccaggtggaaattatttattgtgaagcagacgactgtctgtcctgtttatgacaaacccaaatgagaattggagggactaccagtaagtggtctcttcatgctctccccatcccagtttttaggatgaaatttagagcctggccttttgtgttgcttgcaccaaatctgtatgtctcaggtgaaactcactgttccatgaatggtcatcctttttttttttttttttttggaaccagcccctttcaccctttcatccgtcttttttttttaggaaaataacccttcttgcttcagcacttctccctggtccttgctgaaagacagagataaaaatccattctctgagccttgcttggttgtcagaggccatgagaggtgccagttataggtggatgtgccaagatgctggtgaacttggtcttcagctatacccaggctcagaaagggcaagagccatgctgcagcgtaggtgactttggaggtgcacttggggcccagggctttgagtgttgcgggtgtgcctgtccctccagatagtgctctgtttctctctgttgtccccctgcctggtcctctggggccactgtgctttctgctgtgtgcatttataaatgatgtgtattttatatagacctgcttgcattggctgatgctcctctaattccctgagtttgattcaaccacccttgggttgttttgctatggccttagcctttgaaaatattttaaaataaaaaacttgatttttctagtgt

SEQ ID NO: 138648 - DNA, 556 bp, Homo sapiens
  Payload ID: 7163
  Gene Symbol: GRAMD2
  Gene Name: GRAM domain containing 2
  ENST ID: ENST00000570275
  CDS Start-End: 122-556
actttggacacttttgttctcggcataagcgagtctcagggtcctccctctcagtgtgcctcctcaagggtggggctagaggcctcactcagcctggcctacgagctgcctggcactggagatgagcaaccaacaaatgcacagaaagacagcttctctgaacagtcctgtgtcctgcaaagagaaaccagacagagttgaggagcccccggactacagtctgcactggccagaaggcttgaagggtgaagagataaagaagtgtggccgagaagggataacactgaataaatacaaccagcaataccacaagctgtttaaggatgttcccttggaggaagtggttctcaaagtgtgttcctgtgccctccagagggacttcctcctccagggccggctctacatctcccccaactggctctgcttccatgccagcctctttggcaaggatatcaaggtggtcattcctgtggtgtctgtgcaaatgatcaaaaaacacaagatggcacggctccttcccaatggactggccatcaccaccaacaccagccagaag

SEQ ID NO: 138649 - DNA, 507 bp, Homo sapiens
  Payload ID: 7163
  Gene Symbol: GRAMD2
  Gene Name: GRAM domain containing 2
  ENST ID: ENST00000562288
  CDS Start-End: 98-241
ataagcgagtctcagggtcctccctctcagtgtgcctcctcaagggtggggctagaggcctcactcagcctggcctacgagctgcctggcactggagatgagcaaccaacaaatgcacagaaagacagcttctctgaacagtcctgtgtcctgcaaagagaaaccagacagagttgaggagcccccggactacagtgccatccccctctcccagtgtggtagcctcagccaggtcaggtgagtctgtgccaagctccccgcagcagagctcaggccacaggaaggaggcggcagggagggcagtcctgctggcatcatggcctgtggccaggccccggcgcttctgcactggccagaaggcttgaagggtgaagagataaagaagtgtggccgagaagggataacactgaataaatacaaccagcaataccacaagctgtttaaggatgttcccttggaggaagtggttctcaaagtgtgttcctgtgccctccagagggacttcct

SEQ ID NO: 138650 - DNA, 623 bp, Homo sapiens
  Payload ID: 7163
  Gene Symbol: GRAMD2
  Gene Name: GRAM domain containing 2
  ENST ID: ENST00000568594
  CDS Start-End: 116-623
attttcagtgtcaccctcaatatcagggccagtcttgggtgggggccagaggcagcggccatgggcatggtggggctgttagggaaaggtgtcctcatgaagcccccttcctgatatgggcctgtttttccctagcaaccaacaaatgcacagaaagacagcttctctgaacagtcctgtgtcctgcaaagagaaaccagacagagttgaggagcccccggactacagtctgcactggccagaaggcttgaagggtgaagagataaagaagtgtggccgagaagggataacactgaataaatacaaccagcaataccacaagctgtttaaggatgttcccttggaggaagtggttctcaaagtgtgttcctgtgccctccagagggacttcctcctccagggccggctctacatctcccccaactggctctgcttccatgccagcctctttggcaaggatatcaaggtggtcattcctgtggtgtctgtgcaaatgatcaaaaaacacaagatggcacggctccttcccaatggactggccatcaccaccaacaccagccagaagtatatctttgtgtcactgctctcccgggacagtgtatatgacctgctgaggagagtct

SEQ ID NO: 138651 - DNA, 664 bp, Homo sapiens
  Payload ID: 7163
  Gene Symbol: GRAMD2
  Gene Name: GRAM domain containing 2
  ENST ID: ENST00000564129
  CDS Start-End: 32-664
ctactttcccggaacctgatggtttacagtcatgctgcgcggcaaccaacaaatgcacagaaagacagcttctctgaacagtcctgtgtcctgcaaagagaaaccagacagagttgaggagcccccggactacagtctgcactggccagaaggcttgaagggtgaagagataaagaagtgtggccgagaagggataacactgaataaatacaaccagcaataccacaagctgtttaaggatgttcccttggaggaagtggttctcaaagtgtgttcctgtgccctccagagggacttcctcctccagggccggctctacatctcccccaactggctctgcttccatgccagcctctttggcaaggatatcaaggtggtcattcctgtggtgtctgtgcaaatgatcaaaaaacacaagatggcacggctccttcccaatggactggccatcaccaccaacaccagccagaagtatatctttgtgtcactgctctcccgggacagtgtatatgacctgctgaggagagtctgcacccacctacagccttccagcaagaagagtctgagtgtaagagaattttcaggggaacctgagtctctggaagtcctcatccctgagatgaagtggagaaaggtatgcccttcctccaggtccctgtctctc

SEQ ID NO: 138652 - DNA, 3175 bp, Homo sapiens
  Payload ID: 7164
  Gene Symbol: GRAMD3
  Gene Name: GRAM domain containing 3
  Uniprot ID: Q96HH9
  ENST ID: ENST00000285689
  CDS Start-End: 462-1760
atctagagccggctgccctctaaaaatccccctgttacagtcgggatagaaaacaaaaagcttaatttaccaggaggctaaacagattgtgccttcttaggcaaatgttccacctgcttggccaattagcttcctctcccgaaagactcgttcaacaggtttcctttttctcttctctgcctcctgggttggggaaagaggctgtcacttcgcttcgaccctccccttccctccctctcggcttttccacagtgggtcggaccaatcgcgcccgctccgacgtgtccaggtccgcggccccgggagcttggcgcggcccggcctggatgcgctgggcggagggtgcaggggagggcacggcgccgcttgcttggcctgcgcacccggacctagaagccgggacgagccggggcagagccaggcgcgcggaagtctgaaggtgccctccagacacggccccgatgactgaactacagcaagatgtggaagacacaaagcctgcgaaagtgctcgggaagagggagagcaaacttggctcagcccactcagaggctgagaatggtgtggaggagaaaaagaaagcctgcaggtcgccaacagcccaatcccctaccccatctgtggaggcggactccccagaccagaagaaaatcattagcctatggtcaaaatccagttttgatggtgcctctttagcaagtgataagaacgactgtaaaacagaaagcaaaaatgaccctaagactgaaagaaaaaagtcttcatcttccagccagtacaaggccaatatgcactttcacaagttgtttcttagtgtcccaacggaggaaccactgaagcaaagctttacctgtgctctacagaaagaaatactataccaaggaaagctctttgtatcagaaaactggatttgttttcattccaaagtctttggaaaagacacaaagatctctattccagctttctcggtaaccctaataaagaaaaccaaaactgctcttctagtgccaaacgccctgatcatagcaacagtcacagacaggtacatatttgtctccttactctccagagattcaacttacaaactactaaaatctgtgtgtggacacttagaaaatacaagtgttggtaacagtcccaatccatcttctgctgaaaacagtttccgagcagaccgcccttcatctctgcctctggatttcaatgatgaattctcagatctggatggagtggttcaacaaagaaggcaagacatggaaggatatagcagttctggttctcaaactcctgaatctgagaactctcgagatttccatgcgacagaatcccaaacagttctgaatgtctccaagggagaagcaaagccaactcgggcagatgcccatgtgaacagagtacctgaaggaaaagccaagagtctccctgtacagggtctgtcagaaactgttggaatcttacataaagtcaagtctcagaaatgtccgatgcttcaccatattcttatattctatgcaattgttgtctgtgcactaatcatctcgaccttctacatgagatacagaattaatactctggaggagcagctggggttactaacctccattgtggacacccataatactgaacaggcagcaccatctggcctgaggtcacaagtacaattcaatgtggaggttctctgtcaagagcttacagctaacatagtgaaattagaaaagatacaaaataacttacagaagttgcttgagaatggtgactgatcgaccagattgcttgggccatcggaatacctcatgtttccctttgaagaaggtgcttcctgaggcgttttgtttgagtgcaccctgctggtcagaggtgcaagcagatgagaatccagacattgcatgtggaggtctccagctcaggaaagtgaggagggaaataattttggttcttgtgcaataaaagttgaccttgactctctgaggaagattttgctgcttttgcctgaagaaaacagacccatctctggaggtctcaggaagggcccagcgaacacactctcttggataattaccacgatggcgtcagcaaacactccaccctgtgcctttttagtccttcccgccctcctgcctctcccttacacccctcttaacgactttcaaactaaaggatacatcatatactgacaaactcaatgtggtcctttcaagaattagccatgagtctcaaaaaggcaataaatggctctaagtggacaggtttgcttcaaacaagtaacatctacattttgtcttttttttttcagttctcctgttatgttctggttgaaatcacctgtgtgtcttaatttctcaattcctttttggcaagaatatcaagcaaggtgaatttaacattatgtttatgttttgttttgttgctgtaactaatagttaattggactgattcttacccagccctggtcaagaatctgtgaggcatgtgactgaagtactaaattaaacttattttgaaaccaaacctaatttttaagccaaaaggtgtaatagtgatttaatacaggatgaaaaacactgaatttttaagactgtaggtggactatgttagtagttttcaagcaggatgtctgtattcagcattcaataatgctaaaatccctttcagcatgaaatttgtatgtttttatcctttgctgactaaaataaaataactggtggtttgctaactatttaccatatgggttggctggtttttattaataattgtttagggtatcataagatctgtaagtacaaaggatattctgtttctatctgcaatgcatttgataatcatttctatgaaatgtattttatttaatcagataagctaataagcgaattggttacatcgtttgtatctgttggcctagtggacagctgtgcctggtgcacctctggcttttaataaatactcattggttgaaacaccctgctaacactgtgttttgtcagttcgtaaattcctttaaccaagacttaactatgctttttaactctttttccacctgccatctactactaccaactcacttatacttccttcctcccaagtaatcatttcaaaactaaaaaaggatttaagttcttgggttacaacggtttaaaggaaagaaaatgaactttgaagtcaaaaaaaaaagaaaaaa

SEQ ID NO: 138653 - DNA, 1847 bp, Homo sapiens
  Payload ID: 7164
  Gene Symbol: GRAMD3
  Gene Name: GRAM domain containing 3
  ENST ID: ENST00000513978
  CDS Start-End: 136-399
atgcgctgggcggagggtgcaggggagggcacggcgccgcttgcttggcctgcgcacccggacctagaagccgggacgagccggggcagagccaggcgcgcggaagtctgaaggtgccctccagacacggccccgatgactgaactacagcaagatgtggaagacacaaagcctgcgaaagtgctcgggaagagggagagcaaacttggctcagcccactcagaggctgagaatggtgtggaggagaaaaagaaagcctgcaggtcgccaacagcccaatcccctaccccatctgtggaggcggactccccagaccagaagaaaatcattagcctatgcccatatcttctctccaaatctatgcttcattcaggaccaagagtcaaaatccagttttgatggtgcctctttagcaagtgataagaacgactgtaaaacagaaagcaaaaatgaccctaagactgaaagaaaaaagtcttcatcttccagccagtacaaggccaatatgcactttcacaagttgtttcttagtgtcccaacggaggaaccactgaagcaaagctttacctgtgctctacagaaagaaatactataccaaggaaagctctttgtatcagaaaactggatttgttttcattccaaagtctttggaaaagacacaaagatctctattccagctttctcggtaaccctaataaagaaaaccaaaactgctcttctagtgccaaacgccctgatcatagcaacagtcacagacaggtacatatttgtctccttactctccagagattcaacttacaaactactaaaatctgtgtgtggacacttagaaaatacaagtgttggtaacagtcccaatccatcttctgctgaaaacagtttccgagcagaccgcccttcatctctgcctctggatttcaatgatgaattctcagatctggatggagtggttcaacaaagaaggcaagacatggaaggatatagcagttctggttctcaaactcctgaatctgagaactctcgagatttccatgcgacagaatcccaaacagttctgaatgtctccaagggagaagcaaagccaactcgggcagatgcccatgtgaacagagtacctgaaggaaaagccaagagtctccctgtacagggtctgtcagaaactgttggaatcttacataaagtcaagtctcagaaatgtccgatgcttcaccatattcttatattctatgcaattgttgtctgtgcactaatcatctcgaccttctacatgagatacagaattaatactctggaggagcagctggggttactaacctccattgtggacacccataatactgaacaggcagcaccatctggcctgaggtcacaagtacaattcaatgtggaggttctctgtcaagagcttacagctaacatagtgaaattagaaaagatacaaaataacttacagaagttgcttgagaatggtgactgatcgaccagattgcttgggccatcggaatacctcatgtttccctttgaagaaggtgcttcctgaggcgttttgtttgagtgcaccctgctggtcagaggtgcaagcagatgagaatccagacattgcatgtggaggtctccagctcaggaaagtgaggagggaaataattttggttcttgtgcaataaaagttgaccttgactctctgaggaagattttgctgcttttgcctgaagaaaacagacccatctctggaggtctcaggaagggcccagcgaacacactctcttggataattaccacgatggcgtcagcaaacactccaccctgtgcctttttagtccttcccgccctcctgcctctcccttaca

SEQ ID NO: 138654 - DNA, 1532 bp, Homo sapiens
  Payload ID: 7164
  Gene Symbol: GRAMD3
  Gene Name: GRAM domain containing 3
  ENST ID: ENST00000514099
  CDS Start-End: 136-399
atgcgctgggcggagggtgcaggggagggcacggcgccgcttgcttggcctgcgcacccggacctagaagccgggacgagccggggcagagccaggcgcgcggaagtctgaaggtgccctccagacacggccccgatgactgaactacagcaagatgtggaagacacaaagcctgcgaaagtgctcgggaagagggagagcaaacttggctcagcccactcagaggctgagaatggtgtggaggagaaaaagaaagcctgcaggtcgccaacagcccaatcccctaccccatctgtggaggcggactccccagaccagaagaaaatcattagcctatgtacaaggccaatatgcactttcacaagttgtttcttagtgtcccaacggaggaaccactgaagcaaagctttacctgtgctctacagaaagaaatactataccaaggaaagctctttgtatcagaaaactggatttgttttcattccaaagtctttggaaaagacacaaagatctctattccagctttctcggtaaccctaataaagaaaaccaaaactgctcttctagtgccaaacgccctgatcatagcaacagtcacagacaggtacatatttgtctccttactctccagagattcaacttacaaactactaaaatctgtgtgtggacacttagaaaatacaagtgttggtaacagtcccaatccatcttctgctgaaaacagtttccgagcagaccgcccttcatctctgcctctggatttcaatgatgaattctcagatctggatggagtggttcaacaaagaaggcaagacatggaaggatatagcagttctggttctcaaactcctgaatctgagaactctcgagatttccatgcgacagaatcccaaacagttctgaatgtctccaagggagaagcaaagccaactcgggcagatgcccatgtgaacagagtacctgaaggaaaagccaagagtctccctgtacagggtctgtcagaaactgttggaatcttacataaagtcaagtctcagaaatgtccgatgcttcaccatattcttatattctatgcaattgttgtctgtgcactaatcatctcgaccttctacatgagatacagaattaatactctggaggagcagctggggttactaacctccattgtggacacccataatactgaacaggcagcaccatctggcctgaggtcacaagtacaattcaatgtggaggttctctgtcaagagcttacagctaacatagtgaaattagaaaagatacaaaataacttacagaagttgcttgagaatggtgactgatcgaccagattgcttgggccatcggaatacctcatgtttccctttgaagaaggtgcttcctgaggcgttttgtttgagtgcaccctgctggtcagaggtgcaagcagatgagaatccagacattgcatgtggaggtctccagctcaggaaagtgaggagggaaataattttggttcttgtgcaataaaagttgaccttgactctctgagg

SEQ ID NO: 138655 - DNA, 994 bp, Homo sapiens
  Payload ID: 7164
  Gene Symbol: GRAMD3
  Gene Name: GRAM domain containing 3
  ENST ID: ENST00000506445
  CDS Start-End: 131-994
acatgaagaaagagcttcctgcaattcaaggactgtacaaagctgaaacgcagagattttcatattatttgggagactcagaaatgagcttttaaggttgttccttgacttgcgggtcaataagcgcacaatggtgaagaaaaggctgccttctagtgacacggtgttccggtttgagactccgggcagcccaaggaaggccaacgtggaggcctcacgcagctccacagacagccccagctcggtgttcctcagctcagaggctgagaatggtgtggaggagaaaaagaaagcctgcaggtcgccaacagcccaatcccctaccccatctgtggaggcggactccccagaccagaagaaaatcattagcctatggtcaaaatccagttttgatggtgcctctttagcaagtgataagaacgactgtaaaacagaaagcaaaaatgaccctaagactgaaagaaaaaagtcttcatcttccagccagtacaaggccaatatgcactttcacaagttgtttcttagtgtcccaacggaggaaccactgaagcaaagctttacctgtgctctacagaaagaaatactataccaaggaaagctctttgtatcagaaaactggatttgttttcattccaaagtctttggaaaagacacaaagatctctattccagctttctcggtaaccctaataaagaaaaccaaaactgctcttctagtgccaaacgccctgatcatagcaacagtcacagacaggtacatatttgtctccttactctccagagattcaacttacaaactactaaaatctgtgtgtggacacttagaaaatacaagtgttggtaacagtcccaatccatcttctgctgaaaacagtttccgagcagaccgcccttcatctctgcctctggatttcaatgatgaattctcagatctggatggagtggttcaacaaagaaggcaagacatggaaggatatagcagttctggttctcaa

SEQ ID NO: 138656 - DNA, 1577 bp, Homo sapiens
  Payload ID: 7164
  Gene Symbol: GRAMD3
  Gene Name: GRAM domain containing 3
  Uniprot ID: Q96HH9
  ENST ID: ENST00000511134
  CDS Start-End: 81-1331
agagctgggcagcacagacctgggagccagcaagtccacacagtctggcatttacaagtgaaacagctacctctctctgaatgtctaaagtgaagcggtttcctttcttcttcagctcagaggctgagaatggtgtggaggagaaaaagaaagcctgcaggtcgccaacagcccaatcccctaccccatctgtggaggcggactccccagaccagaagaaaatcattagcctatggtcaaaatccagttttgatggtgcctctttagcaagtgataagaacgactgtaaaacagaaagcaaaaatgaccctaagactgaaagaaaaaagtcttcatcttccagccagtacaaggccaatatgcactttcacaagttgtttcttagtgtcccaacggaggaaccactgaagcaaagctttacctgtgctctacagaaagaaatactataccaaggaaagctctttgtatcagaaaactggatttgttttcattccaaagtctttggaaaagacacaaagatctctattccagctttctcggtaaccctaataaagaaaaccaaaactgctcttctagtgccaaacgccctgatcatagcaacagtcacagacaggtacatatttgtctccttactctccagagattcaacttacaaactactaaaatctgtgtgtggacacttagaaaatacaagtgttggtaacagtcccaatccatcttctgctgaaaacagtttccgagcagaccgcccttcatctctgcctctggatttcaatgatgaattctcagatctggatggagtggttcaacaaagaaggcaagacatggaaggatatagcagttctggttctcaaactcctgaatctgagaactctcgagatttccatgcgacagaatcccaaacagttctgaatgtctccaagggagaagcaaagccaactcgggcagatgcccatgtgaacagagtacctgaaggaaaagccaagagtctccctgtacagggtctgtcagaaactgttggaatcttacataaagtcaagtctcagaaatgtccgatgcttcaccatattcttatattctatgcaattgttgtctgtgcactaatcatctcgaccttctacatgagatacagaattaatactctggaggagcagctggggttactaacctccattgtggacacccataatactgaacaggcagcaccatctggcctgaggtcacaagtacaattcaatgtggaggttctctgtcaagagcttacagctaacatagtgaaattagaaaagatacaaaataacttacagaagttgcttgagaatggtgactgatcgaccagattgcttgggccatcggaatacctcatgtttccctttgaagaaggtgcttcctgaggcgttttgtttgagtgcaccctgctggtcagaggtgcaagcagatgagaatccagacattgcatgtggaggtctccagctcaggaaagtgaggagggaaataattttggttcttgtgcaataaaagttgaccttgactctctgaggaagattttgctgcttttgcctgaagaaaacagaccc

SEQ ID NO: 138657 - DNA, 2196 bp, Homo sapiens
  Payload ID: 7164
  Gene Symbol: GRAMD3
  Gene Name: GRAM domain containing 3
  Uniprot ID: Q96HH9
  ENST ID: ENST00000513040
  CDS Start-End: 201-1544
tctcacacatgtgggtttcaagtgcggctggtgccatccctctgagcagacgctgaaagagaaaacttctgagatagcacttgtgagcgaaaagcacaccaactggctcaaagagctgtggttgggcagatctggtgtaaatacaaagttccttcccgacatttcccagagtttcttgaagatcacctggcctctagaagatgacaaggagacagcaagtcctacaagcaaaaaggagcattcagcaaacattccaagcacagcttatgccctggaagagtatgttccacgggagagaagtgaagccagtgggtccggacctggaactctcagaggctgagaatggtgtggaggagaaaaagaaagcctgcaggtcgccaacagcccaatcccctaccccatctgtggaggcggactccccagaccagaagaaaatcattagcctatggtcaaaatccagttttgatggtgcctctttagcaagtgataagaacgactgtaaaacagaaagcaaaaatgaccctaagactgaaagaaaaaagtcttcatcttccagccagtacaaggccaatatgcactttcacaagttgtttcttagtgtcccaacggaggaaccactgaagcaaagctttacctgtgctctacagaaagaaatactataccaaggaaagctctttgtatcagaaaactggatttgttttcattccaaagtctttggaaaagacacaaagatctctattccagctttctcggtaaccctaataaagaaaaccaaaactgctcttctagtgccaaacgccctgatcatagcaacagtcacagacaggtacatatttgtctccttactctccagagattcaacttacaaactactaaaatctgtgtgtggacacttagaaaatacaagtgttggtaacagtcccaatccatcttctgctgaaaacagtttccgagcagaccgcccttcatctctgcctctggatttcaatgatgaattctcagatctggatggagtggttcaacaaagaaggcaagacatggaaggatatagcagttctggttctcaaactcctgaatctgagaactctcgagatttccatgcgacagaatcccaaacagttctgaatgtctccaagggagaagcaaagccaactcgggcagatgcccatgtgaacagagtacctgaaggaaaagccaagagtctccctgtacagggtctgtcagaaactgttggaatcttacataaagtcaagtctcagaaatgtccgatgcttcaccatattcttatattctatgcaattgttgtctgtgcactaatcatctcgaccttctacatgagatacagaattaatactctggaggagcagctggggttactaacctccattgtggacacccataatactgaacaggcagcaccatctggcctgaggtcacaagtacaattcaatgtggaggttctctgtcaagagcttacagctaacatagtgaaattagaaaagatacaaaataacttacagaagttgcttgagaatggtgactgatcgaccagattgcttgggccatcggaatacctcatgtttccctttgaagaaggtgcttcctgaggcgttttgtttgagtgcaccctgctggtcagaggtgcaagcagatgagaatccagacattgcatgtggaggtctccagctcaggaaagtgaggagggaaataattttggttcttgtgcaataaaagttgaccttgactctctgaggaagattttgctgcttttgcctgaagaaaacagacccatctctggaggtctcaggaagggcccagcgaacacactctcttggataattaccacgatggcgtcagcaaacactccaccctgtgcctttttagtccttcccgccctcctgcctctcccttacacccctcttaacgactttcaaactaaaggatacatcatatactgacaaactcaatgtggtcctttcaagaattagccatgagtctcaaaaaggcaataaatggctctaagtggacaggtttgcttcaaacaagtaacatctacattttgtcttttttttttcagttctcctgttatgttctggttgaaatcacctgtgtgtcttaatttctcaattcctttttggcaagaatatcaagcaaggtgaatttaacattatgtttatgttttgttttgttgctgta

SEQ ID NO: 138658 - DNA, 3109 bp, Homo sapiens
  Payload ID: 7164
  Gene Symbol: GRAMD3
  Gene Name: GRAM domain containing 3
  ENST ID: ENST00000515200
  CDS Start-End: 462-1694
atctagagccggctgccctctaaaaatccccctgttacagtcgggatagaaaacaaaaagcttaatttaccaggaggctaaacagattgtgccttcttaggcaaatgttccacctgcttggccaattagcttcctctcccgaaagactcgttcaacaggtttcctttttctcttctctgcctcctgggttggggaaagaggctgtcacttcgcttcgaccctccccttccctccctctcggcttttccacagtgggtcggaccaatcgcgcccgctccgacgtgtccaggtccgcggccccgggagcttggcgcggcccggcctggatgcgctgggcggagggtgcaggggagggcacggcgccgcttgcttggcctgcgcacccggacctagaagccgggacgagccggggcagagccaggcgcgcggaagtctgaaggtgccctccagacacggccccgatgactgaactacagcaagatgtggaagacacaaagcctgcgaaagtgctcgggaagagggagagcaaacttggctcagcccactcagaggctgagaatggtgtggaggagaaaaagaaagcctgcaggtcgccaacagcccaatcccctaccccatctgtggaggcggactccccagaccagaagaaaatcattagcctatgcccatatcttctctccaaatctatgcttcattcaggaccaagatacaaggccaatatgcactttcacaagttgtttcttagtgtcccaacggaggaaccactgaagcaaagctttacctgtgctctacagaaagaaatactataccaaggaaagctctttgtatcagaaaactggatttgttttcattccaaagtctttggaaaagacacaaagatctctattccagctttctcggtaaccctaataaagaaaaccaaaactgctcttctagtgccaaacgccctgatcatagcaacagtcacagacaggtacatatttgtctccttactctccagagattcaacttacaaactactaaaatctgtgtgtggacacttagaaaatacaagtgttggtaacagtcccaatccatcttctgctgaaaacagtttccgagcagaccgcccttcatctctgcctctggatttcaatgatgaattctcagatctggatggagtggttcaacaaagaaggcaagacatggaaggatatagcagttctggttctcaaactcctgaatctgagaactctcgagtagatttccatgcgacagaatcccaaacagttctgaatgtctccaagggagaagcaaagccaactcgggcagatgcccatgtgaacagagtacctgaaggaaaagccaagagtctccctgtacagggtctgtcagaaactgttggaatcttacataaagtcaagtctcagaaatgtccgatgcttcaccatattcttatattctatgcaattgttgtctgtgcactaatcatctcgaccttctacatgagatacagaattaatactctggaggagcagctggggttactaacctccattgtggacacccataatactgaacaggcagcaccatctggcctgaggtcacaagtacaattcaatgtggaggttctctgtcaagagcttacagctaacatagtgaaattagaaaagatacaaaataacttacagaagttgcttgagaatggtgactgatcgaccagattgcttgggccatcggaatacctcatgtttccctttgaagaaggtgcttcctgaggcgttttgtttgagtgcaccctgctggtcagaggtgcaagcagatgagaatccagacattgcatgtggaggtctccagctcaggaaagtgaggagggaaataattttggttcttgtgcaataaaagttgaccttgactctctgaggaagattttgctgcttttgcctgaagaaaacagacccatctctggaggtctcaggaagggcccagcgaacacactctcttggataattaccacgatggcgtcagcaaacactccaccctgtgcctttttagtccttcccgccctcctgcctctcccttacacccctcttaacgactttcaaactaaaggatacatcatatactgacaaactcaatgtggtcctttcaagaattagccatgagtctcaaaaaggcaataaatggctctaagtggacaggtttgcttcaaacaagtaacatctacattttgtcttttttttttcagttctcctgttatgttctggttgaaatcacctgtgtgtcttaatttctcaattcctttttggcaagaatatcaagcaaggtgaatttaacattatgtttatgttttgttttgttgctgtaactaatagttaattggactgattcttacccagccctggtcaagaatctgtgaggcatgtgactgaagtactaaattaaacttattttgaaaccaaacctaatttttaagccaaaaggtgtaatagtgatttaatacaggatgaaaaacactgaatttttaagactgtaggtggactatgttagtagttttcaagcaggatgtctgtattcagcattcaataatgctaaaatccctttcagcatgaaatttgtatgtttttatcctttgctgactaaaataaaataactggtggtttgctaactatttaccatatgggttggctggtttttattaataattgtttagggtatcataagatctgtaagtacaaaggatattctgtttctatctgcaatgcatttgataatcatttctatgaaatgtattttatttaatcagataagctaataagcgaattggttacatcgtttgtatctgttggcctagtggacagctgtgcctggtgcacctctggcttttaataaatactcattggttgaaacaccctgctaacactgtgttttgtcagttcgtaaattcctttaaccaagacttaactatgctttttaactctttttccacctgccatctactactaccaactcacttatacttccttcctcccaagtaatcatttcaaaactaaaaaaggatttaagttcttgggttacaacggtttaaaggaaagaaaatgaactttgaagtcaaaaaaaaaagaaaaaa

SEQ ID NO: 138659 - DNA, 1363 bp, Homo sapiens
  Payload ID: 7164
  Gene Symbol: GRAMD3
  Gene Name: GRAM domain containing 3
  ENST ID: ENST00000502348
  CDS Start-End: 343-1314
attccatttcccctcccacgctgctcactcaaacacacgctagcctctgctgcttgaattctacatagtttcagtctgctgctgacaagacctccaagctcagaggctgagaatggtgtggaggagaaaaagaaagcctgcaggtcgccaacagcccaatcccctaccccatctgtggaggcggactccccagaccagaagaaaatcattagcctatggtcaaaatccagttttgatggtgcctctttagcaagtgataagaacgactgtaaaacagaaagcaaaaatgaccctaagactgaaagaaaaaagtcttcatcttccagccagtacaaggccaatatgcactttcacaagttgtttcttagtgtcccaacggaggaaccactgaagcaaagctttacctgtgctctacagaaagaaatactataccaaggaaagctctttgtatcagaaaactggatttgttttcattccaaagtctttggaaaagacacaaagatctctattccagctttctcggtaaccctaataaagaaaaccaaaactgctcttctagtgccaaacgccctgatcatagcaacagtcacagacaggtacatatttgtctccttactctccagagattcaacttacaaactactaaaatctgtgtgtggacacttagaaaatacaagtgttggtaacagtcccaatccatcttctgctgaaaacagtttccgagcagaccgcccttcatctctgcctctggatttcaatgatgaattctcagatctggatggagtggttcaacaaagaaggcaagacatggaaggatatagcagttctggttctcaaactcctgaatctgagaactctcgagatttccatgcgacagaatcccaaacagttctgaatgtctccaagggagaagcaaagccaactcgggcagatgcccatgtgaacagagtacctgaaggaaaagccaagagtctccctgtacagggtctgtcagaaactgttggaatcttacataaagtcaagtctcagaaatgtccgatgcttcaccatattcttatattctatgcaattgttgtctgtgcactaatcatctcgaccttctacatgagatacagaattaatactctggaggagcagctggggttactaacctccattgtggacacccataatactgaacaggcagcaccatctggcctgaggtcacaagtacaattcaatgtggaggttctctgtcaagagcttacagctaacatagtgaaattagaaaagatacaaaataacttacagaagttgcttgagaatggtgactgatcgaccagattgcttgggccatcggaatacctcatgtttccctttgaag

SEQ ID NO: 138660 - DNA, 2977 bp, Homo sapiens
  Payload ID: 7164
  Gene Symbol: GRAMD3
  Gene Name:: GRAM domain containing 3
  Uniprot ID: Q96HH9
  ENST ID: ENST00000542322
  CDS Start-End: 450-1772
ctgttacagtcgggatagaaaacaaaaagcttaatttaccaggaggctaaacagattgtgccttcttaggcaaatgttccacctgcttggccaattagcttcctctcccgaaagactcgttcaacaggtttcctttttctcttctctgcctcctgggttggggaaagaggctgtcacttcgcttcgaccctccccttccctccctctcggcttttccacagtgggtcggaccaatcgcgcccgctccgacgtgtccaggtccgcggccccgggagcttggcgcggcccggcctggatgcgctgggcggagggtgcaggggagggcacggcgccgcttgcttggcctgcgcacccggacctagaagccgggacgagccggggcagagccaggcgcgcggaagtctgaaggtgccctccagacacggccccgatgactgaactacagcaagatgtggaagacacaaagcctgcgaaagtgctcgggaagagggagagcaaacttggctcagcccactcagaggctgagaatggtgtggaggagaaaaagaaagcctgcaggtcgccaacagcccaatcccctaccccatctgtggaggcggactccccagaccagaagaaaatcattagcctatgcccatatcttctctccaaatctatgcttcattcaggaccaagagtcaaaatccagttttgatggtgcctctttagcaagtgataagaacgactgtaaaacagaaagcaaaaatgaccctaagactgaaagaaaaaagtcttcatcttccagccagtacaaggccaatatgcactttcacaagttgtttcttagtgtcccaacggaggaaccactgaagcaaagctttacctgtgctctacagaaagaaatactataccaaggaaagctctttgtatcagaaaactggatttgttttcattccaaagtctttggaaaagacacaaagatctctattccagctttctcggtaaccctaataaagaaaaccaaaactgctcttctagtgccaaacgccctgatcatagcaacagtcacagacaggtacatatttgtctccttactctccagagattcaacttacaaactactaaaatctgtgtgtggacacttagaaaatacaagtgttggtaacagtcccaatccatcttctgctgaaaacagtttccgagcagaccgcccttcatctctgcctctggatttcaatgatgaattctcagatctggatggagtggttcaacaaagaaggcaagacatggaaggatatagcagttctggttctcaaactcctgaatctgagaactctcgagatttccatgcgacagaatcccaaacagttctgaatgtctccaagggagaagcaaagccaactcgggcagatgcccatgtgaacagagtacctgaaggaaaagccaagagtctccctgtacagggtctgtcagaaactgttggaatcttacataaagtcaagtctcagaaatgtccgatgcttcaccatattcttatattctatgcaattgttgtctgtgcactaatcatctcgaccttctacatgagatacagaattaatactctggaggagcagctggggttactaacctccattgtggacacccataatactgaacaggcagcaccatctggcctgaggtcacaagtacaattcaatgtggaggttctctgtcaagagcttacagctaacatagtgaaattagaaaagatacaaaataacttacagaagttgcttgagaatggtgactgatcgaccagattgcttgggccatcggaatacctcatgtttccctttgaagaaggtgcttcctgaggcgttttgtttgagtgcaccctgctggtcagaggtgcaagcagatgagaatccagacattgcatgtggaggtctccagctcaggaaagtgaggagggaaataattttggttcttgtgcaataaaagttgaccttgactctctgaggaagattttgctgcttttgcctgaagaaaacagacccatctctggaggtctcaggaagggcccagcgaacacactctcttggataattaccacgatggcgtcagcaaacactccaccctgtgcctttttagtccttcccgccctcctgcctctcccttacacccctcttaacgactttcaaactaaaggatacatcatatactgacaaactcaatgtggtcctttcaagaattagccatgagtctcaaaaaggcaataaatggctctaagtggacaggtttgcttcaaacaagtaacatctacattttgtcttttttttttcagttctcctgttatgttctggttgaaatcacctgtgtgtcttaatttctcaattcctttttggcaagaatatcaagcaaggtgaatttaacattatgtttatgttttgttttgttgctgtaactaatagttaattggactgattcttacccagccctggtcaagaatctgtgaggcatgtgactgaagtactaaattaaacttattttgaaaccaaacctaatttttaagccaaaaggtgtaatagtgatttaatacaggatgaaaaacactgaatttttaagactgtaggtggactatgttagtagttttcaagcaggatgtctgtattcagcattcaataatgctaaaatccctttcagcatgaaatttgtatgtttttatcctttgctgactaaaataaaataactggtggtttgctaactatttaccatatgggttggctggtttttattaataattgtttagggtatcataagatctgtaagtacaaaggatattctgtttctatctgcaatgcatttgataatcatttctatgaaatgtattttatttaatcagataagctaataagcgaattggttacatcgtttgtatctgttggcctagtggacagctgtgcctggtgcacctctggcttttaataaatactcattggttgaaacaccctgctaa

SEQ ID NO: 138661 - DNA, 2822 bp, Homo sapiens
  Payload ID: 7164
  Gene Symbol: GRAMD3
  Gene Name: GRAM domain containing 3
  Uniprot ID: Q96HH9
  ENST ID: ENST00000544396
  CDS Start-End: 631-1617
ctgttacagtcgggatagaaaacaaaaagcttaatttaccaggaggctaaacagattgtgccttcttaggcaaatgttccacctgcttggccaattagcttcctctcccgaaagactcgttcaacaggtttcctttttctcttctctgcctcctgggttggggaaagaggctgtcacttcgcttcgaccctccccttccctccctctcggcttttccacagtgggtcggaccaatcgcgcccgctccgacgtgtccaggtccgcggccccgggagcttggcgcggcccggcctggatgcgctgggcggagggtgcaggggagggcacggcgccgcttgcttggcctgcgcacccggacctagaagccgggacgagccggggcagagccaggcgcgcggaagtctgaaggtgccctccagacacggccccgatgactgaactacagcaagatgtggaagacacaaagcctgcgaaagtgctcgggaagagggagagcaaacttggctcagcccactcagaggctgagaatggtgtggaggagaaaaagaaagcctgcaggtcgccaacagcccaatcccctaccccatctgtggaggcggactccccagaccagaagaaaatcattagcctatgtacaaggccaatatgcactttcacaagttgtttcttagtgtcccaacggaggaaccactgaagcaaagctttacctgtgctctacagaaagaaatactataccaaggaaagctctttgtatcagaaaactggatttgttttcattccaaagtctttggaaaagacacaaagatctctattccagctttctcggtaaccctaataaagaaaaccaaaactgctcttctagtgccaaacgccctgatcatagcaacagtcacagacaggtacatatttgtctccttactctccagagattcaacttacaaactactaaaatctgtgtgtggacacttagaaaatacaagtgttggtaacagtcccaatccatcttctgctgaaaacagtttccgagcagaccgcccttcatctctgcctctggatttcaatgatgaattctcagatctggatggagtggttcaacaaagaaggcaagacatggaaggatatagcagttctggttctcaaactcctgaatctgagaactctcgagatttccatgcgacagaatcccaaacagttctgaatgtctccaagggagaagcaaagccaactcgggcagatgcccatgtgaacagagtacctgaaggaaaagccaagagtctccctgtacagggtctgtcagaaactgttggaatcttacataaagtcaagtctcagaaatgtccgatgcttcaccatattcttatattctatgcaattgttgtctgtgcactaatcatctcgaccttctacatgagatacagaattaatactctggaggagcagctggggttactaacctccattgtggacacccataatactgaacaggcagcaccatctggcctgaggtcacaagtacaattcaatgtggaggttctctgtcaagagcttacagctaacatagtgaaattagaaaagatacaaaataacttacagaagttgcttgagaatggtgactgatcgaccagattgcttgggccatcggaatacctcatgtttccctttgaagaaggtgcttcctgaggcgttttgtttgagtgcaccctgctggtcagaggtgcaagcagatgagaatccagacattgcatgtggaggtctccagctcaggaaagtgaggagggaaataattttggttcttgtgcaataaaagttgaccttgactctctgaggaagattttgctgcttttgcctgaagaaaacagacccatctctggaggtctcaggaagggcccagcgaacacactctcttggataattaccacgatggcgtcagcaaacactccaccctgtgcctttttagtccttcccgccctcctgcctctcccttacacccctcttaacgactttcaaactaaaggatacatcatatactgacaaactcaatgtggtcctttcaagaattagccatgagtctcaaaaaggcaataaatggctctaagtggacaggtttgcttcaaacaagtaacatctacattttgtcttttttttttcagttctcctgttatgttctggttgaaatcacctgtgtgtcttaatttctcaattcctttttggcaagaatatcaagcaaggtgaatttaacattatgtttatgttttgttttgttgctgtaactaatagttaattggactgattcttacccagccctggtcaagaatctgtgaggcatgtgactgaagtactaaattaaacttattttgaaaccaaacctaatttttaagccaaaaggtgtaatagtgatttaatacaggatgaaaaacactgaatttttaagactgtaggtggactatgttagtagttttcaagcaggatgtctgtattcagcattcaataatgctaaaatccctttcagcatgaaatttgtatgtttttatcctttgctgactaaaataaaataactggtggtttgctaactatttaccatatgggttggctggtttttattaataattgtttagggtatcataagatctgtaagtacaaaggatattctgtttctatctgcaatgcatttgataatcatttctatgaaatgtattttatttaatcagataagctaataagcgaattggttacatcgtttgtatctgttggcctagtggacagctgtgcctggtgcacctctggcttttaataaatactcattggttgaaacaccctgctaa

SEQ ID NO: 138662 - DNA, 4315 bp, Homo sapiens
  Payload ID: 7165
  Gene Symbol: GRAMD4
  Gene Name: GRAM domain containing 4
  Uniprot ID: Q6IC98
  ENST ID: ENST00000361034
  CDS Start-End: 40-1776
cgtcatgttagggtgaagcagaggacctcagtgctgaacatgctaaggaggttggacaaaatcaggttcagaggtcacaagagagatgacttcctcgatctagcggagtctccaaatgcctcggacaccgaatgcagcgacgaaatccccctgaaggtaccgcggacctcgccccgggacagcgaggagctgagggaccctgctggtccagggaccctcatcatggccacaggagtccaggactttaaccggacagagtttgatcgactgaatgagatcaaaggtcacctggaaattgccttattggaaaaacatttcttacaggaggagctccggaagctgcgagaagaaaccaacgcggagatgctgcggcaggagctggaccgcgagcggcagcggcggatggagctggagcagaaggtgcaggaggtgctgaaggccagaaccgaggagcagatggctcagcagcccccaaaagggcaggcccaggccagcaatggagcagagcgccggagccaggggctgtcctcgcgcctgcagaagtggttctacgagcggtttggggagtacgtggaggacttccggttccagcccgaggagaacactgtggagacagaggaacccctgagcgcccgcaggttaactgaaaatatgagacggctcaagcgcggtgccaagccggtcactaactttgtgaagaacctctctgccttatccgactggtactccgtctacacgtctgccattgccttcaccgtgtacatgaatgccgtgtggcatggctgggccatcccattgttcttatttctagcaattctgaggttatccctcaattacctcatcgccagggggtggcggatacagtggagcatcgtgcccgaagtgtctgagcccgtggaacctccaaaggaagacctgactgtgtctgagaagttccagctggtgctggacgtcgcccagaaagcccagaaccttttcgggaagatggctgacatcctggagaagatcaagaacttgttcatgtgggtccagccggagatcacacagaagctgtatgtggcgctctgggctgccttcctggcctcctgcttcttcccctaccgcctggtggggcttgccgtgggactctatgctggtatcaagttcttcctcattgatttcatctttaaacgctgcccgaggctgcgcgccaagtacgacacgccctatatcatctggaggagtctccccaccgacccgcagctcaaggagcgctccagcgccgcagtctcacgcaggctgcagacgacctcgtcacggagctacgtacccagcgcaccggccggcctgggtaaagaggaggacgccggtcgcttccacagcaccaagaagggcaatttccacgagatcttcaatctgacagaaaacgagcgtccgctggcggtgtgcgagaatggctggcgctgctgcctcatcaacagggaccggaagatgcccacggactacatcaggaacggggtgctctacgtcacggagaattacttgtgcttcgaaagctccaaatctgggtcctcaaagaggaacaaagtcatcaagctagtggacatcacggacatccagaagtacaaggtcctgtctgtcctcccaggctcaggcatggggattgccgtgtcgacgccatccacccagaaaccgctcgtgtttggtgccatggtgcacagggatgaggccttcgagaccattctcagccagtacatcaagatcacctcagcggcagcgtctggcggggacagctagtattgacttgcccaggacgttgctggaattttctttttctttttctttttctttttttttttttacgatttggtagtggaaacaattggacatcctcatgagcttttgcaataattctcctggacctgtggttctattgtgttgacctctgcgttttatcgaccaagaaggggccagggctcacagggacgggggtgcccctctcccacagggcacgtcaggtgcctctgagggccacccgcagactgggggagggggcagaggccctcgggggcccgtggagaagacacacaggacccctggccctgcccttctccgttccagcctggacagagaaacctctccagccaccccaagaggttctcgcaaccttgtgtcccgctctccagaggccagaagctcgtccaccaccaaagccatagctgaagagtgcggggcccttcctcctggggacagaaagatgtcgtcaaggagggacatgggggcctttcaccaaccaccgagaaacgggcctggcggccctccttcctcttacatgagaccctcctgtggcatttgcccttggtgccgggctggggccgggcgcagtgaccctgcctgcgctccacactcgctccacgggaacagagagggtgagaagggcccacccctcgcctgccctcagtgtctttggtggcaccttccttgctggcctccagggcgctcagcaccgcgtctgtaagggcctgcctgctgctctcggcctgacacgccggccaggaggtctgtagctggggaccagtaagggcacaggatggtgcaggtaaaagcacatctttctcacactttgctctttggaaggcccaggagaacatccgcgaaggctgttggaggtgctccgagcactgtggcatgtctggcacatggcccccaggctgcggttgcctgggttggttgggggaggaagtggggaggagtgttccgggaccatggtggcccaggctgcagccgcctttgggccatccgagaggctctggcagcccctgtgctttagggagcaaccgtgagccgagcccagaggcctgggcctgcactgcctgcagccgacatgcgacagcgttccctcccccgcgtgcctagccggtgccggtccgggcacagacccccccagcccccgccctgccccagggaagcctgggcttcccgggaacaaggtggcatttgtggagggagcgcccgcaggcctggtctgctggggccgcctgcgctgggctgaagggagggaaaggcggcttgggcctcctggaaggaggtggccaccccgcgggcctgcgtgtctgctggggcggatcccgcagctccctcagcttgtcctgagtcccttgggtgtcgttgagattgttgttttttgaagaaacagaagattctattttttacagcgagcaagctggttttcttatttttgtatcctttttcagatgtaatttttatctttgctccgatcctcatttgctggtgtgggtgagggatccggcggcatgggctggtttcacccccttcacgaggggccgcagagtcacacgctggtgccgggggtgctttggggggagctgcgccgatcaccagattaagcacatgtcctatcccaggcggtggagcggagcccccgtggctctggactgcgcggacgttggcgtcaggatgaccacacggcggcctttcccgaatggggacagaacccgctctgagccgtgggtctggctcctgtaggggactggctctcttggtgcaccaggggagggggacatatcccagtgaaccccaccttggcgcctgaggcaacacagggtgggcactgacccacccccaggggcggctgcagaggcagtgcccgcagacaatggccacacctctctccccagggcccggcagtgcccaaggatgggtccggggcctcggggccaatgagcgcctcttcctaggtgctgggattcagtccccaaacacagcgggaggggtccctggggcagatggggctttaccagcgtcgggtggtttagttcgagtcccttttgtggagaaagggagatgaaaactgaccacgtgccaggtgtggccgaagcccccagggagggccacattcggggagcggggggtcgggggagggccaccgactggctctgctgccagcacaggcccctccctggaagtcctcgggagcggagcgcggatcggcacgggctctgggctccccgtggagagaagctgtagtttttaccaaattgtgtacatctgggcagatgtttaatttctgtgactaatcactgaactagacgaatgttaaattttttatgtctgaagcctgagtctattttggatctgtaaataatcattgccagtgtgacttttgttcaacaaaaggattgtactgtattaagaaccgatgaaaaaaattctcctgtaacatttttttaagaaaactttgtttgtttaaagaaaaagtattgtataaattataatttttatttaaataaacctaaaatgctttgtgctaaggctc

SEQ ID NO: 138663 - DNA, 4484 bp, Homo sapiens
  Payload ID: 7165
  Gene Symbol: GRAMD4
  Gene Name: GRAM domain containing 4
  Uniprot ID: Q6IC98
  ENST ID: ENST00000406902
  CDS Start-End: 214-1950
ctccaggctccagggcagcagacaccaccctctccgtgcctgctggtgttgggcggcttggaggctatggttcctgggtcctcgtagcacatcctggttctgggccaggacctgaaggagccacagtgaaagagtgtttctggatgtatctgagacagacggagggaacccgagcgtcatgttagggtgaagcagaggacctcagtgctgaacatgctaaggaggttggacaaaatcaggttcagaggtcacaagagagatgacttcctcgatctagcggagtctccaaatgcctcggacaccgaatgcagcgacgaaatccccctgaaggtaccgcggacctcgccccgggacagcgaggagctgagggaccctgctggtccagggaccctcatcatggccacaggagtccaggactttaaccggacagagtttgatcgactgaatgagatcaaaggtcacctggaaattgccttattggaaaaacatttcttacaggaggagctccggaagctgcgagaagaaaccaacgcggagatgctgcggcaggagctggaccgcgagcggcagcggcggatggagctggagcagaaggtgcaggaggtgctgaaggccagaaccgaggagcagatggctcagcagcccccaaaagggcaggcccaggccagcaatggagcagagcgccggagccaggggctgtcctcgcgcctgcagaagtggttctacgagcggtttggggagtacgtggaggacttccggttccagcccgaggagaacactgtggagacagaggaacccctgagcgcccgcaggttaactgaaaatatgagacggctcaagcgcggtgccaagccggtcactaactttgtgaagaacctctctgccttatccgactggtactccgtctacacgtctgccattgccttcaccgtgtacatgaatgccgtgtggcatggctgggccatcccattgttcttatttctagcaattctgaggttatccctcaattacctcatcgccagggggtggcggatacagtggagcatcgtgcccgaagtgtctgagcccgtggaacctccaaaggaagacctgactgtgtctgagaagttccagctggtgctggacgtcgcccagaaagcccagaaccttttcgggaagatggctgacatcctggagaagatcaagaacttgttcatgtgggtccagccggagatcacacagaagctgtatgtggcgctctgggctgccttcctggcctcctgcttcttcccctaccgcctggtggggcttgccgtgggactctatgctggtatcaagttcttcctcattgatttcatctttaaacgctgcccgaggctgcgcgccaagtacgacacgccctatatcatctggaggagtctccccaccgacccgcagctcaaggagcgctccagcgccgcagtctcacgcaggctgcagacgacctcgtcacggagctacgtacccagcgcaccggccggcctgggtaaagaggaggacgccggtcgcttccacagcaccaagaagggcaatttccacgagatcttcaatctgacagaaaacgagcgtccgctggcggtgtgcgagaatggctggcgctgctgcctcatcaacagggaccggaagatgcccacggactacatcaggaacggggtgctctacgtcacggagaattacttgtgcttcgaaagctccaaatctgggtcctcaaagaggaacaaagtcatcaagctagtggacatcacggacatccagaagtacaaggtcctgtctgtcctcccaggctcaggcatggggattgccgtgtcgacgccatccacccagaaaccgctcgtgtttggtgccatggtgcacagggatgaggccttcgagaccattctcagccagtacatcaagatcacctcagcggcagcgtctggcggggacagctagtattgacttgcccaggacgttgctggaattttctttttctttttctttttctttttttttttttacgatttggtagtggaaacaattggacatcctcatgagcttttgcaataattctcctggacctgtggttctattgtgttgacctctgcgttttatcgaccaagaaggggccagggctcacagggacgggggtgcccctctcccacagggcacgtcaggtgcctctgagggccacccgcagactgggggagggggcagaggccctcgggggcccgtggagaagacacacaggacccctggccctgcccttctccgttccagcctggacagagaaacctctccagccaccccaagaggttctcgcaaccttgtgtcccgctctccagaggccagaagctcgtccaccaccaaagccatagctgaagagtgcggggcccttcctcctggggacagaaagatgtcgtcaaggagggacatgggggcctttcaccaaccaccgagaaacgggcctggcggccctccttcctcttacatgagaccctcctgtggcatttgcccttggtgccgggctggggccgggcgcagtgaccctgcctgcgctccacactcgctccacgggaacagagagggtgagaagggcccacccctcgcctgccctcagtgtctttggtggcaccttccttgctggcctccagggcgctcagcaccgcgtctgtaagggcctgcctgctgctctcggcctgacacgccggccaggaggtctgtagctggggaccagtaagggcacaggatggtgcaggtaaaagcacatctttctcacactttgctctttggaaggcccaggagaacatccgcgaaggctgttggaggtgctccgagcactgtggcatgtctggcacatggcccccaggctgcggttgcctgggttggttgggggaggaagtggggaggagtgttccgggaccatggtggcccaggctgcagccgcctttgggccatccgagaggctctggcagcccctgtgctttagggagcaaccgtgagccgagcccagaggcctgggcctgcactgcctgcagccgacatgcgacagcgttccctcccccgcgtgcctagccggtgccggtccgggcacagacccccccagcccccgccctgccccagggaagcctgggcttcccgggaacaaggtggcatttgtggagggagcgcccgcaggcctggtctgctggggccgcctgcgctgggctgaagggagggaaaggcggcttgggcctcctggaaggaggtggccaccccgcgggcctgcgtgtctgctggggcggatcccgcagctccctcagcttgtcctgagtcccttgggtgtcgttgagattgttgttttttgaagaaacagaagattctattttttacagcgagcaagctggttttcttatttttgtatcctttttcagatgtaatttttatctttgctccgatcctcatttgctggtgtgggtgagggatccggcggcatgggctggtttcacccccttcacgaggggccgcagagtcacacgctggtgccgggggtgctttggggggagctgcgccgatcaccagattaagcacatgtcctatcccaggcggtggagcggagcccccgtggctctggactgcgcggacgttggcgtcaggatgaccacacggcggcctttcccgaatggggacagaacccgctctgagccgtgggtctggctcctgtaggggactggctctcttggtgcaccaggggagggggacatatcccagtgaaccccaccttggcgcctgaggcaacacagggtgggcactgacccacccccaggggcggctgcagaggcagtgcccgcagacaatggccacacctctctccccagggcccggcagtgcccaaggatgggtccggggcctcggggccaatgagcgcctcttcctaggtgctgggattcagtccccaaacacagcgggaggggtccctggggcagatggggctttaccagcgtcgggtggtttagttcgagtcccttttgtggagaaagggagatgaaaactgaccacgtgccaggtgtggccgaagcccccagggagggccacattcggggagcggggggtcgggggagggccaccgactggctctgctgccagcacaggcccctccctggaagtcctcgggagcggagcgcggatcggcacgggctctgggctccccgtggagagaagctgtagtttttaccaaattgtgtacatctgggcagatgtttaatttctgtgactaatcactgaactagacgaatgttaaattttttatgtctgaagcctgagtctattttggatctgtaaataatcattgccagtgtgacttttgttcaacaaaaggattgtactgtattaagaaccgatgaaaaaaattctcctgtaacatttttttaagaaaactttgtttgtttaaagaaaaagtattgtataaattataatttttatttaaataaacctaaaatgctttgtgctaa

SEQ ID NO: 138664 - DNA, 2834 bp, Homo sapiens
  Payload ID: 7165
  Gene Symbol: GRAMD4
  Gene Name: GRAM domain containing 4
  Uniprot ID: Q6IC98
  ENST ID: ENST00000408031
  CDS Start-End: 97-402
gctgggtacttccagtggaaagtgtgacaggcgggccttctcccattagtgtgcgagaatggctggcgctgctgcctcatcaacagggaccggaagatgcccacggactacatcaggaacggggtgctctacgtcacggagaattacttgtgcttcgaaagctccaaatctgggtcctcaaagaggaacaaagtcatcaagctagtggacatcacggacatccagaagtacaaggtcctgtctgtcctcccaggctcaggcatggggattgccgtgtcgacgccatccacccagaaaccgctcgtgtttggtgccatggtgcacagggatgaggccttcgagaccattctcagccagtacatcaagatcacctcagcggcagcgtctggcggggacagctagtattgacttgcccaggacgttgctggaattttctttttctttttctttttctttttttttttttacgatttggtagtggaaacaattggacatcctcatgagcttttgcaataattctcctggacctgtggttctattgtgttgacctctgcgttttatcgaccaagaaggggccagggctcacagggacgggggtgcccctctcccacagggcacgtcaggtgcctctgagggccacccgcagactgggggagggggcagaggccctcgggggcccgtggagaagacacacaggacccctggccctgcccttctccgttccagcctggacagagaaacctctccagccaccccaagaggttctcgcaaccttgtgtcccgctctccagaggccagaagctcgtccaccaccaaagccatagctgaagagtgcggggcccttcctcctggggacagaaagatgtcgtcaaggagggacatgggggcctttcaccaaccaccgagaaacgggcctggcggccctccttcctcttacatgagaccctcctgtggcatttgcccttggtgccgggctggggccgggcgcagtgaccctgcctgcgctccacactcgctccacgggaacagagagggtgagaagggcccacccctcgcctgccctcagtgtctttggtggcaccttccttgctggcctccagggcgctcagcaccgcgtctgtaagggcctgcctgctgctctcggcctgacacgccggccaggaggtctgtagctggggaccagtaagggcacaggatggtgcaggtaaaagcacatctttctcacactttgctctttggaaggcccaggagaacatccgcgaaggctgttggaggtgctccgagcactgtggcatgtctggcacatggcccccaggctgcggttgcctgggttggttgggggaggaagtggggaggagtgttccgggaccatggtggcccaggctgcagccgcctttgggccatccgagaggctctggcagcccctgtgctttagggagcaaccgtgagccgagcccagaggcctgggcctgcactgcctgcagccgacatgcgacagcgttccctcccccgcgtgcctagccggtgccggtccgggcacagacccccccagcccccgccctgccccagggaagcctgggcttcccgggaacaaggtggcatttgtggagggagcgcccgcaggcctggtctgctggggccgcctgcgctgggctgaagggagggaaaggcggcttgggcctcctggaaggaggtggccaccccgcgggcctgcgtgtctgctggggcggatcccgcagctccctcagcttgtcctgagtcccttgggtgtcgttgagattgttgttttttgaagaaacagaagattctattttttacagcgagcaagctggttttcttatttttgtatcctttttcagatgtaatttttatctttgctccgatcctcatttgctggtgtgggtgagggatccggcggcatgggctggtttcacccccttcacgaggggccgcagagtcacacgctggtgccgggggtgctttggggggagctgcgccgatcaccagattaagcacatgtcctatcccaggcggtggagcggagcccccgtggctctggactgcgcggacgttggcgtcaggatgaccacacggcggcctttcccgaatggggacagaacccgctctgagccgtgggtctggctcctgtaggggactggctctcttggtgcaccaggggagggggacatatcccagtgaaccccaccttggcgcctgaggcaacacagggtgggcactgacccacccccaggggcggctgcagaggcagtgcccgcagacaatggccacacctctctccccagggcccggcagtgcccaaggatgggtccggggcctcggggccaatgagcgcctcttcctaggtgctgggattcagtccccaaacacagcgggaggggtccctggggcagatggggctttaccagcgtcgggtggtttagttcgagtcccttttgtggagaaagggagatgaaaactgaccacgtgccaggtgtggccgaagcccccagggagggccacattcggggagcggggggtcgggggagggccaccgactggctctgctgccagcacaggcccctccctggaagtcctcgggagcggagcgcggatcggcacgggctctgggctccccgtggagagaagctgtagtttttaccaaattgtgtacatctgggcagatgtttaatttctgtgactaatcactgaactagacgaatgttaaattttttatgtctgaagcctgagtctattttggatctgtaaataatcattgccagtgtgacttttgttcaacaaaaggattgtactgtattaagaaccgatgaaaaaaa

SEQ ID NO: 138665 - DNA, 669 bp, Homo sapiens
  Payload ID: 7165
  Gene Symbol: GRAMD4
  Gene Name: GRAM domain containing 4
  ENST ID: ENST00000456069
  CDS Start-End: 1-669
ggaggacttccggttccagcccgaggagaacactgtggagacagaggaacccctgagcgcccgcaggttaactgaaaatatgagacggctcaagcgcggtgccaagccggtcactaactttgtgaagaacctctctgccttatccgactggtactccgtctacacgtctgccattgccttcaccgtgtacatgaatgccgtgtggcatggctgggccatcccattgttcttatttctagcaattctgaggttatccctcaattacctcatcgccagggggtggcggatacagtggagcatcgtgcccgaagtgtctgagcccgtggaacctccaaaggaagacctgactgtgtctgagaagttccagctggtgctggacgtcgcccagaaagcccagaaccttttcgggaagatggctgacatcctggagaagatcaagaacttgttcatgtgggtccagccggagatcacacagaagctgtatgtggcgctctgggctgccttcctggcctcctgcttcttcccctaccgcctggtggggcttgccgtggtgctgacaagggacctcagcttagaggggcagaggctgcctgctccaagcaaggatggccccagctgggacttgggctctcttgagctgagctgtccctcctgggtcggccaccacgt

SEQ ID NO: 138666 - DNA, 311 bp, Homo sapiens
  Payload ID: 7165
  Gene Symbol: GRAMD4
  Gene Name: GRAM domain containing 4
  ENST ID: ENST00000431155
  CDS Start-End: 212-311
ccgccgcctccgcgctcgtggccgggacccgcggggccgcctcctcccggctccccggcgccgctgggctcccgggcgggcggcaggcgtagcgcggccgggcggccggcgaggggggcgccgcggcgggtggatgagagttggccccgatatccgctcaggggaacccgagcgtcatgttagggtgaagcagaggacctcagtgctgaacatgctaaggaggttggacaaaatcaggttcagaggtcacaagagagatgacttcctcgatctagcggagtctccaaatgcctcggacaccgaatgcagcg

SEQ ID NO: 138667 - DNA, 375 bp, Homo sapiens
  Payload ID: 7165
  Gene Symbol: GRAMD4
  Gene Name: GRAM domain containing 4
  ENST ID: ENST00000447351
  CDS Start-End: 117-375
ggggagggcggatccaggtctggagtctttggattgaaaggttggagatgcctgtgggactcccaagggaacccgagcgtcatgttagggtgaagcagaggacctcagtgctgaacatgctaaggaggttggacaaaatcaggttcagaggtcacaagagagatgacttcctcgatctagcggagtctccaaatgcctcggacaccgaatgcagcgacgaaatccccctgaaggtaccgcggacctcgccccgggacagcgaggagctgagggaccctgctggtccagggaccctcatcatggccacaggagtccaggactttaaccggacagagtttgatcgactgaatgagatcaaaggtcacctggaaattg

SEQ ID NO: 138668 - DNA, 1694 bp, Homo sapiens
  Payload ID: 7166
  Gene Symbol: GCA
  Gene Name: grancalcin, EF-hand calcium binding protein
  ENST ID: ENST00000233612
  CDS Start-End: 219-815
tgccaacgtgcgggtccgcccttggctcctgctccctgcgtccgcgcctggtactcggcggcgccggattccggggctgttgggggccagggcctgggcgagcattgatcctgggctgacttggagccgcaggttttctggtcgttgaggaccctcgaggagcgtcctggtggagccgagggagtaattttggaaattttagcattcaggtgccaggaatgcagatgggacagccagtgccagaaacaggcccagctatactcctcgatggatactctgggccagcatattcagacacttattcctcagctggtgactccgtgtatacttacttcagtgctgttgctggacaggatggtgaagtggatgctgaagaacttcagagatgtttgacacagtctggaattaatggaacttactctcccttcagtttggaaacctgcagaattatgattgccatgttggatagagatcacacaggaaaaatgggatttaatgcattcaaagagctatgggcagctcttaatgcctggaaggaaaacttcatgactgttgatcaagatggaagtggcacagtagaacatcatgagttgcgtcaagccattggtcttatgggttataggttgagtcctcaaacattaactactattgttaaacgttatagcaagaatggcagaattttctttgatgattatgttgcttgctgtgtgaagcttcgagcattgacagatttctttaggaaaagagaccacttgcaacaagggtctgcgaatttcatatatgacgattttttgcagggcactatggcaatttgaatgcttagaattttaaacctgaagagacactgtgaattcttttgtttggaagaagtgaactggactactttaaaacttttaagggttttctatgttcttcctacctgttaaacctcttccctttctgtgtgtttttattttagcagatagttcaaagcaataaaagatttcttttttaatttgaggtattactgcttttggaaaagttattttataaatatgtgcatattgtcataaaatattgtatgattaattgatttaaataatgcttagccttaattttagataatgtaaatttagaggaatgtactttacaagatagattgtataagaagccaaataatgaaagcctagaaaaaactaatttatacttatctgaaggttacaaattagacttttaaattttctttgtagttggtggtgtttgagggttggctagaaatgaaagcctggattttgtgccatgtttgtaatatagtttgttccttgatcaaataatcagagaaaagaaacttaaagatctttgtctgtgaagaagaaaattatctccctagttcaatctgtagtgaaataagactacagaaggcattgttttttccttttttattttttgtattatatatttttcttaaatatgttttattgtcttctctaagcaaaaagttcttaataaacatagtatttctctctgcgtcctatttcattagtgaagacatagttcacctaaaatggcatcctgctctgaatctagactttttagaaatggcatatgtttttgatgatatgtcaacattcaaaattgtcctaattaaattgttgtttaaatgtaatgtcaactctttataaacttaaaaataaacaagtaattaaccactctaa

SEQ ID NO: 138669 - DNA, 691 bp, Homo sapiens
  Payload ID: 7166
  Gene Symbol: GCA
  Gene Name: grancalcin, EF-hand calcium binding protein
  ENST ID: ENST00000446271
  CDS Start-End: 252-691
ctcctccggcggatattttgttttcccagcaggttctgccttaacaataaggtcctttgtaggccaaaatgtgcagggcataaaagcatgtgatttgggactttccaaaggggaagtgaacagaaactgccacagacccggacgtgaacagggagttaccctcggctggtgaatgtaggcaggcctggctgagggtggtgagactgcgagggacaggtgagagatgaagctcagaagacatctttgcagagatgtggagaagacaggaggaagtccttcctaaaataaacctgacctcctgtgggttcccaaacactaacttgtttccctgggaatttggaggtgggttcgaaaaatttggaaattttagcattcaggtgccaggaatgcagatgggacagccagtgccagaaacaggcccagctatactcctcgatggatactctgggccagcatattcagacacttattcctcagctggtgactccgtgtatacttacttcagtgctgttgctggacaggatggtgaagtggatgctgaagaacttcagagatgtttgacacagtctggaattaatggaacttactctcccttcagtttggaaacctgcagaattatgattgccatgttggatagagatcacacaggaaaaatgggatttaatgcattcaaagagctatgggcagctct

SEQ ID NO: 138670 - DNA, 1992 bp, Homo sapiens
  Payload ID: 7166
  Gene Symbol: GCA
  Gene Name: grancalcin, EF-hand calcium binding protein
  Uniprot ID: P28676
  ENST ID: ENST00000437150
  CDS Start-End: 162-815
ggcctgcggaagggggcgggttcggaggagtgaactgtgcggttagtgcgcctttcagcctcacctgcagctgcgcctccttgcacctgcgcctgtgctttttctcccagcactgcggacgcgactcgagggtgacgctcgctccgctcgtcccgctcgtcatggcctacccgggatacggaggagggtttggaaattttagcattcaggtgccaggaatgcagatgggacagccagtgccagaaacaggcccagctatactcctcgatggatactctgggccagcatattcagacacttattcctcagctggtgactccgtgtatacttacttcagtgctgttgctggacaggatggtgaagtggatgctgaagaacttcagagatgtttgacacagtctggaattaatggaacttactctcccttcagtttggaaacctgcagaattatgattgccatgttggatagagatcacacaggaaaaatgggatttaatgcattcaaagagctatgggcagctcttaatgcctggaaggaaaacttcatgactgttgatcaagatggaagtggcacagtagaacatcatgagttgcgtcaagccattggtcttatgggttataggttgagtcctcaaacattaactactattgttaaacgttatagcaagaatggcagaattttctttgatgattatgttgcttgctgtgtgaagcttcgagcattgacagatttctttaggaaaagagaccacttgcaacaagggtctgcgaatttcatatatgacgattttttgcagggcactatggcaatttgaatgcttagaattttaaacctgaagagacactgtgaattcttttgtttggaagaagtgaactggactactttaaaacttttaagggttttctatgttcttcctacctgttaaacctcttccctttctgtgtgtttttattttagcagatagttcaaagcaataaaagatttcttttttaatttgaggtattactgcttttggaaaagttattttataaatatgtgcatattgtcataaaatattgtatgattaattgatttaaataatgcttagccttaattttagataatgtaaatttagaggaatgtactttacaagatagattgtataagaagccaaataatgaaagcctagaaaaaactaatttatacttatctgaaggttacaaattagacttttaaattttctttgtagttggtggtgtttgagggttggctagaaatgaaagcctggattttgtgccatgtttgtaatatagtttgttccttgatcaaataatcagagaaaagaaacttaaagatctttgtctgtgaagaagaaaattatctccctagttcaatctgtagtgaaataagactacagaaggcattgttttttccttttttattttttgtattatatatttttcttaaatatgttttattgtcttctctaagcaaaaagttcttaataaacatagtatttctctctgcgtcctatttcattagtgaagacatagttcacctaaaatggcatcctgctctgaatctagactttttagaaatggcatatgtttttgatgatatgtcaacattcaaaattgtcctaattaaattgttgtttaaatgtaatgtcaactctttataaacttaaaaataaacaagtaattaaccactctaattgttcagaaattttacatttgacttatttgacaacattaacattagtggtggctttgccattaaaaacccagtaagtattttgagtgcatctatgtgatgtggtgttttgagcatagtaggcaccacagcaacttttctgcgtggtactaaaactgccgaaaatgcgacgtagaatcaccagatctttagtgtttaatatccctggtataagatgttataattaatgtaatttctttcttggcaaacacctcatgtctgtcttagtgaagatttaataaaccacttatttttcttat

SEQ ID NO: 138671 - DNA, 652 bp, Homo sapiens
  Payload ID: 7166
  Gene Symbol: GCA
  Gene Name: grancalcin, EF-hand calcium binding protein
  ENST ID: ENST00000453113
  CDS Start-End: 256-652
gcgcctttcagcctcacctgcagctgcgcctccttgcacctgcgcctgtgctttttctcccagcactgcggacgcgactcgagggtgacgctcgctccgctcgtcccgctcgtcatggcctacccgggatacggaggagggaagctgactgccaagctatgaaaaagtggaagagccatgtgaaagggcccatgtggaggagaactggggcccctggccaacaagtttggaaattttagcattcaggtgccaggaatgcagatgggacagccagtgccagaaacaggcccagctatactcctcgatggatactctgggccagcatattcagacacttattcctcagctggtgactccgtgtatacttacttcagtgctgttgctggacaggatggtgaagtggatgctgaagaacttcagagatgtttgacacagtctggaattaatggaacttactctcccttcagtttggaaacctgcagaattatgattgccatgttggatagagatcacacaggaaaaatgggatttaatgcattcaaagagctatgggcagctcttaatgcctggaaggaaaacttcatgactgttgatcaagatggaagtggcacagtagaacatcatgagttgcgtcaagccattggtcttatgg

SEQ ID NO: 138672 - DNA, 655 bp, Homo sapiens
  Payload ID: 7166
  Gene Symbol: GCA
  Gene Name: grancalcin, EF-hand calcium binding protein
  ENST ID: ENST00000414723
  CDS Start-End: 1-440
ccttcagtttggaaacctgcagaattatgattgccatgttggatagagatcacacaggaaaaatgggatttaatgcattcaaagagctatgggcagctcttaatgcctggaaggaaaacttcatgactgttgatcaagatggaagtggcacagtagaacatcatgagttgcgtcaagccattggtcttatgggttataggttgagtcctcaaacattaactactattgttaaacgttatagcaagaatggcagaattttctttgatgattatgttgcttgctgtgtgaagcttcgagcattgacagatttctttaggaaaagagaccacttgcaacaagggtctgcgaatttcatatatgacgattgtggaggaatgaacgtaattaactttgaacatcttgatacagaaagacctgaatctgtgtgcaaaagtgactaagttccctttatccccctggaattcccatgagttgaggatcatctgaatttgagttgcatccatgaacagttttatcccttggtttcttatttgcgtggaaggcattttcataacgaagtactggtttagtaaaagcagtaaataggagtctccatgcaagagaaattggagtttcctaacatgcatgtgatttaaaaaataaaaataaaaaataa

SEQ ID NO: 138673 - DNA, 824 bp, Homo sapiens
  Payload ID: 7166
  Gene Symbol: GCA
  Gene Name: grancalcin, EF-hand calcium binding protein
  ENST ID: ENST00000429691
  CDS Start-End: 223-486
gggagttaccctcggctggtgaatgtaggcaggcctggctgagggtggtgagactgcgagggacaggtgagagatgaagctcagaagacatctttgcagagatgtggagaagacaggaggaagtccttcctaaaataaacctgacctcctgtgggttcccaaacactaacttgtttccctgggaatttggagtttggaaattttagcattcaggtgccaggaatgcagatgggacagccagtgccagaaacaggcccagctatactcctcgatggatactctgggccagcatattcagacacttattcctcagctggtgactccgtgtatacttacttcagtgctgttgctggacaggatggtgaagtggatgctgaagaacttcagagatgtttgacacagtctggaattaatggaacttactctcccttcagtttggaaacctgcagaattatgattgccatgttggatagaaaagaaacttaaagatctttgtctgtgaagaagaaaattatctccctagttcaatctgtagtgaaataagactacagaaggcattgttttttccttttttattttttgtattatatatttttcttaaatatgttttattgtcttctctaagcaaaaagttcttaataaacatagtatttctctctgcgtcctatttcattagtgaagacatagttcacctaaaatggcatcctgctctgaatctagactttttagaaatggcatatgtttttgatgatatgtcaacattcaaaattgtcctaattaaattgttgtttaaatgtaatgtcaactctttataaacttaaaaa

SEQ ID NO: 138674 - DNA, 2342 bp, Homo sapiens
  Payload ID: 7167
  Gene Symbol: GRN
  Gene Name: granulin
  Uniprot ID: P28799
  ENST ID: ENST00000053867
  CDS Start-End: 257-2038
attctccaatcacatgatccctagaaatggggtgtggggcgagaggaagcagggaggagagtgatttgagtagaaaagaaacacagcattccaggctggccccacctctatattgataagtagccaatgggagcgggtagccctgatccctggccaatggaaactgaggtaggcgggtcatcgcgctggggtctgtagtctgagcgctacccggttgctgctgcccaaggaccgcggagtcggacgcaggcagaccatgtggaccctggtgagctgggtggccttaacagcagggctggtggctggaacgcggtgcccagatggtcagttctgccctgtggcctgctgcctggaccccggaggagccagctacagctgctgccgtccccttctggacaaatggcccacaacactgagcaggcatctgggtggcccctgccaggttgatgcccactgctctgccggccactcctgcatctttaccgtctcagggacttccagttgctgccccttcccagaggccgtggcatgcggggatggccatcactgctgcccacggggcttccactgcagtgcagacgggcgatcctgcttccaaagatcaggtaacaactccgtgggtgccatccagtgccctgatagtcagttcgaatgcccggacttctccacgtgctgtgttatggtcgatggctcctgggggtgctgccccatgccccaggcttcctgctgtgaagacagggtgcactgctgtccgcacggtgccttctgcgacctggttcacacccgctgcatcacacccacgggcacccaccccctggcaaagaagctccctgcccagaggactaacagggcagtggccttgtccagctcggtcatgtgtccggacgcacggtcccggtgccctgatggttctacctgctgtgagctgcccagtgggaagtatggctgctgcccaatgcccaacgccacctgctgctccgatcacctgcactgctgcccccaagacactgtgtgtgacctgatccagagtaagtgcctctccaaggagaacgctaccacggacctcctcactaagctgcctgcgcacacagtgggggatgtgaaatgtgacatggaggtgagctgcccagatggctatacctgctgccgtctacagtcgggggcctggggctgctgcccttttacccaggctgtgtgctgtgaggaccacatacactgctgtcccgcggggtttacgtgtgacacgcagaagggtacctgtgaacaggggccccaccaggtgccctggatggagaaggccccagctcacctcagcctgccagacccacaagccttgaagagagatgtcccctgtgataatgtcagcagctgtccctcctccgatacctgctgccaactcacgtctggggagtggggctgctgtccaatcccagaggctgtctgctgctcggaccaccagcactgctgcccccagggctacacgtgtgtagctgaggggcagtgtcagcgaggaagcgagatcgtggctggactggagaagatgcctgcccgccgggcttccttatcccaccccagagacatcggctgtgaccagcacaccagctgcccggtggggcagacctgctgcccgagcctgggtgggagctgggcctgctgccagttgccccatgctgtgtgctgcgaggatcgccagcactgctgcccggctggctacacctgcaacgtgaaggctcgatcctgcgagaaggaagtggtctctgcccagcctgccaccttcctggcccgtagccctcacgtgggtgtgaaggacgtggagtgtggggaaggacacttctgccatgataaccagacctgctgccgagacaaccgacagggctgggcctgctgtccctaccgccagggcgtctgttgtgctgatcggcgccactgctgtcctgctggcttccgctgcgcagccaggggtaccaagtgtttgcgcagggaggccccgcgctgggacgcccctttgagggacccagccttgagacagctgctgtgagggacagtactgaagactctgcagccctcgggaccccactcggagggtgccctctgctcaggcctccctagcacctccccctaaccaaattctccctggaccccattctgagctccccatcaccatgggaggtggggcctcaatctaaggccttccctgtcagaagggggttgtggcaaaagccacattacaagctgccatcccctccccgtttcagtggaccctgtggccaggtgcttttccctatccacaggggtgtttgtgtgtgtgcgcgtgtgcgtttcaataaagtttgtacactttc

SEQ ID NO: 138675 - DNA, 546 bp, Homo sapiens
  Payload ID: 7167
  Gene Symbol: GRN
  Gene Name: granulin
  ENST ID: ENST00000588143
  CDS Start-End: 57-546
agtctgagcgctacccggttgctgctgcccaaggaccgcggagtcggacgcagaccatgtggaccctggtgagctgggtggccttaacagcagggctggtggctggaacgcggtgcccagatggtcagttctgccctgtggcctgctgcctggaccccggaggagccagctacagctgctgccgtccccttctggacaaatggcccacaacactgagcaggcatctgggtggcccctgccaggttgatgcccactgctctgccggccactcctgcatctttaccgtctcagggacttccagttgctgccccttcccagaggccgtggcatgcggggatggccatcactgctgcccacggggcttccactgcagtgcagacgggcgatcctgcttccaaagatcaggtaacaactccgtgggtgccatccagtgccctgatagtcagttcgaatgcccggacttctccacgtgctgtgttatggtcgatggctcctgggggtgctgccccatgccccaggcttcctgctgtgaagacagggtgcact

SEQ ID NO: 138676 - DNA, 526 bp, Homo sapiens
  Payload ID: 7167
  Gene Symbol: GRN
  Gene Name: granulin
  ENST ID: ENST00000587518
  CDS Start-End: 118-526
atcgcgctggggtctgtagtctgagcgctacccggttgctgctgcccaaggaccgcggagtcggacgcagcagggaccacaccattcttgacccagctccacccctgtcggcagaccatgtggaccctggtgagctgggtggccttaacagcagggctggtggctggaacgcggtgcccagatggtcagttctgccctgtggcctgctgcctggaccccggaggagccagctacagctgctgccgtccccttctggacaaatggcccacaacactgagcaggcatctgggtggcccctgccaggttgatgcccactgctctgccggccactcctgcatctttaccgtctcagggacttccagttgctgccccttcccagaggccgtggcatgcggggatggccatcactgctgcccacggggcttccactgcagtgcagacgggcgatcctgcttccaaagatcaggtaacaactccgtgggtgccatccagtgccctgatagtcagttcgaatgcccggacttct

SEQ ID NO: 138677 - DNA, 1557 bp, Homo sapiens
  Payload ID: 7167
  Gene Symbol: GRN
  Gene Name: granulin
  ENST ID: ENST00000586443
  CDS Start-End: 1-1166
tggcaaagaagctccctgcccagaggactaacagggcagtggccttgtccagctcggtcatgtgtccggacgcacggtcccggtgccctgatggttctacctgctgtgagctgcccagtgggaagtatggctgctgcccaatgcccaacgccacctgctgctccgatcacctgcactgctgcccccaagacactgtgtgtgacctgatccagagtaagtgcctctccaaggagaacgctaccacggacctcctcactaagctgcctgcgcacacagtgggggatgtgaaatgtgacatggaggtgagctgcccagatggctatacctgctgccgtctacagtcgggggcctggggctgctgcccttttacccaggctgtgtgctgtgaggaccacatacactgctgtcccgcggggtttacgtgtgacacgcagaagggtacctgtgaacaggggccccaccaggtgccctggatggagaaggccccagctcacctcagcctgccagacccacaagccttgaagagagatgtcccctgtgataatgtcagcagctgtccctcctccgatacctgctgccaactcacgtctggggagtggggctgctgtccaatcccagaggctgtctgctgctcggaccaccagcactgctgcccccagggctacacgtgtgtagctgaggggcagtgtcagcgaggaagcgagatcgtggctggactggagaagatgcctgcccgccgggcttccttatcccaccccagagacatcggctgtgaccagcacaccagctgcccggtggggcagacctgctgcccgagcctgggtgggagctgggcctgctgccagttgccccatgctgtgtgctgcgaggatcgccagcactgctgcccggctggctacacctgcaacgtgaaggctcgatcctgcgagaaggaagtggtctctgcccagcctgccaccttcctggcccgtagccctcacgtgggtgtgaaggacgtggagtgtggggaaggacacttctgccatgataaccagacctgctgccgagacaaccgacagggctgggcctgctgtccctaccgccaggtcagtgccaacccccatcctggggctgggtatggccagggaccaggtcccacctcgtccaaccctctcgcccccctctgaccatccagggcgtctgttgtgctgatcggcgccactgctgtcctgctggcttccgctgcgcagccaggggtaccaagtgtttgcgcagggaggccccgcgctgggacgcccctttgagggacccagccttgagacagctgctgtgagggacagtactgaagactctgcagccctcgggaccccactcggagggtgccctctgctcaggcctccctagcacctccccctaaccaaattctccctggaccccattctgagctccccatcaccatgggaggtggggcctcaatctaaggccttccctgtcagaagggggttgtggcaaaagccacattacaagctgccatcccctccccgtttcagtggaccctgtggccaggtgcttttccct

SEQ ID NO: 138678 - DNA, 535 bp, Homo sapiens
  Payload ID: 7167
  Gene Symbol: GRN
  Gene Name: granulin
  ENST ID: ENST00000587109
  CDS Start-End: 349-535
atcgcgctggggtctgtagtctgagcgctacccggttgctgctgcccaaggaccgcggagtcggacgcaggtaggagagcggccgcgcagacctctcgcctgctcctgcccaggggcccgccagggccatgtgagcttgaggttcccctggagtctcagccggagacaacagaagaaccgcttactgaaactccttgggggttctgatacactagggggagttttatgggaaagaggaagcagtaattgcagtgacgccccgttagaaggggctttctacctccccagcattcccccaaagcagggaccacaccattcttgacccagctccacccctgtcggcagaccatgtggaccctggtgagctgggtggccttaacagcagggctggtggctggaacgcggtgcccagatggtcagttctgccctgtggcctgctgcctggaccccggaggagccagctacagctgctgccgtccccttctggacaaatggcccacaacactgagcaggcatctgggtggcccctgccagg

SEQ ID NO: 138679 - DNA, 763 bp, Homo sapiens
  Payload ID: 7167
  Gene Symbol: GRN
  Gene Name: granulin
  ENST ID: ENST00000593167
  CDS Start-End: 317-763
ggttgctgctgcccaaggaccgcggagtcggacgcaggtgctggcttcttcccctctcctggtggtggtgggtggttcccgcggcggcctggagccggaggggcgcgcgaccctgggctgggagctccgagggcctgggaacgagacctgagaccttggcttctcgaagggtaaacaggaggggccacatgcacaggtaattcaccagggagccgaacactcctgtgcagacagactccccttcccagcaagccatggcagcggacagcctgctgagaacacccaggaagcaggcggtgccagctgcaggcagaccatgtggaccctggtgagctgggtggccttaacagcagggctggtggctggaacgcggtgcccagatggtcagttctgccctgtggcctgctgcctggaccccggaggagccagctacagctgctgccgtccccttctggacaaatggcccacaacactgagcaggcatctgggtggcccctgccaggttgatgcccactgctctgccggccactcctgcatctttaccgtctcagggacttccagttgctgccccttcccagaggccgtggcatgcggggatggccatcactgctgcccacggggcttccactgcagtgcagacgggcgatcctgcttccaaagatcaggtaacaactccgtgggtgccatccagtgccctgatagtcagttcgaatgcccggacttctccacgtgctgtgttatggtcgatggctcctgggggtgc

SEQ ID NO: 138680 - DNA, 558 bp, Homo sapiens
  Payload ID: 7167
  Gene Symbol: GRN
  Gene Name: granulin
  ENST ID: ENST00000588237
  CDS Start-End: 41-558
gctgctgcccaaggaccgcggagtcggacgcaggcagaccatgtggaccctggtgagctgggtggccttaacagcagggctggtggctggaacgcggtgcccagatggtcagttctgccctgtggcctgctgcctggaccccggaggagccagctacagctgctgccgtccccttctggacaaatggcccacaacactgagcaggcatctgggtggcccctgccaggttgatgcccactgctctgccggccactcctgcatctttaccgtctcagggacttccagttgctgccccttcccagaggcttcctgctgtgaagacagggtgcactgctgtccgcacggtgccttctgcgacctggttcacacccgctgcatcacacccacgggcacccaccccctggcaaagaagctccctgcccagaggactaacagggcagtggccttgtccagctcggtcatgtgtccggacgcacggtcccggtgccctgatggttctacctgctgtgagctgcccagtgggaagtatggctgctgcccaatgcccaacgccacctg

SEQ ID NO: 138681 - DNA, 546 bp, Homo sapiens
  Payload ID: 7167
  Gene Symbol: GRN
  Gene Name: granulin
  ENST ID: ENST00000589536
  CDS Start-End: 213-546
gtcatcgcgctggggtctgtagtctgagcgctacccggttgctgctgcccaaggaccgcggagtcggacgcaggtgctggcttcttcccctctcctggtggtggtgggtggttcccgcggcggcctggagccggaggggcgcgcgaccctgggctgggagctccgagggcctgggaacgagacctgagaccttggcttctcgaaggcagaccatgtggaccctggtgagctgggtggccttaacagcagggctggtggctggaacgcggtgcccagatggtcagttctgccctgtggcctgctgcctggaccccggaggagccagctacagctgctgccgtccccttctggacaaatggcccacaacactgagcaggcatctgggtggcccctgccaggttgatgcccactgctctgccggccactcctgcatctttaccgtctcagggacttccagttgctgccccttcccagaggccgtggcatgcggggatggccatcactgctgcccacggggcttccactgcagtgcagacgggcgatcct

SEQ ID NO: 138682 - DNA, 585 bp, Homo sapiens
  Payload ID: 7167
  Gene Symbol: GRN
  Gene Name: granulin
  ENST ID: ENST00000591740
  CDS Start-End: 181-585
gctgctgcccaaggaccgcggagtcggacgcagggtaaacaggaggggccacatgcacaggtaattcaccagggagccgaacactcctgtgcagacagactccccttcccagcaagccatggcagcggacagcctgctgagaacacccaggaagcaggcggtgccagctgcaggcagaccatgtggaccctggtgagctgggtggccttaacagcagggctggtggctggaacgcggtgcccagatggtcagttctgccctgtggcctgctgcctggaccccggaggagccagctacagctgctgccgtccccttctggacaaatggcccacaacactgagcaggcatctgggtggcccctgccaggttgatgcccactgctctgccggccactcctgcatctttaccgtctcagggacttccagttgctgccccttcccagaggccgtggcatgcggggatggccatcactgctgcccacggggcttccactgcagtgcagacgggcgatcctgcttccaaagatcaggtaacaactccgtgggtgccatccagtgccctgatagtcagttcgaatgcccggac

SEQ ID NO: 138683 - DNA, 614 bp, Homo sapiens
  Payload ID: 7167
  Gene Symbol: GRN
  Gene Name: granulin
  ENST ID: ENST00000587387
  CDS Start-End: 41-614
gctgctgcccaaggaccgcggagtcggacgcaggcagaccatgtggaccctggtgagctgggtggccttaacagcagggctggtggctggaacgcggtgcccagatggtcagttctgccctgtggcctgctgcctggaccccggaggagccagctacagctgctgccgtccccttctggacaaatggcccacaacactgagcaggcatctgggtggcccctgccaggttgatgcccactgctctgccggccactcctgcatctttaccgtctcagggacttccagttgctgccccttcccagagataaaagggccctgccaatgcaggtttctctgtgttccacaggccgtggcatgcggggatggccatcactgctgcccacggggcttccactgcagtgcagacgggcgatcctgcttccaaagatcaggtaacaactccgtgggtgccatccagtgccctgatagtcagttcgaatgcccggacttctccacgtgctgtgttatggtcgatggctcctgggggtgctgccccatgccccaggcttcctgctgtgaagacagggtgcactgctgtccgcacggtgccttctgcgacctggttcacacccgct

SEQ ID NO: 138684 - DNA, 1632 bp, Homo sapiens
  Payload ID: 7167
  Gene Symbol: GRN
  Gene Name: granulin
  ENST ID: ENST00000589265
  CDS Start-End: 38-1348
gctgcccaaggaccgcggagtcggacgcaggcagaccatgtggaccctggtgagctgggtggccttaacagcagggctggtggctggaacgcggtgcccagatggtcagttctgccctgtggcctgctgcctggaccccggaggagccagctacagctgctgccgtccccttctggacaaatggcccacaacactgagcaggcatctgggtggcccctgccaggttgatgcccactgctctgccggccactcctgcatctttaccgtctcagggacttccagttgctgccccttcccagaggccgtggcatgcggggatggccatcactgctgcccacggggcttccactgcagtgcagacgggcgatcctgcttccaaagatcaggtaacaactccgtgggtgccatccagtgccctgatagtcagttcgaatgcccggacttctccacgtgctgtgttatggtcgatggctcctgggggtgctgccccatgccccaggctgtgtgctgtgaggaccacatacactgctgtcccgcggggtttacgtgtgacacgcagaagggtacctgtgaacaggggccccaccaggtgccctggatggagaaggccccagctcacctcagcctgccagacccacaagccttgaagagagatgtcccctgtgataatgtcagcagctgtccctcctccgatacctgctgccaactcacgtctggggagtggggctgctgtccaatcccagaggctgtctgctgctcggaccaccagcactgctgcccccagggctacacgtgtgtagctgaggggcagtgtcagcgaggaagcgagatcgtggctggactggagaagatgcctgcccgccgggcttccttatcccaccccagagacatcggctgtgaccagcacaccagctgcccggtggggcagacctgctgcccgagcctgggtgggagctgggcctgctgccagttgccccatgctgtgtgctgcgaggatcgccagcactgctgcccggctggctacacctgcaacgtgaaggctcgatcctgcgagaaggaagtggtctctgcccagcctgccaccttcctggcccgtagccctcacgtgggtgtgaaggacgtggagtgtggggaaggacacttctgccatgataaccagacctgctgccgagacaaccgacagggctgggcctgctgtccctaccgccagggcgtctgttgtgctgatcggcgccactgctgtcctgctggcttccgctgcgcagccaggggtaccaagtgtttgcgcagggaggccccgcgctgggacgcccctttgagggacccagccttgagacagctgctgtgagggacagtactgaagactctgcagccctcgggaccccactcggagggtgccctctgctcaggcctccctagcacctccccctaaccaaattctccctggaccccattctgagctccccatcaccatgggaggtggggcctcaatctaaggccttccctgtcagaagggggttgtggcaaaagccacattacaagctgccatcccctccccgtttcagtggaccctgtggccaggtgcttttccctatccacaggggtgtttgtgtgtgtgcgcgtgtgcgtttc

SEQ ID NO: 138685 - DNA, 562 bp, Homo sapiens
  Payload ID: 7167
  Gene Symbol: GRN
  Gene Name: granulin
  ENST ID: ENST00000585512
  CDS Start-End: 452-562
gctgctgcccaaggaccgcggagtcggacgcaggtaggagagcggccgcgcagacctctcgcctgctcctgcccaggggcccgccagggccatgtgagcttgaggttcccctggagtctcagccggagacaacagaagaaccgcttactgaaactccttgggggttctgatacactagggggagttttatgggaaagaggaagcagtaattgcagtgacgccccgttagaaggggctttctacctccccagcattcccccaaagcagggaccacaccattcttgacccagctccacccctgtcgggtaaacaggaggggccacatgcacaggtaattcaccagggagccgaacactcctgtgcagacagactccccttcccagcaagccatggcagcggacagcctgctgagaacacccaggaagcaggcggtgccagctgcaggcagaccatgtggaccctggtgagctgggtggccttaacagcagggctggtggctggaacgcggtgcccagatggtcagttctgccctgtggcctgctgcctggaccccggaggagcc

SEQ ID NO: 138686 - DNA, 665 bp, Homo sapiens
  Payload ID: 7167
  Gene Symbol: GRN
  Gene Name: granulin
  ENST ID: ENST00000586242
  CDS Start-End: 1-332
gctgcccgagcctgggtgggagctgggcctgctgccagttgccccatgctgtgtgctgcgaggatcgccagcactgctgcccggctggctacacctgcaacgtgaaggctcgatcctgcgagaaggaagtggtctctgcccagcctgccaccttcctggcccgtagccctcacgtgggtgtgaaggacgtggagtgtggggaaggacacttctgccatgataaccagacctgctgccgagacaaccgacagggctgggcctgctgtccctaccgccagccaggggtaccaagtgtttgcgcagggaggccccgcgctgggacgcccctttgagggacccagccttgagacagctgctgtgagggacagtactgaagactctgcagccctcgggaccccactcggagggtgccctctgctcaggcctccctagcacctccccctaaccaaattctccctggaccccattctgagctccccatcaccatgggaggtggggcctcaatctaaggccttccctgtcagaagggggttgtggcaaaagccacattacaagctgccatcccctccccgtttcagtggaccctgtggccaggtgcttttccctatccacaggggtgtttgtgtgtgtgcgcgtgtgcgtttcaataaagtttgtacactttc

SEQ ID NO: 138687 - DNA, 541 bp, Homo sapiens
  Payload ID: 7167
  Gene Symbol: GRN
  Gene Name: granulin
  ENST ID: ENST00000592783
  CDS Start-End: 116-541
gctgctgcccaaggaccgcggagtcggacgcagaaggggctttctacctccccagcattcccccaaagcagggaccacaccattcttgacccagctccacccctgtcggcagaccatgtggaccctggtgagctgggtggccttaacagcagggctggtggctggaacgcggtgcccagatggtcagttctgccctgtggcctgctgcctggaccccggaggagccagctacagctgctgccgtccccttctggacaaatggcccacaacactgagcaggcatctgggtggcccctgccaggttgatgcccactgctctgccggccactcctgcatctttaccgtctcagggacttccagttgctgccccttcccagaggccgtggcatgcggggatggccatcactgctgcccacggggcttccactgcagtgcagacgggcgatcctgcttccaaagatcaggtaacaactccgtgggtgccatccagtgccctgatagtcagttcgaatgcccggacttctccacgtgctgtgttatg

SEQ ID NO: 138688 - DNA, 843 bp, Homo sapiens
  Payload ID: 7167
  Gene Symbol: GRN
  Gene Name: granulin
  ENST ID: ENST00000586782
  CDS Start-End: 29-598
ggaccgcggagtcggacgcaggcagaccatgtggaccctggtgagctgggtggccttaacagcagggctggtggctggaacgcggtgcccagatggtcagttctgccctgtggcctgctgcctggaccccggaggagccagctacagctgctgccgtccccttctggacaaatggcccacaacactgagcaggcatctgggtggcccctgccaggttgatgcccactgctctgccggccactcctgcatctttaccgtctcagggacttccagttgctgccccttcccagaggccgtggcatgcggggatggccatcactgctgcccacggggcttccactgcagtgcagacgggcgatcctgcttccaaagatcaggtaacaactccgtgggtgccatccagtgccctgatagtcagttcgaatgcccggacttctccacgtgctgtgttatggtcgatggctcctgggggtgctgccccatgccccagggtgcactgctgtccgcacggtgccttctgcgacctggttcacacccgctgcatcacacccacgggcacccaccccctggcaaagaagctccctgcccagaggactaacagggcagtggccttgtccagctcggtcatgtgtccggacgcacggtcccggtgccctgatggttctacctgctgtgagctgcccagtgggaagtatggctgctgcccaatgcccaacgccacctgctgctccgatcacctgcactgctgcccccaagacactgtgtgtgacctgatccagagtaagtgcctctccaaggagaacgctaccacggacctcctcactaagctgcctgcgcacacag

SEQ ID NO: 138689 - DNA, 846 bp, Homo sapiens
  Payload ID: 7168
  Gene Symbol: GNLY
  Gene Name: granulysin
  Uniprot ID: P22749
  ENST ID: ENST00000263863
  CDS Start-End: 129-566
gtatctgtggtaaacccagtgacacgggggagatgacatacaaaaagggcaggacctgagaaagattaagctgcaggctccctgcccataaaacagggtgtgaaaggcatctcagcggctgccccaccatggctacctgggccctcctgctccttgcagccatgctcctgggcaacccaggtctggtcttctctcgtctgagccctgagtactacgacctggcaagagcccacctgcgtgatgaggagaaatcctgcccgtgcctggcccaggagggcccccagggtgacctgttgaccaaaacacaggagctgggccgtgactacaggacctgtctgacgatagtccaaaaactgaagaagatggtggataagcccacccagagaagtgtttccaatgctgcgacccgggtgtgtaggacggggaggtcacgatggcgcgacgtctgcagaaatttcatgaggaggtatcagtctagagttacccagggcctcgtggccggagaaactgcccagcagatctgtgaggacctcaggttgtgtataccttctacaggtcccctctgagccctctcaccttgtcctgtggaagaagcacaggctcctgtcctcagatcccgggaacctcagcaacctctgccggctcctcgcttcctcgatccagaatccactctccagtctccctcccctgactccctctgctgtcctcccctctcacgagaataaagtgtcaagcaagattttagccgcagctgcttcttctttggtggatttgaggggtgggtgtcagtggcatgctggggtgagctgtgtagtccttcaataaatgtctgtcgtgtgtcccata

SEQ ID NO: 138690 - DNA, 858 bp, Homo sapiens
  Payload ID: 7168
  Gene Symbol: GNLY
  Gene Name: granulysin
  Uniprot ID: P22749
  ENST ID: ENST00000409696
  CDS Start-End: 283-675
cctgggccctcctgctccttgcagccatgctcctgggcaacccagcccctgcctccgcatctgcgtggtgaaggccattggccctcatcggtggatctgcgtttcctcgggcctacactgtctaggattgtgcggggctggtgagagaacaagatctcttctgtgttcaaggcagacttcctgccccctgcaccctgctctctcccaggccttgaggtcagtgtgagccccaagggcaagaacacttctggaagggagagtggatttggctgggccatctggatggaaggtctggtcttctctcgtctgagccctgagtactacgacctggcaagagcccacctgcgtgatgaggagaaatcctgcccgtgcctggcccaggagggcccccagggtgacctgttgaccaaaacacaggagctgggccgtgactacaggacctgtctgacgatagtccaaaaactgaagaagatggtggataagcccacccagagaagtgtttccaatgctgcgacccgggtgtgtaggacggggaggtcacgatggcgcgacgtctgcagaaatttcatgaggaggtatcagtctagagttacccagggcctcgtggccggagaaactgcccagcagatctgtgaggacctcaggttgtgtataccttctacaggtcccctctgagccctctcaccttgtcctgtggaagaagcacaggctcctgtcctcagatcccgggaacctcagcaacctctgccggctcctcgcttcctcgatccagaatccactctccagtctccctcccctgactccctctgctgtcctcccctctcacgagaataaagtgtcaagcaagattttagccgc

SEQ ID NO: 138691 - DNA, 561 bp, Homo sapiens
  Payload ID: 7168
  Gene Symbol: GNLY
  Gene Name: granulysin
  ENST ID: ENST00000526018
  CDS Start-End: 1-561
cccacctgcgtgatgaggagaaatcctgcccgtgcctggcccaggagggcccccagggtgacctgttgaccaaaacacaggagctgggccgtgactacaggacctgtctgacgatagtccaaaaactgaagaagatggtggataagcccacccagagaagtgtttccaatgctgcgacccgggtgtgtaggacggggaggtcacgatggcgcgacgtctgcagaaatttcatgaggaggtatcagtctagagttacccagggcctcgtggccggagaaactgcccagcagatctgtgaggacctcaggttgtgtataccttctacaggccccacaacctgctcaggctgccgactggcttccaggatgtgcctctgggtcccctctgagccctctcaccttgtcctgtggaagaagcacaggctcctgtcctcagatcccgggaacctcagcaacctctgccggctcctcgcttcctcgatccagaatccactctccagtctccctcccctgactccctctgctgtcctcccctctcacgagaataaagtgtcaagcaaga

SEQ ID NO: 138692 - DNA, 750 bp, Homo sapiens
  Payload ID: 7168
  Gene Symbol: GNLY
  Gene Name: granulysin
  ENST ID: ENST00000524600
  CDS Start-End: 62-580
aagctgcaggctccctgcccataaaacagggtgtgaaaggcatctcagcggctgccccaccatggctacctgggccctcctgctccttgcagccatgctcctgggcaacccaggccttgaggtcagtgtgagccccaagggcaagaacacttctggaagggagagtggatttggctgggccatctggatggaaggtctggtcttctctcgtctgagccctgagtactacgacctggcaagagcccacctgcgtgatgaggagaaatcctgcccgtgcctggcccaggagggcccccagggtgacctgttgaccaaaacacaggagctgggccgtgactacaggacctgtctgacgatagtccaaaaactgaagaagatggtggataagcccacccagagaagtgtttccaatgctgcgacccgggtgtgtaggacggggaggtcacgatggcgcgacgtctgcagaaatttcatgaggaggtatcagtctagagttacccagggcctcgtggccggagaaactgcccagcagatctgtgaggacctcaggttgtgtataccttctacaggtcccctctgagccctctcaccttgtcctgtggaagaagcacaggctcctgtcctcagatcccgggaacctcagcaacctctgccggctcctcgcttcctcgatccagaatccactctccagtctccctcccctgactccctctgctgtcctcccctctcacgagaataaagtgtcaagca

SEQ ID NO: 138693 - DNA, 894 bp, Homo sapiens
  Payload ID: 7169
  Gene Symbol: GZMA
  Gene Name: granzyme A (granzyme 1, cytotoxic T-lymphocyte-associated serine esterase 3)
  Uniprot ID: P12544
  ENST ID: ENST00000274306
  CDS Start-End: 36-824
attttcaggttgattgatgtgggacagcagccacaatgaggaactcctatagatttctggcatcctctctctcagttgtcgtttctctcctgctaattcctgaagatgtctgtgaaaaaattattggaggaaatgaagtaactcctcattcaagaccctacatggtcctacttagtcttgacagaaaaaccatctgtgctggggctttgattgcaaaagactgggtgttgactgcagctcactgtaacttgaacaaaaggtcccaggtcattcttggggctcactcaataaccagggaagagccaacaaaacagataatgcttgttaagaaagagtttccctatccatgctatgacccagccacacgcgaaggtgaccttaaacttttacagctgatggaaaaagcaaaaattaacaaatatgtgactatccttcatctacctaaaaagggggacgatgtgaaaccaggaaccatgtgccaagttgcagggtggggcaggactcacaatagtgcatcttggtccgatactctgagagaagtcaatatcaccatcatagacagaaaagtctgcaatgatcgaaatcactataattttaaccctgtgattggaatgaatatggtttgtgctggaagcctccgaggtggaagagactcgtgcaatggagattctggaagccctttgttgtgcgagggtgttttccgaggggtcacttcctttggccttgaaaataaatgcggagaccctcgtgggcctggtgtctatattcttctctcaaagaaacacctcaactggataattatgactatcaagggagcagtttaaataaccgtttcctttcatttactgtggcttcttaatcttttcacaaataaaatcaatttgcatgactgta

SEQ ID NO: 138694 - DNA, 968 bp, Homo sapiens
  Payload ID: 7170
  Gene Symbol: GZMB
  Gene Name: granzyme B (granzyme 2, cytotoxic T-lymphocyte-associated serine esterase 1)
  Uniprot ID: P10144
  ENST ID: ENST00000216341
  CDS Start-End: 108-851
ggaacatgaagtcactgagcctgctccacctctttcctctcccaagagctaaaagagagcaaggaggaaacaacagcagctccaaccagggcagccttcctgagaagatgcaaccaatcctgcttctgctggccttcctcctgctgcccagggcagatgcaggggagatcatcgggggacatgaggccaagccccactcccgcccctacatggcttatcttatgatctgggatcagaagtctctgaagaggtgcggtggcttcctgatacgagacgacttcgtgctgacagctgctcactgttggggaagctccataaatgtcaccttgggggcccacaatatcaaagaacaggagccgacccagcagtttatccctgtgaaaagacccatcccccatccagcctataatcctaagaacttctccaacgacatcatgctactgcagctggagagaaaggccaagcggaccagagctgtgcagcccctcaggctacctagcaacaaggcccaggtgaagccagggcagacatgcagtgtggccggctgggggcagacggcccccctgggaaaacactcacacacactacaagaggtgaagatgacagtgcaggaagatcgaaagtgcgaatctgacttacgccattattacgacagtaccattgagttgtgcgtgggggacccagagattaaaaagacttcctttaagggggactctggaggccctcttgtgtgtaacaaggtggcccagggcattgtctcctatggacgaaacaatggcatgcctccacgagcctgcaccaaagtctcaagctttgtacactggataaagaaaaccatgaaacgctactaactacaggaagcaaactaagcccccgctgtaatgaaacaccttctctggagccaagtccagatttacactgggagaggtgccagcaactgaataaatacctcttagctgagtggaaaa

SEQ ID NO: 138695 - DNA, 816 bp, Homo sapiens
  Payload ID: 7170
  Gene Symbol: GZMB
  Gene Name: granzyme B (granzyme 2, cytotoxic T-lymphocyte-associated serine esterase 1)
  ENST ID: ENST00000382540
  CDS Start-End: 108-716
ggaacatgaagtcactgagcctgctccacctctttcctctcccaagagctaaaagagagcaaggaggaaacaacagcagctccaaccagggcagccttcctgagaagatgcaaccaatcctgcttctgctggccttcctcctgctgcccagggcagatgcaggggagatcatcgggggacatgaggccaagccccactcccgcccctacatggcttatcttatgatctgggatcagaagtctctgaagaggtgcggtggcttcctgatacgagacgacttcgtgctgacagctgctcactgttggggaagactggagagaaaggccaagcggaccagagctgtgcagcccctcaggctacctagcaacaaggcccaggtgaagccagggcagacatgcagtgtggccggctgggggcagacggcccccctgggaaaacactcacacacactacaagaggtgaagatgacagtgcaggaagatcgaaagtgcgaatctgacttacgccattattacgacagtaccattgagttgtgcgtgggggacccagagattaaaaagacttcctttaagggggactctggaggccctcttgtgtgtaacaaggtggcccagggcattgtctcctatggacgaaacaatggcatgcctccacgagcctgcaccaaagtctcaagctttgtacactggataaagaaaaccatgaaacgctactaactacaggaagcaaactaagcccccgctgtaatgaaacaccttctctggagccaagtccagatttacactgggagaggtgccagcaactgaataaatacct

SEQ ID NO: 138696 - DNA, 666 bp, Homo sapiens
  Payload ID: 7170
  Gene Symbol: GZMB
  Gene Name: granzyme B (granzyme 2, cytotoxic T-lymphocyte-associated serine esterase 1)
  ENST ID: ENST00000382542
  CDS Start-End: 1-609
atgcaaccaatcctgcttctgctggccttcctcctgctgcccagggcagatgcaggggagatcatcgggggacatgaggccaagccccactcccgcccctacatggcttatcttatgatctgggatcagaagtctctgaagaggtgcggtggcttcctgatacgagacgacttcgtgctgacagctgctcactgttggggaaggctggagagaaaggccaagcggaccagagctgtgcagcccctcaggctacctagcaacaaggcccaggtgaagccagggcagacatgcagtgtggccggctgggggcagacggcccccctgggaaaacactcacacacactacaagaggtgaagatgacagtgcaggaagatcgaaagtgcgaatctgacttacgccattattacgacagtaccattgagttgtgcgtgggggacccagagattaaaaagacttcctttaagggggactctggaggccctcttgtgtgtaacaaggtggcccagggcattgtctcctatggacgaaacaatggcatgcctccacgagcctgcaccaaagtctcaagctttgtacactggataaagaaaaccatgaaacgctactaactacaggaagcaaactaagcccccgctgtaatgaaacaccttctctggagccaagtc

SEQ ID NO: 138697 - DNA, 923 bp, Homo sapiens
  Payload ID: 7170
  Gene Symbol: GZMB
  Gene Name: granzyme B (granzyme 2, cytotoxic T-lymphocyte-associated serine esterase 1)
  ENST ID: ENST00000415355
  CDS Start-End: 99-806
gcaaggaggaaacaacagcagctccaaccagggcagccttcctgagaagatgcaaccaatcctgcttctgctggccttcctcctgctgcccagggcagatgcagacttttccttcaggggagatcatcgggggacatgaggccaagccccactcccgcccctacatggcttatcttatgatctgggatcagaagtctctgaagaggtgcggtggcttcctgatacgagacgacttcgtgctgacagctgctcactgttggggaagctccataaatgtcaccttgggggcccacaatatcaaagaacaggagccgacccagcagtttatccctgtgaaaagacccatcccccatccagcctataatcctaagaacttctccaacgacatcatgctactgcagctggagagaaaggccaagcggaccagagctgtgcagcccctcaggctacctagcaacaaggcccaggtgaagccagggcagacatgcagtgtggccggctgggggcagacggcccccctgggaaaacactcacacacactacaagaggtgaagatgacagtgcaggaagatcgaaagtgcgaatctgacttacgccattattacgacagtaccattgagttgtgcgtgggggacccagagattaaaaagacttcctttaagggggactctggaggccctcttgtgtgtaacaaggtggcccagggcattgtctcctatggacgaaacaatggcatgcctccacgagcctgcaccaaagtctcaagctttgtacactggataaagaaaaccatgaaacgctactaactacaggaagcaaactaagcccccgctgtaatgaaacaccttctctggagccaagtccagatttacactgggagaggtgccagcaactgaataaatacctcttagctgagtggaaaa

SEQ ID NO: 138698 - DNA, 517 bp, Homo sapiens
  Payload ID: 7170
  Gene Symbol: GZMB
  Gene Name: granzyme B (granzyme 2, cytotoxic T-lymphocyte-associated serine esterase 1)
  ENST ID: ENST00000532263
  CDS Start-End: 1-108
atgcaaccaatcctgcttctgctggccttcctcctgctgcccagggcagatgcagctggagagaaaggccaagcggaccagagctgtgcagcccctcaggctacctagcaacaaggcccaggtgaagccagggcagacatgcagtgtggccggctgggggcagacggcccccctgggaaaacactcacacacactacaagaggtgaagatgacagtgcaggaagatcgaaagtgcgaatctgacttacgccattattacgacagtaccattgagttgtgcgtgggggacccagagattaaaaagacttcctttaagggggactctggaggccctcttgtgtgtaacaaggtggcccagggcattgtctcctatggacgaaacaatggcatgcctccacgagcctgcaccaaagtctcaagctttgtacactggataaagaaaaccatgaaacgctactaactacaggaagcaaactaagcccccgctgtaatgaaacaccttctctggagccaagtc

SEQ ID NO: 138699 - DNA, 819 bp, Homo sapiens
  Payload ID: 7170
  Gene Symbol: GZMB
  Gene Name: granzyme B (granzyme 2, cytotoxic T-lymphocyte-associated serine esterase 1)
  ENST ID: ENST00000526004
  CDS Start-End: 37-309
aacagcagctccaaccagggcagccttcctgagaagatgcaaccaatcctgcttctgctggccttcctcctgctgcccagggcagatgcaggggagatcatcgggggacatgaggccaagccccactcccgcccctacatggcttatcttatgatctgggatcagaagtctctgaagaggtgcggtggcttcctgatacgagacgacttcgtgctgacagctgctcactgttggggaagctggagagaaaggccaagcggaccagagctgtgcagcccctcaggctacctagcaacaaggcccaggtgaagccagggcagacatgcagtgtggccggctgggggcagacggcccccctgggaaaacactcacacacactacaagaggtgaagatgacagtgcaggaagatcgaaagtgcgaatctgacttacgccattattacgacagtaccattgagttgtgcgtgggggacccagagattaaaaagacttcctttaaggtaagactatgcacctgcctggattggctcttgggagaaagatgtttggggaatatctgagacctggagactcaagtagtgggggactccttcacccactagactgtgatatttctctctggaaagagaagaggggactagactgagctggggagaaattagggcctctgcaaacttaccaggaggcttatggtggatggtgcttctttggaaggatgaatttgcaacactccacccactccaggtcacagatattaggaaactgtgcccactgggggtgcagtaattataaccaggtgtgtcttcagaggctggtacc

SEQ ID NO: 138700 - DNA, 772 bp, Homo sapiens
  Payload ID: 7170
  Gene Symbol: GZMB
  Gene Name: granzyme B (granzyme 2, cytotoxic T-lymphocyte-associated serine esterase 1)
  ENST ID: ENST00000530830
  CDS Start-End: 64-198
gccttcctgagaagatgcaaccaatcctgcttctgctggccttcctcctgctgcccagggcagatgcaggaatgttctgaactccagctcccattctaccaagaccccccaagtgtgatgctggataagctatcagcaggaatggcagagcagcaggccattctcaagaagagccagggagatcatcgggggacatgaggccaagccccactcccgcccctacatggcttatcttatgatctgggatcagaagtctctgaagaggtgcggtggcttcctgatacgagacgacttcgtgctgacagctgctcactgttggggaagctccataaatgtcaccttgggggcccacaatatcaaagaacaggagccgacccagcagtttatccctgtgaaaagacccatcccccatccagcctataatcctaagaacttctccaacgacatcatgctactgcagctggagagaaaggccaagcggaccagagctgtgcagcccctcaggctacctagcaacaaggcccaggtgaagccagggcagacatgcagtgtggccggctgggggcagacggcccccctgggaaaacactcacacacactacaagaggtgaagatgacagtgcaggaagatcgaaagtgcgaatctgacttacgccattattacgacagtaccattgagttgtgcgtgggggacccagagattaaaaagacttcctttaagggggactctggaggccctcttgtgtgtaacaaggtggcccagggcattgtc

SEQ ID NO: 138701 - DNA, 665 bp, Homo sapiens
  Payload ID: 7170
  Gene Symbol: GZMB
  Gene Name: granzyme B (granzyme 2, cytotoxic T-lymphocyte-associated serine esterase 1)
  ENST ID: ENST00000554242
  CDS Start-End: 1-273
atgcaaccaatcctgcttctgctggccttcctcctgctgcccagggcagatgcaggggagatcatcgggggacatgaggccaagccccactcccgcccctacatggcttatcttatgatctgggatcagaagtctctgaagaggtgcggtggcttcctgatacgagacgacttcgtgctgacagctgctcactgttggggaagctggagagaaaggccaagcggaccagagctgtgcagcccctcaggctacctagcaacaaggcccaggtgaagccagggcagacatgcagtgtggccggctgggggcagacggcccccctgggaaaacactcacacacactacaagaggtgaagatgacagtgcaggaagatcgaaagtgcgaatctgacttacgccattattacgacagtaccattgagttgtgcgtgggggacccagagattaaaaagacttcctttaagggggactctggaggccctcttgtgtgtaacaaggtggcccagggcattgtctcctatggacgaaacaatggcatgcctccacgagcctgcaccaaagtctcaagctttgtacactggataaagaaaaccatgaaacgctactaactacaggaagcaaactaagcccccgctgtaatgaaacaccttctctggagccaagtc

SEQ ID NO: 138702 - DNA, 559 bp, Homo sapiens
  Payload ID: 7170
  Gene Symbol: GZMB
  Gene Name: granzyme B (granzyme 2, cytotoxic T-lymphocyte-associated serine esterase 1)
  ENST ID: ENST00000616551
  CDS Start-End: 1-459
atgcaaccaatcctgcttctgctggccttcctcctgctgcccagggcagatcagctggagagaaaggccaagcggaccagagctgtgcagcccctcaggctacctagcaacaaggcccaggtgaagccagggcagacatgcagtgtggccggctgggggcagacggcccccctgggaaaacactcacacacactacaagaggtgaagatgacagtgcaggaagatcgaaagtgcgaatctgacttacgccattattacgacagtaccattgagttgtgcgtgggggacccagagattaaaaagacttcctttaagggggactctggaggccctcttgtgtgtaacaaggtggcccagggcattgtctcctatggacgaaacaatggcatgcctccacgagcctgcaccaaagtctcaagctttgtacactggataaagaaaaccatgaaacgctactaactacaggaagcaaactaagcccccgctgtaatgaaacaccttctctggagccaagtccagatttacactgggagaggtgccagcaactgaataaatacct

SEQ ID NO: 138703 - DNA, 909 bp, Homo sapiens
  Payload ID: 7171
  Gene Symbol: GZMH
  Gene Name: granzyme H (cathepsin G-like 2, protein h-CCPX)
  Uniprot ID: P20718
  ENST ID: ENST00000216338
  CDS Start-End: 46-786
ggagtcaacaccaacagctctgacctgggcagccttcctgagaaaatgcagccattcctcctcctgttggcctttcttctgacccctggggctgggacagaggagatcatcgggggccatgaggccaagccccactcccgcccctacatggcctttgttcagtttctgcaagagaagagtcggaagaggtgtggcggcatcctagtgagaaaggactttgtgctgacagctgctcactgccagggaagctccataaatgtcaccttgggggcccacaatatcaaggaacaggagcggacccagcagtttatccctgtgaaaagacccatcccccatccagcctataatcctaagaacttctccaacgacatcatgctactgcagctggagagaaaggccaagtggaccacagctgtgcggcctctcaggctacctagcagcaaggcccaggtgaagccagggcagctgtgcagtgtggctggctggggttatgtctcaatgagcactttagcaaccacactgcaggaagtgttgctgacagtgcagaaggactgccagtgtgaacgtctcttccatggcaattacagcagagccactgagatttgtgtgggggatccaaagaagacacagaccggtttcaagggggactccggggggcccctcgtgtgtaaggacgtagcccaaggtattctctcctatggaaacaaaaaagggacacctccaggagtctacatcaaggtctcacacttcctgccctggataaagagaacaatgaagcgcctctaacagcaggcatgagactaaccttcctctgggcctgaccatctctgggacagaggcaagaatccccaaggggtgggcagtcggggttgcaggactgtaataaatggatctctggtgtaaatatga

SEQ ID NO: 138704 - DNA, 687 bp, Homo sapiens
  Payload ID: 7171
  Gene Symbol: GZMH
  Gene Name: granzyme H (cathepsin G-like 2, protein h-CCPX)
  Uniprot ID: P20718
  ENST ID: ENST00000382548
  CDS Start-End: 87-569
cccatccctccttcatctccctccagcatttgtttctggaaggagtcaacaccaacagctctgacctgggcagccttcctgagaaaatgcagccattcctcctcctgttggcctttcttctgacccctggggctgggacagaggagatcatcgggggccatgaggccaagccccactcccgcccctacatggcctttgttcagtttctgcaagagaagagtcggaagaggtgtggcggcatcctagtgagaaaggactttgtgctgacagctgctcactgccagggaagctccataaatgtcaccttgggggcccacaatatcaaggaacaggagcggacccagcagtttatccctgtgaaaagacccatcccccatccagcctataatcctaagaacttctccaacgacatcatgctactgcagggggactccggggggcccctcgtgtgtaaggacgtagcccaaggtattctctcctatggaaacaaaaaagggacacctccaggagtctacatcaaggtctcacacttcctgccctggataaagagaacaatgaagcgcctctaacagcaggcatgagactaaccttcctctgggcctgaccatctctgggacagaggcaagaatccccaaggggtgggcagtcggggttgcaggactgtaataaatggatctctggtgtaaa

SEQ ID NO: 138705 - DNA, 520 bp, Homo sapiens
  Payload ID: 7171
  Gene Symbol: GZMH
  Gene Name: granzyme H (cathepsin G-like 2, protein h-CCPX)
  ENST ID: ENST00000557220
  CDS Start-End: 55-402
tttctggaaggagtcaacaccaacagctctgacctgggcagccttcctgagaaaatgcagccattcctcctcctgttggcctttcttctgacccctggggctgggacagaggagatcatcgggggccatgaggccaagccccactcccgcccctacatggcctttgttcagtttctgcaagagaagagtcggaagaggtgtggcggcatcctagtgagaaaggactttgtgctgacagctgctcactgccagggaaggggggactccggggggcccctcgtgtgtaaggacgtagcccaaggtattctctcctatggaaacaaaaaagggacacctccaggagtctacatcaaggtctcacacttcctgccctggataaagagaacaatgaagcgcctctaacagcaggcatgagactaaccttcctctgggcctgaccatctctgggacagaggcaagaatccccaaggggtgggcagtcggggttgcaggactgtaataaatggatctctggtgtaaa

SEQ ID NO: 138706 - DNA, 1509 bp, Homo sapiens
  Payload ID: 7172
  Gene Symbol: GZMK
  Gene Name: granzyme K (granzyme 3
  tryptase II)
  Uniprot ID: P49863
  ENST ID: ENST00000231009
  CDS Start-End: 71-865
ttcagaatcttcttccttcatcacaggatcaacacatttcatctgggcttcttaaatctaaatctttaaaatgactaagttttcttccttttctctgtttttcctaatagttggggcttatatgactcatgtgtgtttcaatatggaaattattggagggaaagaagtgtcacctcattccaggccatttatggcctccatccagtatggcggacatcacgtttgtggaggtgttctgattgatccacagtgggtgctgacagcagcccactgccaatatcggtttaccaaaggccagtctcccactgtggttttaggcgcacactctctctcaaagaatgaggcctccaaacaaacactggagatcaaaaaatttataccattctcaagagttacatcagatcctcaatcaaatgatatcatgctggttaagcttcaaacagccgcaaaactcaataaacatgtcaagatgctccacataagatccaaaacctctcttagatctggaaccaaatgcaaggttactggctggggagccaccgatccagattcattaagaccttctgacaccctgcgagaagtcactgttactgtcctaagtcgaaaactttgcaacagccaaagttactacaacggcgacccttttatcaccaaagacatggtctgtgcaggagatgccaaaggccagaaggattcctgtaagggtgactcagggggccccttgatctgtaaaggtgtcttccacgctatagtctctggaggtcatgaatgtggtgttgccacaaagcctggaatctacaccctgttaaccaagaaataccagacttggatcaaaagcaaccttgtcccgcctcatacaaattaagttacaaataattttattggatgcacttgcttcttttttcctaatatgctcgcaggttagagttgggtgtaagtaaagcagagcacatatggggtccatttttgcacttgtaagtcattttattaaggaatcaagttctttttcacttgtatcactgatgtatttctaccatgctggttttattctaaataaaatttagaagactctctgtttgtcttttatcacatgaagtaatatctgcccccattgcacccacactcgccaaagggcaataaggtcactgaataaaacagtaatggtaccaccttcaactaggtgtaacttctgctggatcatcctaagttgttgggttgttttcttttcattgttgtgataacattgaacatgagataggcccttgcaacaaatgtttaagggtatgatacattattgttaactataggcatgatcttgcagtgcagatctctagaactgcttcatctcatataaatgaaactttatgccagttgaatagcagctctctatttccccaccacccccatcctctggcaaccccattctactctaagcttctatgagtttgtattttttaaatataaatcataaatataaatatcctaattcaagcaagcagcttatacaaa

SEQ ID NO: 138707 - DNA, 940 bp, Homo sapiens
  Payload ID: 7173
  Gene Symbol: GZMM
  Gene Name: granzyme M (lymphocyte met-ase 1)
  Uniprot ID: P51124
  ENST ID: ENST00000264553
  CDS Start-End: 38-811
gccggggccagcacccacactgggtctccacagcggcatggaggcctgcgtgtcttcactgctggtgctggccctgggggccctgtcagtaggcagctcctttgggacccagatcatcgggggccgggaggtgatcccccactcgcgcccgtacatggcctcactgcagagaaatggctcccacctgtgcgggggtgtcctggtgcacccaaagtgggtgctgacggctgcccactgcctggcccagcggatggcccagctgaggctggtgctggggctccacaccctggacagccccggtctcaccttccacatcaaggcagccatccagcaccctcgctacaagcccgtccctgccctggagaacgacctcgcgctgcttcagctggacgggaaagtgaagcccagccggaccatccggccgttggccctgcccagtaagcgccaggtggtggcagcagggactcggtgcagcatggccggctgggggctgacccaccagggcgggcgcctgtcccgggtgctgcgggagctggacctccaagtgctggacacccgcatgtgtaacaacagccgcttctggaacggcagcctctcccccagcatggtctgcctggcggccgactccaaggaccaggctccctgcaagggtgactcgggcgggcccctggtgtgtggcaaaggccgggtgttggccagagtcctgtccttcagctccagggtctgcactgacatcttcaagcctcccgtggccaccgctgtggcgccttacgtgtcctggatcaggaaggtcaccggccgatcggcctgatgccctggggtgatggggaccccctcgctgtctccacaggacccttcccctccaggggtgcagtggggtgggtgaggacgggtgggagggacagggagggaccaataaatcataatgaagaaacgctca

SEQ ID NO: 138708 - DNA, 941 bp, Homo sapiens
  Payload ID: 7173
  Gene Symbol: GZMM
  Gene Name: granzyme M (lymphocyte met-ase 1)
  ENST ID: ENST00000592501
  CDS Start-End: 152-808
ggccggggccagcacccacactgggtctccacagcggcatggaggcctgcgtgtcttcactgctggtgctggccctgggggccctgtcagtagctcctttgggacccagatcatcgggggccgggaggtgatcccccactcgcgcccgtacatggcctcactgcagagaaatggctcccacctgtgcgggggtgtcctggtgcacccaaagtgggtgctgacggctgcccactgcctggcccagcggatggcccagctgaggctggtgctggggctccacaccctggacagccccggtctcaccttccacatcaaggcagccatccagcaccctcgctacaagcccgtccctgccctggagaacgacctcgcgctgcttcagctggacgggaaagtgaagcccagccggaccatccggccgttggccctgcccagtaagcgccaggtggtggcagcagggactcggtgcagcatggccggctgggggctgacccaccagggcgggcgcctgtcccgggtgctgcgggagctggacctccaagtgctggacacccgcatgtgtaacaacagccgcttctggaacggcagcctctcccccagcatggtctgcctggcggccgactccaaggaccaggctccctgcaagggtgactcgggcgggcccctggtgtgtggcaaaggccgggtgttggccagagtcctgtccttcagctccagggtctgcactgacatcttcaagcctcccgtggccaccgctgtggcgccttacgtgtcctggatcaggaaggtcaccggccgatcggcctgatgccctggggtgatggggaccccctcgctgtctccacaggacccttcccctccaggggtgcagtggggtgggtgaggacgggtgggagggacagggagggaccaataaatcataatgaagaaacgctcagagc

SEQ ID NO: 138709 - DNA, 6530 bp, Homo sapiens
  Payload ID: 7174
  Gene Symbol: GIGYF1
  Gene Name: GRB10 interacting GYF protein 1
  Uniprot ID: O75420
  ENST ID: ENST00000275732
  CDS Start-End: 1211-4318
cctctgcctggggccccagggatgcgcctcctcctgaaagtcccctccatcctcccttagaggaacaggctgccgccgcgcccccatcagcctccattgccctgaccttatttccacctgatggtgccagaggctgcttcccagctggtatcctgagatcctcgttcccttggtggcttggttgtttaagcctccattattgattgggggcggtggtctgggtgtgattcctgtgggggaaaccagcccgaggtgccttggctcaggcttgcctgcctggagtccttgtcgtgtacccgtctgtggccctagagtcacctcctgctccttttcactgggtttctccccagaccaagcccctggatttgagcttctgagcagccaactgatttttttcatgagggaaagaattttgctcctagatttatttctaatccttttctccgtaactgaccttttctctgtaagctatttgtggctctagtgggtttttgtttgcttgcttgtttttgttttatctttgccctgaacgtccatcctggcctcggctgcctccctccccgagttcttcactacacctcctgtctcagcctcccagagagggtggcgagggtgctgatgcccagagacaccatccggcgaatggacctctcctgtcatgcggggcagggcagggctgccggcagagccatgtcctgaaccctccctcctcccccctgctctccttaagggtctttcccagatgtgaaggtccctcccaggctctactgaggtcagaccaattcccagtggcttgggtaccctcgttcactccagcaccagcccctgccctccttcttcccgggccaggctgccaggtgagccccgggccaagggtggttgccctgctgaggccgaaaggactcgagcttcccatctcctcgcctcccccaggtctttcaccgtctggactcatctctgggtaactcatggtgtgagtggccacgtggctggctcaggtgagtccttttagaccccaggtgacccaccagctagtccggggcccattgttgtgcccactaggatgtcccccatggtgtcctccctgcgctttaaagttctccttcgtgtgctgttcttcatggcccctgttcccccacaggtgtttggacagtgaacgccaggtcccctcctccccacccccggcctctcaaacacgcccagccccacgatggcagcagagacactcaactttgggcctgagtggctcagggccctgtccgggggcggcagcgtggcctccccacccccgtcccctgccatgcccaaatacaagctggctgactaccgttatgggcgagaggaaatgctggctctctacgtcaaggagaacaaggtcccggaagagctgcaggacaaggagttcgccgcggtgctgcaggacgagccactgcagcccctggctctggagccgctgactgaggaggaacagagaaacttctccctgtcagtgaacagcgtggctgtgctgaggctgatggggaaaggggctggcccccccctggctggcacctcccgaggcaggggcagcacgcggagccgaggccgcggccgtggtgacagctgcttttaccaaagaagcatcgaagaaggcgatggggcctttggacgaagcccccgggaaatccagcgcagccagagctgggatgacagaggcgagaggcggtttgagaagtcagcaaggcgggatggagcacgatgtggctttgaggagggaggggctggcccaaggaaggagcacgcccgctcagacagcgagaactggcgctccctacgggaggaacaggaggaggaggaggagggcagctggaggctcggagcagggccccggcgagacggcgaccgctggcgctccgccagccctgatggtggtccccgctctgctggctggcgggaacatggggaacggcggcgcaagtttgaatttgatttgcgaggggatcgaggagggtgtggtgaagaggaggggcggggagggggaggcagctctcacctgcggcggtgccgagcgcctgaaggctttgaggaggacaaggatgggctcccagagtggtgcctggacgatgaggatgaagaaatgggcacctttgatgcctctggggccttcttgcctctcaagaagggccccaaggagcccattcctgaggagcaggagctggacttccaagggttggaggaggaggaggaaccttccgaagggctagaggaggaagggcctgaggcaggtgggaaagagctgaccccactgcctcctcaggaggagaagtccagctccccatccccactgcccaccctgggcccactctgggggacaaacggggatggggacgaaactgcagagaaagagcccccagcggccgaagatgatattcgggggatccagctgagtcccggggtgggctcctctgctggcccacccggagatctggaggatgatgaaggcttgaagcacctgcagcaggaggcggagaagctggtggcctccctgcaggacagctccttggaggaggagcagttcacggctgccatgcagacccagggcctgcgccactctgcagccgccactgccctcccgctcagccatggggctgcccggaagtggttctacaaggacccacagggcgagatccaaggccccttcacgacacaggagatggcagagtggttccaggccggctacttttccatgtcactgctggtgaagcggggctgcgatgagggcttccagccgctgggcgaggtgatcaagatgtggggccgcgtgccctttgccccagggccctcacctcccccactgctgggaaacatggaccaggagcggctgaagaagcaacaggagctggccgcggcggccttgtaccagcagctgcagcaccagcagtttctccagctggtcagcagccgccagctcccacagtgcgcgctccgagaaaaggcagctctgggggacctgacaccgccaccaccgccgccgccacagcagcagcagcagcagctcacggcattcctgcagcagctccaggcgctcaaaccccccagaggcggggaccagaacctgctcccgacgatgagccggtccttgtcggtgccagattcgggccgcctctgggacgtacatacctcagcctcatcacagtcaggtggtgaggccagtctttgggacataccaattaactcttcgactcagggtccaattctagaacaactccagctgcaacataaattccaggagcgcagagaagtggagctcagggcgaagcgggaggaagaggaacgcaagcgtcgagaggagaagcgccgccagcagcagcaggaggagcagaagcggcggcaggaggaggaagagctgtttcggcgcaagcacgtgcggcagcaggagctattgctgaagttgctacagcagcagcaggcggtccctgtgccccccgcacccagctccccgcccccactctgggctggcctggccaagcaggggctgtccatgaagacgctcctggagttgcagctggagggcgagcggcagctgcacaaacagcccccacctcgggagccagctcgggcccaggcccccaaccaccgagtgcagcttgggggcctgggcactgcccccctgaaccagtgggtgtctgaggctgggccactgtggggcgggccagacaagagtgggggcggcagcagcggcctggggctctgggaggacacccccaagagcggcgggagcctggtccgtggcctcggcctgaagaacagccggagcagcccatctctcagtgactcatacagccacctatcgggtcggcccattcgcaaaaagacggaggaagaagagaagctgctgaagctgctgcagggcattcccaggccccaggacggcttcacccagtggtgcgagcagatgctgcacacgctgagcgccacgggcagcctggacgtgcccatggctgtagcgatcctcaaggaggtggaatccccctatgatgtccacgattatatccgttcctgcctgggggacacgctggaagccaaagaatttgccaaacaattcctggagcggagggccaagcagaaagccagccagcagcggcagcagcagcaggaggcatggctgagcagcgcctcgctgcagacggccttccaggccaaccacagcaccaaactcggccccggggagggcagcaaggccaagaggcgggcactgatgctgcactcagaccccagcatcctggggtactccctgcacggatcttctggtgagatcgagagcgtggatgactactgaccagcccggacccccagcccctgggctgtaggccagggcagccacagcggcgtggaccgagggtcccagcctgcaggctccccgcagagagcacaggaagaggcaggggcggggtccccagcacttgttacaaacacacgatgcaccttaactcacccaccacgaggcactttacagactgggggagggggtttttctttttatttttttttttaattttaaacgactgaagaaaacattaggagaggcaaaaatattgttaaaaactagactctaaacaccccttcctgctgtgaggatagtgggtgtgacaatggaaggtccacagaggtttttgttttttggttttttttttttttttaagaaaaaaagatgaaaaatgaaaaaaaaaatggttaggaggctgaaagaaaaaacacactgttattttggggcagtggggacacaggccccgtggacctgtcctgcctggcccccaaggccatacttaccccccagaaggcgggccatggggtaactggaagctgggggccagcagtttgcacaggaggcctgtctgagccccacccgccagacctgttgtgagcagctcctgtcactgaggctggctgaggtgtccggggtggggccaaagtagccccttggcttcgctgctttgggggacagttgcacaaattggacgagtggccccagctctctggctgccatcttgtgctggccgagtagacgggaggggccaagccgtgccaacctctctggctggcagggtggggcagcaggactctggttctggtgaggggcgtctcccactgctgccattttgggggacaccctgggtttgaacctgaaagccccagctctctgccttgccacgtgaatgtattctttgggccacaagcccccgcctcacccctgcctgagctgcctcacccctgtgagcggcgggggtggatgattgctccagaggctgcagagagaaggctgagctgtttctccagtgaagggggcaggaggaggggcctcaaaggcaaggagtgggtggctttgggcttagggttgcagtagaggggctgccgcccggggccccaacctgtagccagctcgtaagatgtggaccacccagctctgcacctgacccttccgctgaccaaatgggagaggagcaggtggccttccgggtctgatatgatgcgctttttaccgttgggtaaggttggggtgaagagaagtgtgcggctcctgggtcagaggaggctgccccttctattgctcacccacttcttattcccggtcccctacttgggttcgtctccgcccattttgggttttgtaacagttttgtcttttgggtttctcatccagctcctcccattgacctcattgctcagagtgcagtattagggcaaggcttcgccactgcctccctccatgaatgtatttctccctcctgccctggggacatggggagtggcccgtttctttccccatctagtcccagaaagatggtgtttggttttctgttgttggatttttttttttttttttttttttttgcaccaaagtggcaactaggtcagtgttgggggatcaagctggcctcggggtggggggcccccacctgcctctccctggttcccacagtgttagcgtccctgaaaagacaatattctctctaaagcaataaggggtgacgggccggggggagtgtttgctgctgctggcccccagctccccttccctcttgccaggtgtgggggagactcctgttgtgactgaatgtaacccccccacccctgccgcagccaatgcaggggaagggggacactcttcctgtctcttctccccagctaaagagactttggacttagggggcccatgagcctggagaggccttaaccctgtgaggaagtatagggggagccctctcccacccccatccccttctgagagtggtcaatgtttacaagcccctgagcccccctgcccagggactcagaccctgttgctgtccttccccggccccggtcttcctgggccctcgctgctcccctgcccttcctggggttggggtgggtgcaggggtcaccgtgttccctgtctgccttgtacccacagtctccccgccccctctccaccctgtgtgacttccctctcttttacctgctcctgtaaatactcccttctcccaataaaacttggtgtgtgttctccc

SEQ ID NO: 138710 - DNA, 5847 bp, Homo sapiens
  Payload ID: 7175
  Gene Symbol: GIGYF2
  Gene Name: GRB10 interacting GYF protein 2
  Uniprot ID: Q6Y7W6
  ENST ID: ENST00000373563
  CDS Start-End: 196-4095
gacgtgcgtggcgacgtgtcggccatcttgtgttgttgaggctgaggactgactggggttctgagactccctgtcccggaccgcagcgttaaaaggatctgaacaaagtctgctcaaatctcctgctgtgaaccagcagaatttttgaacaggtttcttcacatataaaaatctattgtaaaaatacggaaaagaatggcagcggaaacgcagacactgaactttgggcctgaatggctccgagctctgtccagtggtgggagtattacatcccctcctctttctccagcattgccgaagtataaattagcagattatcgttacggcagagaagaaatgttagcacttttccttaaagacaacaagataccttcagaccttctggataaagaatttctgcctatcctccaggaggaaccccttccaccattggctctggtaccctttacagaagaagaacagagaaacttttccatgtctgtaaatagtgctgctgtcctgcgattgacaggacgaggaggaggaggaacagtggtgggggctcctagaggtcgaagttcttcaagagggcgaggcagaggcagaggtgaatgtggtttctaccaaagaagttttgatgaagtagagggtgtttttggtcgaggaggtggcagagaaatgcatagatcgcagagctgggaggaaaggggtgacagacgttttgaaaaaccaggacgaaaagatgtagggagaccaaattttgaggaaggtggaccaacatcagtagggagaaagcatgaatttatacgctcagaaagtgaaaattggcgcatctttagagaggaacaaaatggagaagatgaagatggaggttggcgactagctggatcaaggagggatggagagaggtggcgacctcacagtcctgatggccctcgttctgcaggctggcgggaacacatggaacgacgtcggaggtttgagtttgattttcgagatagagatgatgaacggggttaccgaagggttcgctctggcagtgggagcatagatgatgacagggatagcttgcccgaatggtgcttagaggatgctgaagaagaaatgggtacatttgactcatctggagcattcctttctctaaaaaaagtacagaaagagcctattccagaagagcaggagatggacttccggcctgtggacgaaggggaggagtgctctgactctgagggtagccataatgaagaggccaaagaacccgataagacaaataagaaagaaggagagaaaacagatagagtaggagttgaagctagtgaggaaactccccagacctcatcatcatctgctagaccaggtactccttcagaccatcagtctcaggaagcatcacagtttgagaggaaagatgaaccaaaaactgagcaaacggaaaaagctgaagaggagactcggatggaaaatagtctaccagccaaagtgcccagcagaggggatgaaatggttgctgatgtccagcagcccctgtcgcagattccttcagatacagcctctcctcttctcatacttccacctcctgttcccaatcctagtcctactctccggccagttgaaacaccagttgtaggtgctcctggtatgggcagtgtttccacagaacctgatgatgaagaaggtctcaaacatttggagcagcaagctgagaaaatggtggcttatctccaagacagtgcactagatgatgaaagattggcatcaaaactgcaagagcacagagctaaaggagtgtcgattccattgatgcatgaagcaatgcagaagtggtattacaaagatcctcagggagaaattcaaggtcccttcaataatcaggagatggcagaatggtttcaggcgggctattttactatgtctttattggtgaagagagcgtgtgatgaaagcttccaacctcttggcgatatcatgaaaatgtggggaagggttcccttttctccaggtccagctccccctcctcatatgggagagctggaccaggaacgactgaccaggcagcaagaactcacagccttataccagatgcagcacctgcagtaccagcagtttttaatacaacaacaatatgcacaggttttggcccaacagcagaaagcagcactgtcttcccagcagcagcagcagttggcacttcttcttcaacagtttcagaccttgaagatgagaatatctgatcagaacatcattccctcagtaactaggtctgtgtccgtgccagatactggctctatctgggagcttcagccaacagcttcacagcctacagtttgggaaggtggtagtgtatgggatcttcctctggacaccacgacaccaggccctgccctggaacagcttcagcagctagagaaggccaaagctgcaaagctagagcaagagagaagagaggcagaaatgagggcaaaacgggaagaggaagagcgaaagaggcaggaagaactccgaagacaacaggaggaaattcttcggcgacagcaggaagaagaaaggaaaaggcgagaggaagaagaacttgcccgaaggaaacaggaagaggctctgcgtcgccagcgggagcaagaaattgcattaaggcgacagcgagaagaggaagaaagacagcagcaagaagaagctcttagaagactggaagagaggagaagagaagaggaagaaaggcggaagcaggaagaattgttacgcaaacaggaagaggaggctgcaaaatgggcccgggaagaagaagaagcccagcgtcgattagaggagaaccggctgcggatggaagaggaggcagccagactccggcatgaggaagaagaacggaagagaaaggagctggaggtccagcggcagaaggagttaatgcgccagaggcagcagcagcaagaggctctccggaggttgcagcagcagcagcagcaacaacagctggcgcagatgaagcttccttcttcttcaacgtggggccagcagtccaatacaacagcatgtcagtcccaggccacgctgtcgttggctgaaatccaaaaactagaggaagaacgagaacggcagcttcgagaagagcaaaggcgccagcagagggagttgatgaaagctcttcagcagcagcagcaacagcaacagcagaaactctcaggttgggggaatgtcagcaaaccttcaggtaccacgaaatctcttctggagatccagcaggaagaggccaggcaaatgcaaaagcagcagcagcagcagcagcaacaccagcaaccaaacagagctcgtaacaatacgcattccaacctgcacaccagcattgggaattctgtttggggctctataaatactggtcctcctaaccagtgggcatctgacctagtcagtagtatttggagtaatgctgacactaaaaactccaacatgggattctgggatgatgcagtgaaagaggtgggacctaggaattcaacaaataaaaataaaaacaacgccagtctcagtaaatctgtaggtgtgtctaaccggcagaataagaaagtagaagaagaagaaaagttgctgaagctctttcagggagtaaataaagcccaagatggatttacgcagtggtgtgaacagatgcttcatgcccttaatacggcaaataacttggatgttcccacatttgtttctttcctgaaagaagtagaatctccttatgaggtccatgattatatcagggcctatttaggagatacttctgaggccaaggagtttgccaagcagttccttgagcgccgtgccaaacagaaagccaaccagcagcgtcagcagcagcagctgccacagcagcagcagcagcagccgccacagcagccgccacagcagccacaacagcaggactctgtgtgggggatgaaccacagtacactccattcagtatttcagaccaatcaaagcaacaaccaacaatccaattttgaggctgtgcagagtggcaagaagaagaaaaagcagaagatggtccgagcagatcccagtttattaggattttcagtcaatgcatcatcggagcgactcaacatgggtgaaatcgagacgttggatgactactgagcacctgccagtggactggccatccctctcctgtctgccgactatggagtctccacctttggacacaacacttactcaccatttactctttatcactctgcaacaaatcacagaaccgatcatctcaggctttttcttctggccctttgtgtccaagattctttaatccatttttgttggtgaacatctcagactatagataagtggactggaccctgtgtcttgggggtggcagttgggattactccccaacaaggctgattttaggcagcatgtgttcactgtgctgtgatttcatctactgtctcccagaaagtgtgttgggatcggccattagcagcttgctttctcttgtcactttttttcttctattttgttttttcttcttctttttccccccatcagggcaaatggtctaactggtgcaatcatgaagagagttaatggttaacagacattggccaataacaaaacaccccatggactgtgactcgagtatccaacaggcagtcagagctctcccggtctgaaagttgcattgccactgctaactttgggattgcatcagagaggccctgagtggggttgagatgaggttggtttggtttgatgttacacactcctcacctgttctttctgagtgtcctttctctgaaaggatttatgtttttcttcgttagatagtgacttctgagcaagctgatctcccctggcatgctccaacctgattggacaaaggaagctctatggcctgggagagagactattcttaatttttctttcttacaaaaactgatttttcccataaatatttttacttcagaggactaggaccattttgttttgggcccttctgctgaaaatttgtctcgtttaagaggcagctagaatctttaccatatgtatgaatttgtataatttcatttttggatagggataaacttttgcttctgataaaagcctggaatttcatctggtcctcagagcattgcgtgtgtgtcttgctgtagcccggaaaaggttttgtgtaaagattctgggatggcaagttgtttgccttttctgaaaagagaacatacagaacctgtccatctttaagaccttcatccatggaatctactatacaggaggatgcagtgggctggaggggatgggcgaaaatgggagcaggaagcctggcctggcttctggtcatggcctcctaaaaccttaaacttcaagtagaaatgtactcaagccctatttataaacaaatacttttcctgcctccaccaaacccctacagaacatcacctggaattgccactcacactgggttggagtcattgggcagctgtgcctgtgcgagaggtgctgtggtctgggcagcccctggaaaagcacctttgctgcctgtcattgttgcctgaagaaggctggagttgctctgagagcagtttgggtttggagtattatatttggcttctatttttattattttggatcaccattctccctatcccttcttgcctccctcccttctaaacatgtgtaataactatacagagactgctacaaaattgtatatagtttttggatcaaatagcatgaggggagaggaaaccattaaaagttggggctcctactctcctttgctttgtaaattcaaaagttgggggtgggtaagagggatagttaaaatgtttacaaaactttaggctccctcggaacttttgccagtgtggaggaaaataaaaaagaacttaaataaaa

SEQ ID NO: 138711 - DNA, 5978 bp, Homo sapiens
  Payload ID: 7175
  Gene Symbol: GIGYF2
  Gene Name: GRB10 interacting GYF protein 2
  Uniprot ID: Q6Y7W6
  ENST ID: ENST00000409547
  CDS Start-End: 312-4211
atcttgtgttgttgaggctgaggactgactggggttctgagactccctgtcccggaccgcagattatagtgggaccagtctcattaggttgaatctacagcctatgttggtgttaacccaggtctcttagagcgttaaaaggatctgaacaaagtctgctcaaatctcctgctgtgaaccagcagaatttttgaacagagaccacgtctccacctcctgggctccaacgattctcccatcttggcctcccaaagcgctggatttacaggtttcttcacatataaaaatctattgtaaaaatacggaaaagaatggcagcggaaacgcagacactgaactttgggcctgaatggctccgagctctgtccagtggtgggagtattacatcccctcctctttctccagcattgccgaagtataaattagcagattatcgttacggcagagaagaaatgttagcacttttccttaaagacaacaagataccttcagaccttctggataaagaatttctgcctatcctccaggaggaaccccttccaccattggctctggtaccctttacagaagaagaacagagaaacttttccatgtctgtaaatagtgctgctgtcctgcgattgacaggacgaggaggaggaggaacagtggtgggggctcctagaggtcgaagttcttcaagagggcgaggcagaggcagaggtgaatgtggtttctaccaaagaagttttgatgaagtagagggtgtttttggtcgaggaggtggcagagaaatgcatagatcgcagagctgggaggaaaggggtgacagacgttttgaaaaaccaggacgaaaagatgtagggagaccaaattttgaggaaggtggaccaacatcagtagggagaaagcatgaatttatacgctcagaaagtgaaaattggcgcatctttagagaggaacaaaatggagaagatgaagatggaggttggcgactagctggatcaaggagggatggagagaggtggcgacctcacagtcctgatggccctcgttctgcaggctggcgggaacacatggaacgacgtcggaggtttgagtttgattttcgagatagagatgatgaacggggttaccgaagggttcgctctggcagtgggagcatagatgatgacagggatagcttgcccgaatggtgcttagaggatgctgaagaagaaatgggtacatttgactcatctggagcattcctttctctaaaaaaagtacagaaagagcctattccagaagagcaggagatggacttccggcctgtggacgaaggggaggagtgctctgactctgagggtagccataatgaagaggccaaagaacccgataagacaaataagaaagaaggagagaaaacagatagagtaggagttgaagctagtgaggaaactccccagacctcatcatcatctgctagaccaggtactccttcagaccatcagtctcaggaagcatcacagtttgagaggaaagatgaaccaaaaactgagcaaacggaaaaagctgaagaggagactcggatggaaaatagtctaccagccaaagtgcccagcagaggggatgaaatggttgctgatgtccagcagcccctgtcgcagattccttcagatacagcctctcctcttctcatacttccacctcctgttcccaatcctagtcctactctccggccagttgaaacaccagttgtaggtgctcctggtatgggcagtgtttccacagaacctgatgatgaagaaggtctcaaacatttggagcagcaagctgagaaaatggtggcttatctccaagacagtgcactagatgatgaaagattggcatcaaaactgcaagagcacagagctaaaggagtgtcgattccattgatgcatgaagcaatgcagaagtggtattacaaagatcctcagggagaaattcaaggtcccttcaataatcaggagatggcagaatggtttcaggcgggctattttactatgtctttattggtgaagagagcgtgtgatgaaagcttccaacctcttggcgatatcatgaaaatgtggggaagggttcccttttctccaggtccagctccccctcctcatatgggagagctggaccaggaacgactgaccaggcagcaagaactcacagccttataccagatgcagcacctgcagtaccagcagtttttaatacaacaacaatatgcacaggttttggcccaacagcagaaagcagcactgtcttcccagcagcagcagcagttggcacttcttcttcaacagtttcagaccttgaagatgagaatatctgatcagaacatcattccctcagtaactaggtctgtgtccgtgccagatactggctctatctgggagcttcagccaacagcttcacagcctacagtttgggaaggtggtagtgtatgggatcttcctctggacaccacgacaccaggccctgccctggaacagcttcagcagctagagaaggccaaagctgcaaagctagagcaagagagaagagaggcagaaatgagggcaaaacgggaagaggaagagcgaaagaggcaggaagaactccgaagacaacaggaggaaattcttcggcgacagcaggaagaagaaaggaaaaggcgagaggaagaagaacttgcccgaaggaaacaggaagaggctctgcgtcgccagcgggagcaagaaattgcattaaggcgacagcgagaagaggaagaaagacagcagcaagaagaagctcttagaagactggaagagaggagaagagaagaggaagaaaggcggaagcaggaagaattgttacgcaaacaggaagaggaggctgcaaaatgggcccgggaagaagaagaagcccagcgtcgattagaggagaaccggctgcggatggaagaggaggcagccagactccggcatgaggaagaagaacggaagagaaaggagctggaggtccagcggcagaaggagttaatgcgccagaggcagcagcagcaagaggctctccggaggttgcagcagcagcagcagcaacaacagctggcgcagatgaagcttccttcttcttcaacgtggggccagcagtccaatacaacagcatgtcagtcccaggccacgctgtcgttggctgaaatccaaaaactagaggaagaacgagaacggcagcttcgagaagagcaaaggcgccagcagagggagttgatgaaagctcttcagcagcagcagcaacagcaacagcagaaactctcaggttgggggaatgtcagcaaaccttcaggtaccacgaaatctcttctggagatccagcaggaagaggccaggcaaatgcaaaagcagcagcagcagcagcagcaacaccagcaaccaaacagagctcgtaacaatacgcattccaacctgcacaccagcattgggaattctgtttggggctctataaatactggtcctcctaaccagtgggcatctgacctagtcagtagtatttggagtaatgctgacactaaaaactccaacatgggattctgggatgatgcagtgaaagaggtgggacctaggaattcaacaaataaaaataaaaacaacgccagtctcagtaaatctgtaggtgtgtctaaccggcagaataagaaagtagaagaagaagaaaagttgctgaagctctttcagggagtaaataaagcccaagatggatttacgcagtggtgtgaacagatgcttcatgcccttaatacggcaaataacttggatgttcccacatttgtttctttcctgaaagaagtagaatctccttatgaggtccatgattatatcagggcctatttaggagatacttctgaggccaaggagtttgccaagcagttccttgagcgccgtgccaaacagaaagccaaccagcagcgtcagcagcagcagctgccacagcagcagcagcagcagccgccacagcagccgccacagcagccacaacagcaggactctgtgtgggggatgaaccacagtacactccattcagtatttcagaccaatcaaagcaacaaccaacaatccaattttgaggctgtgcagagtggcaagaagaagaaaaagcagaagatggtccgagcagatcccagtttattaggattttcagtcaatgcatcatcggagcgactcaacatgggtgaaatcgagacgttggatgactactgagcacctgccagtggactggccatccctctcctgtctgccgactatggagtctccacctttggacacaacacttactcaccatttactctttatcactctgcaacaaatcacagaaccgatcatctcaggctttttcttctggccctttgtgtccaagattctttaatccatttttgttggtgaacatctcagactatagataagtggactggaccctgtgtcttgggggtggcagttgggattactccccaacaaggctgattttaggcagcatgtgttcactgtgctgtgatttcatctactgtctcccagaaagtgtgttgggatcggccattagcagcttgctttctcttgtcactttttttcttctattttgttttttcttcttctttttccccccatcagggcaaatggtctaactggtgcaatcatgaagagagttaatggttaacagacattggccaataacaaaacaccccatggactgtgactcgagtatccaacaggcagtcagagctctcccggtctgaaagttgcattgccactgctaactttgggattgcatcagagaggccctgagtggggttgagatgaggttggtttggtttgatgttacacactcctcacctgttctttctgagtgtcctttctctgaaaggatttatgtttttcttcgttagatagtgacttctgagcaagctgatctcccctggcatgctccaacctgattggacaaaggaagctctatggcctgggagagagactattcttaatttttctttcttacaaaaactgatttttcccataaatatttttacttcagaggactaggaccattttgttttgggcccttctgctgaaaatttgtctcgtttaagaggcagctagaatctttaccatatgtatgaatttgtataatttcatttttggatagggataaacttttgcttctgataaaagcctggaatttcatctggtcctcagagcattgcgtgtgtgtcttgctgtagcccggaaaaggttttgtgtaaagattctgggatggcaagttgtttgccttttctgaaaagagaacatacagaacctgtccatctttaagaccttcatccatggaatctactatacaggaggatgcagtgggctggaggggatgggcgaaaatgggagcaggaagcctggcctggcttctggtcatggcctcctaaaaccttaaacttcaagtagaaatgtactcaagccctatttataaacaaatacttttcctgcctccaccaaacccctacagaacatcacctggaattgccactcacactgggttggagtcattgggcagctgtgcctgtgcgagaggtgctgtggtctgggcagcccctggaaaagcacctttgctgcctgtcattgttgcctgaagaaggctggagttgctctgagagcagtttgggtttggagtattatatttggcttctatttttattattttggatcaccattctccctatcccttcttgcctccctcccttctaaacatgtgtaataactatacagagactgctacaaaattgtatatagtttttggatcaaatagcatgaggggagaggaaaccattaaaagttggggctcctactctcctttgctttgtaaattcaaaagttgggggtgggtaagagggatagttaaaatgtttacaaaactttaggctccctcggaacttttgccagtgtggaggaaaataaaaaagaacttaaataaaatctgattgtattcta

SEQ ID NO: 138712 - DNA, 5976 bp, Homo sapiens
  Payload ID: 7175
  Gene Symbol: GIGYF2
  Gene Name: GRB10 interacting GYF protein 2
  ENST ID: ENST00000409480
  CDS Start-End: 263-4228
gtgcgtggcgacgtgtcggccatcttgtgttgttgaggctgaggactgactggggttctgagactccctgtcccggaccgcagattatagtgggaccagtctcattaggttgaatctacagcctatgttggtgttaacccaggtctcttagagcgttaaaaggatctgaacaaagtctgctcaaatctcctgctgtgaaccagcagaatttttgaacaggtttcttcacatataaaaatctattgtaaaaatacggaaaagaatggcagcggaaacgcagacactgaactttgggcctgaatggctccgagctctgtccagtggtgggagtattacatcccctcctctttctccagcattgccgaagtataaattagcagattatcgttacggcagagaagaaatgttagcacttttccttaaagacaacaagataccttcagaccttctggataaagaatttctgcctatcctccaggaggaaccccttccaccattggctctggtaccctttacagaagaagaacagagaaacttttccatgtctgtaaatagtgctgctgtcctgcgattgacaggacgaggaggaggaggaacagtggtgggggctcctagaggtcgaagttcttcaagagggcgaggcagaggcagaggtgaatgtggtttctaccaaagaagttttgatgaagtagagggtgtttttggtcgaggaggtggcagagaaatgcatagatcgcagagctgggaggaaaggggtgacagacgttttgaaaaaccaggacgaaaagatgtaggaaagaagaatggatattattgcatgtactcaccagttcttttgctgggtcagcctttatgccaagggagaccaaattttgaggaaggtggaccaacatcagtagggagaaagcatgaatttatacgctcagaaagtgaaaattggcgcatctttagagaggaacaaaatggagaagatgaagatggaggttggcgactagctggatcaaggagggatggagagaggtggcgacctcacagtcctgatggccctcgttctgcaggctggcgggaacacatggaacgacgtcggaggtttgagtttgattttcgagatagagatgatgaacggggttaccgaagggttcgctctggcagtgggagcatagatgatgacagggatagcttgcccgaatggtgcttagaggatgctgaagaagaaatgggtacatttgactcatctggagcattcctttctctaaaaaaagtacagaaagagcctattccagaagagcaggagatggacttccggcctgtggacgaaggggaggagtgctctgactctgagggtagccataatgaagaggccaaagaacccgataagacaaataagaaagaaggagagaaaacagatagagtaggagttgaagctagtgaggaaactccccagacctcatcatcatctgctagaccaggtactccttcagaccatcagtctcaggaagcatcacagtttgagaggaaagatgaaccaaaaactgagcaaacggaaaaagctgaagaggagactcggatggaaaatagtctaccagccaaagtgcccagcagaggggatgaaatggttgctgatgtccagcagcccctgtcgcagattccttcagatacagcctctcctcttctcatacttccacctcctgttcccaatcctagtcctactctccggccagttgaaacaccagttgtaggtgctcctggtatgggcagtgtttccacagaacctgatgatgaagaaggtctcaaacatttggagcagcaagctgagaaaatggtggcttatctccaagacagtgcactagatgatgaaagattggcatcaaaactgcaagagcacagagctaaaggagtgtcgattccattgatgcatgaagcaatgcagaagtggtattacaaagatcctcagggagaaattcaaggtcccttcaataatcaggagatggcagaatggtttcaggcgggctattttactatgtctttattggtgaagagagcgtgtgatgaaagcttccaacctcttggcgatatcatgaaaatgtggggaagggttcccttttctccaggtccagctccccctcctcatatgggagagctggaccaggaacgactgaccaggcagcaagaactcacagccttataccagatgcagcacctgcagtaccagcagtttttaatacaacaacaatatgcacaggttttggcccaacagcagaaagcagcactgtcttcccagcagcagcagcagttggcacttcttcttcaacagtttcagaccttgaagatgagaatatctgatcagaacatcattccctcagtaactaggtctgtgtccgtgccagatactggctctatctgggagcttcagccaacagcttcacagcctacagtttgggaaggtggtagtgtatgggatcttcctctggacaccacgacaccaggccctgccctggaacagcttcagcagctagagaaggccaaagctgcaaagctagagcaagagagaagagaggcagaaatgagggcaaaacgggaagaggaagagcgaaagaggcaggaagaactccgaagacaacaggaggaaattcttcggcgacagcaggaagaagaaaggaaaaggcgagaggaagaagaacttgcccgaaggaaacaggaagaggctctgcgtcgccagcgggagcaagaaattgcattaaggcgacagcgagaagaggaagaaagacagcagcaagaagaagctcttagaagactggaagagaggagaagagaagaggaagaaaggcggaagcaggaagaattgttacgcaaacaggaagaggaggctgcaaaatgggcccgggaagaagaagaagcccagcgtcgattagaggagaaccggctgcggatggaagaggaggcagccagactccggcatgaggaagaagaacggaagagaaaggagctggaggtccagcggcagaaggagttaatgcgccagaggcagcagcagcaagaggctctccggaggttgcagcagcagcagcagcaacaacagctggcgcagatgaagcttccttcttcttcaacgtggggccagcagtccaatacaacagcatgtcagtcccaggccacgctgtcgttggctgaaatccaaaaactagaggaagaacgagaacggcagcttcgagaagagcaaaggcgccagcagagggagttgatgaaagctcttcagcagcagcagcaacagcaacagcagaaactctcaggttgggggaatgtcagcaaaccttcaggtaccacgaaatctcttctggagatccagcaggaagaggccaggcaaatgcaaaagcagcagcagcagcagcagcaacaccagcaaccaaacagagctcgtaacaatacgcattccaacctgcacaccagcattgggaattctgtttggggctctataaatactggtcctcctaaccagtgggcatctgacctagtcagtagtatttggagtaatgctgacactaaaaactccaacatgggattctgggatgatgcagtgaaagaggtgggacctaggaattcaacaaataaaaataaaaacaacgccagtctcagtaaatctgtaggtgtgtctaaccggcagaataagaaagtagaagaagaagaaaagttgctgaagctctttcagggagtaaataaagcccaagatggatttacgcagtggtgtgaacagatgcttcatgcccttaatacggcaaataacttggatgttcccacatttgtttctttcctgaaagaagtagaatctccttatgaggtccatgattatatcagggcctatttaggagatacttctgaggccaaggagtttgccaagcagttccttgagcgccgtgccaaacagaaagccaaccagcagcgtcagcagcagcagctgccacagcagcagcagcagcagccgccacagcagccgccacagcagccacaacagcaggactctgtgtgggggatgaaccacagtacactccattcagtatttcagaccaatcaaagcaacaaccaacaatccaattttgaggctgtgcagagtggcaagaagaagaaaaagcagaagatggtccgagcagatcccagtttattaggattttcagtcaatgcatcatcggagcgactcaacatgggtgaaatcgagacgttggatgactactgagcacctgccagtggactggccatccctctcctgtctgccgactatggagtctccacctttggacacaacacttactcaccatttactctttatcactctgcaacaaatcacagaaccgatcatctcaggctttttcttctggccctttgtgtccaagattctttaatccatttttgttggtgaacatctcagactatagataagtggactggaccctgtgtcttgggggtggcagttgggattactccccaacaaggctgattttaggcagcatgtgttcactgtgctgtgatttcatctactgtctcccagaaagtgtgttgggatcggccattagcagcttgctttctcttgtcactttttttcttctattttgttttttcttcttctttttccccccatcagggcaaatggtctaactggtgcaatcatgaagagagttaatggttaacagacattggccaataacaaaacaccccatggactgtgactcgagtatccaacaggcagtcagagctctcccggtctgaaagttgcattgccactgctaactttgggattgcatcagagaggccctgagtggggttgagatgaggttggtttggtttgatgttacacactcctcacctgttctttctgagtgtcctttctctgaaaggatttatgtttttcttcgttagatagtgacttctgagcaagctgatctcccctggcatgctccaacctgattggacaaaggaagctctatggcctgggagagagactattcttaatttttctttcttacaaaaactgatttttcccataaatatttttacttcagaggactaggaccattttgttttgggcccttctgctgaaaatttgtctcgtttaagaggcagctagaatctttaccatatgtatgaatttgtataatttcatttttggatagggataaacttttgcttctgataaaagcctggaatttcatctggtcctcagagcattgcgtgtgtgtcttgctgtagcccggaaaaggttttgtgtaaagattctgggatggcaagttgtttgccttttctgaaaagagaacatacagaacctgtccatctttaagaccttcatccatggaatctactatacaggaggatgcagtgggctggaggggatgggcgaaaatgggagcaggaagcctggcctggcttctggtcatggcctcctaaaaccttaaacttcaagtagaaatgtactcaagccctatttataaacaaatacttttcctgcctccaccaaacccctacagaacatcacctggaattgccactcacactgggttggagtcattgggcagctgtgcctgtgcgagaggtgctgtggtctgggcagcccctggaaaagcacctttgctgcctgtcattgttgcctgaagaaggctggagttgctctgagagcagtttgggtttggagtattatatttggcttctatttttattattttggatcaccattctccctatcccttcttgcctccctcccttctaaacatgtgtaataactatacagagactgctacaaaattgtatatagtttttggatcaaatagcatgaggggagaggaaaccattaaaagttggggctcctactctcctttgctttgtaaattcaaaagttgggggtgggtaagagggatagttaaaatgtttacaaaactttaggctccctcggaacttttgccagtgtggaggaaaataaaaaagaacttaaat

SEQ ID NO: 138713 - DNA, 5747 bp, Homo sapiens
  Payload ID: 7175
  Gene Symbol: GIGYF2
  Gene Name: GRB10 interacting GYF protein 2
  Uniprot ID: Q6Y7W6
  ENST ID: ENST00000409196
  CDS Start-End: 99-3980
gttgttgaggctgaggactgactggggttctgagactccctgtcccggaccgcaggtttcttcacatataaaaatctattgtaaaaatacggaaaagaatggcagcggaaacgcagacactgaactttgggcctgaatggctccgagctctgtccagtggtgggagtattacatcccctcctctttctccagcattgccgaagtataaattagcagattatcgttacggcagagaagaaatgttagcacttttccttaaagacaacaagataccttcagaccttctggataaagaatttctgcctatcctccaggaggaaccccttccaccattggctctggtaccctttacagaagaagaacagagaaacttttccatgtctgtaaatagtgctgctgtcctgcgattgacaggacgaggaggaggaggaacagtggtgggggctcctagaggtcgaagttcttcaagagggcgaggcagaggcagaggtgaatgtggtttctaccaaagaagttttgatgaagtagagggtgtttttggtcgaggaggtggcagagaaatgcatagatcgcagagctgggaggaaaggggtgacagacgttttgaaaaaccaggacgaaaagatgtagggagaccaaattttgaggaaggtggaccaacatcagtagggagaaagcatgaatttatacgctcagaaagtgaaaattggcgcatctttagagaggaacaaaatggagaagatgaagatggaggttggcgactagctggatcaaggagggatggagagaggtggcgacctcacagtcctggctggcgggaacacatggaacgacgtcggaggtttgagtttgattttcgagatagagatgatgaacggggttaccgaagggttcgctctggcagtgggagcatagatgatgacagggatagcttgcccgaatggtgcttagaggatgctgaagaagaaatgggtacatttgactcatctggagcattcctttctctaaaaaaagtacagaaagagcctattccagaagagcaggagatggacttccggcctgtggacgaaggggaggagtgctctgactctgagggtagccataatgaagaggccaaagaacccgataagacaaataagaaagaaggagagaaaacagatagagtaggagttgaagctagtgaggaaactccccagacctcatcatcatctgctagaccaggtactccttcagaccatcagtctcaggaagcatcacagtttgagaggaaagatgaaccaaaaactgagcaaacggaaaaagctgaagaggagactcggatggaaaatagtctaccagccaaagtgcccagcagaggggatgaaatggttgctgatgtccagcagcccctgtcgcagattccttcagatacagcctctcctcttctcatacttccacctcctgttcccaatcctagtcctactctccggccagttgaaacaccagttgtaggtgctcctggtatgggcagtgtttccacagaacctgatgatgaagaaggtctcaaacatttggagcagcaagctgagaaaatggtggcttatctccaagacagtgcactagatgatgaaagattggcatcaaaactgcaagagcacagagctaaaggagtgtcgattccattgatgcatgaagcaatgcagaagtggtattacaaagatcctcagggagaaattcaaggtcccttcaataatcaggagatggcagaatggtttcaggcgggctattttactatgtctttattggtgaagagagcgtgtgatgaaagcttccaacctcttggcgatatcatgaaaatgtggggaagggttcccttttctccaggtccagctccccctcctcatatgggagagctggaccaggaacgactgaccaggcagcaagaactcacagccttataccagatgcagcacctgcagtaccagcagtttttaatacaacaacaatatgcacaggttttggcccaacagcagaaagcagcactgtcttcccagcagcagcagcagttggcacttcttcttcaacagtttcagaccttgaagatgagaatatctgatcagaacatcattccctcagtaactaggtctgtgtccgtgccagatactggctctatctgggagcttcagccaacagcttcacagcctacagtttgggaaggtggtagtgtatgggatcttcctctggacaccacgacaccaggccctgccctggaacagcttcagcagctagagaaggccaaagctgcaaagctagagcaagagagaagagaggcagaaatgagggcaaaacgggaagaggaagagcgaaagaggcaggaagaactccgaagacaacaggaggaaattcttcggcgacagcaggaagaagaaaggaaaaggcgagaggaagaagaacttgcccgaaggaaacaggaagaggctctgcgtcgccagcgggagcaagaaattgcattaaggcgacagcgagaagaggaagaaagacagcagcaagaagaagctcttagaagactggaagagaggagaagagaagaggaagaaaggcggaagcaggaagaattgttacgcaaacaggaagaggaggctgcaaaatgggcccgggaagaagaagaagcccagcgtcgattagaggagaaccggctgcggatggaagaggaggcagccagactccggcatgaggaagaagaacggaagagaaaggagctggaggtccagcggcagaaggagttaatgcgccagaggcagcagcagcaagaggctctccggaggttgcagcagcagcagcagcaacaacagctggcgcagatgaagcttccttcttcttcaacgtggggccagcagtccaatacaacagcatgtcagtcccaggccacgctgtcgttggctgaaatccaaaaactagaggaagaacgagaacggcagcttcgagaagagcaaaggcgccagcagagggagttgatgaaagctcttcagcagcagcagcaacagcaacagcagaaactctcaggttgggggaatgtcagcaaaccttcaggtaccacgaaatctcttctggagatccagcaggaagaggccaggcaaatgcaaaagcagcagcagcagcagcagcaacaccagcaaccaaacagagctcgtaacaatacgcattccaacctgcacaccagcattgggaattctgtttggggctctataaatactggtcctcctaaccagtgggcatctgacctagtcagtagtatttggagtaatgctgacactaaaaactccaacatgggattctgggatgatgcagtgaaagaggtgggacctaggaattcaacaaataaaaataaaaacaacgccagtctcagtaaatctgtaggtgtgtctaaccggcagaataagaaagtagaagaagaagaaaagttgctgaagctctttcagggagtaaataaagcccaagatggatttacgcagtggtgtgaacagatgcttcatgcccttaatacggcaaataacttggatgttcccacatttgtttctttcctgaaagaagtagaatctccttatgaggtccatgattatatcagggcctatttaggagatacttctgaggccaaggagtttgccaagcagttccttgagcgccgtgccaaacagaaagccaaccagcagcgtcagcagcagcagctgccacagcagcagcagcagcagccgccacagcagccgccacagcagccacaacagcaggactctgtgtgggggatgaaccacagtacactccattcagtatttcagaccaatcaaagcaacaaccaacaatccaattttgaggctgtgcagagtggcaagaagaagaaaaagcagaagatggtccgagcagatcccagtttattaggattttcagtcaatgcatcatcggagcgactcaacatgggtgaaatcgagacgttggatgactactgagcacctgccagtggactggccatccctctcctgtctgccgactatggagtctccacctttggacacaacacttactcaccatttactctttatcactctgcaacaaatcacagaaccgatcatctcaggctttttcttctggccctttgtgtccaagattctttaatccatttttgttggtgaacatctcagactatagataagtggactggaccctgtgtcttgggggtggcagttgggattactccccaacaaggctgattttaggcagcatgtgttcactgtgctgtgatttcatctactgtctcccagaaagtgtgttgggatcggccattagcagcttgctttctcttgtcactttttttcttctattttgttttttcttcttctttttccccccatcagggcaaatggtctaactggtgcaatcatgaagagagttaatggttaacagacattggccaataacaaaacaccccatggactgtgactcgagtatccaacaggcagtcagagctctcccggtctgaaagttgcattgccactgctaactttgggattgcatcagagaggccctgagtggggttgagatgaggttggtttggtttgatgttacacactcctcacctgttctttctgagtgtcctttctctgaaaggatttatgtttttcttcgttagatagtgacttctgagcaagctgatctcccctggcatgctccaacctgattggacaaaggaagctctatggcctgggagagagactattcttaatttttctttcttacaaaaactgatttttcccataaatatttttacttcagaggactaggaccattttgttttgggcccttctgctgaaaatttgtctcgtttaagaggcagctagaatctttaccatatgtatgaatttgtataatttcatttttggatagggataaacttttgcttctgataaaagcctggaatttcatctggtcctcagagcattgcgtgtgtgtcttgctgtagcccggaaaaggttttgtgtaaagattctgggatggcaagttgtttgccttttctgaaaagagaacatacagaacctgtccatctttaagaccttcatccatggaatctactatacaggaggatgcagtgggctggaggggatgggcgaaaatgggagcaggaagcctggcctggcttctggtcatggcctcctaaaaccttaaacttcaagtagaaatgtactcaagccctatttataaacaaatacttttcctgcctccaccaaacccctacagaacatcacctggaattgccactcacactgggttggagtcattgggcagctgtgcctgtgcgagaggtgctgtggtctgggcagcccctggaaaagcacctttgctgcctgtcattgttgcctgaagaaggctggagttgctctgagagcagtttgggtttggagtattatatttggcttctatttttattattttggatcaccattctccctatcccttcttgcctccctcccttctaaacatgtgtaataactatacagagactgctacaaaattgtatatagtttttggatcaaatagcatgaggggagaggaaaccattaaaagttggggctcctactctcctttgctttgtaaattcaaaagttgggggtgggtaagagggatagttaaaatgtttacaaaactttaggctccctcggaacttttgccagtgtggaggaaaataaaaaagaacttaaataaaatctgattgtattcta

SEQ ID NO: 138714 - DNA, 5937 bp, Homo sapiens
  Payload ID: 7175
  Gene Symbol: GIGYF2
  Gene Name: GRB10 interacting GYF protein 2
  Uniprot ID: Q6Y7W6
  ENST ID: ENST00000409451
  CDS Start-End: 227-4189
ggctgaggactgactggggttctgagactccctgtcccggaccgcagattatagtgggaccagtctcattaggttgaatctacagcctatgttggtgttaacccaggtctcttagagcgttaaaaggatctgaacaaagtctgctcaaatctcctgctgtgaaccagcagaatttttgaacaggtttcttcacatataaaaatctattgtaaaaatacggaaaagaatggcagcggaaacgcagacactgaactttgggcctgaatggctccgagctctgtccagtggtgggagtattacatcccctcctctttctccagcattgccgaagtataaattagcagattatcgttacggcagagaagaaatgttagcacttttccttaaagacaacaagataccttcagaccttctggataaagaatttctgcctatcctccaggaggaaccccttccaccattggctctggtaccctttacagaagaagaacagagaaacttttccatgtctgtaaatagtgctgctgtcctgcgattgacaggacgaggaggaggaggaacagtggtgggggctcctagaggtcgaagttcttcaagagggcgaggcagaggcagaggtgaatgtggtttctaccaaagaagttttgatgaagtagagggtgtttttggtcgaggaggtggcagagaaatgcatagatcgcagagctgggaggaaaggggtgacagacgttttgaaaaaccaggacgaaaagatgtaggaaagaagaatggatattattgcatgtactcaccagttcttttgctgggtcagcctttatgccaagggagaccaaattttgaggaaggtggaccaacatcagtagggagaaagcatgaatttatacgctcagaaagtgaaaattggcgcatctttagagaggaacaaaatggagaagatgaagatggaggttggcgactagctggatcaaggagggatggagagaggtggcgacctcacagtcctgatggccctcgttctgcaggctggcgggaacacatggaacgacgtcggaggtttgagtttgattttcgagatagagatgatgaacggggttaccgaagggttcgctctggcagtgggagcatagatgatgacagggatagcttgcccgaatggtgcttagaggatgctgaagaagaaatgggtacatttgactcatctggagcattcctttctctaaaaaaagtacagaaagagcctattccagaagagcaggagatggacttccggcctgtggacgaaggggaggagtgctctgactctgagggtagccataatgaagaggccaaagaacccgataagacaaataagaaagaaggagagaaaacagatagagtaggagttgctagtgaggaaactccccagacctcatcatcatctgctagaccaggtactccttcagaccatcagtctcaggaagcatcacagtttgagaggaaagatgaaccaaaaactgagcaaacggaaaaagctgaagaggagactcggatggaaaatagtctaccagccaaagtgcccagcagaggggatgaaatggttgctgatgtccagcagcccctgtcgcagattccttcagatacagcctctcctcttctcatacttccacctcctgttcccaatcctagtcctactctccggccagttgaaacaccagttgtaggtgctcctggtatgggcagtgtttccacagaacctgatgatgaagaaggtctcaaacatttggagcagcaagctgagaaaatggtggcttatctccaagacagtgcactagatgatgaaagattggcatcaaaactgcaagagcacagagctaaaggagtgtcgattccattgatgcatgaagcaatgcagaagtggtattacaaagatcctcagggagaaattcaaggtcccttcaataatcaggagatggcagaatggtttcaggcgggctattttactatgtctttattggtgaagagagcgtgtgatgaaagcttccaacctcttggcgatatcatgaaaatgtggggaagggttcccttttctccaggtccagctccccctcctcatatgggagagctggaccaggaacgactgaccaggcagcaagaactcacagccttataccagatgcagcacctgcagtaccagcagtttttaatacaacaacaatatgcacaggttttggcccaacagcagaaagcagcactgtcttcccagcagcagcagcagttggcacttcttcttcaacagtttcagaccttgaagatgagaatatctgatcagaacatcattccctcagtaactaggtctgtgtccgtgccagatactggctctatctgggagcttcagccaacagcttcacagcctacagtttgggaaggtggtagtgtatgggatcttcctctggacaccacgacaccaggccctgccctggaacagcttcagcagctagagaaggccaaagctgcaaagctagagcaagagagaagagaggcagaaatgagggcaaaacgggaagaggaagagcgaaagaggcaggaagaactccgaagacaacaggaggaaattcttcggcgacagcaggaagaagaaaggaaaaggcgagaggaagaagaacttgcccgaaggaaacaggaagaggctctgcgtcgccagcgggagcaagaaattgcattaaggcgacagcgagaagaggaagaaagacagcagcaagaagaagctcttagaagactggaagagaggagaagagaagaggaagaaaggcggaagcaggaagaattgttacgcaaacaggaagaggaggctgcaaaatgggcccgggaagaagaagaagcccagcgtcgattagaggagaaccggctgcggatggaagaggaggcagccagactccggcatgaggaagaagaacggaagagaaaggagctggaggtccagcggcagaaggagttaatgcgccagaggcagcagcagcaagaggctctccggaggttgcagcagcagcagcagcaacaacagctggcgcagatgaagcttccttcttcttcaacgtggggccagcagtccaatacaacagcatgtcagtcccaggccacgctgtcgttggctgaaatccaaaaactagaggaagaacgagaacggcagcttcgagaagagcaaaggcgccagcagagggagttgatgaaagctcttcagcagcagcagcaacagcaacagcagaaactctcaggttgggggaatgtcagcaaaccttcaggtaccacgaaatctcttctggagatccagcaggaagaggccaggcaaatgcaaaagcagcagcagcagcagcagcaacaccagcaaccaaacagagctcgtaacaatacgcattccaacctgcacaccagcattgggaattctgtttggggctctataaatactggtcctcctaaccagtgggcatctgacctagtcagtagtatttggagtaatgctgacactaaaaactccaacatgggattctgggatgatgcagtgaaagaggtgggacctaggaattcaacaaataaaaataaaaacaacgccagtctcagtaaatctgtaggtgtgtctaaccggcagaataagaaagtagaagaagaagaaaagttgctgaagctctttcagggagtaaataaagcccaagatggatttacgcagtggtgtgaacagatgcttcatgcccttaatacggcaaataacttggatgttcccacatttgtttctttcctgaaagaagtagaatctccttatgaggtccatgattatatcagggcctatttaggagatacttctgaggccaaggagtttgccaagcagttccttgagcgccgtgccaaacagaaagccaaccagcagcgtcagcagcagcagctgccacagcagcagcagcagcagccgccacagcagccgccacagcagccacaacagcaggactctgtgtgggggatgaaccacagtacactccattcagtatttcagaccaatcaaagcaacaaccaacaatccaattttgaggctgtgcagagtggcaagaagaagaaaaagcagaagatggtccgagcagatcccagtttattaggattttcagtcaatgcatcatcggagcgactcaacatgggtgaaatcgagacgttggatgactactgagcacctgccagtggactggccatccctctcctgtctgccgactatggagtctccacctttggacacaacacttactcaccatttactctttatcactctgcaacaaatcacagaaccgatcatctcaggctttttcttctggccctttgtgtccaagattctttaatccatttttgttggtgaacatctcagactatagataagtggactggaccctgtgtcttgggggtggcagttgggattactccccaacaaggctgattttaggcagcatgtgttcactgtgctgtgatttcatctactgtctcccagaaagtgtgttgggatcggccattagcagcttgctttctcttgtcactttttttcttctattttgttttttcttcttctttttccccccatcagggcaaatggtctaactggtgcaatcatgaagagagttaatggttaacagacattggccaataacaaaacaccccatggactgtgactcgagtatccaacaggcagtcagagctctcccggtctgaaagttgcattgccactgctaactttgggattgcatcagagaggccctgagtggggttgagatgaggttggtttggtttgatgttacacactcctcacctgttctttctgagtgtcctttctctgaaaggatttatgtttttcttcgttagatagtgacttctgagcaagctgatctcccctggcatgctccaacctgattggacaaaggaagctctatggcctgggagagagactattcttaatttttctttcttacaaaaactgatttttcccataaatatttttacttcagaggactaggaccattttgttttgggcccttctgctgaaaatttgtctcgtttaagaggcagctagaatctttaccatatgtatgaatttgtataatttcatttttggatagggataaacttttgcttctgataaaagcctggaatttcatctggtcctcagagcattgcgtgtgtgtcttgctgtagcccggaaaaggttttgtgtaaagattctgggatggcaagttgtttgccttttctgaaaagagaacatacagaacctgtccatctttaagaccttcatccatggaatctactatacaggaggatgcagtgggctggaggggatgggcgaaaatgggagcaggaagcctggcctggcttctggtcatggcctcctaaaaccttaaacttcaagtagaaatgtactcaagccctatttataaacaaatacttttcctgcctccaccaaacccctacagaacatcacctggaattgccactcacactgggttggagtcattgggcagctgtgcctgtgcgagaggtgctgtggtctgggcagcccctggaaaagcacctttgctgcctgtcattgttgcctgaagaaggctggagttgctctgagagcagtttgggtttggagtattatatttggcttctatttttattattttggatcaccattctccctatcccttcttgcctccctcccttctaaacatgtgtaataactatacagagactgctacaaaattgtatatagtttttggatcaaatagcatgaggggagaggaaaccattaaaagttggggctcctactctcctttgctttgtaaattcaaaagttgggggtgggtaagagggatagttaaaatgtttacaaaactttaggctccctcggaacttttgccagtgtggaggaaaataaaaaagaacttaaat

SEQ ID NO: 138715 - DNA, 957 bp, Homo sapiens
  Payload ID: 7175
  Gene Symbol: GIGYF2
  Gene Name: GRB10 interacting GYF protein 2
  ENST ID: ENST00000410033
  CDS Start-End: 428-957
gtgtatgacagtattttatcaaccatgtgccagaggggcttacctttaatacaggaaattatgataagtaaactgttttcacttttaaaaatcaagttattagcaaaaccactagcttagatctgggtagacattataacaggcattcagagtattttaaggaagtggtaggtagatagaaacatactgaagttaatgtttgggtagagttaggatggttttataccaactcttcatggctgcctcttgggtgggttttctgtcattagtgggcattgtttacatcacaaggtctagacaattttcattagtctgtgacctgggccagatgttatagttctctaaaaggcatcactgcattttatgctgagcttgtccgtaggcagagggtttgtagactatgttcccaacaagcattcagtgaagaatggataggatctgggctgagagagaaaagaaattccagctggtcaaaaacaaacaagatggccctcgttctgcaggctggcgggaacacatggaacgacgtcggaggtttgagtttgattttcgagatagagatgatgaacggggttaccgaagggttcgctctggcagtgggagcatagatgatgacagggatagcttgcccgaatggtgcttagaggatgctgaagaagaaatgggtacatttgactcatctggagcattcctttctctaaaaaaagtacagaaagagcctattccagaagagcaggagatggacttccggcctgtggacgaaggggaggagtgctctgactctgagggtagccataatgaagaggccaaagaacccgataagacaaataagaaagaaggagagaaaacagatagagtaggagttgaagctagtgaggaaactccccagacctcatcatcatctgctagaccaggtactccttcagaccatcagtctcaggaagcatcacagtttga

SEQ ID NO: 138716 - DNA, 566 bp, Homo sapiens
  Payload ID: 7175
  Gene Symbol: GIGYF2
  Gene Name: GRB10 interacting GYF protein 2
  ENST ID: ENST00000458528
  CDS Start-End: 70-249
attttatgctgagcttgtccgtaggcagagggtttgtagactatgttcccaacaagcattcagtgaagaatggataggatctgggctgagagagaaaagaaattccagctggtcaaaaacaaacaagatggccctcgttctgcaggctggcgggaacacatggaacgacgtcggagtacagaaagagcctattccagaagagcaggagatggacttccggcctgtggacgaaggggaggagtgctctgactctgagggtagccataatgaagaggccaaagaacccgataagacaaataagaaagaaggagagaaaacagatagagtaggagttgaagctagtgaggaaactccccagacctcatcatcatctgctagaccaggtactccttcagaccatcagtctcaggaagcatcacagtttgagaggaaagatgaaccaaaaactgagcaaacggaaaaagctgaagaggagactcggatggaaaatagtctaccagccaaagtgcccagcagaggggatgaaatggttgctgatgtccagcagcccctgtcgcagattcctt

SEQ ID NO: 138717 - DNA, 564 bp, Homo sapiens
  Payload ID: 7175
  Gene Symbol: GIGYF2
  Gene Name: GRB10 interacting GYF protein 2
  ENST ID: ENST00000421778
  CDS Start-End: 295-564
agcattgaaaaaagaaaacatgagatacagtaaagaaaaagtagctgcataactggctgggtgtatttaatacattaaaaaatggataagtcttattctgtcagtcctgtttcagagatctgaaaattgtcaatgctttgtccattgatgtggatatccaggtcagtcctgtttgggcttttagaaaccagaggagttggaaattcagggacagtcttgtcaaaattctccatcttgatttgatattcacctttggaacctcgggtcaacagagatgcaaaacagtgatgtaacatgatttcagacgggagaccaaattttgaggaaggtggaccaacatcagtagggagaaagcatgaatttatacgctcagaaagtgaaaattggcgcatctttagagaggaacaaaatggagaagatgaagatggaggttggcgactagctggatcaaggagggatggagagaggtggcgacctcacagtcctgatggccctcgttctgcaggctggcgggaacacatggaacgacgtcggaggtttgagtttgattttcgagatagagat

SEQ ID NO: 138718 - DNA, 588 bp, Homo sapiens
  Payload ID: 7175
  Gene Symbol: GIGYF2
  Gene Name: GRB10 interacting GYF protein 2
  ENST ID: ENST00000445650
  CDS Start-End: 231-588
acatttgagtaggagggctggggcatttgaagccttgcgatgggaactgtgtgaaggaaatggagctgtttagataggagacaagattgtggacagggcagagtggggaggagggcttatagggtcactctctatcaatacctgcctactaatcatgatcatgtgagtttccaaaggaacgtttaaagttagttccgaagtagtcttcctgatcatgtgtgcaagacttcatgaccaagctcccagatgatccagggagaccaaattttgaggaaggtggaccaacatcagtagggagaaagcatgaatttatacgctcagaaagtgaaaattggcgcatctttagagaggaacaaaatggagaagatgaagatggaggttggcgactagctggatcaaggagggatggagagaggtggcgacctcacagtcctgatggccctcgttctgcaggctggcgggaacacatggaacgacgtcggaggtttgagtttgattttcgagatagagatgatgaacggggttaccgaagggttcgctctggcagtgggagcatagatgatgacagggatagcttgcccgaatggt

SEQ ID NO: 138719 - DNA, 606 bp, Homo sapiens
  Payload ID: 7175
  Gene Symbol: GIGYF2
  Gene Name: GRB10 interacting GYF protein 2
  ENST ID: ENST00000429187
  CDS Start-End: 288-606
ggactgactggggttctgagactccctgtcccggaccgcagcgttaaaaggatctgaacaaagtctgctcaaatctcctgctgtgaaccagcagaatttttgaacagatgctgcttgaatctggggcttcgtttatatttcaagactgctgcctgtaggagctccatctgtatcatttgtgttaatagtgaccctggagttttgtacttccagaacctatgtgagcatatgtgatggccttgtagtttcttcacatataaaaatctattgtaaaaatacggaaaagaatggcagcggaaacgcagacactgaactttgggcctgaatggctccgagctctgtccagtggtgggagtattacatcccctcctctttctccagcattgccgaagtataaattagcagattatcgttacggcagagaagaaatgttagcacttttccttaaagacaacaagataccttcagaccttctggataaagaatttctgcctatcctccaggaggaaccccttccaccattggctctggtaccctttacagaagaagaacagagaaacttttccatgtctgtaaatagtgctgctgtcctgcgattgacaggac

SEQ ID NO: 138720 - DNA, 556 bp, Homo sapiens
  Payload ID: 7175
  Gene Symbol: GIGYF2
  Gene Name: GRB10 interacting GYF protein 2
  ENST ID: ENST00000455139
  CDS Start-End: 371-556
attgaaaaaagaaaacatgagatacagtaaagaaaaagtagctgcataactggctgggtgtatttaatacattaaaaaatggataagtcttattctgtcagtcctgtttcagagatctgaaaattgtcaatgctttgtccattgatgtggatatccagggagaccaaattttgaggaaggtggaccaacatcagtagggagaaagcatgaatttatacgctcagaaagtgaaaattggcgcatctttagagaggaacaaaatggagaagatgaagatggaggttggcgactagctggatcaaggagggatggagagaggtggcgacctcacagtcctgatggccctcgttctgcaggctggcgggaacacatggaacgacgtcggaggtttgagtttgattttcgagatagagatgatgaacggggttaccgaagggttcgctctggcagtgggagcatagatgatgacagggatagcttgcccgaatggtgcttagaggatgctgaagaagaaatgggtacatttgactcatctggagcattcctttctctaaaa

SEQ ID NO: 138721 - DNA, 530 bp, Homo sapiens
  Payload ID: 7175
  Gene Symbol: GIGYF2
  Gene Name: GRB10 interacting GYF protein 2
  ENST ID: ENST00000427233
  CDS Start-End: 491-530
gtgacgtgcgtggcgacgtgtcggccatcttgtgttgttgaggctgaggactgactggggttctgagactccctgtcccggaccgcagattatagtgggaccagtctcattaggttgaatctacagcctatgttggtgttaacccaggtctcttagagcgttaaaaggatctgaacaaagtctgctcaaatctcctgctgtgaaccagcagaatttttgaacagagatactgtagctaagtgcaacaaggtgtcctgaattggagactggcacagaacaaggatgttgttggaaaaactgatgaaatctgaataaactctgaagtatagagactgtctcgctctgtcacccaggctagagtgcagtggtgctatcgtaactcactggagccctgatctaggctcaaaccatcctcccacctcagcctcccaagtagctgggactaaggtttcttcacatataaaaatctattgtaaaaatacggaaaagaatggcagcggaaacgcagacactgaactttgggcctgaat

SEQ ID NO: 138722 - DNA, 561 bp, Homo sapiens
  Payload ID: 7175
  Gene Symbol: GIGYF2
  Gene Name: GRB10 interacting GYF protein 2
  ENST ID: ENST00000430720
  CDS Start-End: 224-561
atcttgtgttgttgaggctgaggactgactggggttctgagactccctgtcccggaccgcagagactgtctcgctctgtcacccaggctagagtgcagtggtgctatcgtaactcactggagccctgatctaggctcaaaccatcctcccacctcagcctcccaagtagctgggactaaggtttcttcacatataaaaatctattgtaaaaatacggaaaagaatggcagcggaaacgcagacactgaactttgggcctgaatggctccgagctctgtccagtggtgggagtattacatcccctcctctttctccagcattgccgaagtataaattagcagattatcgttacggcagagaagaaatgttagcacttttccttaaagacaacaagataccttcagaccttctggataaagaatttctgcctatcctccaggaggaaccccttccaccattggctctggtaccctttacagaagaagaacagagaaacttttccatgtctgtaaatagtgctgctgtcctgcgattgacaggacgaggaggaggaggaacagt

SEQ ID NO: 138723 - DNA, 677 bp, Homo sapiens
  Payload ID: 7175
  Gene Symbol: GIGYF2
  Gene Name: GRB10 interacting GYF protein 2
  ENST ID: ENST00000427649
  CDS Start-End: 249-677
gaactgacttggagaaggggtgcattttttccctctaatcaggaccggtctttaggagaccaaattttgaggaaggtggaccaacatcagtagggagaaagcatgaatttatacgctcagaaagtgaaaattggcgcatctttagagaggaacaaaatggagaagatgaagatggaggttggcgactagctggatcaaggagggatggagagaggtggcgacctcacagtcctggctggcgggaacacatggaacgacgtcggaggtttgagtttgattttcgagatagagatgatgaacggggttaccgaagggttcgctctggcagtgggagcatagatgatgacagggatagcttgcccgaatggtgcttagaggatgctgaagaagaaatgggtacatttgactcatctggagcattcctttctctaaaaaaagtacagaaagagcctattccagaagagcaggagatggacttccggcctgtggacgaaggggaggagtgctctgactctgagggtagccataatgaagaggccaaagaacccgataagacaaataagaaagaaggagagaaaacagatagagtaggagttgaagctagtgaggaaactccccagacctcatcatcatctgctagaccaggtactccttcagaccatcagtctcaggaagca

SEQ ID NO: 138724 - DNA, 626 bp, Homo sapiens
  Payload ID: 7175
  Gene Symbol: GIGYF2
  Gene Name: GRB10 interacting GYF protein 2
  ENST ID: ENST00000424038
  CDS Start-End: 113-391
cagcgttaaaaggatctgaacaaagtctgctcaaatctcctgctgtgaaccagcagaatttttgaacaggtttcttcacatataaaaatctattgtaaaaatacggaaaagaatggcagcggaaacgcagacactgaactttgggcctgaatggctccgagctctgtccagtggtgggagtattacatcccctcctctttctccagcattgccgaagtataaattagcagattatcgttacggcagagaagaaatgttagcacttttccttaaagacaacaagataccttcagaccttctggataaagaatttctgcctatcctccaggaggaaccccttccaccattggctctggtaccctttacagaagaagaacagaggcagaggtgaatgtggtttctaccaaagaagttttgatgaagtagagggtgtttttggtcgaggaggtggcagagaaatgcatagatcgcagagctgggaggaaaggggtgacagacgttttgaaaaaccaggacgaaaagatgtagggagaccaaattttgaggaaggtggaccaacatcagtagggagaaagcatgaatttatacgctcagaaagtgaaaattggcgcatctttagagaggaa

SEQ ID NO: 138725 - DNA, 547 bp, Homo sapiens
  Payload ID: 7175
  Gene Symbol: GIGYF2
  Gene Name: GRB10 interacting GYF protein 2
  ENST ID: ENST00000436349
  CDS Start-End: 362-547
tggggcatttgaagccttgcgatgggaactgtgtgaaggaaatggagctgtttagataggagacaagattgtggacagggcagagtggggaggagggcttatagggtcactctctatcaatacctgcctactaatcatgatcatgtgagggagaccaaattttgaggaaggtggaccaacatcagtagggagaaagcatgaatttatacgctcagaaagtgaaaattggcgcatctttagagaggaacaaaatggagaagatgaagatggaggttggcgactagctggatcaaggagggatggagagaggtggcgacctcacagtcctgatggccctcgttctgcaggctggcgggaacacatggaacgacgtcggaggtttgagtttgattttcgagatagagatgatgaacggggttaccgaagggttcgctctggcagtgggagcatagatgatgacagggatagcttgcccgaatggtgcttagaggatgctgaagaagaaatgggtacatttgactcatctggagcattcctttctctaaaa

SEQ ID NO: 138726 - DNA, 583 bp, Homo sapiens
  Payload ID: 7175
  Gene Symbol: GIGYF2
  Gene Name: GRB10 interacting GYF protein 2
  ENST ID: ENST00000424414
  CDS Start-End: 370-583
gggtccacacatttgagtaggagggctggggcatttgaagccttgcgatgggaactgtgtgaaggaaatggagctgtttagataggagacaagattgtggacagggcagagtggggaggagggcttatagggtcactctctatcaatacctgcctactaatcatgatcatgtgagggagaccaaattttgaggaaggtggaccaacatcagtagggagaaagcatgaatttatacgctcagaaagtgaaaattggcgcatctttagagaggaacaaaatggagaagatgaagatggaggttggcgactagctggatcaaggagggatggagagaggtggcgacctcacagtcctggctggcgggaacacatggaacgacgtcggaggtttgagtttgattttcgagatagagatgatgaacggggttaccgaagggttcgctctggcagtgggagcatagatgatgacagggatagcttgcccgaatggtgcttagaggatgctgaagaagaaatgggtacatttgactcatctggagcattcctttctctaaaaaaagtacagaaagagcctattccagaag

SEQ ID NO: 138727 - DNA, 564 bp, Homo sapiens
  Payload ID: 7175
  Gene Symbol: GIGYF2
  Gene Name: GRB10 interacting GYF protein 2
  ENST ID: ENST00000421433
  CDS Start-End: 285-564
atcttgtgttgttgaggctgaggactgactggggttctgagactccctgtcccggaccgcagcgttaaaaggatctgaacaaagtctgctcaaatctcctgctgtgaaccagcagaatttttgaacagatgctgcttgaatctggggcttcgtttatatttcaagactgctgcctgtaggagctccatctgtatcatttgtgttaatagtgaccctggagttttgtacttccagaacctatgtttcttcacatataaaaatctattgtaaaaatacggaaaagaatggcagcggaaacgcagacactgaactttgggcctgaatggctccgagctctgtccagtggtgggagtattacatcccctcctctttctccagcattgccgaagtataaattagcagattatcgttacggcagagaagaaatgttagcacttttccttaaagacaacaagataccttcagaccttctggataaagaatttctgcctatcctccaggaggaaccccttccaccattggctctggtaccctttacagaagaagaacagagaaacttttcca

SEQ ID NO: 138728 - DNA, 544 bp, Homo sapiens
  Payload ID: 7175
  Gene Symbol: GIGYF2
  Gene Name: GRB10 interacting GYF protein 2
  ENST ID: ENST00000428883
  CDS Start-End: 199-544
acgtgcgtggcgacgtgtcggccatcttgtgttgttgaggctgaggactgactggggttctgagactccctgtcccggaccgcagagaccacgtctccacctcctgggctccaacgattctcccatcttggcctcccaaagcgctggatttacaggtttcttcacatataaaaatctattgtaaaaatacggaaaagaatggcagcggaaacgcagacactgaactttgggcctgaatggctccgagctctgtccagtggtgggagtattacatcccctcctctttctccagcattgccgaagtataaattagcagattatcgttacggcagagaagaaatgttagcacttttccttaaagacaacaagataccttcagaccttctggataaagaatttctgcctatcctccaggaggaaccccttccaccattggctctggtaccctttacagaagaagaacagagaaacttttccatgtctgtaaatagtgctgctgtcctgcgattgacaggacgaggaggaggaggaacagtggtggggg

SEQ ID NO: 138729 - DNA, 2329 bp, Homo sapiens
  Payload ID: 7175
  Gene Symbol: GIGYF2
  Gene Name:: GRB10 interacting GYF protein 2
  ENST ID: ENST00000423659
  CDS Start-End: 170-2329
cttgtgttgttgaggctgaggactgactggggttctgagactccctgtcccggaccgcagcgttaaaaggatctgaacaaagtctgctcaaatctcctgctgtgaaccagcagaatttttgaacaggtttcttcacatataaaaatctattgtaaaaatacggaaaagaatggcagcggaaacgcagacactgaactttgggcctgaatggctccgagctctgtccagtggtgggagtattacatcccctcctctttctccagcattgccgaagtataaattagcagattatcgttacggcagagaagaaatgttagcacttttccttaaagacaacaagataccttcagaccttctggataaagaatttctgcctatcctccaggaggaaccccttccaccattggctctggtaccctttacagaagaagaacagagaaacttttccatgtctgtaaatagtgctgctgtcctgcgattgacaggacgaggaggaggaggaacagtggtgggggctcctagaggtcgaagttcttcaagagggcgagggagaccaaattttgaggaaggtggaccaacatcagtagggagaaagcatgaatttatacgctcagaaagtgaaaattggcgcatctttagagaggaacaaaatggagaagatgaagatggaggttggcgactagctggatcaaggagggatggagagaggtggcgacctcacagtcctggctggcgggaacacatggaacgacgtcggaggtttgagtttgattttcgagatagagatgatgaacggggttaccgaagggttcgctctggcagtgggagcatagatgatgacagggatagcttgcccgaatggtgcttagaggatgctgaagaagaaatgggtacatttgactcatctggagcattcctttctctaaaaaaagtacagaaagagcctattccagaagagcaggagatggacttccggcctgtggacgaaggggaggagtgctctgactctgagggtagccataatgaagaggccaaagaacccgataagacaaataagaaagaaggagagaaaacagatagagtaggagttgaagctagtgaggaaactccccagacctcatcatcatctgctagaccaggtactccttcagaccatcagtctcaggaagcatcacagtttgagaggaaagatgaaccaaaaactgagcaaacggaaaaagctgaagaggagactcggatggaaaatagtctaccagccaaagtgcccagcagaggggatgaaatggttgctgatgtccagcagcccctgtcgcagattccttcagatacagcctctcctcttctcatacttccacctcctgttcccaatcctagtcctactctccggccagttgaaacaccagttgtaggtgctcctggtatgggcagtgtttccacagaacctgatgatgaagaaggtctcaaacatttggagcagcaagctgagaaaatggtggcttatctccaagacagtgcactagatgatgaaagattggcatcaaaactgcaagagcacagagctaaaggagtgtcgattccattgatgcatgaagcaatgcagaagtggtattacaaagatcctcagggagaaattcaaggtcccttcaataatcaggagatggcagaatggtttcaggcgggctattttactatgtctttattggtgaagagagcgtgtgatgaaagcttccaacctcttggcgatatcatgaaaatgtggggaagggttcccttttctccaggtccagctccccctcctcatatgggagagctggaccaggaacgactgaccaggcagcaagaactcacagccttataccagatgcagcacctgcagtaccagcagtttttaatacaacaacaatatgcacaggttttggcccaacagcagaaagcagcactgtcttcccagcagcagcagcagttggcacttcttcttcaacagtttcagaccttgaagatgagaatatctgatcagaacatcattccctcagtaactaggtctgtgtccgtgccagatactggctctatctgggagcttcagccaacagcttcacagcctacagtttgggaaggtggtagtgtatgggatcttcctctggacaccacgacaccaggccctgccctggaacagcttcagcagctagagaaggccaaagctgcaaagctagagcaagagagaagagaggcagaaatgagggcaaaacgggaagaggaagagcgaaagaggcaggaagaactccgaagacaacaggaggaaattcttcggcgacagcaggaagaagaaagg

SEQ ID NO: 138730 - DNA, 588 bp, Homo sapiens
  Payload ID: 7175
  Gene Symbol: GIGYF2
  Gene Name: GRB10 interacting GYF protein 2
  ENST ID: ENST00000425040
  CDS Start-End: 290-588
atcttgtgttgttgaggctgaggactgactggggttctgagactccctgtcccggaccgcagcgttaaaaggatctgaacaaagtctgctcaaatctcctgctgtgaaccagcagaatttttgaacagagactgtctcgctctgtcacccaggctagagtgcagtggtgctatcgtaactcactggagccctgatctaggctcaaaccatcctcccacctcagcctcccaagtagctgggactaaggtttcttcacatataaaaatctattgtaaaaatacggaaaagaatggcagcggaaacgcagacactgaactttgggcctgaatggctccgagctctgtccagtggtgggagtattacatcccctcctctttctccagcattgccgaagtataaattagcagattatcgttacggcagagaagaaatgttagcacttttccttaaagacaacaagataccttcagaccttctggataaagaatttctgcctatcctccaggaggaaccccttccaccattggctctggtaccctttacagaagaagaacagagaaacttttccatgtctgtaaatagtgctgc

SEQ ID NO: 138731 - DNA, 2658 bp, Homo sapiens
  Payload ID: 7175
  Gene Symbol: GIGYF2
  Gene Name: GRB10 interacting GYF protein 2
  ENST ID: ENST00000440945
  CDS Start-End: 151-2658
ggactgactggggttctgagactccctgtcccggaccgcagcgttaaaaggatctgaacaaagtctgctcaaatctcctgctgtgaaccagcagaatttttgaacaggtttcttcacatataaaaatctattgtaaaaatacggaaaagaatggcagcggaaacgcagacactgaactttgggcctgaatggctccgagctctgtccagtggtgggagtattacatcccctcctctttctccagcattgccgaagtataaattagcagattatcgttacggcagagaagaaatgttagcacttttccttaaagacaacaagataccttcagaccttctggataaagaatttctgcctatcctccaggaggaaccccttccaccattggctctggtaccctttacagaagaagaacagagaaacttttccatgtctgtaaatagtgctgctgtcctgcgattgacaggacgaggaggaggaggaacagtggtgggggctcctagaggtcgaagttcttcaagagggcgaggcagaggcagaggtgaatgtggtttctaccaaagaagttttgatgaagtagagggtgtttttggtcgaggaggtggcagagaaatgcatagatcgcagagctgggaggaaaggggtgacagacgttttgaaaaaccaggacgaaaagatgtagggagaccaaattttgaggaaggtggaccaacatcagtagggagaaagcatgaatttatacgctcagaaagtgaaaattggcgcatctttagagaggaacaaaatggagaagatgaagatggaggttggcgactagctggatcaaggagggatggagagaggtggcgacctcacagtcctggctggcgggaacacatggaacgacgtcggaggtttgagtttgattttcgagatagagatgatgaacggggttaccgaagggttcgctctggcagtgggagcatagatgatgacagggatagcttgcccgaatggtgcttagaggatgctgaagaagaaatgggtacatttgactcatctggagcattcctttctctaaaaaaagtacagaaagagcctattccagaagagcaggagatggacttccggcctgtggacgaaggggaggagtgctctgactctgagggtagccataatgaagaggccaaagaacccgataagacaaataagaaagaaggagagaaaacagatagagtaggagttgaagctagtgaggaaactccccagacctcatcatcatctgctagaccaggtactccttcagaccatcagtctcaggaagcatcacagtttgagaggaaagatgaaccaaaaactgagcaaacggaaaaagctgaagaggagactcggatggaaaatagtctaccagccaaagtgcccagcagaggggatgaaatggttgctgatgtccagcagcccctgtcgcagattccttcagatacagcctctcctcttctcatacttccacctcctgttcccaatcctagtcctactctccggccagttgaaacaccagttgtaggtgctcctggtatgggcagtgtttccacagaacctgatgatgaagaaggtctcaaacatttggagcagcaagctgagaaaatggtggcttatctccaagacagtgcactagatgatgaaagattggcatcaaaactgcaagagcacagagctaaaggagtgtcgattccattgatgcatgaagcaatgcagaagtggtattacaaagatcctcagggagaaattcaaggtcccttcaataatcaggagatggcagaatggtttcaggcgggctattttactatgtctttattggtgaagagagcgtgtgatgaaagcttccaacctcttggcgatatcatgaaaatgtggggaagggttcccttttctccaggtccagctccccctcctcatatgggagagctggaccaggaacgactgaccaggcagcaagaactcacagccttataccagatgcagcacctgcagtaccagcagtttttaatacaacaacaatatgcacaggttttggcccaacagcagaaagcagcactgtcttcccagcagcagcagcagttggcacttcttcttcaacagtttcagaccttgaagatgagaatatctgatcagaacatcattccctcagtaactaggtctgtgtccgtgccagatactggctctatctgggagcttcagccaacagcttcacagcctacagtttgggaaggtggtagtgtatgggatcttcctctggacaccacgacaccaggccctgccctggaacagcttcagcagctagagaaggccaaagctgcaaagctagagcaagagagaagagaggcagaaatgagggcaaaacgggaagaggaagagcgaaagaggcaggaagaactccgaagacaacaggaggaaattcttcggcgacagcaggaagaagaaaggaaaaggcgagaggaagaagaacttgcccgaaggaaacaggaagaggctctgcgtcgccagcgggagcaagaaattgcattaaggcgacagcgagaagaggaagaaagacagcagcaagaagaagctcttagaagactggaagagaggagaagagaagaggaagaaaggcggaagcaggaagaattgttacgcaaa

SEQ ID NO: 138732 - DNA, 466 bp, Homo sapiens
  Payload ID: 7175
  Gene Symbol: GIGYF2
  Gene Name: GRB10 interacting GYF protein 2
  ENST ID: ENST00000456491
  CDS Start-End: 263-466
gtgcgtggcgacgtgtcggccatcttgtgttgttgaggctgaggactgactggggttctgagactccctgtcccggaccgcagattatagtgggaccagtctcattaggttgaatctacagcctatgttggtgttaacccaggtctcttagagcgttaaaaggatctgaacaaagtctgctcaaatctcctgctgtgaaccagcagaatttttgaacaggtttcttcacatataaaaatctattgtaaaaatacggaaaagaatggcagcggaaacgcagacactgaactttgggcctgaatggctccgagctctgtccagtggtgggagtattacatcccctcctctttctccagcattgccgaagtataaattagcagattatcgttacggcagaggtgaatgtggtttctaccaaagaagttttgatgaagtagagggtgtttttggtcgaggaggtggcaga

SEQ ID NO: 138733 - DNA, 561 bp, Homo sapiens
  Payload ID: 7175
  Gene Symbol: GIGYF2
  Gene Name: GRB10 interacting GYF protein 2
  ENST ID: ENST00000426102
  CDS Start-End: 114-561
gtttgagagactcagcacctccagttcctgagccttctttgtgaatctgcctgtttctgagctcctttacttagatttcaatttattagcaaaggcgccagcagagggagttgatgaaagctcttcagcagcagcagcaacagcaacagcagaaactctcaggttgggggaatgtcagcaaaccttcaggtaccacgaaatctcttctggagatccagcaggaagaggccaggcaaatgcaaaagcagcagcagcagcagcagcaacaccagcaaccaaacagagctcgtaacaatacgcattccaacctgcacaccagcattgggaattctgtttggggctctataaatactggtcctcctaaccagtgggcatctgacctagtcagtagtatttggagtaatgctgacactaaaaactccaacatgggattctgggatgatgcagtgaaagaggtgggacctaggaattcaacaaataaaaataaaaacaacgccagtctcagtaaatctgtaggtgtgtctaaccggcagaataagaaagtagaagaagaagaaaagt

SEQ ID NO: 138734 - DNA, 7878 bp, Homo sapiens
  Payload ID: 7175
  Gene Symbol: GIGYF2
  Gene Name: GRB10 interacting GYF protein 2
  ENST ID: ENST00000629305
  CDS Start-End: 198-4163
gtgacgtgcgtggcgacgtgtcggccatcttgtgttgttgaggctgaggactgactggggttctgagactccctgtcccggaccgcagcgttaaaaggatctgaacaaagtctgctcaaatctcctgctgtgaaccagcagaatttttgaacaggtttcttcacatataaaaatctattgtaaaaatacggaaaagaatggcagcggaaacgcagacactgaactttgggcctgaatggctccgagctctgtccagtggtgggagtattacatcccctcctctttctccagcattgccgaagtataaattagcagattatcgttacggcagagaagaaatgttagcacttttccttaaagacaacaagataccttcagaccttctggataaagaatttctgcctatcctccaggaggaaccccttccaccattggctctggtaccctttacagaagaagaacagagaaacttttccatgtctgtaaatagtgctgctgtcctgcgattgacaggacgaggaggaggaggaacagtggtgggggctcctagaggtcgaagttcttcaagagggcgaggcagaggcagaggtgaatgtggtttctaccaaagaagttttgatgaagtagagggtgtttttggtcgaggaggtggcagagaaatgcatagatcgcagagctgggaggaaaggggtgacagacgttttgaaaaaccaggacgaaaagatgtaggaaagaagaatggatattattgcatgtactcaccagttcttttgctgggtcagcctttatgccaagggagaccaaattttgaggaaggtggaccaacatcagtagggagaaagcatgaatttatacgctcagaaagtgaaaattggcgcatctttagagaggaacaaaatggagaagatgaagatggaggttggcgactagctggatcaaggagggatggagagaggtggcgacctcacagtcctgatggccctcgttctgcaggctggcgggaacacatggaacgacgtcggaggtttgagtttgattttcgagatagagatgatgaacggggttaccgaagggttcgctctggcagtgggagcatagatgatgacagggatagcttgcccgaatggtgcttagaggatgctgaagaagaaatgggtacatttgactcatctggagcattcctttctctaaaaaaagtacagaaagagcctattccagaagagcaggagatggacttccggcctgtggacgaaggggaggagtgctctgactctgagggtagccataatgaagaggccaaagaacccgataagacaaataagaaagaaggagagaaaacagatagagtaggagttgaagctagtgaggaaactccccagacctcatcatcatctgctagaccaggtactccttcagaccatcagtctcaggaagcatcacagtttgagaggaaagatgaaccaaaaactgagcaaacggaaaaagctgaagaggagactcggatggaaaatagtctaccagccaaagtgcccagcagaggggatgaaatggttgctgatgtccagcagcccctgtcgcagattccttcagatacagcctctcctcttctcatacttccacctcctgttcccaatcctagtcctactctccggccagttgaaacaccagttgtaggtgctcctggtatgggcagtgtttccacagaacctgatgatgaagaaggtctcaaacatttggagcagcaagctgagaaaatggtggcttatctccaagacagtgcactagatgatgaaagattggcatcaaaactgcaagagcacagagctaaaggagtgtcgattccattgatgcatgaagcaatgcagaagtggtattacaaagatcctcagggagaaattcaaggtcccttcaataatcaggagatggcagaatggtttcaggcgggctattttactatgtctttattggtgaagagagcgtgtgatgaaagcttccaacctcttggcgatatcatgaaaatgtggggaagggttcccttttctccaggtccagctccccctcctcatatgggagagctggaccaggaacgactgaccaggcagcaagaactcacagccttataccagatgcagcacctgcagtaccagcagtttttaatacaacaacaatatgcacaggttttggcccaacagcagaaagcagcactgtcttcccagcagcagcagcagttggcacttcttcttcaacagtttcagaccttgaagatgagaatatctgatcagaacatcattccctcagtaactaggtctgtgtccgtgccagatactggctctatctgggagcttcagccaacagcttcacagcctacagtttgggaaggtggtagtgtatgggatcttcctctggacaccacgacaccaggccctgccctggaacagcttcagcagctagagaaggccaaagctgcaaagctagagcaagagagaagagaggcagaaatgagggcaaaacgggaagaggaagagcgaaagaggcaggaagaactccgaagacaacaggaggaaattcttcggcgacagcaggaagaagaaaggaaaaggcgagaggaagaagaacttgcccgaaggaaacaggaagaggctctgcgtcgccagcgggagcaagaaattgcattaaggcgacagcgagaagaggaagaaagacagcagcaagaagaagctcttagaagactggaagagaggagaagagaagaggaagaaaggcggaagcaggaagaattgttacgcaaacaggaagaggaggctgcaaaatgggcccgggaagaagaagaagcccagcgtcgattagaggagaaccggctgcggatggaagaggaggcagccagactccggcatgaggaagaagaacggaagagaaaggagctggaggtccagcggcagaaggagttaatgcgccagaggcagcagcagcaagaggctctccggaggttgcagcagcagcagcagcaacaacagctggcgcagatgaagcttccttcttcttcaacgtggggccagcagtccaatacaacagcatgtcagtcccaggccacgctgtcgttggctgaaatccaaaaactagaggaagaacgagaacggcagcttcgagaagagcaaaggcgccagcagagggagttgatgaaagctcttcagcagcagcagcaacagcaacagcagaaactctcaggttgggggaatgtcagcaaaccttcaggtaccacgaaatctcttctggagatccagcaggaagaggccaggcaaatgcaaaagcagcagcagcagcagcagcaacaccagcaaccaaacagagctcgtaacaatacgcattccaacctgcacaccagcattgggaattctgtttggggctctataaatactggtcctcctaaccagtgggcatctgacctagtcagtagtatttggagtaatgctgacactaaaaactccaacatgggattctgggatgatgcagtgaaagaggtgggacctaggaattcaacaaataaaaataaaaacaacgccagtctcagtaaatctgtaggtgtgtctaaccggcagaataagaaagtagaagaagaagaaaagttgctgaagctctttcagggagtaaataaagcccaagatggatttacgcagtggtgtgaacagatgcttcatgcccttaatacggcaaataacttggatgttcccacatttgtttctttcctgaaagaagtagaatctccttatgaggtccatgattatatcagggcctatttaggagatacttctgaggccaaggagtttgccaagcagttccttgagcgccgtgccaaacagaaagccaaccagcagcgtcagcagcagcagctgccacagcagcagcagcagcagccgccacagcagccgccacagcagccacaacagcaggactctgtgtgggggatgaaccacagtacactccattcagtatttcagaccaatcaaagcaacaaccaacaatccaattttgaggctgtgcagagtggcaagaagaagaaaaagcagaagatggtccgagcagatcccagtttattaggattttcagtcaatgcatcatcggagcgactcaacatgggtgaaatcgagacgttggatgactactgagcacctgccagtggactggccatccctctcctgtctgccgactatggagtctccacctttggacacaacacttactcaccatttactctttatcactctgcaacaaatcacagaaccgatcatctcaggctttttcttctggccctttgtgtccaagattctttaatccatttttgttggtgaacatctcagactatagataagtggactggaccctgtgtcttgggggtggcagttgggattactccccaacaaggctgattttaggcagcatgtgttcactgtgctgtgatttcatctactgtctcccagaaagtgtgttgggatcggccattagcagcttgctttctcttgtcactttttttcttctattttgttttttcttcttctttttccccccatcagggcaaatggtctaactggtgcaatcatgaagagagttaatggttaacagacattggccaataacaaaacaccccatggactgtgactcgagtatccaacaggcagtcagagctctcccggtctgaaagttgcattgccactgctaactttgggattgcatcagagaggccctgagtggggttgagatgaggttggtttggtttgatgttacacactcctcacctgttctttctgagtgtcctttctctgaaaggatttatgtttttcttcgttagatagtgacttctgagcaagctgatctcccctggcatgctccaacctgattggacaaaggaagctctatggcctgggagagagactattcttaatttttctttcttacaaaaactgatttttcccataaatatttttacttcagaggactaggaccattttgttttgggcccttctgctgaaaatttgtctcgtttaagaggcagctagaatctttaccatatgtatgaatttgtataatttcatttttggatagggataaacttttgcttctgataaaagcctggaatttcatctggtcctcagagcattgcgtgtgtgtcttgctgtagcccggaaaaggttttgtgtaaagattctgggatggcaagttgtttgccttttctgaaaagagaacatacagaacctgtccatctttaagaccttcatccatggaatctactatacaggaggatgcagtgggctggaggggatgggcgaaaatgggagcaggaagcctggcctggcttctggtcatggcctcctaaaaccttaaacttcaagtagaaatgtactcaagccctatttataaacaaatacttttcctgcctccaccaaacccctacagaacatcacctggaattgccactcacactgggttggagtcattgggcagctgtgcctgtgcgagaggtgctgtggtctgggcagcccctggaaaagcacctttgctgcctgtcattgttgcctgaagaaggctggagttgctctgagagcagtttgggtttggagtattatatttggcttctatttttattattttggatcaccattctccctatcccttcttgcctccctcccttctaaacatgtgtaataactatacagagactgctacaaaattgtatatagtttttggatcaaatagcatgaggggagaggaaaccattaaaagttggggctcctactctcctttgctttgtaaattcaaaagttgggggtgggtaagagggatagttaaaatgtttacaaaactttaggctccctcggaacttttgccagtgtggaggaaaataaaaaagaacttaaataaaatctgattgtattctatctgagtgcacctcttgtactcacctttatggaggctgagttctgcactaaactgttcctcttggtaccatggaaaagctccaagcacccaagacatggaggcagccatggcttctttctctgccagaccacgtagcactggctggttctgtatttgagaatgtagaggtcaaggcagatgtcggtaagtttgaccaaatatcttttctctttttgactctccctttctgctaacatgtggatcagctcctgccctcataccgcagacacacccactctgaacacacccctccagagcttgcccacaccttcccaactagactctgtgtgtgtattcaggaaaaatgaaaataaatttttaaaaattgggagtggaatgggcagattagggggaacaaagtcattttggtcatggaacatccatttgcttaaccaaggagacttgcttctatctgaggaatttcccacttagtagaaagaaacactcttccctgggaatgtttgtttctgtctctctcaatgctactctctttcatattctcatttgctcaccctttcacttagagccaccgttttctcatcccattctatgaacttatttccaaattctcctaactattcctgagttttgaagtatttgttttgtaccctctctgcttccggttttttgtttggttggcttttttggagatagggtcttgtgatgttgcccacactggtctcgagcccctgggctcaagtgatcctcccgcctcagcctcctaaatatctaggactacaggtgtgtgccaccatgcccagctccagttttgttggttgatttgtttaaattcagagatttaaaaacatcccagacaagacagtttgattatggagactgtccccaagcagattggtgtgctggtggctgctgtgcataacagattccctccagattggcttacaacagctacttcattctgtgggtcaggaatttggatagggctcagctgggtggtggttctcctggggtattctttggttgtggtcagatgtcttccagggcatcattcctatgaaggcttaatgaattaggcaagctgtccaagatggctcactcgtgtaatgacagttgacgttggctgtaggctgggaactcagctgggttgatgactggaggagcttatgtgtgtcgtctccggaatggcagcttcagaggagttgaacttaagtggtgattggcttcccccagagaaccaggcagaagctgtgttacctttttgagctcttagctcaggagtcacatagagtcacttctgtgacactgtgttgcatcaaagtagtcacaaacccactcagattcaagagaagggagcatggccctctccctgcaaccccctccccccccgccttgatgaaaggagtgacaaggtcacattggagaagagcttgtggggtgggagatattatagccatttttgggaaatatctgcataaaatgagtttatgcatacatgaaggactttattttcattggctttaagttgagggtttttgtttttgtttttgtattggagatgggttcttactatgttgcccaggctggtctcaaacccctgggctcaagtgatcctgttgcctcagcctcccaagtagctgggactacagctatgtgccagtgcacccagcttgttttttttaaattttaggatagataatggtacttctggctttatttaaataatttttttagggaaaccattgtatttatacatgcatatatttttatatatacaaatatgtatataaaagtatatgttttacattttcaatatatatataatatatacatatatgttatatacgtatatatattgcaccctactttaaaattgactgataacaaaattggtaattttgtataaaatgcccaactgtgcattattaataaaagtatgtgaatgactct

SEQ ID NO: 138735 - DNA, 3006 bp, Homo sapiens
  Payload ID: 7176
  Gene Symbol: GAREM
  Gene Name: GRB2 associated, regulator of MAPK1
  Uniprot ID: Q9H706
  ENST ID: ENST00000269209
  CDS Start-End: 5-2635
gaagatggacccggcgccctcgctgggctgcagcctcaaggatgtgaagtggagctcggtggccgtgccgctcgacctcctggtcagcacttaccggctgccccagatcgcgcgcctggacaacggagagtgcgtagaagggctgcgggaaaatgactatctgctgattcattcctgccgccagtggaccaccatcactgcccacagcttggaggagggtcactatgtcattgggccaaagatagagattccggtacattatgcagggcaattcaagctgctggaacaagaccgagatataaaggagccagtgcaatatttcaacagtgtggaggaggtggctaaggcatttcctgaacgcgtgtacgtcatggaggatatcacattcaacgtgaaggttgcttcaggtgaatgcaatgaagacactgaagtttacaacatcaccctgtgtactggggatgaactcactctaatggggcaggcagaaatcctttatgcaaagacattcaaggaaaagtcacgactcaacacaatcttcaaaaagattgggaagctcaattccatcagcaagctgggaaaaggcaaaatgccgtgcctcatttgtatgaatcaccggaccaacgaaagcattagccttccattccagtgcaagggcagatttagcacccgaagtcccctggaacttcagatgcaagagggcgaacacaccatccgcaacattgtggagaaaaccaggcttcctgtgaatgtgactgtgccaagccctccaccgagaaacccatacgacctccacttcatccgtgaggggcaccgctataagtttgtgaacatccagaccaagacggtggtggtttgctgtgtgctgcggaacaacaagatcctccccatgcactttcctttgcacttgactgtccccaagttcagcctcccagaacacctggtgaagggagagagctggcccgaaaccctggtccatcactggctaggtatctgccaagaacagttcgacatcgatgagtattcacgggctgtccgtgatgtgaaaaccgactggaatgaagaatgcaagagccccaagaagggtcggtgctctggccacaaccacgtgcccaattcgctcagctacgcccgcgatgagctcacccagtccttccaccgactctcggtctgtgtgtatggcaacaatctccatggcaacagtgaggtgaaccttcatggttgcagggacctggggggagattgggctccctttcctcatgacatcctgccctatcaggactctggagatagtgggagcgactaccttttcccagaagctagtgaagaatcagcaggcatcccgggaaagtcagaacttccctacgaagagctgtggctggaggaaggcaagcccagccatcagcctctcactcgctctctgagcgagaagaacagatgtgatcagtttagaggttctgtccgatccaaatgtgcgacttctcctcttcccatccctgggactctgggagcagcagtgaagtcttcagatactgccctacctccacctccagtgcctcccaaatctgaagccgtcagagaagaatgccggctcctgaacgccccacctgttccaccccgaagcgcaaagcctttgtccaccagtccctccatccctcctcgcacagtcaagccagcgcggcaacagactcgctctcccagccccaccttgtcctactattcttcagggctacacaacatcagcgtcactaaaactgacacaaatccttctgaaagcactcctgtttcctgctatccatgtaaccgagtgaaaactgattctgtggacctgaaatccccgtttggaagtccttctgctgaagctgtgtcctctcggctctcatggcctaaccattattcaggagcatcagaaagccagaccaggagtgacttcctgctggatccaagcaggagttatagttaccctagacaaaagacgccaggcacaccaaagagaaactgcccagcaccttttgattttgatggctgtgagctcctggccagccccactagcccagtcactgcagaattcagtagcagcgtctctggttgtcccaagtcagccagctactctctggagagcacagatgtgaaatctcttgcagctggtgtgacaaagcagagtacgtcatgccctgccttaccccccagggctccaaaactagtggaagagaaggtcgcctccgaaacatctcctttgcctctgaaaattgatggtgctgaggaagaccccaagtctgggtcaccagatctctcggaggaccagtattttgttaaaaagggcatgcaggacatcttctctgcctcctaccctttctcatctccgctccatctccagctggcccccagatcctgtggcgacggttccccatggcagccacctgctgacctatcaggactctctatagaggaagtgtccaagtcactacggttcattggtttgtccgaagatgtcatatcattctttgttactgaaaagattgatgggaacctgcttgttcagctaacggaagaaatcctctcagaggatttcaaattgagcaaattgcaggtgaagaagataatgcaattcattaatggctggaggcccaaaatatagccaaataacccccggccagcatggaacaaaactgatcaatgcgtgtgctagaaggggtgggctgggacacaatttcatgtttttgcactaaaaaccttctctgtaaatagggataagagaaactcttactatgcagattacgtttttgaatggtgaacaggctattttgtacatcaataaaaatgctgtacagaacacttggaggtgtgccttgtacgtcactcaacaaacactcagcagctgctaaaagaaaaaaaggcatgtgcagagaaatcattcttacccaagtaggtttatgtgagaaggtatgatatttattacaaaatagccaaagctggaagacataaaaatctttaaaaaaaaaaaaaaaa

SEQ ID NO: 138736 - DNA, 7033 bp, Homo sapiens
  Payload ID: 7176
  Gene Symbol: GAREM
  Gene Name: GRB2 associated, regulator of MAPK1
  Uniprot ID: Q9H706
  ENST ID: ENST00000399218
  CDS Start-End: 57-2684
gcgggtggtgccggtggcggcggcgggggagcgcgggacaggaggcttcggggaagatggacccggcgccctcgctgggctgcagcctcaaggatgtgaagtggagctcggtggccgtgccgctcgacctcctggtcagcacttaccggctgccccagatcgcgcgcctggacaacggagagtgcgtagaagggctgcgggaaaatgactatctgctgattcattcctgccgccagtggaccaccatcactgcccacagcttggaggagggtcactatgtcattgggccaaagatagagattccggtacattatgcagggcaattcaagctgctggaacaagaccgagatataaaggagccagtgcaatatttcaacagtgtggaggaggtggctaaggcatttcctgaacgcgtgtacgtcatggaggatatcacattcaacgtgaaggttgcttcaggtgaatgcaatgaagacactgaagtttacaacatcaccctgtgtactggggatgaactcactctaatggggcaggcagaaatcctttatgcaaagacattcaaggaaaagtcacgactcaacacaatcttcaaaaagattgggaagctcaattccatcagcaagctgggaaaaggcaaaatgccgtgcctcatttgtatgaatcaccggaccaacgaaagcattagccttccattccagtgcaagggcagatttagcacccgaagtcccctggaacttcagatgcaagagggcgaacacaccatccgcaacattgtggagaaaaccaggcttcctgtgaatgtgactgtgccaagccctccaccgagaaacccatacgacctccacttcatccgtgaggggcaccgctataagtttgtgaacatccagaccaagacggtggtggtttgctgtgtgctgcggaacaacaagatcctccccatgcactttcctttgcacttgactgtccccaagttcagcctcccagaacacctggtgaagggagagagctggcccgaaaccctggtccatcactggctaggtatctgccaagaacagttcgacatcgatgagtattcacgggctgtccgtgatgtgaaaaccgactggaatgaagaatgcaagagccccaagaagggtcggtgctctggccacaaccacgtgcccaattcgctcagctacgcccgcgatgagctcacccagtccttccaccgactctcggtctgtgtgtatggcaacaatctccatggcaacagtgaggtgaaccttcatggttgcagggacctggggggagattgggctccctttcctcatgacatcctgccctatcaggactctggagatagtgggagcgactaccttttcccagaagctagtgaagaatcagcaggcatcccgggaaagtcagaacttccctacgaagagctgtggctggaggaaggcaagcccagccatcagcctctcactcgctctctgagcgagaagaacagatgtgatcagtttagaggttctgtccgatccaaatgtgcgacttctcctcttcccatccctgggactctgggagcagcagtgaagtcttcagatactgccctacctccacctccagtgcctcccaaatctgaagccgtcagagaagaatgccggctcctgaacgccccacctgttccaccccgaagcgcaaagcctttgtccaccagtccctccatccctcctcgcacagtcaagccagcgcggcaacagactcgctctcccagccccaccttgtcctactattcttcagggctacacaacatcgtcactaaaactgacacaaatccttctgaaagcactcctgtttcctgctatccatgtaaccgagtgaaaactgattctgtggacctgaaatccccgtttggaagtccttctgctgaagctgtgtcctctcggctctcatggcctaaccattattcaggagcatcagaaagccagaccaggagtgacttcctgctggatccaagcaggagttatagttaccctagacaaaagacgccaggcacaccaaagagaaactgcccagcaccttttgattttgatggctgtgagctcctggccagccccactagcccagtcactgcagaattcagtagcagcgtctctggttgtcccaagtcagccagctactctctggagagcacagatgtgaaatctcttgcagctggtgtgacaaagcagagtacgtcatgccctgccttaccccccagggctccaaaactagtggaagagaaggtcgcctccgaaacatctcctttgcctctgaaaattgatggtgctgaggaagaccccaagtctgggtcaccagatctctcggaggaccagtattttgttaaaaagggcatgcaggacatcttctctgcctcctaccctttctcatctccgctccatctccagctggcccccagatcctgtggcgacggttccccatggcagccacctgctgacctatcaggactctctatagaggaagtgtccaagtcactacggttcattggtttgtccgaagatgtcatatcattctttgttactgaaaagattgatgggaacctgcttgttcagctaacggaagaaatcctctcagaggatttcaaattgagcaaattgcaggtgaagaagataatgcaattcattaatggctggaggcccaaaatatagccaaataacccccggccagcatggaacaaaactgatcaatgcgtgtgctagaaggggtgggctgggacacaatttcatgtttttgcactaaaaaccttctctgtaaatagggataagagaaactcttactatgcagattacgtttttgaatggtgaacaggctattttgtacatcaataaaaatgctgtacagaacacttggaggtgtgccttgtacgtcactcaacaaacactcagcagctgctaaaagaaaaaaaggcatgtgcagagaaatcattcttacccaagtaggtttatgtgagaaggtatgatatttattacaaaatagccaaagctggaagacataaaaatctttaaaaaaaaaaaaaaaacacttttgaacaagtcccttctttcaggagggttgactttagacaattaactgtgttctgtgctctgtcattcagattgcttcttgctaattgttttactcttgtgcctgaaaatgttagtgatacgaattgacactttaatgttgtatgcttggtggggatctttttatcacaaggcattttccaagagtcatatgttgataaagggatatatgttgtccttagaaatcacacaaatcatgaccacaataatttatctgtaactgctgctaattttattgagcagagaaaaaagaatatacatatataaacatgtataggtgcatacacaatacacccggatatgttttacacataattttgattctgatattttagataacatctgttcacttttaaacaatctgttgaggttttgggactgttatctacattgattctcttaggaatagtggacagaatgactccaaagattctcagaaccctgtctcttgaagctcaatcttatttgggttcatcactgaaaacttagaacaaatcagtaaagaatcctgtattgaagaattaagtttgagtttaagcccactcaccgcagggctggtttttgcatgtaatactcccatgatgtctggggaaatgacagtttctgttgaattataattctccggtttaagggtctccttcccctggtgtctgatggtgagaggtctgaagagcatttgtcagagtacattaggcattctcaacctacttcatgctttacgagagctgagaaatcagacgcaccggcctttattattatatatgctacatctgttgagtatttttaaaataccaataagaggacttgtttatttcataaaccacttcttccctctctttcaaagaaaatacattattaccatacttttacattagtctgagaatttttgctaaatatgattaagtattccaaaatataatggcgtcattattcttgacttttttagagaatatacatcttaagactgtattagttctcagagcaaggcatcatctactcccctgcacctgagagtctggccccagattccagatgtgcggacagcccatgaccgaggtgcacacagtgccctcttgaataggaaggtcagccagtgaggcggcagcataacttgcaggatggacttatatcttaccatctcttcctgctaccaaaataaaaaaataaattgaaagacaagacccaccagtctagttttgtagacctgtgaaatgtgtctttatttcttggcattagaagaaagatatttttaatccatatcgtggttttagagttgaagtgaattgatacccaattttccatcttagatctcctttatcaaaaaaaaaagcattttttttctcctaacgtgtctcccaaaatgtaaatactataggcaaaaagagtaccctgtaaaattctcacactggagcacctcttcaaaagtcacagataactcaatgaggaagtgctggtactgcactcacaggacatgagacctatgaagctttcgtgttttgaaagcatccttctgtgtgagggggactgcctcccttagtaaagtaaacctctcagaacttctttttaaaataaaaacagacaagatgcagttactaagctgcaagttttcattggcaaacctagctgaatccgttttaaaatacttagcactcggacacaattctcaaactcaggaagaaggaacagggttggtttgggtttactataaaggttgcctcacataaacaactgactccttttagcgttttttttctttttgtaaaaactttacacaaaatagggttttaaattctttttgcttgttttggacttggtgtatttttgtcaagtttatattgattggcaacgcagagactccttgagggcagggactgtggcctttgattcacttatgctacagtctagtatcactacagtgctgagtaaaagacacagcccctgccctcttggagatcatattgtttatatttgaaatctcagttgctaagagtatgtatgtgtgagtaagaaagacgtgaagtcctatgggcagctgggtatatggagaattacgtgtgtcctgtctttaaaacgtcagcctctattaaggggtacagaacaccccaagatcactaaaacttggaatgtgttggaggcagaaagtatctctctcattgcctagtgttgttgtttttttgttttttgttttttgttttttttactgacctggaattcttttaattgtaataaatatcttctgtcacaaataaatgccacaaataaatgaaattgccattcctaagctgagcacctgtctgtgaaggaccttggtgtcctgactggacagagcattcatagctccaagagaatcatgacaagatatgcaaagcagggataataaggagaaagcccttccctttcgagaagcccttccctttcacagcccttccctgcgattctgcagtgaaaagtgatgcccagagatccacacacagaacccttctaaccagccaggtcaagacttatcatcttatctcctctggcaggtcccctgtaatcaaaagagaggaagtgtctatctaaacaagacccttttgggtccttagattcatggcaaaaatcatcatggcccccatcagaaaagaaaatcagcaataaaccaagccaagcaactaaaatgtataatgtggacctgactcatgttgggaggcagaattcagacactcacagatcaatcttgcaagttttctcttctttaagttgagctgctcaactttatgaactgtgaaatttacttacattctttcaacccacatatatcattgcagtttatgaagttgcagtgaactgcccattcagctaaattgcagtgtttattcttgtctcatgtcgaaatacaacaatcttatgggaaatattatgacagtccgttccaactgttctcagacacatgcataaacagtctctgctcacattccacagccacctgcatgttatccatacagctccctgagaagtccagggatgggaggtggggtgtggaaggatggagggtccttcattttctaaacactttgtataagtcactactcatcgtgcctagcaagtataagattaacattttgaataacaaactggaaaacaaataatccttcaaagaacctagcgaactgttcaaaggaaattttaatttcagtctaccagaaaagttaaatctgttgttggacgtagggggctttcagaaacatgcctcttatatcaatttccactatctttcaagttacctaaaggcaccaggctgcttgagcaagaagaataaaaggcctagagtgcaaattatgtgaagtagagtttttagattgtgggattgtaataatacgggattctcatggttacatcatgttaaatcacactgttcagtctttaaaacttggtgttttaaaatttgtctcattgtgatagccagaaacaaggaataaacgtgatttcagtttaaactatatacaaatatcttctgtaattttgctgctctaatttttaggctataaattttgtaatagagcttatcagatcgcaaatttcctttgtttacaatctcatgtagtagggctcagataatttcttagctataaaccttttctcccactctcatattgtttcatttaaaatatttaagctaagcctaaaaattgaaatcagttaagaatttggagagtttatcttaaatggaaatggtgtattcttttcaaagaattttgtaaccatctttacagtttctttgcttggaaaacttgggttgttaactaccagttaacaatggcattactttccaaaacgttatctaatgggcccaatgtgtacctcaagataaacacagtatgttatgtctaaaaatttccttgtctgttgatttaaatggttctgaaatgtctgtaataaagaaattttcaaagttg

SEQ ID NO: 138737 - DNA, 506 bp, Homo sapiens
  Payload ID: 7176
  Gene Symbol: GAREM
  Gene Name: GRB2 associated, regulator of MAPK1
  ENST ID: ENST00000583696
  CDS Start-End: 1-110
gagcagcagtgaagtcttcagatactgccctacctccacctccagtgcctcccaaatctgaagccagacagggttttatcacattgcccagactggtctcaaagtcctgagctcaagccatccgctcgcctcggcctcccaaagtgctgagattacaggtattttcacctacagcaatctacctgactagatctacttgtctgccatctacagagcaagtaactgaggcctcaatagacaggttgtgctactgcgcaggaatgagttcccggttcatctttcattacttcactcttctccagactgtgctatattacctcacactatgcatctccctttttataatgagagttactgcaattttaaatatctcattttgcttcacagtcatcaatcctttgttgacaaaaatctaccttactgataatgccccaaccaaatataaatcaactactttctcttgcatacatgaagtgaaataaatagaacagcatgttttattctaa

SEQ ID NO: 138738 - DNA, 5138 bp, Homo sapiens
  Payload ID: 7177
  Gene Symbol: GAREML
  Gene Name: GRB2 associated, regulator of MAPK1-like
  Uniprot ID: Q75VX8
  ENST ID: ENST00000407684
  CDS Start-End: 1757-3751
aagcgattcccctgcctcagcctcccaagtagctgggactacaggtgtgtgccaccacacccagagagttttttgtatttttagtagagatggggtttcaccatgttggccaggctggtctcaaactgctgacctcaagtgatctgcccactttggcctcccaaagtgctgggttacaagcgtgagccaccgtgcctggcctgccatctccatttctgaccaggctggtggcctgagtacatcatcctgagtcccttccttccccacctcccccttcttctgtcacccaagcctgctgggtctcccttcccagtatctcttggtctgtttctgctattccctagctcttctccagaaccccttactggtttgtttacctgactggtctcccggttattttaatagagctgaacctggatcatggtatttctttgctcgaaacactccagtgggtctcatgttgtacagaataaagctttactgctttagcaaggcattcagagcctttcaaatcccagttgctgtctgcatcccctcctgtcctccctctccctaagtccttccctgcaggcacgcaccatctggggcaggtggtctgcttttgtgtctctgtgtctgtgtttacagtgtttcttccacagggaatgcccattctgtgaattccctttgattcttaaggtgcagctcagtgatcctctcagattccgccaggcaggttttgcctacctagccgtcttgtaactcttttgtcacaagtctgttgtagcacttatcacatcctgccaccattgggtactcatcgtctcacccattatatctggatttctttaagggcagactgtattttacacagatttgtaccctctgtgtggcctaccatagtgtctgacacatagtgagtgctccatcaatatctgtgcaataattaaatgaatgaactgtgacagaagcaactaccacaggggcttcagaagctaaagaaggcccagcgcggtggctcacacctgtaatcccagcactttgggaggccatagcaggaggattgctcgagcccaggagtttgagaccagcctgggcaacatcatgagacgtcatctctaataaaaataaaaaattagccaggcatggtggcacatgcctgtggtcccaggtacttgagaggctgaggcaggaggatcccttgagcccagaaggttgaagctgcagtgagttgtgatcatgccactgtactccagcctgggcgacagcaagaccctgtctcaaaaaaaacacccagaggctaaagagtcaccttgtcttctctcgacttgttccctcacctattcatggctctcttcctactgtataaagcttgagaagaggccatccatcagatgccagggcggctcagagcttgttttgtgctcatgtgggtatgcatataacaggtgtctggccagtgaggtgagagagcttacacagggatgtcagcttcacagactggcaatcacttccgtaaagtctgtgtctcctaggggcatgtgctgagcttggcaaagcacgcagccccagactgcaggttgggaaggcctactctcagggaggtggctttgctgggttcaggtcagagcctctgggagagtaggattggatattggaccagggcagggtgtgggaacagagctggggtcagagtggttctcccagggccttcaagggctgggccaggccctggttggcccagtgccacctccatgcggatcagcagcccagggcgatgcacaggatgccagatccagggaagttcaagctcctggaacaggcccgggatgtgcgggagccagtgaggtacttcagcagcgtggaggaggtggccagtgtcttccctgaccgcatcttcgtgatggaagccatcaccttcagcgtcaaggtggtgtcgggcgagttcagcgaggacagcgaggtgtacaacttcacgctgcatgcgggcgacgagctcactcttatgggccaggcggagatcctgtgcgccaagaccaccaaggagcgctcgcgcttcaccaccctcctgcgaaagctgggccgggccggggcgctggccggggtgggcggcggcggcccagcgagcgcgggggccgcgggaggcactggcggcgggggcgccaggccggtcaaaggcaagatgccctgcctcatctgcatgaaccaccgcaccaacgaaagcctgagcctgccctttcagtgccagggccgcttcagcactcgcagcccgctggagctgcagatgcaagagggcgagcacacggtgcgcgccatcatcgagcgcgtgaggctgccggtgaacgtgctggtgcccagccggccgccgcgcaacccctacgacctgcacccggtgcgggagggtcattgctacaagctggttagcatcatctccaagacggtggtgctggggctggcgctgcgccgcgagggcccggcgccgctgcacttcctgctgctcacggacacgccgcgcttcgcgctgccgcagggcctgctggccggggacccgcgcgtcgagcgcctggtgcgcgacagcgcctcctactgccgcgagcgcttcgaccccgacgagtactccacggccgtgcgcgaggcgccagcggagctcgccgaagactgcgccagcccgcgccgcgcgcgcctctgcctgcccgcgccgcgcgcccccgggctcgcccgcgcccccggcccgctagcgccggctcccgccggcgagggcgaccaggagtacgtgagccccgactgggcagccgcgcccgagcccgccgcgccgcccgccgagatcccctacgaggagttgtgggcgcaccaggggcccgagggcctcgtccggccgcccccagggctcgatctcatctccttcggggccgcgggaccgccgcgtcgggagccggaagcgccgccgcctccagtccctcccaaatccgaggcggtgaaggaggagtgccgcctgctcaatgcccctccagtgcctccccggggtggcaatggcagcggccggctctccagcagccccccggttccccctcgcttccccaagctgcagccggtacattcccccagctccagcctctcctactactcctctggcctccaggatggggcgggttcccgcagtggcagtggctccccatcgccggacacctactccctctattgctacccatgcacctggggagactgcaaggaaccagtcctggagcccttcgatccctttgagctggggcagggcagttctccagagcctgagctgctgcgttctcaggagcccagagcagtggggacacctgggcctggaccccgcctttcaccacttggcccctccaaggcctttgagcctgaaggtttggtgctgcaccaggtccccaccccactgtcaccagctgctctgcagggacccgaggcgggaggagcactttttctaacccaagggcgcctggaagggcctcctgccagtccccgggatggagccacaggctttggagtccgagatgcctcctcctggcagccccctgctgacctgtctgcactctccctggaggaggtctctcgcagtctgcgtttcatcgggctctcagaggatgtggtgagcttctttgcccgagaacgcatcgatggtagcatctttgtgcagctcagtgaggacatcctggcagatgacttccacctcaccaagctgcaggtcaagaagatcatgcagttcatcaaaggctggaggcccaagatctgaactgcccagctggagctgcacagctggaatgctggtatgggggccccaggtacagcactccggaggagcaggtgctgcctgcaagaaggatctatgtcgagactgaggctgctcagcagccactgggtggatccaggggagatgcatgtggaaatgtggtcctctggggtcagacccctgcacgggacatcttgcctttgagtgtgcagagtacatggggaaggggctgggggcaccactgtgtacctgggcccagtaaggcatttgccgtgattcccacaacggggtcaaaagctggccttcagggtgacctaacaccacctcatgccctgctatagaccttcacaaacgacttccactgctgaagcctgtaggctctgtttagagacaagaagatggctggtaatttaagcaccgatttcccaagtgcccactctcctttgtgctctgttggcttttggcctaaagctgccccagagtgagggtgtagatgtctgtgtctgtgagatgcctttcccttccccctctgctccaccgtggttgaggggggtggggcctggccccgcacacaggtgagtcgtgtacaagcctaacccatggcacctcagaggctccacctgtgggtcctggttcatgggtgacaactttggaagagcacagctctgcaattgacccgacccacttatctagttaggaagccagacactgcccagatgactctagcaccctggcttctgctctgactttactgcagctagtcatccatccgtcaggtggcgttcagtctcagaatactgattccgtggaagagcaggttgatttaggtcagcttctccttgattctagaagcaagcggtagtcaaccacctccaattccgccaatctcttgcccccatcatttgtctctgacaatacttggtgtttttccctggttttctgtcactggcacaggagggtacagttgggagagtgcgttcctggagctcagtcctgcatttgttcacgtgcctcacagcaggcctttgtgcccttgaatctcaaacatggggatctgcttggtacccagagctctggtcattgtgtccaaccacacaccccaccccatccgtgtcctccatctcacccagaaccacagggtgcccactagtgtcagggcccaaagtgccagccttctcttctgccttacctagtctacctatttatttcctccactttttatcttaaaagtagctaagccatgctggtgcccatactccaagcaggctgcctcagctcagagaagtggtcagagagtagagcacagaacctgtgatgtggggacatttggttttcttgcagatcatttaatgaatcctcaaggactaatgaaataaatgctagactgctg

SEQ ID NO: 138739 - DNA, 4161 bp, Homo sapiens
  Payload ID: 7177
  Gene Symbol: GAREML
  Gene Name: GRB2 associated, regulator of MAPK1-like
  Uniprot ID: Q75VX8
  ENST ID: ENST00000401533
  CDS Start-End: 131-2755
cgcggcccggcggggctgccaggcggcgagcgccgcggcggccccgggaggtggcggcgggcgcgagagcctgggccgcgcgggactgaccgtcggggccccgggacggcggccccggggcgcccatgccatggagaagctggcggccgggctggccggcctgcgctggagcatgggcgccttcccgctcgacctcatcgtcagccgctgccgcctgcccacgctcgcctgccttgggccaggggagtacgccgagggcgtcagtgagcgagacatcctgctcatccactcctgccggcagtggacaacggtgacagctcataccctggaggagggccactatgtcatcgggcccaagatcgacatccccctgcagtacccagggaagttcaagctcctggaacaggcccgggatgtgcgggagccagtgaggtacttcagcagcgtggaggaggtggccagtgtcttccctgaccgcatcttcgtgatggaagccatcaccttcagcgtcaaggtggtgtcgggcgagttcagcgaggacagcgaggtgtacaacttcacgctgcatgcgggcgacgagctcactcttatgggccaggcggagatcctgtgcgccaagaccaccaaggagcgctcgcgcttcaccaccctcctgcgaaagctgggccgggccggggcgctggccggggtgggcggcggcggcccagcgagcgcgggggccgcgggaggcactggcggcgggggcgccaggccggtcaaaggcaagatgccctgcctcatctgcatgaaccaccgcaccaacgaaagcctgagcctgccctttcagtgccagggccgcttcagcactcgcagcccgctggagctgcagatgcaagagggcgagcacacggtgcgcgccatcatcgagcgcgtgaggctgccggtgaacgtgctggtgcccagccggccgccgcgcaacccctacgacctgcacccggtgcgggagggtcattgctacaagctggttagcatcatctccaagacggtggtgctggggctggcgctgcgccgcgagggcccggcgccgctgcacttcctgctgctcacggacacgccgcgcttcgcgctgccgcagggcctgctggccggggacccgcgcgtcgagcgcctggtgcgcgacagcgcctcctactgccgcgagcgcttcgaccccgacgagtactccacggccgtgcgcgaggcgccagcggagctcgccgaagactgcgccagcccgcgccgcgcgcgcctctgcctgcccgcgccgcgcgcccccgggctcgcccgcgcccccggcccgctagcgccggctcccgccggcgagggcgaccaggagtacgtgagccccgactgggcagccgcgcccgagcccgccgcgccgcccgccgagatcccctacgaggagttgtgggcgcaccaggggcccgagggcctcgtccggccgcccccagggctcgatctcatctccttcggggccgcgggaccgccgcgtcgggagccggaagcgccgccgcctccagtccctcccaaatccgaggcggtgaaggaggagtgccgcctgctcaatgcccctccagtgcctccccggggtggcaatggcagcggccggctctccagcagccccccggttccccctcgcttccccaagctgcagccggtacattcccccagctccagcctctcctactactcctctggcctccaggatggggcgggttcccgcagtggcagtggctccccatcgccggacacctactccctctattgctacccatgcacctggggagactgcaaggtgggcgagtcctctagccgcccagcccccggtcccctaccctcaaccacacagcccagccaggcctcccgggccctcacagagcctctgagcggtcgagccgcctcccttctgggggctgacacccctgttaagacctaccacagctgccctcctctattcaagccctcacatccccagaagcgctttgctccgtttggagctctcaaccctttttccgggcctgcctacccctcaggcccttcagcggccttgtcttctgggcccagaaccacctcgggtcctgtggctacctctggccctgcgtattccccaggcccagcctcgccaggccaggcctattcagctgctcccccctcctcctgcgccccctcctcctcctcttcttctgaatggcaggaaccagtcctggagcccttcgatccctttgagctggggcagggcagttctccagagcctgagctgctgcgttctcaggagcccagagcagtggggacacctgggcctggaccccgcctttcaccacttggcccctccaaggcctttgagcctgaaggtttggtgctgcaccaggtccccaccccactgtcaccagctgctctgcagggacccgaggcgggaggagcactttttctaacccaagggcgcctggaagggcctcctgccagtccccgggatggagccacaggctttggagtccgagatgcctcctcctggcagccccctgctgacctgtctgcactctccctggaggaggtctctcgcagtctgcgtttcatcgggctctcagaggatgtggtgagcttctttgcccgagaacgcatcgatggtagcatctttgtgcagctcagtgaggacatcctggcagatgacttccacctcaccaagctgcaggtcaagaagatcatgcagttcatcaaaggctggaggcccaagatctgaactgcccagctggagctgcacagctggaatgctggtatgggggccccaggtacagcactccggaggagcaggtgctgcctgcaagaaggatctatgtcgagactgaggctgctcagcagccactgggtggatccaggggagatgcatgtggaaatgtggtcctctggggtcagacccctgcacgggacatcttgcctttgagtgtgcagagtacatggggaaggggctgggggcaccactgtgtacctgggcccagtaaggcatttgccgtgattcccacaacggggtcaaaagctggccttcagggtgacctaacaccacctcatgccctgctatagaccttcacaaacgacttccactgctgaagcctgtaggctctgtttagagacaagaagatggctggtaatttaagcaccgatttcccaagtgcccactctcctttgtgctctgttggcttttggcctaaagctgccccagagtgagggtgtagatgtctgtgtctgtgagatgcctttcccttccccctctgctccaccgtggttgaggggggtggggcctggccccgcacacaggtgagtcgtgtacaagcctaacccatggcacctcagaggctccacctgtgggtcctggttcatgggtgacaactttggaagagcacagctctgcaattgacccgacccacttatctagttaggaagccagacactgcccagatgactctagcaccctggcttctgctctgactttactgcagctagtcatccatccgtcaggtggcgttcagtctcagaatactgattccgtggaagagcaggttgatttaggtcagcttctccttgattctagaagcaagcggtagtcaaccacctccaattccgccaatctcttgcccccatcatttgtctctgacaatacttggtgtttttccctggttttctgtcactggcacaggagggtacagttgggagagtgcgttcctggagctcagtcctgcatttgttcacgtgcctcacagcaggcctttgtgcccttgaatctcaaacatggggatctgcttggtacccagagctctggtcattgtgtccaaccacacaccccaccccatccgtgtcctccatctcacccagaaccacagggtgcccactagtgtcagggcccaaagtgccagccttctcttctgccttacctagtctacctatttatttcctccactttttatcttaaaagtagctaagccatgctggtgcccatactccaagcaggctgcctcagctcagagaagtggtcagagagtagagcacagaacctgtgatgtggggacatttggttttcttgcagatcatttaatgaatcctcaaggactaatgaaataaatgctagactgctgaagatgagtacaagtggca

SEQ ID NO: 138740 - DNA, 2648 bp, Homo sapiens
  Payload ID: 7178
  Gene Symbol: GAB1
  Gene Name: GRB2-associated binding protein 1
  Uniprot ID: Q13480
  ENST ID: ENST00000262994
  CDS Start-End: 303-2387
gagtccgagcgctgctgaggcagctggcgagacggcacgtctggaggcgaggcgggcgcactgaaaggaggccggcgcgcccgcggccccggctcgcgttctgttcaggttcgtgggcctgcagaggagagactcgaactcgtggaacccgcgcaccgtggagtctgtccgcccagtccgtccggggtgcgcgaccaggagagctaggttctcgccactgcgcgctcggcaggcgtcggctgtgtcgggagcgcgcccgccgcccctcagctgcccggcccggagcccgagacgcgcgcaccatgagcggtggtgaagtggtctgctccggatggctccgcaagtcccccccggagaaaaagttgaagcgttatgcatggaagaggagatggttcgtgttacgcagtggccgtttaactggagatccagatgttttggaatattacaaaaatgatcatgccaagaagcctattcgtattattgatttaaatttatgtcaacaagtagatgctggattgacatttaacaaaaaagagtttgaaaacagctacatttttgatatcaacactattgaccggattttctacttggtagcagacagcgaggaggagatgaataagtgggttcgttgtatttgtgacatctgtgggtttaatccaacagaagaagatcctgtgaagccacctggcagctctttacaagcaccagctgatttacctttagctataaatacagcaccaccatccacccaggcagattcatcctctgctactctacctcctccatatcagctaatcaatgttccaccacacctggaaactcttggcattcaggaggatcctcaagactacctgttgctcatcaactgtcaaagcaagaagcccgaacccaccagaacgcatgctgattctgcaaaatccacctcttctgaaacagactgcaatgataacgtcccttctcataaaaatcctgcttcctcccagagcaaacatggaatgaatggcttttttcagcagcaaatgatatacgactctccaccttcacgtgccccatctgcttcagttgactccagcctttataacctgcccaggagttattcccatgatgttttaccaaaggtgtctccatcaagtactgaagcagatggagaactctatgtttttaataccccatctgggacatcgagtgtagagactcaaatgaggcatgtatctattagttatgacattcctccaacacctggtaatacttatcagattccacgaacatttccagaaggaaccttgggacagacatcaaagctagacactattccagatattcctccacctcggccaccgaaaccacatccagctcatgaccgatctcctgtggaaacgtgtagtatcccacgcaccgcctcagacactgacagtagttactgtatccctacagcagggatgtcgccttcacgtagtaataccatttccactgtggatttaaacaaattgcgaaaagatgctagttctcaagactgctatgatattccacgagcatttccaagtgatagatctagttcacttgaaggcttccataaccactttaaagtcaaaaatgtgttgacagtgggaagtgtttcaagtgaagaactggatgaaaattacgtcccaatgaatcccaattcaccaccacgacaacattccagcagttttacagaaccaattcaggaagcaaattatgtgccaatgactccaggaacatttgatttttcctcatttggaatgcaagttcctcctcctgctcatatgggcttcaggtccagcccaaaaacccctcccagaaggccagttcctgttgcagactgtgaaccaccccccgtggataggaacctcaagccagacagaaaagtcaagccagcgcctttagaaataaaacctttgccagaatgggaagaattacaagccccagttagatctcccatcactaggagttttgctcgagactcttccaggtttcccatgtccccccgaccagattcagtgcatagcacaacttcaagcagtgactcacacgacagtgaagagaattatgttcccatgaacccaaacctgtccagtgaagacccaaatctctttggcagtaacagtcttgatggaggaagcagccctatgatcaagcccaaaggagacaaacaggtggaatacttagatctcgacttagattctgggaaatccacaccaccacgtaagcaaaagagcagtggctcaggcagcagtgtagcagatgagagagtggattatgttgttgttgaccaacagaagaccttggctctaaagagtacccgggaagcctggacagatgggagacagtccacagaatcagaaacgccagcgaagagtgtgaaatgaaaatattgccttgccatttctgaacaaaagaaaactgaattgtaaagataaatcccttttgaagaatgacttgacacttccactctaggtagatcctcaaatgagtagagttgaagtcaaaggacctttctgacataatcaagcaatttagacttaagtggtgctttgtggtatctgaacaattcataacatgtaaataatgtgggaaaatagtattgtttagctcccagagaaacatttgttccacagttaacacactcg

SEQ ID NO: 138741 - DNA, 7981 bp, Homo sapiens
  Payload ID: 7178
  Gene Symbol: GAB1
  Gene Name: GRB2-associated binding protein 1
  Uniprot ID: Q13480
  ENST ID: ENST00000262995
  CDS Start-End: 428-2602
gtgtgtgtgtgtgtgtgtgagcagcgctgtgtctgtttcggaaagcgctctggggaggtcttgtccctagggggcggagcgcaaaggacagaagctccggcaccgagtcggggcagagtcccgctgagtccgagcgctgctgaggcagctggcgagacggcacgtctggaggcgaggcgggcgcactgaaaggaggccggcgcgcccgcggccccggctcgcgttctgttcaggttcgtgggcctgcagaggagagactcgaactcgtggaacccgcgcaccgtggagtctgtccgcccagtccgtccggggtgcgcgaccaggagagctaggttctcgccactgcgcgctcggcaggcgtcggctgtgtcgggagcgcgcccgccgcccctcagctgcccggcccggagcccgagacgcgcgcaccatgagcggtggtgaagtggtctgctccggatggctccgcaagtcccccccggagaaaaagttgaagcgttatgcatggaagaggagatggttcgtgttacgcagtggccgtttaactggagatccagatgttttggaatattacaaaaatgatcatgccaagaagcctattcgtattattgatttaaatttatgtcaacaagtagatgctggattgacatttaacaaaaaagagtttgaaaacagctacatttttgatatcaacactattgaccggattttctacttggtagcagacagcgaggaggagatgaataagtgggttcgttgtatttgtgacatctgtgggtttaatccaacagaagaagatcctgtgaagccacctggcagctctttacaagcaccagctgatttacctttagctataaatacagcaccaccatccacccaggcagattcatcctctgctactctacctcctccatatcagctaatcaatgttccaccacacctggaaactcttggcattcaggaggatcctcaagactacctgttgctcatcaactgtcaaagcaagaagcccgaacccaccagaacgcatgctgattctgcaaaatccacctcttctgaaacagactgcaatgataacgtcccttctcataaaaatcctgcttcctcccagagcaaacatggaatgaatggcttttttcagcagcaaatgatatacgactctccaccttcacgtgccccatctgcttcagttgactccagcctttataacctgcccaggagttattcccatgatgttttaccaaaggtgtctccatcaagtactgaagcagatggagaactctatgtttttaataccccatctgggacatcgagtgtagagactcaaatgaggcatgtatctattagttatgacattcctccaacacctggtaatacttatcagattccacgaacatttccagaaggaaccttgggacagacatcaaagctagacactattccagatattcctccacctcggccaccgaaaccacatccagctcatgaccgatctcctgtggaaacgtgtagtatcccacgcaccgcctcagacactgacagtagttactgtatccctacagcagggatgtcgccttcacgtagtaataccatttccactgtggatttaaacaaattgcgaaaagatgctagttctcaagactgctatgatattccacgagcatttccaagtgatagatctagttcacttgaaggcttccataaccactttaaagtcaaaaatgtgttgacagtgggaagtgtttcaagtgaagaactggatgaaaattacgtcccaatgaatcccaattcaccaccacgacaacattccagcagttttacagaaccaattcaggaagcaaattatgtgccaatgactccaggaacatttgatttttcctcatttggaatgcaagttcctcctcctgctcatatgggcttcaggtccagcccaaaaacccctcccagaaggccagttcctgttgcagactgtgaaccaccccccgtggataggaacctcaagccagacagaaaaggtcaaagtcctaaaattttaagactcaaaccccatggtttagagcgaactgattcacaaaccataggtgactttgctacaagaagaaaggtcaagccagcgcctttagaaataaaacctttgccagaatgggaagaattacaagccccagttagatctcccatcactaggagttttgctcgagactcttccaggtttcccatgtccccccgaccagattcagtgcatagcacaacttcaagcagtgactcacacgacagtgaagagaattatgttcccatgaacccaaacctgtccagtgaagacccaaatctctttggcagtaacagtcttgatggaggaagcagccctatgatcaagcccaaaggagacaaacaggtggaatacttagatctcgacttagattctgggaaatccacaccaccacgtaagcaaaagagcagtggctcaggcagcagtgtagcagatgagagagtggattatgttgttgttgaccaacagaagaccttggctctaaagagtacccgggaagcctggacagatgggagacagtccacagaatcagaaacgccagcgaagagtgtgaaatgaaaatattgccttgccatttctgaacaaaagaaaactgaattgtaaagataaatcccttttgaagaatgacttgacacttccactctaggtagatcctcaaatgagtagagttgaagtcaaaggacctttctgacataatcaagcaatttagacttaagtggtgctttgtggtatctgaacaattcataacatgtaaataatgtgggaaaatagtattgtttagctcccagagaaacatttgttccacagttaacacactcgtagtattactgtatttatgcactttttcatctaaaacattgttctgggttttcccaatgtaccttaccataattcctttgggagttcttgttttttgtcacactactttatataacaatactaagtcaactaagctacttttagatttggaaattgctgtttacagtctaacaacattaaaatgagaggtagattcacaagttagctttctacctgaagcttcaggtgataaccattagcttatacttggactcatcatttgttgccttccaaaatgctgaggataatgtatgtactggtgtcaggacctagttctctggttaatgtacatttagtttttaatggtggaactttgttatattttgttaattacagtgtttttggttcattgagtgaagattctgccgggtgggatcttgcacctttgaaagactgaataattacactaccaagtaagcctgcaaatcattgatggcatgcagtgatgatgtgctcttacacttgttaacatgtattaagtgttatttgcaaaaggtagattatgtaaccaatcaggtacgtaccaggcagtgatgtgctaatacactgatcaggtttagacaatgagctttggttgtgttcttgttagtcctaatattggttttcagtttggaattaataaagcagttgacattcactgttagttacagcaacatactgtgatttttaattagatagtaattcagatttattactctatgaaattctgtcttttgacaccatagtgccctttctatgattttttttacttaatattcttcttggccttatatttaattccctatgcaattaatattttatatctgcatttttttaaaaaaaatagatgttatataagtgattctcgtatgtagcacctgttgcttttccactgaaagaattacggattttgtactgtgatttatattcactgccccaattcaagaaatattggagccttgctacaatgtgaaatgttatagtcatggactccttccaaccagatttctgaaaacaccagagggatggtataattctgtctcacctataacatggtcctgtgacatagatattaagaccacaagttgtagtgaggctacaattatattcgtctgtcttggctttgcaacataatttagaaagcacgtatagttgttttttaaccaagttacatacaatctcatgtactgatttgagacttataacaatttttggagggggcatagagaaaggagtgcccacagttgaggcatgaccccctccattcagacctctaactgttgcctgagtacacagatgtgccctgatttctggcccattggccatagtactgtgcctaatcaatgtaataggtttattttcccaatcctcaaactaaaaatgttcataacaagatgaattgtagactagtaacatttgatgcttttaaatatttgcttctttttaaacaaaaactaaaacccagaagtgaatttttaggtggatttttaaataaaaaagattgattgagtttggtgtgcaagctgttttataatgaaacaacaaaatgaaatctaaaatcctgaaatgtgcctaaactatcaaaacacacgatacagctaatgtgtaaagatgctaaattctgttacttggaggatgaatatatttaagatttaaaacacaataataaatacatgattaattcaaaaataaaaatctttacagctgcctatcaagggtctaaagcacttaatgaatgtttttagtctaacttatcattaactttttacaagtcaccatatttgaagatctgtagcactctgattttcagaaaatttttcattctgaataatttaaaaatggtgatgtattagaaaggcagtttgctttagaaaactaaatcacattgaacattgtattagagaattaaattaaaagtttcttacagagcagtattttccaaacatttttagcactagaatctttttagatgaaattttatgtataaccccaatacataaagcctgaaaactcaattttatcaatataaatgtattttgggttcacatttatgcttattcattttggctcattactaagcataataagattctgagttatttctgaataacacaaatgtggagttatacatagttgatgaaaccagcagccaatttatagctatgccctgttttatttgtatactatcaagaaaattttgattcacacaaatgtaagcaaaaataataggttttaaacatacatctcaggaaattctttaattagagatagctaaagttattcaaggtctatacaaaaataagttatcctggtagtggaagttaatacataagcagtctccagtgtggtaaagtagggtatgtaacacatcagaatgtgcgtttttattaggttttaaaatatgcacgtataaaaactaaatttgaatcaaacccttttaactcacctccaagaagctagactttggccaggaatgggctaaaaaccactggttaacgatgtgacagttatgatcttggagattggaaatctttcttccacattagagttctttaccttaattccttattctgaaaaattgtaagattttatgaaggtttgaatactgaagcacagttctgctttcaaaaattaaaattcaaacttgaaaaagctgtttaacccatggaagatatcatttagtaagatgtaaaagattttttaaatctacacttcagtttatacatctttatcattatcaatactatataagttactgtgagcattttagagaattccataaaggtactatgagtgtgtctgtatgtgtgtgtatatatagcattgtatttaatcatagactaaatttaatttgatatagaaatactactttacttgtacattaaggtcataatttctgctggactcttttatatttaattaatggggattatagtcttccttcataaatgcatttaaacctgaaattgaacaccagtgtttttctttttctacttatgggaagttgtctgcttccccctttagagaaaacagtatttttatattttgttaaaatattaactactttatgcctacacactatgctgtagatactgatcataattcttgggtgttcacaaacactcctagtgcctcttttttggcccgttgaaagtgttggtattactactttcactacagagcctttggccctctaataatgctgaggtgggctgatccttcccatttctgtcttcgggtcattctggtaggtcttctcctccactgtcaagtaagcaatcaggtccgtgacagggattggacatatgaacaaattaagtggatacacacagtgagaaagatacatgcattctatggtaacaactactgtcaataacatctgatgttacatgcacatttatatatatataattttaaaaactgaactatgagaagccatggtataaatgaatattgtggacatcatggacttgatatgatagaaatcaattgtcagcttgagaaagttgtttttaatctgtctaaatagttcatgcattactacagttaaaaatagtttcatttgtcttctatagacttaattttattccggttcagtataatctctgttaacagagtttcagcaaactgattggtcaaggtattaacatagcttctacttcctttacttaaaaagatgtggttttatgtaagttcttgattactgatgatcatcccaaattttgacaacaaaatcatatgtataaatttatttctcccctcttgttcatcatcttttgtaaaggtcccattgtagatcttttctgctaccaaataaaacttttcaaacaatttggtttcaagaccttaaatagacaagttggatactaagattgtgaactgataaggacatataaatttatatttccagcccttccttagagtctttatctgcatcaaaaacccaattctgccattaactgtgcttcccagtcccacctctatatgtcactcattttctgcaacaaagatctcactaaatcatgttgaaacacaagtcatgatcctctctaagtaaatagaaaaagctccctggaaaaactctgttgccacatgcacgtgccctgttactcctccagccagccagtgctgccagcattttattgtgtaaaagtccaaataaataagggcctgcatgcaacctttatcttcagaaactaggttttatatgtaaaatgtgacttgggaaatgattctgtttattaactggctgggatttttcatttctatgaaagtttcaaacatctccagtactttataaaatcccaacaattgctgtaagtcagcactttggtccactcagcccacccagcccacttgcaactctgactcttcactgaatcatatttgggaagtttgggtagggtgaggctatcttcttcaagattattttctcatatgtctgtctgtcaccttgtaaaccatgagactcctgggtatttgcatgtaacttctttgaggaagttaccaccatctctgatatagacacactttttgagttgcagtttctgttagaattttttggagactaacttgccaattctgtgaatgttattgaatatttaaaaagctgggtctgtaatgggaggcattttattagctgttgtgattgggtaacatgtccccttagatttcctgatttaaaattatacaaaattactatttttgataaaataaaggaacacctacagaaaattaagtttctaagatgtttctatacttcattagaaaagattttattactattacttatggttattggtgattaacacttaatgcgtctcctctgattttgtgttccatgaggtgcttggaacatttggagtgctctgtgcgagggacatacagtgatataggaaatttaaaaattaaaataatacccaaaacccactttatcagatatggtattgtgatggttaatattatgtgtcaacttggtgaggctatggcgcccatgtgtttggtcaaacactagcctagatgttgctgtgaatatattttgtagatgtgattaacatttacaatcagttgattttaagtaaagcagattctcatccataa

SEQ ID NO: 138742 - DNA, 571 bp, Homo sapiens
  Payload ID: 7178
  Gene Symbol: GAB1
  Gene Name: GRB2-associated binding protein 1
  ENST ID: ENST00000511836
  CDS Start-End: 1-283
tggccgtttaactggagatccagatgttttggaatattacaaaaatgatcatgccaagaagcctattcgtattattgatttaaatttatgtcaacaagtagatgctggattgacatttaacaaaaaagagtttgaaaacagctacatttttgatatcaacactattgaccggattttctacttggtagcagacagcgaggaggagatgaataagtgggttcgttgtatttgtgacatctgtgggtttaatccaacagaagaaggatctcactttgtcgtctaggctggagtacagtggcatgatctctgctcactgcaacctctgcctcccaggttcaagcgattctcgtgcctcagccttctgagtagctggaattacagatcctgtgaagccacctggcagctctttacaagcaccagctgatttacctttagctataaatacagcaccaccatccacccaggcagattcatcctctgctactctacctcctccatatcagctaatcaatgttccaccacacctggaaactcttggcattcaggaggatcctcaagactacctgttgct

SEQ ID NO: 138743 - DNA, 2477 bp, Homo sapiens
  Payload ID: 7178
  Gene Symbol: GAB1
  Gene Name: GRB2-associated binding protein 1
  ENST ID: ENST00000505913
  CDS Start-End: 324-2099
attactttcctagactctagtcatgaacaggatgttggaagtcagaggtacagagaagctgcctttttaggccgctcacatgaaaggcatggaagaggagatggttcgtgttacgcagtggccgtttaactggagatccagatgttttggaatattacaaaaatgatcatgccaagaagcctattcgtattattgatttaaatttatgtcaacaagtagatgctggattgacatttaacaaaaaagagtttgaaaacagctacatttttgatatcaacactattgaccggattttctacttggtagcagacagcgaggaggagatgaataagtgggttcgttgtatttgtgacatctgtgggtttaatccaacagaagaagatcctgtgaagccacctggcagctctttacaagcaccagctgatttacctttagctataaatacagcaccaccatccacccaggcagattcatcctctgctactctacctcctccatatcagctaatcaatgttccaccacacctggaaactcttggcattcaggaggatcctcaagactacctgttgctcatcaactgtcaaagcaagaagcccgaacccaccagaacgcatgctgattctgcaaaatccacctcttctgaaacagactgcaatgataacgtcccttctcataaaaatcctgcttcctcccagagcaaacatggaatgaatggcttttttcagcagcaaatgatatacgactctccaccttcacgtgccccatctgcttcagttgactccagcctttataacctgcccaggagttattcccatgatgttttaccaaaggtgtctccatcaagtactgaagcagatggagaactctatgtttttaataccccatctgggacatcgagtgtagagactcaaatgaggcatgtatctattagttatgacattcctccaacacctggtaatacttatcagattccacgaacatttccagaaggaaccttgggacagacatcaaagctagacactattccagatattcctccacctcggccaccgaaaccacatccagctcatgaccgatctcctgtggaaacgtgtagtatcccacgcaccgcctcagacactgacagtagttactgtatccctacagcagggatgtcgccttcacgtagtaataccatttccactgtggatttaaacaaattgcgaaaagatgctagttctcaagactgctatgatattccacgagcatttccaagtgatagatctagttcacttgaaggcttccataaccactttaaagtcaaaaatgtgttgacagtgggaagtgtttcaagtgaagaactggatgaaaattacgtcccaatgaatcccaattcaccaccacgacaacattccagcagttttacagaaccaattcaggaagcaaattatgtgccaatgactccaggaacatttgatttttcctcatttggaatgcaagttcctcctcctgctcatatgggcttcaggtccagcccaaaaacccctcccagaaggccagttcctgttgcagactgtgaaccaccccccgtggataggaacctcaagccagacagaaaagtcaagccagcgcctttagaaataaaacctttgccagaatgggaagaattacaagccccagttagatctcccatcactaggagttttgctcgagactcttccaggtttcccatgtccccccgaccagattcagtgcatagcacaacttcaagcagtgactcacacgacagtgaagagaattatgttcccatgaacccaaacctgtccagtgaagacccaaatctctttggcagtaacagtcttgatggaggaagcagccctatgatcaagcccaaaggagacaaacaggtggaatacttagatctcgacttagattctgggaaatccacaccaccacgtaagcaaaagagcagtggctcaggcagcagtgtagcagatgagagagtggattatgttgttgttgaccaacagaagaccttggctctaaagagtacccgggaagcctggacagatgggagacagtccacagaatcagaaacgccagcgaagagtgtgaaatgaaaatattgccttgccatttctgaacaaaagaaaactgaattgtaaagataaatcccttttgaagaatgacttgacacttccactctaggtagatcctcaaatgagtagagttgaagtcaaaggacctttctgacataatcaagcaatttagacttaagtggtgctttgtggtatctgaacaattcataacatgtaaataatgtgggaaaatagtattgtttagctcccagagaaacatttgttccacagttaacacactcgtagtattactgtatttatgcactttttcatctaaaacattgttctgggttttcccaatgtaccttaccataattcctttgggagttcttgttttttgtcacactactttatataaca

SEQ ID NO: 138744 - DNA, 743 bp, Homo sapiens
  Payload ID: 7178
  Gene Symbol: GAB1
  Gene Name: GRB2-associated binding protein 1
  ENST ID: ENST00000509992
  CDS Start-End: 214-743
caaggacaaagtacactggcttctgaagaaactttttcttgggagcaaggacttgggggtaacaaaatgaggagtaagtgaagaaagaagaaggcacagcttgtcgagattgatggaccgccccccgcccccgggagagcagcgtaggaaattgcaggatgaaatttgtgtgccagtcttgtcagcacccattcctgttgaaggagagggcatatggatgaggcatggaagaggagatggttcgtgttacgcagtggccgtttaactggagatccagatgttttggaatattacaaaaatgatcatgccaagaagcctattcgtattattgatttaaatttatgtcaacaagtagatgctggattgacatttaacaaaaaagagtttgaaaacagctacatttttgatatcaacactattgaccggattttctacttggtagcagacagcgaggaggagatgaataagtgggttcgttgtatttgtgacatctgtgggtttaatccaacagaagaagatcctgtgaagccacctggcagctctttacaagcaccagctgatttacctttagctataaatacagcaccaccatccacccaggcagattcatcctctgctactctacctcctccatatcagctaatcaatgttccaccacacctggaaactcttggcattcaggaggatcctcaagactacctgttgctcatcaactgtcaaagcaagaagcccgaacccaccag

SEQ ID NO: 138745 - DNA, 470 bp, Homo sapiens
  Payload ID: 7178
  Gene Symbol: GAB1
  Gene Name: GRB2-associated binding protein 1
  ENST ID: ENST00000512843
  CDS Start-End: 1-275
atcctgtgaagccacctggcagctctttacaagcaccagctgatttacctttagctataaatacagcaccaccatccacccaggcagattcatcctctgctactctacctcctccatatcagctaatcaatgttccaccacacctggaaactcttggcattcaggaggatcctcaagactacctgttgctcatcaactgtcaaagcaagaagcccgaacccaccagaaacgccagcgaagagtgtgaaatgaaaatattgccttgccatttctgaacaaaagaaaactgaattgtaaagataaatcccttttgaagaatgacttgacacttccactctaggtagatcctcaaatgagtagagttgaagtcaaaggacctttctgacataatcaagcaatttagacttaagtggtgctttgtggtatctgaacaattcataacatgtaaataatgtgggaaaatagtattg

SEQ ID NO: 138746 - DNA, 582 bp, Homo sapiens
  Payload ID: 7178
  Gene Symbol: GAB1
  Gene Name: GRB2-associated binding protein 1
  ENST ID: ENST00000515366
  CDS Start-End: 438-582
aaaaattatagaggatctgcagactgagacgcattgggactgaaattaggcaattcagagtttctcatgcatagtctcactgtgttgcccagattggtcttgaactcctggcctcaagtgatcctctttccttgccctcccaaagtgctgggattacaggcttgagccaccactcccagccaacagaattcttttcaacagcatggaagaggagatggttcgtgttacgcagtggccgtttaactggagatccagatgttttggaatattacaaaaatgatcatgccaagaagcctattcgtattattgatttaaatttatgtcaacaagtagatgctggattgacatttaacaaaaaagagtttgaaaacagctacatttttgatatcaacactattgaccggattttctacttggtagcagacagcgaggaggagatgaataagtgggttcgttgtatttgtgacatctgtgggtttaatccaacagaagaagatcctgtgaagccacctggcagctctttacaagcaccagctgatttacctttagctataaatacagcaccaccatccacccaggcag

SEQ ID NO: 138747 - DNA, 728 bp, Homo sapiens
  Payload ID: 7178
  Gene Symbol: GAB1
  Gene Name: GRB2-associated binding protein 1
  ENST ID: ENST00000514639
  CDS Start-End: 12-728
acgcgcgcaccatgagcggtggtgaagtggtctgctccggatggctccgcaagtcccccccggagaaaaagttgaagcgttatgcatggaagaggagatggttcgtgttacgcagtggccgtttaactggagatccagatgttttggaatattacaaaaatgatcatgccaagaagcctattcgtattattgatttaaatttatgtcaacaagtagatgctggattgacatttaacaaaaaagagtttgaaaacagctacatttttgatatcaacactattgaccggattttctacttggtagcagacagcgaggaggagatgaataagtgggttcgttgtatttgtgacatctgtgggtttaatccaacagaagaagatcctgtgaagccacctggcagctctttacaagcaccagctgatttacctttagctataaatacagcaccaccatccacccaggcagattcatcctctgctactctacctcctccatatcagctaatcaatgttccaccacacctggaaactcttggcattcaggaggatcctcaagactacctgttgctcatcaactgtcaaagcaagaagcccgaacccaccagccaagggtcatcttttgtttctgaagaaggagaggaataccttctactagaagattttgaaagcaaaacgattccattgcaaacgcatgctgattctgcaaaatccacctcttctgaaacagac

SEQ ID NO: 138748 - DNA, 6052 bp, Homo sapiens
  Payload ID: 7179
  Gene Symbol: GAB2
  Gene Name: GRB2-associated binding protein 2
  Uniprot ID: Q9UQC2
  ENST ID: ENST00000340149
  CDS Start-End: 161-2077
gaaattttgagaagtggtgggatgaagaagatccctgaagagaggagtaactgagacaaaggcgaggctagcaatagagagacaagtgagggaattagacctttggtatcatcatgaaaaggcctggaagaaacgctggtttatcctgcggagtggccggatgagcggtgacccagatgttctggaatactacaagaacgatcactccaagaagcctctgcggatcatcaacctgaacttctgtgagcaggtagatgcaggcctgacctttaacaagaaggagctgcaggatagttttgtgtttgacatcaagaccagtgaacgcaccttttacctggtggctgagacagaagaggacatgaataagtgggtccagagcatctgccagatctgtggcttcaatcaggctgaggagagcacagactccctgagaaatgtttcctcagccggtcatggcccccgctcttctccagctgagctcagcagctctagccagcaccttctccgagagcgcaagtcctcagccccatcacactccagccagccaactctgttcacgtttgaaccccctgtgtcaaaccacatgcagcccaccttgtccaccagcgcacctcaggagtatctctacttgcaccagtgcataagccgaagagcagaaaatgcaaggagtgccagcttctctcagggcaccagagcctcttttctcatgaggagtgacacagctgtacaaaaacttgcccagggcaatggacactgtgtcaacgggatcagtggtcaagtccatggcttctatagccttcccaagccgagccggcacaatacagaattcagagacagtacctacgacctcccccgcagcctggcctcccatggccacaccaagggcagcctcacaggctccgagacagataatgaggatgtgtacaccttcaagacgcccagcaacaccctgtgcagggagttcggggacctcctggtagacaatatggatgttccggccaccccactctcagcctaccagatccctaggacattcactctggacaaaaaccacaatgccatgacagtggccactcctggggactcagccatagctcccccaccccgcccccccaagccaagtcaggcagaaacacctcgatggggcagtcctcagcagagaccgccaatcagtgaaaatagcagatctgtcgctgccaccatccccagacgcaacaccctccctgcaatggacaacagccgacttcaccgagcttcttcctgtgagacctacgagtacccacagcgtggtggagagagtgcaggccggtctgctgaatccatgagtgatggagttggctctttcctgccagggaaaatgattgtgggccgatcggacagcaccaattctgaagacaactatgtgcccatgaatccaggttcttccaccctgttggccatggaacgagcaggtgataattcccagagcgtctacatcccaatgagcccaggggcccatcactttgactcacttggctacccatcaacaacccttcctgtgcaccgaggccccagcagaggaagtgagattcagccaccccctgtcaaccgcaacctcaaacctgatcggaaagcaaagccaacaccacttgacctgaggaacaacaccgtcatcgatgaactccccttcaagtcacctatcaccaagtcttggtctagggccaaccacaccttcaactccagctcctcccagtactgccgccccatctccacccagagcatcaccagcacagactcaggagacagcgaagagaactatgtccctatgcaaaacccagtgtctgcatctcccgttcccagtggcacgaacagtcctgcccctaagaagagcaccggcagcgttgattatctggccctggacttccagccgagctccccaagcccccaccgcaagccatctacttcatccgtcacctctgatgagaaggtggactacgttcaggtggacaaggagaagacccaggccctgcagaacaccatgcaggagtggacagacgtgcggcagtcctcagagccttccaagggtgccaagctgtgatgagagggccaccgcagagcccaggaggcagcatctccagagctggcccttcccatctcccctctcccctctcccgttcttcctcccatccacctcctctctactctgccagtctcagccttcaaagcacttgacatcagggaccctgaacccttcccctgggaggtgagggcctgatcaaggcacctcctctgcccactcggggcccagctgtgatttttatcagtaatggccatgcctccacccaccttagttaggagctacttccaaaaagcatccttcagcctcttcctgtcctttagacctgactctctaccagatgtttggagggaagggctggggctctgagccagattccacacctcacgttcagtcacagccctcagctatcttccctccggccactgggctacctctccttcagtcccagaagacaagtctcaccaacccagggagtcaaggaccagcaaaccaaagtggataatggactttttcattcctgtttttcttggcaggagagaagcaaggccactaaaagaggagatggtggagacggaggctcagcagtggtcttgaggggtaaaggacttagatgcccagatgaagagggaaagctgacatctgcagggaacccactttgaggctgaggccatggcaggacagctgctgtggggtgcagaggcagaagatgaaggacaaaaggaagggaaaactgatggccaacctagagcagcaaggagcagggcttggagctcgggtggtggagatgacaaggacactgtggggtctgggtccccagaactctggagctacaggccactctaggcccaagggctagtcctcttccccagtcccctcagaggcccccgccagccccaccttgaaagcagcatacaggggaaggcttggaccaagctgggcgaccaagcacatggggcaggaacacatggtaaaggggtggggaatatgggagggagtgtggtgtggatgggggtgatgcagggactgaggggaaccctgggacaggcacaggctgggcagaggcacagggcagtgcaggggactctgcagtggggtcgggaagtgagtttctttgcagtgagcagtgcagtggaagtcgggcacagaggtagcagacagatgtgaagcagtggtgaaggccatgtagcaagtggggaaatacatccaaagggcctgggagttggggggtgcccaacgcaatccttgggggtgcagggtggagcagaaagtgaaggagggacacgtgcaagagtggtgtgcatggtggtgtgacatgaggaccgttcctaggatgggacagtgggtcaggcaggacaaggagaaagcagggcagaatgatgcctagaggaccacatcaggcatggctgacagcttgtgcccatgggctgtggcgtatgtcagatcgcagggtaggaacgagtctggcctggtgccggcccagtgtttcctcagctcatccgccctctgttgctccctagcattccaggagccatcttggactctcctccccaggtttgaaaggccatcagattagcagggacggggtgtagggcatcacccaaggttccttctcttaaactaagggtgggggatctgaatgtttttatgttgactgttcttgactaaattttcaagagtttcagaagcaacaggacagaccagacgtttcattctaccctggggcgaacagaacttcttcctcccaaacaatgacttcctgccatgtttgatggggacagctaccactgtcctctgcccccattcccctttcagctcccatgagcatgcatagttcaccagaccaatggcctagccattctctaagtcccatcctggaagaagttatttcttcaagagctgcacctctcctcctagcattagtttagatcaactcaaggagtatttattaatggctgctgtctccagtttctggggttaagcactaaggacacaagaatcaatcagaccttctccctgaacttaagatagccacaatcagaaaaaggacaaggacatgagacagtggtgatggccatcagacagagacttcaaatgctgatggagggcagaggaagtacttagggaggttggtgtcagaggcaggagtgggggatcagggaaggtggattctaggaaaagggagtgcctgaggtaggccttagaaggggatgagtcagatttttacagaggaggagggcagggcttgggtccagtggaggaagaaggaaggagaggcttggaaagccttgtgtcttgggaacaaaaggcctttgagcatatgggtccagccactcagaagtgtaggggccatgccttggtgttccaataagtgaatggaagcagtggtggtagctacactgggcagagttggcagggtgctggttcactctgcccagccctgaatgtgtgccttaaaggccccctacaaggggccccatacgacagagcttttaactggtgccttccctgtacccgcagcagccacaagtgggcccagactattgcagcctcccataaacatgtgagcatgttctgagtgtgccatgatgtgagtggacctggctggaatcttcggagagcgactgaggtgttcaaatcgaatctcccaggaggcttccttccagccccctattctggtaactaccaggaggcttccttccagccccctattctggtaactaccaaaatccctcgggtgcaagtgtaggggtagagatggaaggatgagaggtgaaattgaccttttgaaagcaaagctctggctcacaggccccaaactaccagccgtatctagcatatccccaccctccacccactacctcctccaacaaaggagtcaactcagttgaaaaaactggtcctttggcctatccatgggtcaaagtccacctctcctgggggcctggagaggactgagcctacggaaaggggataccttcccactcagcactgcttcacacaggccccctgcctggggctctccaaggagccttcttcacccacttccagctccacttctgcaaggttaagtcaagtgagaacgatgagaaatagggagatggtgtctccttaagtccttgatctgcctgtctgtggaatgggaggttggattagctgcgctgaggtcccatccacagctggtgctcagctgcttgaaggggagactccctcctctgtaacttctttctgggggattggggtgggcagtacctatccccagtcccctcctagcttgactttagtggtttccaatgtagaagttaacaaagtatgccccattcctgtgacaaaagcacaaccattctgaagttactggagcatgggctcagctcatcctccctctggccccttctcccatggggacatctcggcccagcacccctatcccatttccagagttcttccttccccatctgggccttcataaaatgcaggggaagccagactggtctcaggagcgctaaagcccttccgtggggggtcgtctttctgggactagccctgctgtttaggacctgggaccacaatggggtacctgccgagggggtccccaagagatccaggctgtcatgtgatttatggtggcatgtgttgtgtatttgttggctacttgtgtcttgaaatctagaattatttcacgcagaattgtcactgtttgtcaggaagagaaaatgggctagtggaagcccagtcttgagttcttgtcttgttaccatttaaaattgacatttaattttcaaatcactgttggtgcctaatcacttaagttattaatttattctgttgtattcttttttttaaattgtaacatatttatccggtgggtgggacaggagtgtgttcaagtgggtcatgtttttgctgtggtgacacatggtacaggcttggagcttgcaggtccctttctactgtggtgttggagcaggacaataaagtccactagaaatgcacccc

SEQ ID NO: 138749 - DNA, 6092 bp, Homo sapiens
  Payload ID: 7179
  Gene Symbol: GAB2
  Gene Name: GRB2-associated binding protein 2
  Uniprot ID: Q9UQC2
  ENST ID: ENST00000361507
  CDS Start-End: 87-2117
gagctgcgcaccgccggccgctgccccagctgcccgagcccgcgccctcgtccgcgcgacccggcggggggctccaggccggcagcatgagcggcggcggcgacgtggtgtgcaccggctggctgaggaaatcgcctcccgagaagaagttgaggcgctatgcctggaagaaacgctggtttatcctgcggagtggccggatgagcggtgacccagatgttctggaatactacaagaacgatcactccaagaagcctctgcggatcatcaacctgaacttctgtgagcaggtagatgcaggcctgacctttaacaagaaggagctgcaggatagttttgtgtttgacatcaagaccagtgaacgcaccttttacctggtggctgagacagaagaggacatgaataagtgggtccagagcatctgccagatctgtggcttcaatcaggctgaggagagcacagactccctgagaaatgtttcctcagccggtcatggcccccgctcttctccagctgagctcagcagctctagccagcaccttctccgagagcgcaagtcctcagccccatcacactccagccagccaactctgttcacgtttgaaccccctgtgtcaaaccacatgcagcccaccttgtccaccagcgcacctcaggagtatctctacttgcaccagtgcataagccgaagagcagaaaatgcaaggagtgccagcttctctcagggcaccagagcctcttttctcatgaggagtgacacagctgtacaaaaacttgcccagggcaatggacactgtgtcaacgggatcagtggtcaagtccatggcttctatagccttcccaagccgagccggcacaatacagaattcagagacagtacctacgacctcccccgcagcctggcctcccatggccacaccaagggcagcctcacaggctccgagacagataatgaggatgtgtacaccttcaagacgcccagcaacaccctgtgcagggagttcggggacctcctggtagacaatatggatgttccggccaccccactctcagcctaccagatccctaggacattcactctggacaaaaaccacaatgccatgacagtggccactcctggggactcagccatagctcccccaccccgcccccccaagccaagtcaggcagaaacacctcgatggggcagtcctcagcagagaccgccaatcagtgaaaatagcagatctgtcgctgccaccatccccagacgcaacaccctccctgcaatggacaacagccgacttcaccgagcttcttcctgtgagacctacgagtacccacagcgtggtggagagagtgcaggccggtctgctgaatccatgagtgatggagttggctctttcctgccagggaaaatgattgtgggccgatcggacagcaccaattctgaagacaactatgtgcccatgaatccaggttcttccaccctgttggccatggaacgagcaggtgataattcccagagcgtctacatcccaatgagcccaggggcccatcactttgactcacttggctacccatcaacaacccttcctgtgcaccgaggccccagcagaggaagtgagattcagccaccccctgtcaaccgcaacctcaaacctgatcggaaagcaaagccaacaccacttgacctgaggaacaacaccgtcatcgatgaactccccttcaagtcacctatcaccaagtcttggtctagggccaaccacaccttcaactccagctcctcccagtactgccgccccatctccacccagagcatcaccagcacagactcaggagacagcgaagagaactatgtccctatgcaaaacccagtgtctgcatctcccgttcccagtggcacgaacagtcctgcccctaagaagagcaccggcagcgttgattatctggccctggacttccagccgagctccccaagcccccaccgcaagccatctacttcatccgtcacctctgatgagaaggtggactacgttcaggtggacaaggagaagacccaggccctgcagaacaccatgcaggagtggacagacgtgcggcagtcctcagagccttccaagggtgccaagctgtgatgagagggccaccgcagagcccaggaggcagcatctccagagctggcccttcccatctcccctctcccctctcccgttcttcctcccatccacctcctctctactctgccagtctcagccttcaaagcacttgacatcagggaccctgaacccttcccctgggaggtgagggcctgatcaaggcacctcctctgcccactcggggcccagctgtgatttttatcagtaatggccatgcctccacccaccttagttaggagctacttccaaaaagcatccttcagcctcttcctgtcctttagacctgactctctaccagatgtttggagggaagggctggggctctgagccagattccacacctcacgttcagtcacagccctcagctatcttccctccggccactgggctacctctccttcagtcccagaagacaagtctcaccaacccagggagtcaaggaccagcaaaccaaagtggataatggactttttcattcctgtttttcttggcaggagagaagcaaggccactaaaagaggagatggtggagacggaggctcagcagtggtcttgaggggtaaaggacttagatgcccagatgaagagggaaagctgacatctgcagggaacccactttgaggctgaggccatggcaggacagctgctgtggggtgcagaggcagaagatgaaggacaaaaggaagggaaaactgatggccaacctagagcagcaaggagcagggcttggagctcgggtggtggagatgacaaggacactgtggggtctgggtccccagaactctggagctacaggccactctaggcccaagggctagtcctcttccccagtcccctcagaggcccccgccagccccaccttgaaagcagcatacaggggaaggcttggaccaagctgggcgaccaagcacatggggcaggaacacatggtaaaggggtggggaatatgggagggagtgtggtgtggatgggggtgatgcagggactgaggggaaccctgggacaggcacaggctgggcagaggcacagggcagtgcaggggactctgcagtggggtcgggaagtgagtttctttgcagtgagcagtgcagtggaagtcgggcacagaggtagcagacagatgtgaagcagtggtgaaggccatgtagcaagtggggaaatacatccaaagggcctgggagttggggggtgcccaacgcaatccttgggggtgcagggtggagcagaaagtgaaggagggacacgtgcaagagtggtgtgcatggtggtgtgacatgaggaccgttcctaggatgggacagtgggtcaggcaggacaaggagaaagcagggcagaatgatgcctagaggaccacatcaggcatggctgacagcttgtgcccatgggctgtggcgtatgtcagatcgcagggtaggaacgagtctggcctggtgccggcccagtgtttcctcagctcatccgccctctgttgctccctagcattccaggagccatcttggactctcctccccaggtttgaaaggccatcagattagcagggacggggtgtagggcatcacccaaggttccttctcttaaactaagggtgggggatctgaatgtttttatgttgactgttcttgactaaattttcaagagtttcagaagcaacaggacagaccagacgtttcattctaccctggggcgaacagaacttcttcctcccaaacaatgacttcctgccatgtttgatggggacagctaccactgtcctctgcccccattcccctttcagctcccatgagcatgcatagttcaccagaccaatggcctagccattctctaagtcccatcctggaagaagttatttcttcaagagctgcacctctcctcctagcattagtttagatcaactcaaggagtatttattaatggctgctgtctccagtttctggggttaagcactaaggacacaagaatcaatcagaccttctccctgaacttaagatagccacaatcagaaaaaggacaaggacatgagacagtggtgatggccatcagacagagacttcaaatgctgatggagggcagaggaagtacttagggaggttggtgtcagaggcaggagtgggggatcagggaaggtggattctaggaaaagggagtgcctgaggtaggccttagaaggggatgagtcagatttttacagaggaggagggcagggcttgggtccagtggaggaagaaggaaggagaggcttggaaagccttgtgtcttgggaacaaaaggcctttgagcatatgggtccagccactcagaagtgtaggggccatgccttggtgttccaataagtgaatggaagcagtggtggtagctacactgggcagagttggcagggtgctggttcactctgcccagccctgaatgtgtgccttaaaggccccctacaaggggccccatacgacagagcttttaactggtgccttccctgtacccgcagcagccacaagtgggcccagactattgcagcctcccataaacatgtgagcatgttctgagtgtgccatgatgtgagtggacctggctggaatcttcggagagcgactgaggtgttcaaatcgaatctcccaggaggcttccttccagccccctattctggtaactaccaggaggcttccttccagccccctattctggtaactaccaaaatccctcgggtgcaagtgtaggggtagagatggaaggatgagaggtgaaattgaccttttgaaagcaaagctctggctcacaggccccaaactaccagccgtatctagcatatccccaccctccacccactacctcctccaacaaaggagtcaactcagttgaaaaaactggtcctttggcctatccatgggtcaaagtccacctctcctgggggcctggagaggactgagcctacggaaaggggataccttcccactcagcactgcttcacacaggccccctgcctggggctctccaaggagccttcttcacccacttccagctccacttctgcaaggttaagtcaagtgagaacgatgagaaatagggagatggtgtctccttaagtccttgatctgcctgtctgtggaatgggaggttggattagctgcgctgaggtcccatccacagctggtgctcagctgcttgaaggggagactccctcctctgtaacttctttctgggggattggggtgggcagtacctatccccagtcccctcctagcttgactttagtggtttccaatgtagaagttaacaaagtatgccccattcctgtgacaaaagcacaaccattctgaagttactggagcatgggctcagctcatcctccctctggccccttctcccatggggacatctcggcccagcacccctatcccatttccagagttcttccttccccatctgggccttcataaaatgcaggggaagccagactggtctcaggagcgctaaagcccttccgtggggggtcgtctttctgggactagccctgctgtttaggacctgggaccacaatggggtacctgccgagggggtccccaagagatccaggctgtcatgtgatttatggtggcatgtgttgtgtatttgttggctacttgtgtcttgaaatctagaattatttcacgcagaattgtcactgtttgtcaggaagagaaaatgggctagtggaagcccagtcttgagttcttgtcttgttaccatttaaaattgacatttaattttcaaatcactgttggtgcctaatcacttaagttattaatttattctgttgtattcttttttttaaattgtaacatatttatccggtgggtgggacaggagtgtgttcaagtgggtcatgtttttgctgtggtgacacatggtacaggcttggagcttgcaggtccctttctactgtggtgttggagcaggacaataaagtccactagaaatgcacccc

SEQ ID NO: 138750 - DNA, 567 bp, Homo sapiens
  Payload ID: 7179
  Gene Symbol: GAB2
  Gene Name: GRB2-associated binding protein 2
  ENST ID: ENST00000530915
  CDS Start-End: 262-567
agctgcccgagcccgcgccctcgtccgcgcgacccggcggggggctccaggccggcagcatgagcggcggcggcgacgtggtgtgcaccggctggctgaggaaatcgcctcccgagaagaagttgaggcgctattaccttctgtctgacttcaaccccacatctgcttgacaagaattaactcaaatatctcttcttaacacctacctgattctggcatacagcctggaagaaacgctggtttatcctgcggagtggccggatgagcggtgacccagatgttctggaatactacaagaacgatcactccaagaagcctctgcggatcatcaacctgaacttctgtgagcaggtagatgcaggcctgacctttaacaagaaggagctgcaggatagttttgtgtttgacatcaagaccagtgaacgcaccttttacctggtggctgagacagaagaggacatgaataagtgggtccagagcatctgccagatctgtggcttcaatcaggctgaggagagcacagactccctgagaaatgtttcctcagccggtcatggcccccgctct

SEQ ID NO: 138751 - DNA, 543 bp, Homo sapiens
  Payload ID: 7179
  Gene Symbol: GAB2
  Gene Name: GRB2-associated binding protein 2
  ENST ID: ENST00000528886
  CDS Start-End: 152-543
gtagtaggtccgtctcctcctcccgccgagggacgccagagttaaggagcttcttgctgggaaggggtccctcctttcagccggaacctgacccgcagaatgtatcggaaatgcctggaagaaacgctggtttatcctgcggagtggccggatgagcggtgacccagatgttctggaatactacaagaacgatcactccaagaagcctctgcggatcatcaacctgaacttctgtgagcaggtagatgcaggcctgacctttaacaagaaggagctgcaggatagttttgtgtttgacatcaagaccagtgaacgcaccttttacctggtggctgagacagaagaggacatgaataagtgggtccagagcatctgccagatctgtggcttcaatcaggctgaggagagcacagactccctgagaaatgtttcctcagccggtcatggcccccgctcttctccagctgagctcagcagctctagccagcaccttctccgagagcgcaagtcctcagccccatcacactccagccagccaactct

SEQ ID NO: 138752 - DNA, 3704 bp, Homo sapiens
  Payload ID: 7180
  Gene Symbol: GAB3
  Gene Name: GRB2-associated binding protein 3
  Uniprot ID: Q8WWW8
  ENST ID: ENST00000369568
  CDS Start-End: 49-1695
tgccgcgggcggctggcccagctggaggaagcggcggcggcggccacgatgagtgcgggcgacgcagtgtgcaccggctggctcgttaagtcgccccccgagaggaagctacagcgctacgcctggcgcaagcgctggtttgtcctccggcgaggccgcatgagcggcaaccccgatgtcttggagtactacaggaacaagcactccagcaagcccatccgggtgatagacctcagcgagtgtgcagtgtggaagcatgtgggccccagctttgttcggaaggaatttcagaataatttcgtgttcattgtcaagactacttcccgtacattctacctggtggccaaaactgagcaagaaatgcaggtgtgggtgcacagcatcagtcaggtctgcaaccttggccacctggaggatggtgcagcagattccatggagagcctctcttacacgccctcctccctgcagccatcctctgccagctcccttcttaccgcccatgctgccagctcctctttgccaagagatgacccaaacactaatgccgtagccactgaggaaaccagaagtgagtcagagcttctcttccttccagattatctggttttgtccaactgcgagactggaagactgcaccataccagtctacccaccagatgtgatagctggtcaaactcagaccgttcattggaacaggcttcatttgatgatgtttttgttgactgcctgcagccgctcccctccagtcatttggtccacccctcatgccatggcagtggagctcaggaggtgccatcctcgaggcctcaggctgccctgatctggagtagagaaatcaatgggccacccagggaccacttgtcttcttcaccattgctggaaagttccttaagttccaccattcaggtagataaaaatcaaggttccttaccctgtggagcaaaagaactagacattatgtccaacactccacctccccgcccccctaagccaagccatctgtctgaacggcgccaagaggagtggagtacacacagtggtagcaagaagccagaatgcactctggttccaagaagaatctccctctctggtttagacaacatgagaacctggaaagctgatgtagaaggccaatccttaagacaccgagacaagcggcttagtttgaatttgccatgcaggttctccccgatgtaccccacagcttcagccagtatcgaagacagctatgtgcccatgagcccccaggctggtgcctctggtcttggaccccactgcagccctgatgactacattccaatgaactcaggaagcatctcaagcccgttgcctgagctgcctgcaaacctggaacctcccccagtgaatagagatctcaagcctcagaggaaatcacggccacctcctctggacctgagaaacctctcgatcatccgggaacatgcatctcttaccaggacccgcactgtgccttgcagtcgaaccagctttctctctccagaaagaaatggtattaattctgcaagattttttgctaatcctgtttccagagaagacgaagaaagctacatcgaaatgaaacttctcctttcagaagaacaaagagtagactatgtccaagtggatgagcagaagacacaggctctccagagcacaaaacaggagtggacggatgaaaggcaatccaaagtatgagaggtgcgggcttgtgccatgtgtgaaacagggaagcttggggctcagtttgagttttttcttttttttttttttttgtccactaaaaacacactgatggtcaacacaggtcaaaaccaagagagaatgtgtagttttcaaggtcttggccagaacctttaggaaagaagacctgtttatacattgaaggaagaaaagaaggaagcagttgccttccggagggggctctgagagaatctagcctcccctctgtcctattggagcaaagattggagtgagtgttgccaccaacaggattttatcgtttgactccaatacctgaaattctgacttctctcctgtgcttcaatgagaatgataaattatcctagcaaaggggcctctggagaccatcttgttccagcctctgaagacagttgaggagatcaagcccagcaatggtggcagaatcttactccacagacttcagcagactagtcatttcaatacccaaagaaagacaagtgacaggggcaatggatctcaggctctgagataagtatatcagatgacactggtggctctaaggatattgcaattaagcagctacctgtagccaggtattctgctgctcttggccttttcccacgcatcgtctcgtgtcttctccgaaagaccttggaagataggcctggaagagactgttgatgccactttgaagaaaagaacactgagaactagaggagggaacactttgcccaagattactcacaaagccaagacccagagtccagcttagagaatagagttgttcaggctgccaattgcaagctcattcctctacctcatacttcctctgaggattttgacaaaatggattaattgggtgagccttggagacatgtgggaaacacctgcagacacaaaatgagtagtcatcctgtctccctttcaatagggatctgaacaggtgttttgatacttgaaagatgtgcatgtcaagtgagggtttctttctgcgatgttcaactggaactctcccatcagtagttacaattagaaatacctactgatggttagtctgaaggccattctcatggtcacctatacagtgtgtttccctgtgagctagcagacacaatgaccaggaaaaaacctatgaattccattcttaggtttcccagccaattgctcccttctgctttagaagtgactaggtactgagagtacaaacactcccactttataatgaaggcgtcatgtcaccccttcctttacaggtcctggggtccaggagacccagaatgaaggtgtcagttgggcatgaagtgttatttagtgtccattcttgatccttctgagcacctacagctggaaactaagcagatactggtcctgcattctgactgagattgtgtcttctttatgaggatagatcaaattggcagtcaggcccatgatagtcagtgcagttggggcagttgtagactttgctacaggatttcagggtttccaatcaccccacaggtaagtgaatgccaaagtcttcttttttcagaccatacaagaagtcattttgattttcaaagaagccgttttgattttcaaagaagcaggttctggtgacattattttcttccttggacaaagtggggggaaatttctaagtattttaactgagttcagggtccttagtgagcctggacagagcaaggagagggctccccactccctaagccccacagccagctctgcatcaccacacacagccagagcctgtgaggagctgccttcttccccatgtgacttgcaaagagtctcaggcaagaaaccagggcttcaaactgctagttcccatggagggtagttccctcgtgtggagcacttgtgttaggatcactgattatctgacaaaggctggtgcagaaaaaaaattgtaggcccaagtgtcaagaaccacaccagattggagatagaaaagaatagctgaaattatgtcagtagtgaaatgtcactccattgacccaccg

SEQ ID NO: 138753 - DNA, 4718 bp, Homo sapiens
  Payload ID: 7180
  Gene Symbol: GAB3
  Gene Name: GRB2-associated binding protein 3
  Uniprot ID: Q8WWW8
  ENST ID: ENST00000369575
  CDS Start-End: 33-1793
cccagctggaggaagcggcggcggcggccacgatgagtgcgggcgacgcagtgtgcaccggctggctcgttaagtcgccccccgagaggaagctacagcgctacgcctggcgcaagcgctggtttgtcctccggcgaggccgcatgagcggcaaccccgatgtcttggagtactacaggaacaagcactccagcaagcccatccgggtgatagacctcagcgagtgtgcagtgtggaagcatgtgggccccagctttgttcggaaggaatttcagaataatttcgtgttcattgtcaagactacttcccgtacattctacctggtggccaaaactgagcaagaaatgcaggtgtgggtgcacagcatcagtcaggtctgcaaccttggccacctggaggatggtgcagattccatggagagcctctcttacacgccctcctccctgcagccatcctctgccagctcccttcttaccgcccatgctgccagctcctctttgccaagagatgacccaaacactaatgccgtagccactgaggaaaccagaagtgagtcagagcttctcttccttccagattatctggttttgtccaactgcgagactggaagactgcaccataccagtctacccaccagatgtgatagctggtcaaactcagaccgttcattggaacaggcttcatttgatgatgtttttgttgactgcctgcagccgctcccctccagtcatttggtccacccctcatgccatggcagtggagctcaggaggtgccatcctcgaggcctcaggctgccctgatctggagtagagaaatcaatgggccacccagggaccacttgtcttcttcaccattgctggaaagttccttaagttccaccattcaggtagataaaaatcaaggttccttaccctgtggagcaaaagaactagacattatgtccaacactccacctccccgcccccctaagccaagccatctgtctgaacggcgccaagaggagtggagtacacacagtggtagcaagaagccagaatgcactctggttccaagaagaatctccctctctggtttagacaacatgagaacctggaaagctgatgtagaaggccaatccttaagacaccgagacaagcggcttagtttgaatttgccatgcaggttctccccgatgtaccccacagcttcagccagtatcgaagacagctatgtgcccatgagcccccaggctggtgcctctggtcttggaccccactgcagccctgatgactacattccaatgaactcaggaagcatctcaagcccgttgcctgagctgcctgcaaacctggaacctcccccagtgaatagagatctcaagcctcagaggaaatcacggccacctcctctggacctgagaaacctctcgatcatccgggaacatgcatctcttaccaggacccgcactgtgccttgcagtcgaaccagctttctctctccagaaagaaatggtattaattctgcaagattttttgctaatcctgtttccagagaagacgaagaaagctacatcgaaatggaggagcaccgaacagccagttccctgagcagtggtgcccttacgtggacaaagaaattcagcctagattatttggccctggacttcaattcagcatcaccagcccccatgcagcagaaacttctcctttcagaagaacaaagagtagactatgtccaagtggatgagcagaagacacaggctctccagagcacaaaacaggagtggacggatgaaaggcaatccaaagtatgagaggtgcgggcttgtgccatgtgtgaaacagggaagcttggggctcagtttgagttttttcttttttttttttttttgtccactaaaaacacactgatggtcaacacaggtcaaaaccaagagagaatgtgtagttttcaaggtcttggccagaacctttaggaaagaagacctgtttatacattgaaggaagaaaagaaggaagcagttgccttccggagggggctctgagagaatctagcctcccctctgtcctattggagcaaagattggagtgagtgttgccaccaacaggattttatcgtttgactccaatacctgaaattctgacttctctcctgtgcttcaatgagaatgataaattatcctagcaaaggggcctctggagaccatcttgttccagcctctgaagacagttgaggagatcaagcccagcaatggtggcagaatcttactccacagacttcagcagactagtcatttcaatacccaaagaaagacaagtgacaggggcaatggatctcaggctctgagataagtatatcagatgacactggtggctctaaggatattgcaattaagcagctacctgtagccaggtattctgctgctcttggccttttcccacgcatcgtctcgtgtcttctccgaaagaccttggaagataggcctggaagagactgttgatgccactttgaagaaaagaacactgagaactagaggagggaacactttgcccaagattactcacaaagccaagacccagagtccagcttagagaatagagttgttcaggctgccaattgcaagctcattcctctacctcatacttcctctgaggattttgacaaaatggattaattgggtgagccttggagacatgtgggaaacacctgcagacacaaaatgagtagtcatcctgtctccctttcaatagggatctgaacaggtgttttgatacttgaaagatgtgcatgtcaagtgagggtttctttctgcgatgttcaactggaactctcccatcagtagttacaattagaaatacctactgatggttagtctgaaggccattctcatggtcacctatacagtgtgtttccctgtgagctagcagacacaatgaccaggaaaaaacctatgaattccattcttaggtttcccagccaattgctcccttctgctttagaagtgactaggtactgagagtacaaacactcccactttataatgaaggcgtcatgtcaccccttcctttacaggtcctggggtccaggagacccagaatgaaggtgtcagttgggcatgaagtgttatttagtgtccattcttgatccttctgagcacctacagctggaaactaagcagatactggtcctgcattctgactgagattgtgtcttctttatgaggatagatcaaattggcagtcaggcccatgatagtcagtgcagttggggcagttgtagactttgctacaggatttcagggtttccaatcaccccacaggtaagtgaatgccaaagtcttcttttttcagaccatacaagaagtcattttgattttcaaagaagccgttttgattttcaaagaagcaggttctggtgacattattttcttccttggacaaagtggggggaaatttctaagtattttaactgagttcagggtccttagtgagcctggacagagcaaggagagggctccccactccctaagccccacagccagctctgcatcaccacacacagccagagcctgtgaggagctgccttcttccccatgtgacttgcaaagagtctcaggcaagaaaccagggcttcaaactgctagttcccatggagggtagttccctcgtgtggagcacttgtgttaggatcactgattatctgacaaaggctggtgcagaaaaaaaattgtaggcccaagtgtcaagaaccacaccagattggagatagaaaagaatagctgaaattatgtcagtagtgaaatgtcactccattgacccaccgaaaaaagaaaagaaatctgtttctaccaaacatttccagaaacgtatttatagcatgaagaaacacacatgggtagtgtgacctgtttggatgtgattacttaaaaatggaatgctctgaataggcactctctacattaaaggtatggaaggcgataggggtcagaattttaaaaatttaattttgaaaaaggtgactcacccctcatttccagagtgtaggcaattatgtcctgctttgataaaactgctagaggatggctatgcaaaagcataacgattcaaggaaacaaagtacaggtagtttttgagctgacagcagcaaaggcaccataagtcaaaatattggttttggtggagatgatcgatgtgtgtgtgtgagagagagctatgtttctaaccaagggcctaatgtttgttacagaaatgatcccagagacctacaagatgtgggaatcagcataacagggcaatgcagcaattaaccccacatcgttttctgtagttcctttttgtttcattttcttctgtctcacctcgttagaaaattcctcccagtcaggggtcgtccagtgcaggacgggggacccaagggtctcaagcctgcaagtccagaaggtgacaaacccaggagcactgggagttaagctttccttggggagggaagagccttgatgtccagcacacagcctggctataaagacacgaagcgacctacccactgtacagtccacttcacaggatcagctgaatcatgacctttaaaagttccgagttgaaactgaaggctctcctcagacctggctttttcctcagtccctgttcataccatctctgcacccacaatcacactgatttttcaaattcattttgtttttgctgtttcatttctggcattaataaaagtcttataagga

SEQ ID NO: 138754 - DNA, 2028 bp, Homo sapiens
  Payload ID: 7180
  Gene Symbol: GAB3
  Gene Name: GRB2-associated binding protein 3
  Uniprot ID: Q8WWW8
  ENST ID: ENST00000424127
  CDS Start-End: 53-1816
cttctgccgcgggcggctggcccagctggaggaagcggcggcggcggccacgatgagtgcgggcgacgcagtgtgcaccggctggctcgttaagtcgccccccgagaggaagctacagcgctacgcctggcgcaagcgctggtttgtcctccggcgaggccgcatgagcggcaaccccgatgtcttggagtactacaggaacaagcactccagcaagcccatccgggtgatagacctcagcgagtgtgcagtgtggaagcatgtgggccccagctttgttcggaaggaatttcagaataatttcgtgttcattgtcaagactacttcccgtacattctacctggtggccaaaactgagcaagaaatgcaggtgtgggtgcacagcatcagtcaggtctgcaaccttggccacctggaggatggtgcagcagattccatggagagcctctcttacacgccctcctccctgcagccatcctctgccagctcccttcttaccgcccatgctgccagctcctctttgccaagagatgacccaaacactaatgccgtagccactgaggaaaccagaagtgagtcagagcttctcttccttccagattatctggttttgtccaactgcgagactggaagactgcaccataccagtctacccaccagatgtgatagctggtcaaactcagaccgttcattggaacaggcttcatttgatgatgtttttgttgactgcctgcagccgctcccctccagtcatttggtccacccctcatgccatggcagtggagctcaggaggtgccatcctcgaggcctcaggctgccctgatctggagtagagaaatcaatgggccacccagggaccacttgtcttcttcaccattgctggaaagttccttaagttccaccattcaggtagataaaaatcaaggttccttaccctgtggagcaaaagaactagacattatgtccaacactccacctccccgcccccctaagccaagccatctgtctgaacggcgccaagaggagtggagtacacacagtggtagcaagaagccagaatgcactctggttccaagaagaatctccctctctggtttagacaacatgagaacctggaaagctgatgtagaaggccaatccttaagacaccgagacaagcggcttagtttgaatttgccatgcaggttctccccgatgtaccccacagcttcagccagtatcgaagacagctatgtgcccatgagcccccaggctggtgcctctggtcttggaccccactgcagccctgatgactacattccaatgaactcaggaagcatctcaagcccgttgcctgagctgcctgcaaacctggaacctcccccagtgaatagagatctcaagcctcagaggaaatcacggccacctcctctggacctgagaaacctctcgatcatccgggaacatgcatctcttaccaggacccgcactgtgccttgcagtcgaaccagctttctctctccagaaagaaatggtattaattctgcaagattttttgctaatcctgtttccagagaagacgaagaaagctacatcgaaatggaggagcaccgaacagccagttccctgagcagtggtgcccttacgtggacaaagaaattcagcctagattatttggccctggacttcaattcagcatcaccagcccccatgcagcagaaacttctcctttcagaagaacaaagagtagactatgtccaagtggatgagcagaagacacaggctctccagagcacaaaacaggagtggacggatgaaaggcaatccaaagtatgagaggtgcgggcttgtgccatgtgtgaaacagggaagcttggggctcagtttgagttttttcttttttttttttttttgtccactaaaaacacactgatggtcaacacaggtcaaaaccaagagagaatgtgtagttttcaaggtcttggccagaacctttaggaaagaagacctgtttatacattgaaggaagaaaagaaggaagcagttgc

SEQ ID NO: 138755 - DNA, 450 bp, Homo sapiens
  Payload ID: 7180
  Gene Symbol: GAB3
  Gene Name: GRB2-associated binding protein 3
  ENST ID: ENST00000454973
  CDS Start-End: 1-450
cagtggtgcccttacgtggacaaagaaattcagcctagattatttggccctggacttcaattcagcatcaccagcccccatgcagcaggccagagcctttgtgttccaggtcatctccagtccagggccgaggcaagagaagcagcccccatctgaagtgtgctggcctcctggcagaggaaaaagagagattgcagaatcacagaatacctctttctccttaggattggaacatgtcacttcctttttgttattattgttttgttttcttgagtcaagatctcactctgtcactcaggctggagtgcagtggcatggtcatagctcactgcagcctcgatctcctgggctaaagttatcctcccatctcagcctcccaagtagctggtactacagttgcacatcatcacccacggctgttttttattttttaataaaaaatgatcttga

SEQ ID NO: 138756 - DNA, 2630 bp, Homo sapiens
  Payload ID: 7181
  Gene Symbol: GAB4
  Gene Name: GRB2-associated binding protein family, member 4
  Uniprot ID: Q2WGN9
  ENST ID: ENST00000400588
  CDS Start-End: 109-1833
gctttctaccccgcagtcccagggtatcgcaagccgtccctcacaccccacctccagcaacgccctctcgccctgtctcccccaccttcactgtgagctgcagcccccatgtccctgccgtccccctcaccctcccgggagctgtgcccacctgacccggcatttgcgcctttgtcttcgtggcccggaagtggccccgccggcggaagcacgagaagtggccacgtgctgtacagcggctggctgaggaagtcgccccccgagaagaagctgaggctctttgcctggaggaaacgctggtttatcctgcggaggggccagactagcagtgacccagatgttctggaatactacaagaatgatggctccaagaagcccctgcgcaccatcaacctgaacctctgtgagcagctggatgttgatgtgactctgaacttcaacaagaaggagattcagaagggctatatgtttgacatcaagaccagtgagcgtaccttttacctggtggctgagaccagggaggacatgaatgagtgggtccagagcatctgtcagatctgtggcttcaggcaggaggaaagcacaggcttcctgggaaacatttcctcagccagtcacggcctctgctcttctccagctgagcccagctgctcccatcagcacctcccccaagaacaagaacccacatctgagcccccggtgtctcactgtgtgccgcccacctggcccatccctgcacctccggggtgtctccgctcgcaccagcacgccagccagagagcagaacatgcaaggagtgccagcttctcccagggttctgaggccccattcatcatgaggagaaacacagccatgcaaaatcttgcccagcacagtggatacagtgttgatggggtcagcggtcacatccatggcttccatagcctttccaagcccagccagcacaatgcagaattcagaggcagcacccacagaatcccctggagcctggcctcccatggccacaccagaggcagcctcacaggctctgaggcggataatgaggcttcctccggcaagtacacccagcatggtggagggaatgccagccggcctgctgagtccatgcatgagggagtctgttctttcctgccaggaagaacgcttgtgggcctgtcagacagcattgcttctgagggcagctgtgtgcccatgaacccaggctcccctaccctgccggctgtgaagcaagcaggcgatgattcccagggtgtctgcatccctgtgggctcatgtcttgttcgctttgacctgcttggctccccactcacagagctttctatgcaccaagacctcagccagggacatgaggtccagctgccccctgtcaaccgcagcctcaagcctaaccagaaggccaacccaacaccgcccaacctgagaaacaacagggtcatcaatgagctctccttcaagccacctgtcacagagccctggtctgggaccagccacacctttgactccagctcctcccaacaccccatctccacgcagagcatcaccaacacagactcagaagacagtggagagaggtatcttttcccgaacccggcatctgcatttcctgtttccggtggcaccagcagttcagccccgccgaggagcactggtaacatccactacgcggccctggacttccagccgagcaagccatccataggctctgtcacgtccggcaagaaggtggactatgtccaggtggatctggagaagacccaggccctgcagaagaccatgcatgaacagatgtgcctgcggcagtcctcagagcctcccaggggcgccaagctgtgactcgggccaccaaaaccagagtggggccaggacagtgcctcagagctgctccgccacactctaaagctctgtaatatcagggaccgcatcccttacatagagagcagaggcctgatcaatatacatcctttgcctgcttggggcccacctgtgcctttggctggccatggtccccaccttcacccccttgctaggagcagttgccagcaagcatcctcagtctcttcctgcccctcagacccgggctcccaacagatttccactctcacacttactcatggtcctcagcctcttccttctagcctctgggctgtttccctcaatcctggaacatgaggagctaccttgctgacccggggacccaaggcccacaggccacagtggacatggaccttttcagccctggcattttttggtcaggggagaggcaaggccatcaaacgttggaatagttgagaaggaaggttaaaggtggtcttgagaagcaaaggaattagatccttagaccagcagggcagctgatacctgcaagggctcccactttcagactgaggccagagtatggcagctgctcccgggtgggagaggcagagagggaagggcaaaaggaagggaaaacatgaagacgaacagccgaaagccacaagaagcagggctggagctccagagactggggtgacaaggaccagggtcagggccccagaaatccggagctgcaggctggctctgctgctctttgctgatgccccttggggggcccttgcctgcctaagaaggcttgatctgagctgggcaaa

SEQ ID NO: 138757 - DNA, 2698 bp, Homo sapiens
  Payload ID: 7181
  Gene Symbol: GAB4
  Gene Name: GRB2-associated binding protein family, member 4
  ENST ID: ENST00000465611
  CDS Start-End: 1-575
acgtgctgtacagcggctggctgaggaagtcgccccccgagaagaagctgaggctctttgcctggaggaaacgctggtttatcctgcggaggggccagactagcagtgacccagatgttctggaatactacaagaatgatggctccaagaagcccctgcgcaccatcaacctgaacctctgtgagcagctggatgttgatgtgactctgaacttcaacaagaaggagattcagaagggctatatgtttgacatcaagaccagtgagcgtaccttttacctggtggctgagaccagggaggacatgaatgagtgggtccagagcatctgtcagatctgtggcttcaggcaggaggaaagcacagctgagcccagctgctcccatcagcacctcccccaagaacaagaacccacatctgagcccccggtgtctcactgtgtgccgcccacctggcccatccctgcacctccggggtgtctccgctcgcaccagcacgccagccagagagcagaacatgcaagcttcctccggcaagtacacccagcatggtggagggaatgccagccggcctgctgagtccatgcatgagggagtctgttctttcctgggccaagacatctgatgtgatccttgccttgatcagggcctgagatgctgacctgccagtgccgagtcaggacttgaggtggatgatgggtctcgaggccacatctgcatggtgcatggtctgtgctgccttctgcctgggtctggtatccagaaacctgagtggacattgggtgctgagccacatctgcatggtgcatggcctgtgctgccttctgcctggctccggcatccggaaacccacgtggacattgggtgctgagccacacctgcatggtgcacggcctgtgctgccttctgcctgggcccagcatccagaaacctgagtggacccagccactaaagatattttatcccatagatttgtcacaaattgtagttggaccccaaggggtcctgagagctagaagtgcccagacatctcatttttttcttgcctctactttgatttcagagtctttccaaggtcactctgatagcttcaaagtgtagccctccccatgtagtgaactcttataattgtatgctgccttggcatccacatcgaatggagttttaactttctcagaccagaggcagaggacttagtctccctgatggtttccagttctacaccacacccatgtggcttcagtcagtggccagagatgggaatttagacttacctcccccatgcagcagactgggctcgccactttcttgctgctccctttaaatggaccatccaggcatttactctgaccttaattaagtgatcccacaccccattctgcaagatacacttccagttgccaccctctctcctcttactccctaacctcccaggacctgtaagaactgaaaactcttccacttttacatgttgactgtgtcatggaagctgctccaaagtctgacccctgaggctgcccagaggggccccatccatggggttcctggctggggcacttctatctgggccgcaggtggctgctgaagacagcagcccccagccaaggtgatcaaaagtttcgttcaaaacaccccgtcatgactctttttggccttgtctagaaattctcattcctatcttgttcttgctggtgatagctgtgtttctttcactgtcctcttcctagccaggaagaacgcttgtgggcctgtcagacagcattgcttctgagggcagctgtgtgcccatgaacccaggctcccctaccctgccggctgtgaagcaagcaggcgatgattcccagggtgtctgcatccctgtgggctcatgtcttgttcgctttgacctgcttggctccccactcacagagctttctatgcaccaagacctcagccagggacatgaggtccagctgccccctgtcaaccgcagcctcaagcctaaccagaaggccaacccaacaccgcccaacctgagaaacaacagggtcatcaatgagctctccttcaagccacctgtcacagagccctggtctgggaccagccacacctttgactccagctcctcccaacaccccatctccacgcagagcatcaccaacacagactcagaagacagtggagagaggtatcttttcccgaacccggcatctgcatttcctgtttccggtggcaccagcagttcagccccgccgaggagcactggtaacatccactacgcggccctggacttccagccgagcaagccatccataggctctgtcacgtccggcaagaaggtggactatgtccaggtggatctggagaagacccaggccctgcagaagaccatgcatgaacagatgtgcctgcggcagtcctcagagcctcccaggggcgccaagctgtgactcgggccaccaaaaccagagtggggccaggacagtgcctcagagctgctccgccacactctaaagctctgtaatatcagggaccgcatcccttacatagagagcagaggcctgatcaatatacatcctttgcctgcttggggcccacctgtgcctttggctggccatggtccccaccttcacccccttgctaggagcagttgccagcaagcatcctcagtctcttcctgcccctcagacccgggctcccaacagatttccactctcacactt

SEQ ID NO: 138758 - DNA, 2119 bp, Homo sapiens
  Payload ID: 7182
  Gene Symbol: GAPT
  Gene Name: GRB2-binding adaptor protein, transmembrane
  Uniprot ID: Q8N292
  ENST ID: ENST00000318469
  CDS Start-End: 298-771
ttaacagaaaaggaagtggaatggaataaaatcccccaatacagtacaattatacattaatggctgtaatgtgaagagcatcacacacgaagagagccatcttccagaaataagtttatacactctctcctctaattgcatcaggactttaccagataatgttcttccagatctgaaaaggaaaatgcctaaaagagcttccaaactcatttttgaataatactaggctacaaagaattacactgtgaattcattaagggtaacaccaaatcactaaacagcactgtttgtacagaaatgtcgaaaagctgtggaaataatttagcggccatttctgtaggaatttcgcttcttttactcttagtggtttgtggaattgggtgtgtttggcactggaaacaccgtgttgccacacgatttaccttaccgaggtttttacaaaggagaagcagcaggagaaaagtctgtactaaaacattcttgggcccccgcatcattggcttaaggcatgaaatctcagttgaaacccaagaccacaaatctgctgtcaggggaaataacacacacgacaactatgaaaatgtggaagcaggtcctcccaaagctaaaggaaaaaccgataaggaactatatgaaaacacagggcagtctaatttcgaggagcatatctatggaaatgagacatcttctgactattataacttccagaagcctcgtccttctgaagttcctcaagatgaagatatatacattcttccagattcatattagcttttcaaaatattgacttttgttattggatgataaatattcactgtaatttttcaacagcaaagacaaggaatcaaactaaatgttgatcaactgtagactggataaagaaaatgtggtacacatacaccatagaatattatgcagccgtaaaaaaagaacaaaactaacatgggaacagaaaatcaaataccacatattctcacttaaaagtgggagctaaataataagaacacatggagagaaggagaggaacaacagacactggggcctacttgagggaggacagtggaaggagggagaggttcagggaaaaaaaaaatatcaggtactatgcttagtacacacatgatgaaataatctgtacaccaaacccccaagtcacaagtgttcctacataacaaacctgaacatgtacccctgaacataaaattataattaaaatattaaaaataattcactgtgatttttattgtactgatgccattcttaatcaagttctgataagtggatggtctctgcctatctccacctttctgaatcctatgtgtatcgctgtggattaattctagatatcttctccaccctccttgcaccagactaaatctgtattatgtgatattgattcttccttctaaatattacccgttatctctttcctttatttctaccattatctttatctggctcagaattattgtcataggctcctaactgttcctcctgcttctagtttctacccactcaatcaattaccgatggtgttgccagatttatcttcagaaaatattcctaacagccacattatttctttcacttaaaatgttttaatgccccctctttgcaaaagacataatacccataatttgaactccaaaatttatggttttccacaattggttccaattcacttttccagtgacttctcttactatctctcatttctttgccttcagcagaatcatcttaaaacctgccaaacttatccttccttcacagctttgcttttctgcctcttctctcaagcctgcttcagatcataagttcttccacacatctcctgaatcactccaaacccgcatttacctttttattttctgatataagctttgatgcctcttcaattcttaggacatttaaacatatgaatgttgccacagcattttattacctagcttcatatgaaaatgtcttaaattcccacctaaatgaaaagaaactgcccaaatgcctagaacatcacataaggcactaaatgcctcatgttttactgacgggaattgaattgtacattttgctgagtagttttgagaaaaaaatctaataaattcatctgttattcatccat

SEQ ID NO: 138759 - DNA, 3016 bp, Homo sapiens
  Payload ID: 7182
  Gene Symbol: GAPT
  Gene Name: GRB2-binding adaptor protein, transmembrane
  Uniprot ID: Q8N292
  ENST ID: ENST00000396776
  CDS Start-End: 463-936
aaggaagtaacccaccaaagtgaaaaagaggaacaagttctaacccaatgcaggtttaaaacataaccaaaagaacaaaagagagagcttgacacaccaatcttgaggtgttgtgccattctctgggaacatacagatgaaatgacctgaaccctgcccaccatttaaccaaaaaaggaagtggaatggaataaaatcccccaatacagtacaattatacattaatggctgtaatgtgaagagcatcacacacgaagagagccatcttccagaaataagtttatacactctctcctctaattgcatcaggactttaccagataatgttcttccagatctgaaaaggaaaatgcctaaaagagcttccaaactcatttttgaataatactaggctacaaagaattacactgtgaattcattaagggtaacaccaaatcactaaacagcactgtttgtacagaaatgtcgaaaagctgtggaaataatttagcggccatttctgtaggaatttcgcttcttttactcttagtggtttgtggaattgggtgtgtttggcactggaaacaccgtgttgccacacgatttaccttaccgaggtttttacaaaggagaagcagcaggagaaaagtctgtactaaaacattcttgggcccccgcatcattggcttaaggcatgaaatctcagttgaaacccaagaccacaaatctgctgtcaggggaaataacacacacgacaactatgaaaatgtggaagcaggtcctcccaaagctaaaggaaaaaccgataaggaactatatgaaaacacagggcagtctaatttcgaggagcatatctatggaaatgagacatcttctgactattataacttccagaagcctcgtccttctgaagttcctcaagatgaagatatatacattcttccagattcatattagcttttcaaaatattgacttttgttattggatgataaatattcactgtaatttttcaacagcaaagacaaggaatcaaactaaatgttgatcaactgtagactggataaagaaaatgtggtacacatacaccatagaatattatgcagccgtaaaaaaagaacaaaactaacatgggaacagaaaatcaaataccacatattctcacttaaaagtgggagctaaataataagaacacatggagagaaggagaggaacaacagacactggggcctacttgagggaggacagtggaaggagggagaggttcagggaaaaaaaaaatatcaggtactatgcttagtacacacatgatgaaataatctgtacaccaaacccccaagtcacaagtgttcctacataacaaacctgaacatgtacccctgaacataaaattataattaaaatattaaaaataattcactgtgatttttattgtactgatgccattcttaatcaagttctgataagtggatggtctctgcctatctccacctttctgaatcctatgtgtatcgctgtggattaattctagatatcttctccaccctccttgcaccagactaaatctgtattatgtgatattgattcttccttctaaatattacccgttatctctttcctttatttctaccattatctttatctggctcagaattattgtcataggctcctaactgttcctcctgcttctagtttctacccactcaatcaattaccgatggtgttgccagatttatcttcagaaaatattcctaacagccacattatttctttcacttaaaatgttttaatgccccctctttgcaaaagacataatacccataatttgaactccaaaatttatggttttccacaattggttccaattcacttttccagtgacttctcttactatctctcatttctttgccttcagcagaatcatcttaaaacctgccaaacttatccttccttcacagctttgcttttctgcctcttctctcaagcctgcttcagatcataagttcttccacacatctcctgaatcactccaaacccgcatttacctttttattttctgatataagctttgatgcctcttcaattcttaggacatttaaacatatgaatgttgccacagcattttattacctagcttcatatgaaaatgtcttaaattcccacctaaatgaaaagaaactgcccaaatgcctagaacatcacataaggcactaaatgcctcatgttttactgacgggaattgaattgtacattttgctgagtagttttgagaaaaaaatctaataaattcatctgttattcatccatacaaggaatatttgttgtgtcttctatctacttgctattgtgctgtgcacctgagggacatgggttggtggaggggttacaaaattaaaaagagagacatggatcctgaacacatacagtctagtaggaaagaaaacatagtaaacaaatgaatacgatgctgctcatgaagctatgatagctcatctctaaatccactcttttatttgctcctctgaattgcttgacctgggcctctgcaaacatttcttttgccaggtggatccattctattctctaccaatagggggcactaaggaagaccgaaaggcagtaggaggcaacagggaattgctcctgcctattctttctgttgcccccgcaggaatttattgccatgtggtttactccagcatcactggttgtttgcagctttctagtttcttccatcattcccaggaccagcttctctgcaacctgtcagaagcaccagcaccagccaggtggcaccctcccttagactctgacagccagactctccttcaacctcctgaagtggtgcaggagacaagtggtaccctcagagttctgcgtcccagcctggcagggctcctcctctgaggtctggtaactctcagccaagattgttacagttactatctctgtggtacctgtgtccccttttttgtttttccatcctgccaatgcctgtttagccaattatctatattaaattctctctgttaaaacaaa

SEQ ID NO: 138760 - DNA, 769 bp, Homo sapiens
  Payload ID: 7182
  Gene Symbol: GAPT
  Gene Name: GRB2-binding adaptor protein, transmembrane
  ENST ID: ENST00000511930
  CDS Start-End: 563-769
ggaagtaacccaccaaagtgaaaaagaggaacaagttctaacccaatgcaggtttaaaacataaccaaaagaacaaaagagagagcttgacacaccaatcttgaggtgttgtgccattctctgggaacatacagatgaaatgacctgaaccctgcccaccatttaaccaacaggtttctggatggcagatcattcaaccttctttttcttgagttttctactctgctgtcatcttccactcatttctgcttcattttgtgattcgttaacagaaaaggaagtggaatggaataaaatcccccaatacagtacaattatacattaatggctgtaatgtgaagagcatcacacacgaagagagccatcttccagaaataagtttatacactctctcctctaattgcatcaggactttaccagataatgttcttccagatctgaaaaggaaaatgcctaaaagagcttccaaactcatttttgaataatactaggctacaaagaattacactgtgaattcattaagggtaacaccaaatcactaaacagcactgtttgtacagaaatgtcgaaaagctgtggaaataatttagcggccatttctgtaggaatttcgcttcttttactcttagtggtttgtggaattgggtgtgtttggcactggaaacaccgtgttgccacacgatttaccttaccgaggtttttacaaaggagaagcagcaggagaaaagtctgtactaaaacattcttgggcccccgcatcattggctta

SEQ ID NO: 138761 - DNA, 731 bp, Homo sapiens
  Payload ID: 7182
  Gene Symbol: GAPT
  Gene Name: GRB2-binding adaptor protein, transmembrane
  ENST ID: ENST00000502276
  CDS Start-End: 526-731
aaggaagtaacccaccaaagtgaaaaagaggaacaagttctaacccaatgcaggtttaaaacataaccaaaagaacaaaagagagagcttgacacaccaatcttgaggttatcacgctataatagagaatggactcattaatatgggattacagaggaaggaatggttaagaaaaagacatggcctctgactgctccaaaaaaggataagcagggcttcacagaagaggtgacagaaaaggaagtggaatggaataaaatcccccaatacagtacaattatacattaatggctgtaatgtgaagagcatcacacacgaagagagccatcttccagaaataagtttatacactctctcctctaattgcatcaggactttaccagataatgttcttccagatctgaaaaggaaaatgcctaaaagagcttccaaactcatttttgaataatactaggctacaaagaattacactgtgaattcattaagggtaacaccaaatcactaaacagcactgtttgtacagaaatgtcgaaaagctgtggaaataatttagcggccatttctgtaggaatttcgcttcttttactcttagtggtttgtggaattgggtgtgtttggcactggaaacaccgtgttgccacacgatttaccttaccgaggtttttacaaaggagaagcagcaggagaaaagtctgtactaaaacattcttgggcccccgcatcattggctt

SEQ ID NO: 138762 - DNA, 2651 bp, Homo sapiens
  Payload ID: 7183
  Gene Symbol: GRAP
  Gene Name: GRB2-related adaptor protein
  Uniprot ID: Q13588
  ENST ID: ENST00000284154
  CDS Start-End: 712-1365
accttctgagctggtctttgatggatgaataggagtctcctgggagcagaaagaggagaacaccaggcagaggaaccacgtgtgcaaaagtctggggttgaaatgagagtttggtgtggccccttgctgtggctgaagccctgggtttgtttagagtgaaggggatgacaaaggatgagaatgggggctgtttgtaggggcaggtggaggtggtggattgcaagggccttgaatgccaggtgaggagcttgggattgaaggagcaggaggcagggcatcacaagaggcatcagggtttaggaaaagatggagagtcattggcagattggtgaagggaggccagcatctggtgccatgagactcagtgcctgagccagcaggacagctttggcacttctcctccaggcacctcacttttacggatgataaaacatgggcacaagggggccccactcccagagcttcagggagactccccaagggccattcctggcacctggggtctgaggtagggacagagctggctcacaagccctccctgctctgtgacatgtctgtttcctgtttctcccccatcaggagcagtttcagtctcaacttcaaaagaacaaacgcgcactcaaaacaaaggaagaccgtcctcgactgcagaggaagcaggaagctgtcggcccagctctgagcccagctgctggagccccgagcagcggcatggagtccgtggccctgtacagctttcaggctacagagagcgacgagctggccttcaacaagggagacacactcaagatcctgaacatggaggatgaccagaactggtacaaggccgagctccggggtgtcgagggatttattcccaagaactacatccgcgtcaagccccatccgtggtactcgggcaggatttcccggcagctggccgaagagattctgatgaagcggaaccatctgggagccttcctgatccgggagagtgagagctccccaggggagttctctgtgtctgtgaactatggagaccaggtgcagcacttcaaggtgctgcgtgaggcctcggggaagtacttcctgtgggaggagaagttcaactccctcaacgagctggtcgacttctaccgcaccaccaccatcgccaagaagcggcagatcttcctgcgcgacgaggagcccttgctcaagtcacctggggcctgctttgcccaggcccagtttgacttctcagcccaggacccctcgcagctcagcttccgccgtggcgacatcattgaggtcctggagcgcccagacccccactggtggcggggccggtcctgcgggcgcgttggcttcttcccacggagttacgtgcagcccgtgcacctgtgagcagcccggcggccgatctggccaacgggcctttttacaggaactgaggtccagagaggacatggacacccccagctctgtcagagtcacacggggctcagtggacggccttggactgaacgtgggctcctaactgcctccggccgctctgcacaaactgggatggcccaggtcccccagcaagggtacccagcaagggtagctccggggcttcctggctggttgctttccattggctgccagctgtgtgacaccacagggcggagtctgtggaggccccgcccacctcctcttgtcaatggccccatctgccaggaaggttgaggactcccaggtttcacccactggaggctcaacctaaggaaccctggccatggtgggtgggttcaccttgggctgaccacccactgggcctgcctgcccctccctcaaaaggcccctggagttgttcaggctgttgggaggtggctcagcctcgaaggacagactgcacacctgttgacctaaactcactggacagactccaggtggacaccaactcctcaacagccccatgacttcagctccacctggggcacccagcaccccaccacagggctagaggccctaagaccctgaaaaaggggcgggcagtagggaaggtggaggcacactcctcttctgttggacaggtgagctctgagggcaagccctgggcccagccacgcagagaccctggctgccctggctcttgtttgtttaggcccaggttctgcccagaccggggcccagcagagctctcaggaggctgagaaacctccagggcagacagaaagttggggccagagctaggttttagagatcctacaggatcccacatgggacggctacctaggtggggcacggcccctacccgagaacaggagggtcctccagagaatgtgccatgatcagggatatgagcagggcctgcccagagcctgggcacctttgggagagggaaaagtgaggtgggacttggaaaggctttgaacgccaggctgatggttgagggatggtgggcagggagggagggcgaagaggctccctctggcatttgggagccggtgggtggagggaggagcccttggaggtggctgcagtcccttaatggggggccttgctctgggcatgtggggctcttcctccatccagagctggcccaagacccttagaaccctgagtgctggcaaatctcactgctcctgacccagcctgtgtattcaaaacgaaaacagtaaaaccaacatcaggatgtccgtcagaaa

SEQ ID NO: 138763 - DNA, 834 bp, Homo sapiens
  Payload ID: 7183
  Gene Symbol: GRAP
  Gene Name: GRB2-related adaptor protein
  ENST ID: ENST00000395635
  CDS Start-End: 172-738
gtctcagaccaaaggcccccttatctgctccccagagcctgacgtccccccactgaattgtcacccctgagctgtctaaatgcgagggaccctaggtgaccactggtggctgtgctcaggccgggtcccccgaccttcaccccaaggctcagtgcgtggcatatcctgaacatggaggatgaccagaactggtacaaggccgagctccggggtgtcgagggatttattcccaagaactacatccgcgtcaagccccatccgtggtactcgggcaggatttcccggcagctggccgaagagattctgatgaagcggaaccatctgggagccttcctgatccgggagagtgagagctccccaggggagttctctgtgtctgtgaactatggagaccaggtgcagcacttcaaggtgctgcgtgaggcctcggggaagtacttcctgtgggaggagaagttcaactccctcaacgagctggtcgacttctaccgcaccaccaccatcgccaagaagcggcagatcttcctgcgcgacgaggagcccttgctcaagtcacctggggcctgctttgcccaggcccagtttgacttctcagcccaggacccctcgcagctcagcttccgccgtggcgacatcattgaggtcctggagcgcccagacccccactggtggcggggccggtcctgcgggcgcgttggcttcttcccacggagttacgtgcagcccgtgcacctgtgagcagcccggcggccgatctggccaacgggcctttttacaggaactgaggtccagagaggacatggacacccccagctctgtcagagtcacacgggg

SEQ ID NO: 138764 - DNA, 846 bp, Homo sapiens
  Payload ID: 7183
  Gene Symbol: GRAP
  Gene Name: GRB2-related adaptor protein
  ENST ID: ENST00000573099
  CDS Start-End: 72-689
ctcgactgcagaggaagcaggaagctgtcggcccagctctgagcccagctgctggagccccgagcagcggcatggagtccgtggccctgtacagctttcaggctacagagagcgacgagctggccttcaacaagggagacacactcaagatcctgaacatggaggatgaccagaactggtacaaggccgagctccggggtgtcgagggatttattcccaagaactacatccgcgtcaagccccatccgtggtactcgggcaggatttcccggcagctggccgaagagattctgatgaagcggaaccatctgggagccttcctgatccgggagagtgagagctccccaggggagttctctgtgtctgtgaatcacctggggcctgctttgcccaggcccagtttgacttctcagcccaggacccctcgcagctcagcttccgccgtggcgacatcattgaggtcctggagcgcccagacccccactggtggcggggccggtcctgcgggcgcgttggcttcttcccacggagttacgtgcagcccgtgcacctgtgagcagcccggcggccgatctggccaacgggcctttttacaggaactgaggtccagagaggacatggacacccccagctctgtcagagtcacacggggctcagtggacggccttggactgaacgtgggctcctaactgcctccggccgctctgcacaaactgggatggcccaggtcccccagcaagggtacccagcaagggtagctccggggcttcctggctggttgctttccattggctgccagctgtgtgacaccacagggcggagtctgtggaggccccgcccacctcc

SEQ ID NO: 138765 - DNA, 776 bp, Homo sapiens
  Payload ID: 7183
  Gene Symbol: GRAP
  Gene Name: GRB2-related adaptor protein
  ENST ID: ENST00000583020
  CDS Start-End: 35-346
tctgagcccagctgctggagccccgagcagcggcatggagtccgtggccctgtacagctttcaggctacagagagcgacgagctggccttcaacaagggagacacactcaagatcctgaacatggaggatgaccagaactggtacaaggccgagctccggggtgtcgagggatttattcccaagaactacatccgcgtcaagccccatccgtggtactcgggcaggatttcccggcagctggccgaagagattctgatgaagcggaaccatctgggagccttcctgatccgggagagtgagagctccccaggggagttctctgtgtctgtgaaatgggcaaactgaggccagagaggggccatgcctgatggagatcgcccagcgggcagttagcacccagctatggagaccaggtgcagcacttcaaggtgctgcgtgaggcctcggggaagtacttcctgtgggaggagaagttcaactccctcaacgagctggtcgacttctaccgcaccaccaccatcgccaagaagcggcagatcttcctgcgcgacgaggagcccttgctcaagtcacctggggcctgctttgcccaggcccagtttgacttctcagcccaggacccctcgcagctcagcttccgccgtggcgacatcattgaggtcctggagcgcccagacccccactggtggcggggccggtcctgcgggcgcgttggcttcttcccacggagttacgtgcagcccgtgcacctgtgagcagcccggcggccgatctg

SEQ ID NO: 138766 - DNA, 3893 bp, Homo sapiens
  Payload ID: 7184
  Gene Symbol: GRAP2
  Gene Name: GRB2-related adaptor protein 2
  Uniprot ID: O75791
  ENST ID: ENST00000344138
  CDS Start-End: 264-1256
acagactgcagggctgactagggttagtttggaggagggagtaagaggtggggaggaggaggcacagttaatggatctgtaaacttgcaccctctttcagagtggtacatggaagacagcacaaagtggatccatactctgaaatgcagtaactctgatgcttgaatttgtctcccttcttgccagaaaggattctaataactcggtgtcaaagccaagacataaactcaaccccttctcttccaaaagcttcacgttacagcatggaagctgttgccaagtttgatttcactgcttcaggtgaggatgaactgagctttcacactggagatgttttgaagattttaagtaaccaagaggagtggtttaaggcggagcttgggagccaggaaggatatgtgcccaagaatttcatagacatccagtttcccaaatggtttcacgaaggcctctctcgacaccaggcagagaacttactcatgggcaaggaggttggcttcttcatcatccgggccagccagagctccccaggggacttctccatctctgtcaggcatgaggatgacgttcaacacttcaaggtcatgcgagacaacaagggtaattactttctgtggactgagaagtttccatccctaaataagctggtagactactacaggacaaattccatctccagacagaagcagatcttccttagagacagaacccgagaagaccagggtcaccggggcaacagcctggaccggaggtcccagggaggcccacacctcagtggggctgtgggagaagaaatccgaccttcgatgaaccggaagctgtcggatcaccccccgacccttcccctgcagcagcaccagcaccagccacagcctccgcaatatgccccagcgccccagcagctgcagcagcccccacagcagcgatatctgcagcaccaccatttccaccaggaacgccgaggaggcagccttgacataaatgatgggcattgtggcaccggcttgggcagtgaaatgaatgcggccctcatgcatcggagacacacagacccagtgcagctccaggcggcagggcgagtgcggtgggcccgggcgctgtatgactttgaggccctggaggatgacgagctggggttccacagcggggaggtggtggaggtcctggatagctccaacccatcctggtggaccggccgcctgcacaacaagctgggcctcttccctgccaactacgtggcacccatgacccgataaactcttcaggggacagaagctttttgtctggagctgcccacaagaaagagggcaaggaaaaaaggctggactccatgactatatatacatacatctatctacatctgcctgtgtacacacacaactttttatactagtaatttattggcaattgggctggtaattagttgatgcaaaagggaactcaggtggagaataatattgacacttgcttttctgcccccctcaggggtgtgtggaaggcagtgggggagttgggaggggggcagggaaatgaaatggagttttgtcctggccttcagctgtcactgcttcctccttgtcttgggaattttcacggagaacagctaagcagagaccacacctcggcactggacacagaacaacagggtggggttgaacttggtggggcacgttctagctgacctgcaagccccgctcacctggagggcttgcagagcagctctcctcctgttctccaaggggtgggcactgttgcattaggaattaaggtgcagcccagtgctgcgggcagccaagcgagtctgagcggggatgtgaaggcaggacggggttggagagaccctgcctgtgcaaggctggcctcctagtcaacacctagctgagacattcatctctgttcaaattaatattccttgggtctttcaaatgaatgtttcaatgtgaggagcgaagtactgggaaatcgagggattttccacaatccccaagcagcttactcagtggaacctctgtttccccagctatgaaggaaatagcatcctacattccgtaaagtgcttgaagaagctctagctgagaatgctgaattttacagtcattgttttatggttacaagggtatgtcttcagggctctgttcattttccctcttgattttctcttttgaagatgccttgcccagtggcatggaaagaagcccacttgatgataggagcctgactatgaattgattgactaaacatgaccccaggtggaagctggctttgacaccagcttcctgttcagtctgaccactgctgtcctcctgctgcccaagagttgcacctggagcaaggaaccccaccatggctgtcgctctccatcccatcacgctagaatcatgtgtccaagggctcactctggaggtgcacagcacaggtcagcctggccaggggcgaaggagacagtagagaggaagctcagggccttaggggaggccgggtgcaaacccgttctgcaccaagtgcactcggagtttgtgggtatgggtgtgtacccctgcaggtgtgcacatgtgtgcttgcacgcacatatttgtgcactcctgtgtgtatacatgtgtgcttgtgtatgcatatgtgtgcattcctgcatgtgtggacatgtgcgtgcatgcatctgtgtgtctgtgtgtgtgctgagacaggaaagggggtgaaagtgttggtgagggagcctggaagttttctcttccccaacctctcttgctctaaggagggatggggttgggggcagccgttattgaaggtgatcggagaagaaagattttctgactcagaagtgactgccagtgtagcacaagcagtgtcccttgtgactgtgattctacagttctctgatcctcatgtttcctttagaggaaagaggaaaaaaggaactctgtggtgggtattgggagggaaaagaaaatagcctggtggaggcaggagggagtcgagtgtgagtaaggagcacctgcagcttttggaagtgaaagcagagagagggaaaggtagctaagacatccaggaggatcaaggggcagcgtgagaggcacagggggaggaaagggagagggtgagtggggccagggaagagaacggtgtggagttggtgggcagatggtgcaggaggagggctgggcagtggggagaggaagaatcagagcagagaaaccgctgctgcggaaggcagggagcaaagaagcataaggaaaagaacaggagaaagaacaaaggcagagaagacctcctcagctattttggtgctaggtaatgtgaaatgctgcagtaaataaaagccataagtaatgtttgattttacagtatttacaaaccatatgctttaaacagcccacaaactccatccagttgtctgatgatgtgggaggaccagctctagttagacggaggtatgtgattcgattctggtggagactttgtgccttgaaaggcttctcaggaaagcagtaataaaacaaagtgtccttgtttggccaggccgtgtctggtgtctgcgttgcatacccctcaggtagagagtgagaacgagaccagggggtgacaggggtcatcggcctgcaggagctgaccccgtaggcaggcggtatgagcagagctttcagaacccctggagctcggtgttctgttgtagcaaaagctactgaagagtattttgtactgagatgccaaagcatctttcccttgctcatcagcctccattcagaaggaagcgggaaagtcacccaaaccacctacaaggaatgagggctcttagcggccaggtaaagaggacaagaaccaaactgtccacattatggaggggagggggaaagagagctcaacccccctcagcctctggtgctgccagggggagc

SEQ ID NO: 138767 - DNA, 1304 bp, Homo sapiens
  Payload ID: 7184
  Gene Symbol: GRAP2
  Gene Name: GRB2-related adaptor protein 2
  Uniprot ID: O75791
  ENST ID: ENST00000407075
  CDS Start-End: 291-1283
gatgatgaaaggagaagggaaaggctgcggatggccttcatttcctgctcctggcatctggggattccgagaatgatcccaggacctagatcctatagattccggcagctcttcctgcaaacacaagcccttgttgtgtgcctgagccttgctctccggcctggagacatccatctgcccactctcctaggaactgctgattaccaggaagcaccatcggctctgctgccctccccctggcagagaggcacaatgaccacattatttctcttccagcttcacgttacagcatggaagctgttgccaagtttgatttcactgcttcaggtgaggatgaactgagctttcacactggagatgttttgaagattttaagtaaccaagaggagtggtttaaggcggagcttgggagccaggaaggatatgtgcccaagaatttcatagacatccagtttcccaaatggtttcacgaaggcctctctcgacaccaggcagagaacttactcatgggcaaggaggttggcttcttcatcatccgggccagccagagctccccaggggacttctccatctctgtcaggcatgaggatgacgttcaacacttcaaggtcatgcgagacaacaagggtaattactttctgtggactgagaagtttccatccctaaataagctggtagactactacaggacaaattccatctccagacagaagcagatcttccttagagacagaacccgagaagaccagggtcaccggggcaacagcctggaccggaggtcccagggaggcccacacctcagtggggctgtgggagaagaaatccgaccttcgatgaaccggaagctgtcggatcaccccccgacccttcccctgcagcagcaccagcaccagccacagcctccgcaatatgccccagcgccccagcagctgcagcagcccccacagcagcgatatctgcagcaccaccatttccaccaggaacgccgaggaggcagccttgacataaatgatgggcattgtggcaccggcttgggcagtgaaatgaatgcggccctcatgcatcggagacacacagacccagtgcagctccaggcggcagggcgagtgcggtgggcccgggcgctgtatgactttgaggccctggaggatgacgagctggggttccacagcggggaggtggtggaggtcctggatagctccaacccatcctggtggaccggccgcctgcacaacaagctgggcctcttccctgccaactacgtggcacccatgacccgataaactcttcaggggacagaagct

SEQ ID NO: 138768 - DNA, 568 bp, Homo sapiens
  Payload ID: 7184
  Gene Symbol: GRAP2
  Gene Name: GRB2-related adaptor protein 2
  ENST ID: ENST00000420971
  CDS Start-End: 278-568
aaaagtcataaaagcattctatgctggaccggttcgtgttaagtctgagttcctcaatcgctggctctcaggagctgtttggaaaattcgttgccatgcatgagtcgggggattggttttttttccactggaaattgttaatggggactgcattagcggccccttatcgctttgcctgatagagagacagcaggttcgcccaaacaattctggaaccctgatcactgccaattaggggagtattgtctggctgacataatcaacttcacgttacagcatggaagctgttgccaagtttgatttcactgcttcaggtgaggatgaactgagctttcacactggagatgttttgaagattttaagtaaccaagaggagtggtttaaggcggagcttgggagccaggaaggatatgtgcccaagaatttcatagacatccagtttcccaaatggtttcacgaaggcctctctcgacaccaggcagagaacttactcatgggcaaggaggttggcttcttcatcatccgggccagccagagctccccaggggacttctccatctctgtcagg

SEQ ID NO: 138769 - DNA, 1308 bp, Homo sapiens
  Payload ID: 7185
  Gene Symbol: GRAPL
  Gene Name: GRB2-related adaptor protein-like
  Uniprot ID: Q8TC17
  ENST ID: ENST00000344415
  CDS Start-End: 152-508
cctgtttctcccccatcaggagcagtttcagtctcaacttcaaaagaacaaacgcgcactcaaaacaaaggaagaccgtcctcgactgcagaggaagcaggaagctgtcggcccagctctgagcccagctgctggagccccgagcagcggcatggagtccgtggccctgtacagctttcaggctacagagagcgacgagctggccttcaacaagggagacacactcaagatcctgaacatggaggatgaccagaactggtacaaggccgagctccggggtgtcgagggatttattcccaagaactacatccgcgtcaagccccatccgtggtactcgggcaggatttcccggcagctggccgaagagattctgatgaagcggaaccatctgggagccttcctgatccgggagagtgagagctccccaggggagttctctgtgtctgtgaataacagagcccagaggggtccctgcctgggcccaaaatcacacagcagattggggtagagccggagaggacccgagactcctgtgccagcctgggcatcccctccactgccagggaaggactgcatccaagtcgcatccgtacccaggccgaggtgtccgaggcccaggctgaaatccggttgctgctgcagagaccaagtttccaaggccttgtcaagtgggctgtgccagacgatccccaggcctgtcattggctgctcttcggctcggacacaccaaacctcaccaagcacttccatttctgagggaatagaggttgtggcttccgtcaagcacccatttaccccaccctcctcctcctcttcctgcaaacttgagtcacagctgccctgctgggctcaggccccagggatgtctgagtcagcctggctggggttccagtcctgacaccgcccttaccagctgggagactccgggaacctccaaccctgctgagcctccacttcgacatccgtgaaacagccatgaataagcaggtctcaaaggtcgactcctgtatgcagggacacagcatgcagtaggtgcccaatcataacagcagcacccacctggagccccttatagcagcccttctcctctgcacttccacatggcatctcatttaaccttcaccacaacccaactaggaaggcaccatcattatcccattttactgatgaagaaactgaggcccaggaaggtgaatttaccagccagctcacaaatggactagtagatggcagtttgtggattggagcccagaggctgtgctcctgcccacaccctctcaaatgagggctataaaataacactctaag

SEQ ID NO: 138770 - DNA, 820 bp, Homo sapiens
  Payload ID: 7185
  Gene Symbol: GRAPL
  Gene Name: GRB2-related adaptor protein-like
  ENST ID: ENST00000574324
  CDS Start-End: 1-196
catccgcgtcaagccccatccgtggtactcgggcaggatttcccggcagctggccgaagagattctgatgaagcggaaccatctgggagccttcctgatccgggagagtgagagctccccaggggagttctctgtgtctgtgaaagcccagaggggtccctgcctgggcccaaaatcacacagcagattggggtagagccggagaggacccgagactcctgtgccagcctgggcatcccctccactgccagggaaggactgcatccaagtcgcatccgtacccaggccgaggtgtccgaggcccaggctgaaatccggttgctgctgcagagaccaagtttccaaggccttgtcaagtgggctgtgccagacgatccccaggcctgtcattggctgctcttcggctcggacacaccaaacctcaccaagcacttccatttctgagggaatagaggttgtggcttccgtcaagcacccatttaccccaccctcctcctcctcttcctgcaaacttgagtcacagctgccctgctgggctcaggccccagggatgtctgagtcagcctggctggggttccagtcctgacaccgcccttaccagctgggagactccgggaacctccaaccctgctgagcctccacttcgacatccgtgaaacagccatgaataagcaggtctcaaaggtcgactcctgtatgcagggacacagcatgcagtaggtgcccaatcataacagcagcacccacctggagccccttatagcagcccttctcctctgcacttccacatggcatctcatttaaccttcaccacaaccca

SEQ ID NO: 138771 - DNA, 573 bp, Homo sapiens
  Payload ID: 7185
  Gene Symbol: GRAPL
  Gene Name: GRB2-related adaptor protein-like
  ENST ID: ENST00000583540
  CDS Start-End: 1-53
agagtgagagctccccaggggagttctctgtgtctgtgaaatgggcaaactgaggccagagaggggccatgcctgatggagatcgcccagcgggcagttagcacccagtaacagagcccagaggggtccctgcctgggcccaaaatcacacagcagattggggtagagccggagaggacccgagactcctgtgccagcctgggcatcccctccactgccagggaaggactgcatccaagtcgcatccgtacccaggccgaggtgtccgaggcccaggctgaaatccggttgctgctgcagagaccaagtttccaaggccttgtcaagtgggctgtgccagacgatccccaggcctgtcattggctgctcttcggctcggacacaccaaacctcaccaagcacttccatttctgagggaatagaggttgtggcttccgtcaagcacccatttaccccaccctcctcctcctcttcctgcaaacttgagtcacagctgccctgctgggctcaggccccagggatgtctgagtcagcctggctggggttccagtcctgacaccgcccttaccagct

SEQ ID NO: 138772 - DNA, 391 bp, Homo sapiens
  Payload ID: 7185
  Gene Symbol: GRAPL
  Gene Name: GRB2-related adaptor protein-like
  ENST ID: ENST00000437957
  CDS Start-End: 180-391
accagtctgtctcagaccaaaggcccccttatctgctccccagagcctgacgtccccccactgaattgtcacccctgagctgtctaaatgcgagggaccctaggtgaccactggtggctgtgctcaggccgggtcccccgaccttcaccccaaggctcagtgcgtggcatatcctgaacatggaggatgaccagaactggtacaaggccgagctccggggtgtcgagggatttattcccaagaactacatccgcgtcaagccccatccgtggtactcgggcaggatttcccggcagctggccgaagagattctgatgaagcggaaccatctgggagccttcctgatccgggagagtgagagctccccaggggagttctctgtgtctgtgaa

SEQ ID NO: 138773 - DNA, 866 bp, Homo sapiens
  Payload ID: 7185
  Gene Symbol: GRAPL
  Gene Name: GRB2-related adaptor protein-like
  ENST ID: ENST00000577213
  CDS Start-End: 86-388
aaaggaagaccgtcctcgactgcagaggaagcaggaagctgtcggcccagctctgagcccagctgctggagccccgagcagcggcatggagtccgtggccctgtacagctttcaggctacagagagcgacgagctggccttcaacaagggagacacactcaagatcctgaacatggaggatgaccagaactggtacaaggccgagctccggggtgtcgagggatttattcccaagaactacatccgcgtcaagccccatccgtggtactcgggcaggatttcccggcagctggccgaagagattctgatgaagcggaaccatctgggagccttcctgatccgggagagtgagagctccccaggggagttctctgtgtctgtgaagtgagctctggcccttgggggtgtgtgcagaggagggtgggcggggttgggcagcatttgagctgagccttggggcccgggacgggctcacggagtgagggtggaggaatggcatccctgcagagggagcagtccgggcagaggccttccggacacaggcggtggtctgggcaccccagggtgcagcccagagcagtggggtgtgttgggaaagcaggatcaggccagctgtgcaaggcctcaatgccaggctgaaggtccaggcttctacgagtataggagccatcataggttcttcatcaggagagggcgatgtccagggtggtgatgtggcaagagattgagggcaggagagtgctgaaacgcccagggcgggtgtccaggatgtgctccgcacagggtcccactctatgtgatatagttgggaagatgcaccctgaggccaggctgcctgggctcaaatgctagttctgccacttcct

SEQ ID NO: 138774 - DNA, 4138 bp, Homo sapiens
  Payload ID: 7186
  Gene Symbol: GREM1
  Gene Name: gremlin 1, DAN family BMP antagonist
  Uniprot ID: O60565
  ENST ID: ENST00000300177
  CDS Start-End: 160-714
actcggtgcgccttccgcggaccgggcgacccagtgcacggccgccgcgtcactctcggtcccgctgaccccgcgccgagccccggcggctctggccgcggccgcactcagcgccacgcgtcgaaagcgcaggccccgaggacccgccgcactgacagtatgagccgcacagcctacacggtgggagccctgcttctcctcttggggaccctgctgccggctgctgaagggaaaaagaaagggtcccaaggtgccatccccccgccagacaaggcccagcacaatgactcagagcagactcagtcgccccagcagcctggctccaggaaccgggggcggggccaagggcggggcactgccatgcccggggaggaggtgctggagtccagccaagaggccctgcatgtgacggagcgcaaatacctgaagcgagactggtgcaaaacccagccgcttaagcagaccatccacgaggaaggctgcaacagtcgcaccatcatcaaccgcttctgttacggccagtgcaactctttctacatccccaggcacatccggaaggaggaaggttcctttcagtcctgctccttctgcaagcccaagaaattcactaccatgatggtcacactcaactgccctgaactacagccacctaccaagaagaagagagtcacacgtgtgaagcagtgtcgttgcatatccatcgatttggattaagccaaatccaggtgcacccagcatgtcctaggaatgcagccccaggaagtcccagacctaaaacaaccagattcttacttggcttaaacctagaggccagaagaacccccagctgcctcctggcaggagcctgcttgtgcgtagttcgtgtgcatgagtgtggatgggtgcctgtgggtgtttttagacaccagagaaaacacagtctctgctagagagcactccctattttgtaaacatatctgctttaatggggatgtaccagaaacccacctcaccccggctcacatctaaaggggcggggccgtggtctggttctgactttgtgtttttgtgccctcctggggaccagaatctcctttcggaatgaatgttcatggaagaggctcctctgagggcaagagacctgttttagtgctgcattcgacatggaaaagtccttttaacctgtgcttgcatcctcctttcctcctcctcctcacaatccatctcttcttaagttgatagtgactatgtcagtctaatctcttgtttgccaaggttcctaaattaattcacttaaccatgatgcaaatgtttttcattttgtgaagaccctccagactctgggagaggctggtgtgggcaaggacaagcaggatagtggagtgagaaagggagggtggagggtgaggccaaatcaggtccagcaaaagtcagtagggacattgcagaagcttgaaaggccaataccagaacacaggctgatgcttctgagaaagtcttttcctagtatttaacagaacccaagtgaacagaggagaaatgagattgccagaaagtgattaactttggccgttgcaatctgctcaaacctaacaccaaactgaaaacataaatactgaccactcctatgttcggacccaagcaagttagctaaaccaaaccaactcctctgctttgtccctcaggtggaaaagagaggtagtttagaactctctgcataggggtgggaattaatcaaaaaccgcagaggctgaaattcctaatacctttcctttatcgtggttatagtcagctcatttccattccactatttcccataatgcttctgagagccactaacttgattgataaagatcctgcctctgctgagtgtacctgacagtagtctaagatgagagagtttagggactactctgttttagcaagagatattttgggggtctttttgttttaactattgtcaggagattgggctaaagagaagacgacgagagtaaggaaataaagggaattgcctctggctagagagtagttaggtgttaatacctggtagagatgtaagggatatgacctccctttctttatgtgctcactgaggatctgaggggaccctgttaggagagcatagcatcatgatgtattagctgttcatctgctactggttggatggacataactattgtaactattcagtatttactggtaggcactgtcctctgattaaacttggcctactggcaatggctacttaggattgatctaagggccaaagtgcagggtgggtgaactttattgtactttggatttggttaacctgttttcttcaagcctgaggttttatatacaaactccctgaatactctttttgccttgtatcttctcagcctcctagccaagtcctatgtaatatggaaaacaaacactgcagacttgagattcagttgccgatcaaggctctggcattcagagaacccttgcaactcgagaagctgtttttatttcgtttttgttttgatccagtgctctcccatctaacaactaaacaggagccatttcaaggcgggagatattttaaacacccaaaatgttgggtctgattttcaaacttttaaactcactactgatgattctcacgctaggcgaatttgtccaaacacatagtgtgtgtgttttgtatacactgtatgaccccaccccaaatctttgtattgtccacattctccaacaataaagcacagagtggatttaattaagcacacaaatgctaaggcagaattttgagggtgggagagaagaaaagggaaagaagctgaaaatgtaaaaccacaccagggaggaaaaatgacattcagaaccagcaaacactgaatttctcttgttgttttaactctgccacaagaatgcaatttcgttaacggagatgacttaagttggcagcagtaatcttcttttaggagcttgtaccacagtcttgcacataagtgcagatttggctcaagtaaagagaatttcctcaacactaacttcactgggataatcagcagcgtaactaccctaaaagcatatcactagccaaagagggaaatatctgttcttcttactgtgcctatattaagactagtacaaatgtggtgtgtcttccaactttcattgaaaatgccatatctataccatattttattcgagtcactgatgatgtaatgatatattttttcattattatagtagaatatttttatggcaagatatttgtggtcttgatcatacctattaaaataatgccaaacaccaaatatgaattttatgatgtacactttgtgcttggcattaaaagaaaaaaacacacatcctggaagtctgtaagttgttttttgttactgtaggtcttcaaagttaagagtgtaagtgaaaaatctggaggagaggataatttccactgtgtggaatgtgaatagttaaatgaaaagttatggttatttaatgtaattattacttcaaatcctttggtcactgtgatttcaagcatgttttctttttctcctttatatgactttctctgagttgggcaaagaagaagctgacacaccgtatgttgttagagtcttttatctggtcaggggaaacaaaatcttgacccagctgaacatgtcttcctgagtcagtgcctgaatctttattttttaaattgaatgttccttaaaggttaacatttctaaagcaatattaagaaagactttaaatgttattttggaagacttacgatgcatgtatacaaacgaatagcagataatgatgactagttcacacataaagtccttttaaggagaaaatctaaaatgaaaagtggataaacagaacatttataagtgatcagttaatgcctaagagtgaaagtagttctattgacattcctcaagatatttaatatcaactgcattatgtattatgtctgcttaaatcatttaaaaacggcaaagaattatatagactatgaggtaccttgctgtgtaggaggatgaaaggggagttgatagtctcataaaactaatttggcttcaagtttcatgaatctgtaactagaatttaattttcaccccaataatgttctatatagcctttgctaaagagcaactaataaattaaacctattctttctgtg

SEQ ID NO: 138775 - DNA, 4015 bp, Homo sapiens
  Payload ID: 7186
  Gene Symbol: GREM1
  Gene Name: gremlin 1, DAN family BMP antagonist
  Uniprot ID: O60565
  ENST ID: ENST00000322805
  CDS Start-End: 160-591
actcggtgcgccttccgcggaccgggcgacccagtgcacggccgccgcgtcactctcggtcccgctgaccccgcgccgagccccggcggctctggccgcggccgcactcagcgccacgcgtcgaaagcgcaggccccgaggacccgccgcactgacagtatgagccgcacagcctacacggtgggagccctgcttctcctcttggggaccctgctgccggctgctgaagggaaaaagaaagggtcccaaggtgccatccccccgccagacaaggccctgcatgtgacggagcgcaaatacctgaagcgagactggtgcaaaacccagccgcttaagcagaccatccacgaggaaggctgcaacagtcgcaccatcatcaaccgcttctgttacggccagtgcaactctttctacatccccaggcacatccggaaggaggaaggttcctttcagtcctgctccttctgcaagcccaagaaattcactaccatgatggtcacactcaactgccctgaactacagccacctaccaagaagaagagagtcacacgtgtgaagcagtgtcgttgcatatccatcgatttggattaagccaaatccaggtgcacccagcatgtcctaggaatgcagccccaggaagtcccagacctaaaacaaccagattcttacttggcttaaacctagaggccagaagaacccccagctgcctcctggcaggagcctgcttgtgcgtagttcgtgtgcatgagtgtggatgggtgcctgtgggtgtttttagacaccagagaaaacacagtctctgctagagagcactccctattttgtaaacatatctgctttaatggggatgtaccagaaacccacctcaccccggctcacatctaaaggggcggggccgtggtctggttctgactttgtgtttttgtgccctcctggggaccagaatctcctttcggaatgaatgttcatggaagaggctcctctgagggcaagagacctgttttagtgctgcattcgacatggaaaagtccttttaacctgtgcttgcatcctcctttcctcctcctcctcacaatccatctcttcttaagttgatagtgactatgtcagtctaatctcttgtttgccaaggttcctaaattaattcacttaaccatgatgcaaatgtttttcattttgtgaagaccctccagactctgggagaggctggtgtgggcaaggacaagcaggatagtggagtgagaaagggagggtggagggtgaggccaaatcaggtccagcaaaagtcagtagggacattgcagaagcttgaaaggccaataccagaacacaggctgatgcttctgagaaagtcttttcctagtatttaacagaacccaagtgaacagaggagaaatgagattgccagaaagtgattaactttggccgttgcaatctgctcaaacctaacaccaaactgaaaacataaatactgaccactcctatgttcggacccaagcaagttagctaaaccaaaccaactcctctgctttgtccctcaggtggaaaagagaggtagtttagaactctctgcataggggtgggaattaatcaaaaaccgcagaggctgaaattcctaatacctttcctttatcgtggttatagtcagctcatttccattccactatttcccataatgcttctgagagccactaacttgattgataaagatcctgcctctgctgagtgtacctgacagtagtctaagatgagagagtttagggactactctgttttagcaagagatattttgggggtctttttgttttaactattgtcaggagattgggctaaagagaagacgacgagagtaaggaaataaagggaattgcctctggctagagagtagttaggtgttaatacctggtagagatgtaagggatatgacctccctttctttatgtgctcactgaggatctgaggggaccctgttaggagagcatagcatcatgatgtattagctgttcatctgctactggttggatggacataactattgtaactattcagtatttactggtaggcactgtcctctgattaaacttggcctactggcaatggctacttaggattgatctaagggccaaagtgcagggtgggtgaactttattgtactttggatttggttaacctgttttcttcaagcctgaggttttatatacaaactccctgaatactctttttgccttgtatcttctcagcctcctagccaagtcctatgtaatatggaaaacaaacactgcagacttgagattcagttgccgatcaaggctctggcattcagagaacccttgcaactcgagaagctgtttttatttcgtttttgttttgatccagtgctctcccatctaacaactaaacaggagccatttcaaggcgggagatattttaaacacccaaaatgttgggtctgattttcaaacttttaaactcactactgatgattctcacgctaggcgaatttgtccaaacacatagtgtgtgtgttttgtatacactgtatgaccccaccccaaatctttgtattgtccacattctccaacaataaagcacagagtggatttaattaagcacacaaatgctaaggcagaattttgagggtgggagagaagaaaagggaaagaagctgaaaatgtaaaaccacaccagggaggaaaaatgacattcagaaccagcaaacactgaatttctcttgttgttttaactctgccacaagaatgcaatttcgttaacggagatgacttaagttggcagcagtaatcttcttttaggagcttgtaccacagtcttgcacataagtgcagatttggctcaagtaaagagaatttcctcaacactaacttcactgggataatcagcagcgtaactaccctaaaagcatatcactagccaaagagggaaatatctgttcttcttactgtgcctatattaagactagtacaaatgtggtgtgtcttccaactttcattgaaaatgccatatctataccatattttattcgagtcactgatgatgtaatgatatattttttcattattatagtagaatatttttatggcaagatatttgtggtcttgatcatacctattaaaataatgccaaacaccaaatatgaattttatgatgtacactttgtgcttggcattaaaagaaaaaaacacacatcctggaagtctgtaagttgttttttgttactgtaggtcttcaaagttaagagtgtaagtgaaaaatctggaggagaggataatttccactgtgtggaatgtgaatagttaaatgaaaagttatggttatttaatgtaattattacttcaaatcctttggtcactgtgatttcaagcatgttttctttttctcctttatatgactttctctgagttgggcaaagaagaagctgacacaccgtatgttgttagagtcttttatctggtcaggggaaacaaaatcttgacccagctgaacatgtcttcctgagtcagtgcctgaatctttattttttaaattgaatgttccttaaaggttaacatttctaaagcaatattaagaaagactttaaatgttattttggaagacttacgatgcatgtatacaaacgaatagcagataatgatgactagttcacacataaagtccttttaaggagaaaatctaaaatgaaaagtggataaacagaacatttataagtgatcagttaatgcctaagagtgaaagtagttctattgacattcctcaagatatttaatatcaactgcattatgtattatgtctgcttaaatcatttaaaaacggcaaagaattatatagactatgaggtaccttgctgtgtaggaggatgaaaggggagttgatagtctcataaaactaatttggcttcaagtttcatgaatctgtaactagaatttaattttcaccccaataatgttctatatagcctttgctaaagagcaactaataaattaaacctattctttctgtg

SEQ ID NO: 138776 - DNA, 2648 bp, Homo sapiens
  Payload ID: 7186
  Gene Symbol: GREM1
  Gene Name: gremlin 1, DAN family BMP antagonist
  Uniprot ID: O60565
  ENST ID: ENST00000560830
  CDS Start-End: 160-591
actcggtgcgccttccgcggaccgggcgacccagtgcacggccgccgcgtcactctcggtcccgctgaccccgcgccgagccccggcggctctggccgcggccgcactcagcgccacgcgtcgaaagcgcaggccccgaggacccgccgcactgacagtatgagccgcacagcctacacggtgggagccctgcttctcctcttggggaccctgctgccggctgctgaagggaaaaagaaagggtcccaaggtgccatccccccgccagacaaggccctgcatgtgacggagcgcaaatacctgaagcgagactggtgcaaaacccagccgcttaagcagaccatccacgaggaaggctgcaacagtcgcaccatcatcaaccgcttctgttacggccagtgcaactctttctacatccccaggcacatccggaaggaggaaggttcctttcagtcctgctccttctgcaagcccaagaaattcactaccatgatggtcacactcaactgccctgaactacagccacctaccaagaagaagagagtcacacgtgtgaagcagtgtcgttgcatatccatcgatttggattaagccaaatccaggtgcacccagcatgtcctaggaatgcagccccaggaagtcccagacctaaaacaaccagattcttacttggcttaaacctagaggccagaagaacccccagctgcctcctggcaggagcctgcttgtgcgtagttcgtgtgcatgagtgtggatgggtgcctgtgggtgtttttagacaccagagaaaacacagtctctgctagagagcactccctattttgtaaacatatctgctttaatggggatgtaccagaaacccacctcaccccggctcacatctaaaggggcggggccgtggtctggttctgactttgtgtttttgtgccctcctggggaccagaatctcctttcggaatgaatgttcatggaagaggctcctctgagggcaagagacctgttttagtgctgcattcgacatggaaaagtccttttaacctgtgcttgcatcctcctttcctcctcctcctcacaatccatctcttcttaagttgatagtgactatgtcagtctaatctcttgtttgccaaggttcctaaattaattcacttaaccatgatgcaaatgtttttcattttgtgaagaccctccagactctgggagaggctggtgtgggcaaggacaagcaggatagtggagtgagaaagggagggtggagggtgaggccaaatcaggtccagcaaaagtcagtagggacattgcagaagcttgaaaggccaataccagaacacaggctgatgcttctgagaaagtcttttcctagtatttaacagaacccaagtgaacagaggagaaatgagattgccagaaagtgattaactttggccgttgcaatctgctcaaacctaacaccaaactgaaaacataaatactgaccactcctatgttcggacccaagcaagttagctaaaccaaaccaactcctctgctttgtccctcaggtggaaaagagaggtagtttagaactctctgcataggggtgggaattaatcaaaaacctcagaggctgaaattcctaatacctttcctttatcgtggttatagtcagctcatttccattccactatttcccataatgcttctgagagccactaacttgattgataaagatcctgcctctgctgagtgtacctgacagtagtctaagatgagagagtttagggactactctgttttagcaagagatattttgggggtctttttgttttaactattgtcaggagattgggctaaagagaagacgacgagagtaaggaaataaagggaattgcctctggctagagagtagttaggtgttaatacctggtagagatgtaagggatatgacctccctttctttatgtgctcactgaggatctgaggggaccctgttaggagagcatagcatcatgatgtattagctgttcatctgctactggttggatggacataactattgtaactattcagtatttactggtaggcactgtcctctgattaaacttggcctactggcaatggctacttaggattgatctaagggccaaagtgcagggtgggtgaactttattgtactttggatttggttaacctgttttcttcaagcctgaggttttatatacaaactccctgaatactctttttgccttgtatcttctcagcctcctagccaagtcctatgtaatatggaaaacaaacactgcagacttgagattcagttgccgatcaaggctctggcattcagagaacccttgcaactcgagaagctgtttttatttcgtttttgttttgatccagtgctctcccatctaacaactaaacaggagccatttcaaggcgggagatattttaaacacccaaaatgttgggtctgattttcaaacttttaaactcactactgatgattctcacgctaggcgaatttgtccaaacacatagtgtgtgtgttttgtatacactgtatgaccccaccccaaatctttgtattgtccacattctccaacaataaagcacagagtggatttaattaagcacacaaatgctaaggcagaattttgagggtgggagag

SEQ ID NO: 138777 - DNA, 623 bp, Homo sapiens
  Payload ID: 7186
  Gene Symbol: GREM1
  Gene Name: gremlin 1, DAN family BMP antagonist
  ENST ID: ENST00000560677
  CDS Start-End: 160-288
actcggtgcgccttccgcggaccgggcgacccagtgcacggccgccgcgtcactctcggtcccgctgaccccgcgccgagccccggcggctctggccgcggccgcactcagcgccacgcgtcgaaagcgcaggccccgaggacccgccgcactgacagtatgagccgcacagcctacacggtgggagccctgcttctcctcttggggaccctgctgccggctgctgaagggaaaaagaaagggtcccaaggtgccatcccccctccagccaagaggccctgcatgtgacggagcgcaaatacctgaagcgagactggtgcaaaacccagccgcttaagcagaccatccacgaggaaggctgcaacagtcgcaccatcatcaaccgcttctgttacggccagtgcaactctttctacatccccaggcacatccggaaggaggaaggttcctttcagtcctgctccttctgcaagcccaagaaattcactaccatgatggtcacactcaactgccctgaactacagccacctaccaagaagaagagagtcacacgtgtgaagcagtgtcgttgcatatccatcgatttggattaagccaaatccaggtgcacccagcatgtccta

SEQ ID NO: 138778 - DNA, 14606 bp, Homo sapiens
  Payload ID: 7186
  Gene Symbol: GREM1
  Gene Name: gremlin 1, DAN family BMP antagonist
  Uniprot ID: O60565
  ENST ID: ENST00000622074
  CDS Start-End: 190-744
atttaaacgggagacggcgcgatgcctggcactcggtgcgccttccgcggaccgggcgacccagtgcacggccgccgcgtcactctcggtcccgctgaccccgcgccgagccccggcggctctggccgcggccgcactcagcgccacgcgtcgaaagcgcaggccccgaggacccgccgcactgacagtatgagccgcacagcctacacggtgggagccctgcttctcctcttggggaccctgctgccggctgctgaagggaaaaagaaagggtcccaaggtgccatccccccgccagacaaggcccagcacaatgactcagagcagactcagtcgccccagcagcctggctccaggaaccgggggcggggccaagggcggggcactgccatgcccggggaggaggtgctggagtccagccaagaggccctgcatgtgacggagcgcaaatacctgaagcgagactggtgcaaaacccagccgcttaagcagaccatccacgaggaaggctgcaacagtcgcaccatcatcaaccgcttctgttacggccagtgcaactctttctacatccccaggcacatccggaaggaggaaggttcctttcagtcctgctccttctgcaagcccaagaaattcactaccatgatggtcacactcaactgccctgaactacagccacctaccaagaagaagagagtcacacgtgtgaagcagtgtcgttgcatatccatcgatttggattaagccaaatccaggtgcacccagcatgtcctaggaatgcagccccaggaagtcccagacctaaaacaaccagattcttacttggcttaaacctagaggccagaagaacccccagctgcctcctggcaggagcctgcttgtgcgtagttcgtgtgcatgagtgtggatgggtgcctgtgggtgtttttagacaccagagaaaacacagtctctgctagagagcactccctattttgtaaacatatctgctttaatggggatgtaccagaaacccacctcaccccggctcacatctaaaggggcggggccgtggtctggttctgactttgtgtttttgtgccctcctggggaccagaatctcctttcggaatgaatgttcatggaagaggctcctctgagggcaagagacctgttttagtgctgcattcgacatggaaaagtccttttaacctgtgcttgcatcctcctttcctcctcctcctcacaatccatctcttcttaagttgatagtgactatgtcagtctaatctcttgtttgccaaggttcctaaattaattcacttaaccatgatgcaaatgtttttcattttgtgaagaccctccagactctgggagaggctggtgtgggcaaggacaagcaggatagtggagtgagaaagggagggtggagggtgaggccaaatcaggtccagcaaaagtcagtagggacattgcagaagcttgaaaggccaataccagaacacaggctgatgcttctgagaaagtcttttcctagtatttaacagaacccaagtgaacagaggagaaatgagattgccagaaagtgattaactttggccgttgcaatctgctcaaacctaacaccaaactgaaaacataaatactgaccactcctatgttcggacccaagcaagttagctaaaccaaaccaactcctctgctttgtccctcaggtggaaaagagaggtagtttagaactctctgcataggggtgggaattaatcaaaaacctcagaggctgaaattcctaatacctttcctttatcgtggttatagtcagctcatttccattccactatttcccataatgcttctgagagccactaacttgattgataaagatcctgcctctgctgagtgtacctgacagtagtctaagatgagagagtttagggactactctgttttagcaagagatattttgggggtctttttgttttaactattgtcaggagattgggctaaagagaagacgacgagagtaaggaaataaagggaattgcctctggctagagagtagttaggtgttaatacctggtagagatgtaagggatatgacctccctttctttatgtgctcactgaggatctgaggggaccctgttaggagagcatagcatcatgatgtattagctgttcatctgctactggttggatggacataactattgtaactattcagtatttactggtaggcactgtcctctgattaaacttggcctactggcaatggctacttaggattgatctaagggccaaagtgcagggtgggtgaactttattgtactttggatttggttaacctgttttcttcaagcctgaggttttatatacaaactccctgaatactctttttgccttgtatcttctcagcctcctagccaagtcctatgtaatatggaaaacaaacactgcagacttgagattcagttgccgatcaaggctctggcattcagagaacccttgcaactcgagaagctgtttttatttcgtttttgttttgatccagtgctctcccatctaacaactaaacaggagccatttcaaggcgggagatattttaaacacccaaaatgttgggtctgattttcaaacttttaaactcactactgatgattctcacgctaggcgaatttgtccaaacacatagtgtgtgtgttttgtatacactgtatgaccccaccccaaatctttgtattgtccacattctccaacaataaagcacagagtggatttaattaagcacacaaatgctaaggcagaattttgagggtgggagagaagaaaagggaaagaagctgaaaatgtaaaaccacaccagggaggaaaaatgacattcagaaccagcaaacactgaatttctcttgttgttttaactctgccacaagaatgcaatttcgttaacggagatgacttaagttggcagcagtaatcttcttttaggagcttgtaccacagtcttgcacataagtgcagatttggctcaagtaaagagaatttcctcaacactaacttcactgggataatcagcagcgtaactaccctaaaagcatatcactagccaaagagggaaatatctgttcttcttactgtgcctatattaagactagtacaaatgtggtgtgtcttccaactttcattgaaaatgccatatctataccatattttattcgagtcactgatgatgtaatgatatattttttcattattatagtagaatatttttatggcaagatatttgtggtcttgatcatacctattaaaataatgccaaacaccaaatatgaattttatgatgtacactttgtgcttggcattaaaagaaaaaaacacacatcctggaagtctgtaagttgttttttgttactgtaggtcttcaaagttaagagtgtaagtgaaaaatctggaggagaggataatttccactgtgtggaatgtgaatagttaaatgaaaagttatggttatttaatgtaattattacttcaaatcctttggtcactgtgatttcaagcatgttttctttttctcctttatatgactttctctgagttgggcaaagaagaagctgacacaccgtatgttgttagagtcttttatctggtcaggggaaacaaaatcttgacccagctgaacatgtcttcctgagtcagtgcctgaatctttattttttaaattgaatgttccttaaaggttaacatttctaaagcaatattaagaaagactttaaatgttattttggaagacttacgatgcatgtatacaaacgaatagcagataatgatgactagttcacacataaagtccttttaaggagaaaatctaaaatgaaaagtggataaacagaacatttataagtgatcagttaatgcctaagagtgaaagtagttctattgacattcctcaagatatttaatatcaactgcattatgtattatgtctgcttaaatcatttaaaaacggcaaagaattatatagactatgaggtaccttgctgtgtaggaggatgaaaggggagttgatagtctcataaaactaatttggcttcaagtttcatgaatctgtaactagaatttaattttcaccccaataatgttctatatagcctttgctaaagagcaactaataaattaaacctattctttctgtgtgtgtgagcgtgcgtttgtgtttggtagtgttcctagggcagaggtggagcagggatgcacttatcatgggaagggaggtagaaaagagaattggatagcctgtgatctttggtggaatttattccttttgcctaggcctttcagaccctgcttgatttccgtaggacacttcaggttgtggcaagggagagctggtctgcaatcggaagtaccagcctcttccctagagcacaactagaaagaagaactatagagtgttataagggaggccctgagatggaaggaccatcacacagaaatgataatatcttcatttcagggtgttccaggggaaaagcaggagaaagatttggggctcagtagaaggaaaagcttcctagtggtaagagtgattggcaataccatgaggtacctttaaaagatagtgaactcctgtccttggaaatattaaaccacaggctagatatcatttaatagggatgtgaagtagagtaagtcactgcccttggtgtgcaattgtgaacttgtcaatttctgaggtccctttctacttagatatataatacaagatttctattaggtatgggtgctctgatgataatgaaaatcccagcagctatgtatgggatggttacaccagacactgtgctaaggattttctttgaattgtttctcactcaatcttcacggtagctcagtgaggtaggtaccattatcactgctagaaagcagtgaacttatatggtcttactgtggcactgggtccttaaacattatgcaaaactgtgagcaacttttatcggtttgttcttttaagaacataacacagcactctaaaaatagatctaactagattgttcacatctagcgattaaggccaccctgagattatagctgcatcatcaggaacccaagatctgaagcattcagtcaaagcctcttggccacctctctttttgtcatggccttcttggacttggagggggagaatggaagcaagtaccaaggagaaagtgttctcagaaaagccacacccattagaaaaatacaaggcctgaaaggtgtgagtgggacttgacacggaagagcatttcaagcttaagaaaaaaaaaaaaaagaagaatgtgggaggatgtcagcaacaatgcttgagattccctggtcccccaaagagtctctcctccataaaactaatgagaatgtgacaaaaatagattcaacttcttatagctctggaaattaactgaagatgtatagcaatttgcagagcatttattcaagaaaaagactaaatctctgtgagcactgtgatattgtaacttgcactactctcatctccccctctccagctccacaatagctttgaaaccaacagcctgcaattaccatgaaaatcagcagtctggcagccactgaaggtgacagaatggagttggagttctttcaaagtcccattcctagacaattgtcactatttgacctgtttggcaggccctggaagctccacttgcaaggctatatttgacctgactggaagcttcccagggtaaaaaactttgtcaaaacaactagaggcaattgattctctttgtggctgcctggggtaatgtataacagttggggaaagcaattggctaaataaaaagcctaaaaggagaagctggaaaaagagattttcatagggactttgaaaagctccaaagtgttattggcaatctagactgccaaatgcataaataggactccatccatgcccaggactgtgcagatgctcaggaaaaacccaagaaagccttaagctctcacttcaagctgatcttgaggctctgcacaagccataagtaaagggaatgcagagttgtcaattgcatggcggagtgttgagtgtgcctcagcattcacacagagctccttggcagagactggttgaattattgattccaagtgtttgaggaaatccgtgtacaactattagatgactactaaccaagcagagacttcagtgtccacacacaacaaaaaatacagactttacagaattagttcagaaaagtcattaaacaaagaaacaacaacaaaccctggggaaatgacagtacgatcaaaccatgcatggccctgcctgcatgtgggaatcctcatccaagtcatactttctaaacatcataaaaagcccaaaccagtctcctttcctggctctctcaagtcattttcagaccaggttaggagacgtgagctgctctccacaaaaagcctcatgtgagtaataaatgtttcatactctcttggggtgtgtgtaacatcatcagtctcagcatctaaaccaaattttggtgacatttcatcttgtttatgcagatgtccaccacacctataaataaacaaactactgaaactgattcaagaaaaaataaaaatctgaatagagctatcacaagtaaagagattaaataagcaatcaaataacttcccagaaagaaaagcccaatttaggatgtcttaactgattaatgttagcaaatatttaaagaagaattggtacaaattcttcacaaactcttccagaaatggaagaggaggaaacactttccaccttattttctataactagtattaccttgataccaaattctgacaaatacatcaaaaataaaaccatagaccaatatctcttttaagtgtaaatgcaaaaaaattcaacaaaatgctagataactgggtccaacaacatatggaaaggattatataccttgaccaagtgggatttgccccaggaatgcaagattgatttaaccatcagtgtaatgcatcatattaatagaataaagacagaaaccacacaatcatctcgatacacgcagaaaaatcatttggcaaaattcaacacccctttgtaataaaatcactcaacacactaggaagagaagggaacttcttcaacctcacacatggcatctatgaaaaacccacagctggccgggtatggtggctcaagcctgtaatcccagcactttgggaggctgagccaggcggatcacctgaggtcaggagttcgagaccaacctgaccaacatggagaaaccctgtatctactaaaaatacaaaaaattagcccggcgtggtggcaaatgcctgtaatcccagctgcttgggaggctgaggcaggagaatcggttgaacccaggaggtggaggttctggtgagccgagatcacgccattgtactccagcctgggcaacaagaacaaaactctgtctcaaaaaaaaaaaaaaaaagaaaagaaaaacccacagctaacatcatacttaaaggtgaaagactgaaagctttcccccaagaggaactaacaggatatctgctgtcactatttttattcaatattatactggaggttctacctagggtaattaggcaaaaaaaaaaaaaaaaaaaaaaaaaaaaaaaaaaaaaaaaaaaaaaaaaagaaaagaaaaaagtcatccagattggaaaagaaataaaatgatttcaattttaagatgacataatattgtatgtagaaatcctaaggaatttacaaaagaactattagagctaatacatgatttcagcaaggttgcaggatacaagatcaacatacagatataaattgtattctacacacttgtaatgaaaaatctgaaaataaaattaagaaaatagcaccctttgaatagtatcaaaaagaataaaatacatagaaaaaatgtaacaggaagtgcaagactggtacattgaaaacaataaaacattgttaaaaaatttaaaatcatcaaaatagatggaaataaaacctgtgttcatggatgaaaaaaattaacattgctctacagattcaatacaattcttatcaaaatcccaggtggcttaagaaattgacaagttaatcctaaaattcataagaaattgaaagggatccacaatagccaaaataatcttaaaaaagattttaaaaagttggagaactcacacttcctggtttcataacatacaccaggctgggcatggtggttcatgcccataatcccagcactttgggaagttgaggcagaaggatcacttgagcacaggagtttgagaccagcctggacgatatagtgagaccttgtctctactaaaaatttaaaaaggaattagccaggtgtggtaacatgcacctgttgtcccagctacttaggaggctgaggcatgaggatcacttgagcccagaagattgtaccactgcactccagcctacatgacagagtaagtctctgtctcaaaaacaaaacaaacaacaaaaatactgaaagctttccccatacaggaactaacaggatatctgctgtcactatttttattcaatattgttctggaggttctagctagggcaattaggcaaaaaaaggaaaaagaagtcatccagattagaaaagaaataaaataatttcaattttcagatgacataatattgtatgtagaaatcctaaggaatttacaaaagaactgctaccctgaaagaattgttgtaaggcaaatacccctgtaattaccattaggggaagaaatttttccatgcttcacagaaactctccttataccccacctcaattttaatctttttctgtaccactacagttataattctcctaaagcttaaagcaattacctccttgtttatatttatagtttcatcactgaagtgtgcattcctaaactcaacaccttagtctggttgcaaacagtttaaatgagaaaagataaggcctgaattaaggcagcagccctaaacctttttctataatcctgatagtgattaccacctaggggattataaatgtttgcttcttcctctggcaccaacaagtttactgagcagaagtttaaaataattggataatggggcaggtgacatcagcaagatgttgtattagcaaatgctggacccttcttcaatccacaaacacatctattctgcaaaaattcatggctaaattcctttgtgaggaatccagaaactaaaaggctcctgcactcccagcaaatgcaaaaaccagactcaccaaagctggtagagagatttgagataccaccttgtccgaatccctaaccccagcacagtgccatgtagtcagcaagagactccctagcactcagtttctcccaggtgagaggagttggttcacatatccaagacctccaacttttctgaggagattcccagaggactggcttctatcttgtcagtcttggagctctgacagaattggtactatctagctacctggggaaggacagagacagaggtttagaccagtagatgacatggcaccctgccctctactgcctcacctcctggctcagcacagacaggacaaaaatcatggctacctacatttccctggagaaggaatgatttgttaaaggcccccaaatcactgggcagacttattggtgggggtcttctcctctgaggcccagctgtgaggactgggacaggtgactgctttgtctaatgtgcagacaccaacacaaagagtcaaggaaaatgaataatcatacgaagatgttccaaaccaaagaacaagataaatctctggaaactgagctaatgaaataaacttatgtgatttacctgacagagaattcagaatagctctcataaagattctcaccagagtcaagagaacaatgcatgaaaaaagttaagaattttgacaaagagatagagtatatttaaaagtaccaaaaagaaatggaactgaagaacacaacaactgaactgaaaaaatttatgacaggacatcaacaggagacaagattaatcagaagaaagaatcaatgaacttgaagacaggtcattggaaataattcagttagaggagaaattaaaatgaaaaagagtgaaaaaaagcccaagggtcttatgggcaacatcaagctgaacaatatactcattattggcatcacagaataaaagagagaaaagaactgagaacgtattcaaagaaataatggctgaacacttcccaaatatgaggaagaaaatgaacattctgatccaagaagcccaaaggtcataaaaaagtgatcccaaagcctacaggcatattataagttgtcatcctagagaaagaaaaatatctttctcccagcctccatattcaaatcttaaggaaaattcttatggacttagcttgagtttcaagttcatttctaaaatcaatcatggtggccaaacggaatgagcattctgatttgccagtgtggtctcatgttacccctgtgcctagaaaggaaacaggagatgaaaagcatggtgataagaagactggatggcaccacatgggatagggggaaagtagttgaaaaaaaatagttgtaaggaaaagagatacaaggagtcaaaaataacaaatatctacttaaaagccttttccacatttaatgttttttgttcactgtggtgtagtaataaatgtctatacttaaggggtgaggattgatatatttaaagtgaatggtctggaaggcaaggaagctcattccaacagattcatgctacattgtttagtgacaaataaggggaacagaacagagaaagtgatttcagctataaatataggagataataaaatcctttagtaaacagtatctaagccttgtttttatgatattggggaacagtaacagatcaaagtactgtagtcttcagtatgcagacctttcactttcttagtttattccagggtcttttttttttttgctgctattacaaatagcattgttttcctaatttttgtttaagatagttcatcgttggtatagaaatgccattgatttttgtatgttgattttgtatcctccaactttactgaatttattagttctaacagttttttgatggagtctttagggttttctatgtataagattatgtcatctgcaaacagcaacaattttaccctttgttttcaacgtgagcgtcttttatttatttttcttgcctaattgctttagctaggacttccagcactaaattgaatagaagtgatgagagtgggcatgtatgccttgtttctggtcttaaagaaaaacatttcagttttccattattcggtataatgttagttatgggtttttaaaaatatatatgacctttattaggttgaggtacttttcctctattcttagtttattgaatgtttttctcatgaaagtgtgttaaattttgtcaaaaccttttttacatccatcaaatgattatgtaatttttatcctttattctgttaatggattatcacattaactaattttcatatcttgaagcatacttgcatcctaggaataaatcccactttgtcatagtctttgatccttttaatataatgttaaatttggtttgccagtattttgttgaggatttttgcatctatatattcatcaaggatattgggctgtaattttcttttcttgtggtgtctttgtccggctttagtataaaggtaattctggcttcataaaataagttagaaagtgttctctcttctttgatttttttggaagagtttgagaataattggcattagttttgttaaatgtttggttgaattcactagtgaaattatttggtcctgggattttctttactgggagttttttgattacttgttcaatctttacgctagtcataggtctgtccagtctttgtatttcttcatgatttagtcatcatgtattcatgggttgtaagacttaatattcttaaaatgcccatattacccaaagtgatctatagattcatgcaatccccatcaaaaatcccagtggcatttttatttacagaaatagaataattctaaaattcatctgaagccacaaaagacaatgaataaacaaatcaatcttgaaaaagaagaacaaagctggaggcattatacttcctgatttcaaaatatcctgcaaaggtacagtaatcaaaacagtatgttaccagcataaagacaaacacacagaccaatagaacagaatagagagctcagcaacaaatccgtgaatatacagtcaactgacatttggcaatggtgccaagcatactcagtgggagaaatgataatctcttcaacaaatggtgttgggaaaactgaatatccacatgcaaaagaataaaattggaccctatcttataccaaaaatcaactcaaaatggattatttaaatgtaagacttgaaacagtaaaactcctagaagtaaacagaagagaaagtttcatgacattgcccttggcaatgatttcatgtacataacaacaaaagcacaggtaataaaaacaaaaatagacaaatgggactacctcaaattaaaatgtttctgcacagcaaacgaccaactgaatgaaaaggcaatctatggaacagaagacacggggtgacatgagaccactttggcaaatcagaatgctcattccatttggccaccatgattggttttagaaatggacttgaagctcaaagaaagcccataatatattccttaagatttgaatatagaggctggaagaaagatttttttctttctctaggatgacaagttatatataataagcctgtaggccaatatctgctggcagccacctttcccaggtatatggatgaaactatctgaaggatgaagcctccattcacagaaaatcagagctgtaaagggaagaggatatcctgatgaatttttttcttggattgagccatgtctgaagtcaagccaacttttgaagtatcctatagtacttatatattgcttggtaacaaattatgccaaaatttagtagcttaaaacaacaaacatctattatctcatgcatttctgatatagatataggagtgactaatctgggtggttctgggtcagaatctctggtgagtgtgtaggcaaggtgtcagtagggggctgcaattatctaaaggcttgcctggggctggagacgcactttcaatgtggtgtactcacgtggctgttggttggaggccaaatgtgctaggcaaagcctcatgcacatttctctgtaaggaaacaaagctggcttacttgggggcaggatttttttttttcccagttgttcttcaaaatgaagtttcccgctccaagtcccagccagatatgtgaaaaacaatccttgcagaacaaccctattagcagttctgcaaggatttttaggaaccgtattagcaagttcctcagttcctcaccatgtgaacctctcttcacgacttagtaactggcttcctctagagtgactaatccaagagacagcaaggattgacagccatgacagcacagtgcctttcatgacttactctccaaagttacaaacctttacttttgctttatcttatttgttagagcaagtcactaaatttgcccacatctaagatgagggtatttgggcttcacctcttgaatggagaagcacccaaaaatctgtggcctttttttttaattacactctcagttacatgaatcaataaattccatttttggcttagcttctattgggtttctatcacttgcaaccaaagtgccctaaccagtatctacatctgagtcattaagaaagtttcagacagggctgggcgcggtggctcacacctgttaatcccagactttgggaggccgaggcaggcggatcacgtggtcaggagatcgagaccatcctggctaacacggtgaaaccttatctctactaaaaatacaaaaaattagccgggtgtggtggcaggtgcctgaagtcccagctactcgggaggctgaggcaggggaatggcgtgaacccgggagacggagcttgcagtgagccgagatcacgccactgcgctccagcctgggcgacagagtgagactcagcttcaaaaaaaaaaaaaaaaaagaaagtttcagatattattgtttattgcttttaatctagtgaattcataaatcgtcacttaactcaagcaaaacaatgttactctctttgtacattgtacagatgcaggataacaatgcagtgttatcctgcatctgtacaatcaagcacccaaactggttctgtagaggcaggaccttagcatatagcagagataacttatcttccagcagatccggagctccattttgtagacagaaatgaatgctctgtgccacagaaggagctgttgcactattcattcccgtttcctcccattcactctccacatctccaatcctggcattgtctgctttgttacttgttaaaaacttgatttcgtagattgctttaaaataagaacaaaatgtactttgacacacatcattttgtttggttctcattaattttgagagaaaggcaagatagatatttaaatgacccctattttagtggtaaacaagctgaaattagataaataaaatgatttgcctaatgc

SEQ ID NO: 138779 - DNA, 2648 bp, Homo sapiens; identical to SEQ ID NO: 138776
  Payload ID: 7186
  Gene Symbol: GREM1
  Gene Name: Gremlin 1, DAN family BMP antagonist
  ENST ID: ENST00000632478
  CDS Start-End: 160-591

SEQ ID NO: 138780 - DNA, 623 bp, Homo sapiens; identical to SEQ ID NO: 138777
  Payload ID: 7186
  Gene Symbol: GREM1
  Gene Name: Gremlin 1, DAN family BMP antagonist
  ENST ID: ENST00000633992
  CDS Start-End: 160-288

SEQ ID NO: 138781 - DNA, 14606 bp, Homo sapiens; identical to SEQ ID NO: 138778
  Payload ID: 7186
  Gene Symbol: GREM1
  Gene Name: Gremlin 1, DAN family BMP antagonist
  ENST ID: ENST00000632802
  CDS Start-End: 190-744

SEQ ID NO: 138782 - DNA, 4170 bp, Homo sapiens
  Payload ID: 7187
  Gene Symbol: GREM2
  Gene Name: gremlin 2, DAN family BMP antagonist
  Uniprot ID: Q9H772
  ENST ID: ENST00000318160
  CDS Start-End: 268-774
aagtctccgggctcctttcacatctgcaggagcagccagcctgggaccgcgcggcgcggggcgcgctctcgcctctcctgcaccctcagccggcgcgcttctcttatgggcgtctgctgcagtctggctgcggtcgaactgaaagcggcggcgggagaccaaacttagaccccgctgtggactagagaactcagagaaggcagagggagagggagagagagagagagaagggacccgaggaggaggcttccatcacgtcattgcaggatgttctggaagctttccctgtccttgttcctggtggcggtgctggtgaaggtggcggaagcccggaagaaccggccggcgggcgccatcccctcgccttacaaggacggcagcagcaacaactcggagagatggcagcaccagatcaaggaggtgctggcctccagccaggaggccctggtggtcaccgagcgcaagtacctcaagagtgactggtgcaagacgcagccgctgcggcagacggtgagcgaggagggctgccggagccgcaccatcctcaaccgcttctgctacggccagtgcaactccttctacatcccgcggcacgtgaagaaggaggaggagtccttccagtcctgcgccttctgcaagccccagcgcgtcacctccgtcctcgtggagctcgagtgccccggcctggacccacccttccgactcaagaaaatccagaaggtgaagcagtgccggtgcatgtccgtgaacctgagcgactcggacaagcagtgagcgccgggccggacgcagctcagccccgcgcgcgcccggccgctgggtggcgccgccgccgcctctgtccctgccctccgagcccactgtcacgctgcctggtgttccccctcagcagcaagcacttctcttagggctgacggtgtccttgtcacagacgtggatcgcaagtggagcttttgctgatgtgttcctgaccgaccccgggtcccacctgtgccccctaaaccaggcggtggatcaggcccgaaggaaaatgctggaaaaccaccaccgccacccagcagtcagagaggacctttcgaggtgatgcactgtaaatccggcattgatgtttccaccatgtggaaaagcaaggatttccctggccccgccctgcactccagctcgcccctttcccgcgcgaagtgaaggatgcgtcacttttctgagcggcccctcagacctctcctgctggtccctggacctctggctgggagcgctcattcttgtgactggcaggctgccctcggtcgctgctgtgatgaggatatgtgcaacctccataaatatgtcggtggacggggcgtctcctaataaacctgataccaagaagacaacttgagccacttggatcccgaagtgggcttcccgggaaacctcgagcagagcaggctacacaatcccccatcctcaagtccccaccgcctcttcttcctcactgtccccgccccctatttgtggactaaagatgaactctggtgtgcatgctattattgctgcaattagaatattatcacacacaaaggtctctatattaacgctggttttataagtgaccgtatattgtaaagagctgttaaaaagtattatagacctattcatgtattatttcacatgttttgactctggcttgcagcaccattcggagtaaggatgacagcaggcccagaaggtgtcttactcagaaaaaaaaatgcctggtcagcaattcactgtcatgcacctatttttagattgggcagggagatgggaggagtcgtgatttttactttgaatactatttcactgacgttactaagcattgcagcacaatgtagaaattggcttgggatggataggtatagggaagggcattcgttgggaaattgatgaccggaaactagaaagcccctataatgtggaatatgcatatgtggggtgaaaccgtatactactttcactgccatgacactaggcaaaaaatatttcctgttaaaagaaagagaaaaagagagggatattgaaaaatataaggagttgagtcgctttgtggtatagaagggagtaaggaataaaagatatagaatagtaatctagttgaactgttctgcacaaaacatgcttccttttcaaagaatagacttcaaaagggacgaacaaacattaggtcaccttttgtgtttataatgaattgttgacgtttccatgctgtggtctcttgatatacggaagtagacgtaacttattttccagcgaaattatatacttcttctgggctcctttgctcagttgccccaggaaggcttccctgtgagtaatgcttatggaatctgacaaatgtgaatgagctgccattggtgggaatcagtaaactttgaaaacctttcactgatgattccctggtaagtgctcctgtgaggggccacttccctagtatgtgagagagaccctctgcaagccgctgtggggacttagcttcctgatactaggtagtgatggtggatctagagacattcacttgaagagcaaggattggggtggggtgggttggtgaatctatctcaggccactgcactgcaaggtgcatttctgtcatttctgcaacaccatgagacctgagcaagaatgtgctgtggcagagggggtcttggtttcataaatgggtatatacagcctgaactcaggaggcagaaatcaaaagaaatccttgagggctggaacctgaggatagagcgaaaatggagagaagggtgttcaaggtcaggagtgatttttgcatttggtggaaaacctcaagtcagactcagtggcagaacatgcagcagaaaagctgtgaaggaaggaaatttacgtgattgtaatggaggctaggggtggattgggaggtgagtggaggagagtctctgaccagctgcagagccaacccctatcattttattaacatggaacccacacagataggggagggattaagctaagaacttacagaatgcaaacacgagcacactctcttcgaacccaattgtgggtgtagcaatgaaagcaatatgatatgctgcagtgtgaagctccttctggggttatcgtatgtacaaagtttaccttataatggctcaaattgtatttaatttttttgttttgtttataaatgaagaaaagctataagtataatgtaattattttataggtatactattaaattatagaacaaataaagataatctaggattatatgtgatcccggtgtgacgtgccataaaagtggaatttttgacttgttgcagtgagctgtgaagcagcactatgcgttcagagagtttttgttcaaccatggtgagttcaacctctagcttatgtcacatgatctcctttggggtctggaatcttctaagagaaatagaatcaggcatccaaggagcagaagtgatggaggtggccctcaatcctggtctttggaagcttccaagcctcttccacatcccctgccagctgaagacagagtattctcactgtgctggctgaaggagaaacactaaacaaggaaaccttgagaaactgcagcaatggaagtccactgttagtctctccgttagcaccagggacacacttgttctgagttttgttcattttcacatttactcctcatgagttccaacatttcttaatttaaatatttcttagtttatagcatctccatttttctattaattgacttaatctgccatttaagaaaactccgtaatcaataaaaaataaaatccacaatcaaactgcacatggttgatccactgtgtaggcttcaaaggaattaaactcaacttcctaggaaataattcatcttagtttattaaatgggacagaatatttcactgctaacgtattctaactcacttgtttttgaaattggccagatgatttttaagttataaagtcaatgaaaatgacttttgctattgtgtgaacaacttagaatgtatatattcccagaaggcttatttaatgattgacctatcaccactgattattaatgtctgcatgaatgataacaataagaccaagtcatcaataatgcaatgaaaattttttaagtgaaagcaagtttattaagaaagtaaaggaataaagaatgcctacttcataggcagagcagcctaa

SEQ ID NO: 138783 - DNA, 6666 bp, Homo sapiens
  Payload ID: 7188
  Gene Symbol: GRSF1
  Gene Name: G-rich RNA sequence binding factor 1
  Uniprot ID: Q12849
  ENST ID: ENST00000254799
  CDS Start-End: 119-1561
agtgcccgcggcgcatgtgccaggcacaccccacccccaaccggccctggattccacttccgttccaccatcgctgctggagcagctgccttcaggccctgcgccgcctccggagtccatggccggcacgcgctgggtactcggggcgctgctccggggctgcggctgtaactgcagcagctgccggcgcaccggcgccgcctgcctgcccttctactccgccgctggctctatcccgtcgggcgtctcgggccgccgccgcctgctgctgctgctcggggccgccgcggccgctgcctcccagacgcgtggcctccagaccgggcctgtgcctcccgggaggctggcggggcctcccgctgtggccacctctgccgcggccgcggccgccgcgtcctactctgccctccgtgcctctctgctgccgcagtcgctggcggcggcggccgccgtcccgacgcgcagctacagccaggagtccaaaactacttacctggaagaccttccaccaccccctgagtatgaattggccccgtccaagttagaagaggaagtggatgatgtctttctcattcgagctcaaggactgccctggtcatgcactatggaagatgtgcttaactttttttcagactgcagaatccgcaacggtgagaatggaatacattttctcctaaacagagatgggaaacgaaggggtgatgccttaattgaaatggagtcagagcaggatgtgcagaaagccttagagaagcaccgcatgtacatgggccagcggtatgtggaagtatatgagataaacaatgaagatgtggatgccttaatgaagagcttgcaggtcaaatcttcgcctgtggtaaatgatggtgtggttcgtttgagaggacttccttatagttgcaatgagaaagacattgtagacttctttgcaggactgaatatagttgacattacttttgtgatggactatagagggaggcgaaaaacaggggaagcctatgtgcaatttgaagaaccagaaatggccaaccaagccctgttgaaacacagggaagaaattggtaatcgatacatcgagatatttccaagcagaaggaatgaagttcgaacacatgtcggttcttataagggaaagaaaatcgcatcttttcctactgctaagtatataactgagccagaaatggtctttgaagaacatgaagtaaatgaggatattcaacccatgacagcttttgaaagtgagaaggaaatagaattgcctaaggaggtgccagaaaagcttccagaggctgctgattttggaactacgtcttctctgcattttgtccacatgagaggattacctttccaagccaatgcccaagacattataaacttttttgctccactcaagcctgttagaatcaccatggaatacagctccagtgggaaggccactggagaagctgatgtgcactttgagacccatgaggatgctgttgcagcgatgctcaaggatcggtcccacgttcatcataggtatattgaactgttcctgaattcatgtccaaaaggaaaataagactctaggggctccagataataagggtgaagcaagaagcatttcatttgcacatctttcttggacttgggatatacagttccagtttattagcagcaactgctagggaaatgattttggtgttttgggttaattgcttctaagaaaagtttcatagtggactgtttagaagaagaaatgaaagatccagtttgggattatgaaataaaccacaaattaaaatttttgtttaaactgtccaggatctgatttaaaaatatggtctttgttttatatgattaaatggtttgttttcatagatgatatgttactcattgtaaagaccacatatttttattcagcagtgttctttaaacggtttcatttaaaaagtaactttttttttttgcctgtgaattgagtgctctgatgtaaaacttctcatggagtgaaacagtgatttattttaaccaaacattcaccaaagcaaagaacggtttcagacctttgaactggtatggtttggcagaatagttttaaattttgctgtatttgattacttagagataggaatttttaaaaatcaaaacaaaaaataccacagcttagtgtaaatgacaatttggcggttttatgtctttagaaatgttttgcctttctaagccttgtgctaaaggcgtataacggtggtgcctatctacttaagggggcattctagtcttaacttaaaagttgtctaaactgtccctccctggctttttttggtttggggtagacctaagggtgtttgttagtctcaaaactgtgaagtgacatgtcagaacagtccagactggtaagaaaattaatggcttcacttgaatttaaaccagctctagataggaaaaaaatcagtctcctcatttgctttttaaatggagtagtacatcccatattttagaacaagtaggggtgccttgcttaaataaaaatagcatttaatgtataattgtgtgaagggtttatggataaagctgtacttctgtcacaatgtggcagtactttctgctttaatattaaacagcttgttatttaaatattggacaaaatggctggcttcaaaatatagtcattaataaactaactttatgtgcacctgtgtaggagaatcaaaatcctgtatgctttctttgccttgttcctgttctcagggtgacgactgccaccaggagatgcagttctagttcttaaaattaaatttgcccaggtttctgacaggtgatacctggaagagagactatgtcttctcttacttaatacataaccatctttgattaccagctaagatgcgaaatcactgtactgtagtcaataaatgaagacttgtttcaggctgaagattacctaagagtatttattattggagtctgtgagtcaactgaatatattattacctcaagtcctgctatattaatataagtagtaagggttaattttcgtgtgtgtgttctctaaaatcctgtgaacatgacttaaccagcttaacatcatcagtagtactgcctagatggaaatgcgttttcatatatggttgaatatgccaagctatgagaactggtatctgtagttgtacgaactattagaatgtgatctttgttgctctttcacatttggtatctgatttgctgtggaaaagatctgtggggcctactgtgaggaattcatctgcaattgatttaagctaatgagttttatttgcacatctctggaaaaagaatgcaagcaaagcattaaaatgctatatgatggatgggtaaggttgaaaggatatatcttcttggcacgctacaggctgagttttctgtacaaaatgtggccattattgggaaatcattttatgtatttgaatgctcccttttgtttttgttcatgatctaggctagtacgtaagtgattgctaaggtggatgtagttatgggaaaggaagagaagcacataatacagtaaaagtaatcttatttccatgcaagtggaagacggtaccgtctccccacatttgagaagactgttttgcatcactctttgctattgaaggaagcagtgatggtgaatttccttctgtttgggttccttgtgtctataacttcctttgtggtaaagccatcaggaagaatagtgggagtggggcatatggtcagggtgctcatatcctgctttagcctagctgctgcttacggagtgcaagggagaactctgagaagcagtatgtaaataccagggagctgattgctgaatattgtggtctcatctgaatattgtggtctcatctaaatattgacaccaggcaatgaagcagaaatagagtatgtgtccctttatgcgtgggtaacttaagcttctgtcatgtgggaagggggaccgaatcttccctgggaggaaggctccaaattctcactacttctgtgttacttgaagggggaagcataaggaacccagtttgaaggcaacattgtgtgccatgaatctgcttattaatcaacatgccttgttaatgtcctctgccctgaacagcccttactcagttctcatttggaaagttattttttggggttacatcctgtttgtttcagaatttaaaaccctccatggtgggtcacttgaggtcaggagttcaagattagcctggccaacttagtgaaactccggctctactgaaaatgcaaaaattagccaggtgtggcacacgcctgtaatcccagttacttgggaggccaaggcaggagaatcgcttgaacctgggaggcagaggttgtagcgagccaagatcacaccattgcactccagcctgggcaacagagtgagactctgtcaaaatcaaaaaaaccaaaatacaaaaaactccattgttctgagagtttcccctaaattatcggaagacactcacattgaattggtaggacctatagtatagaggagaatggtatgtatgtcagcagtagagttccaatccaaattgcgctatcgcattagaaatacattaccctcccactccccaagttcagcaaattagaagagaatctgaagtttgtaggaagggaataaagctgctataaacatttatgtgcaggtttttgtgtagactcgttttcagctcctttgggtaaataccaaggaaccaggttgctggattgtaagttaagagtatgtttagttttggaagaaactgccaaactgttccaacatgactattttgaattcccattgacaatgaataagagttcctgtagctcctcaccctcattagtatttggtgatgtcactcttgcattttagctaatgggtgaatagtggtctcatcgttttaattcccaatcccatagtgatgtggagcaccttttcatatacttaatctgccatccttatatcatcattggtgaggtgtctggattttctgtccagaattttagttctagtggttttcttatttttagaaaggaagtataggaaggaaggtttaatctgtcttaagcctgattatatgaaaatcaagaataggctaggtgtggtggctgacatctgtaatccccgcactttgtgaggctgaagtgggaggactgcttgagcctgggaagtcaagcctgcagtgagccatgactgttgctgcactccagcctgagtgacagagtgagaccctgtctcagaaaaaaaaaaagcaggctcattttaaagttgtttatattttattttttgaaggaaataaacttgaagagatacaaacggtagtgaagattctccttcccctcctgtaattcagctgtttagtttctattctcgcacagccctgttatcagtttctagtgtaagcttgcagtgacttttactttatttataagcaagtgttagtgggtgttgtcatttcttttaaaaatataaattatactgtacatgctattttgtattttggcttttctcccacctaaacaccctaaagatcattttctgtcagtatataaaatcttggtgatgccaatacccatcccttagattgtacaagcagcattttgccatgctttatcccatagcctgcctcctgcagtctcatctttttttctatatgcatgtccaagtaagttgtagacatttttcacttttaatcctttcagcatacatgtcatgggaatttgtttttgtttttgttttttgtgtttgagacagtcgctctgtcacccaggctggagttatagtgacgtgatcccagctcattacagcctccacctcccagtttcaagcaattctcatgcctcagattcccgagtagctgggattacagatgtgcaccaccacgcctgactaatttttgtatttttagtagagatggggtttcatcatgttggccaggctggtctggaactcctggcctccagtcatttgcctgcctcggcctcccaaagtgctgggattacaggcatcagccaccacacccagccgtcattggagtttttttgagggagatttgcagtaaggtgaataaatgttaagtgtatcatttgatgaggttttttctttttttttttttttttttgagatggagtcttgtatcgcccaggctagagtgcagtggcctggtcttggctcactgcaacctccacctcctgggttcaagggagtctcctgcctcagcctcccgagtagctgggattacaggtgtgagccaccatacccagactcatttgatgagttttgatgtaaaagcatgtaactcaaacccctatgtctggaacatctgtattacatctgaattttttcacctagtcaattcctgcacctctctctcctgtcccttcttccctcccctggcagtcagctactgttaggattttgttcactgtagattaattttgcctattctagaacttcatataacggactcacttatgcagtatgtattctgtaagttccttttactcagcatgtttgtatgttcatcagtgtgtttaagctttgttcctttttatggctgagcagtgttctatgtatgaatgccacattttaacgtttcacctgttaggtgaacaactaactggtgaacaatgggctgtttctagtttggggctatcatgaataaagttggtatgaacatgtacaac

SEQ ID NO: 138784 - DNA, 1765 bp, Homo sapiens
  Payload ID: 7188
  Gene Symbol: GRSF1
  Gene Name: G-rich RNA sequence binding factor 1
  ENST ID: ENST00000514161
  CDS Start-End: 1-1253
acccgcccccgtccaccctgtgctcctattgggccctggaacaagggaagctctcccaggcgtcgggtcttctgcttgttttgttctcgcctcgagtctctggtcggttgggcagtgtaagtgtggctggggtgaatgttgaggccttgttccccgcctggcccatggagtccaaaactacttacctggaagaccttccaccaccccctgagtatgaattggccccgtccaagttagaagaggaagtggatgatgtctttctcattcgagctcaaggactgccctggtcatgcactatggaagatgtgcttaactttttttcagactgcagaatccgcaacggtgagaatggaatacattttctcctaaacagagatgggaaacgaaggggtgatgccttaattgaaatggagtcagagcaggatgtgcagaaagccttagagaagcaccgcatgtacatgggccagcggtatgtggaagtatatgagataaacaatgaagatgtggatgccttaatgaagagcttgcaggtcaaatcttcgcctgtggtaaatgatggtgtggttcgtttgagaggacttccttatagttgcaatgagaaagacattgtagacttctttgcaggactgaatatagttgacattacttttgtgatggactatagagggaggcgaaaaacaggggaagcctatgtgcaatttgaagaaccagaaatggccaaccaagccctgttgaaacacagggaagaaattggtaatcgatacatcgagatatttccaagcagaaggaatgaagttcgaacacatgtcggttcttataagggaaagaaaatcgcatcttttcctactgctaagtatataactgagccagaaatggtctttgaagaacatgaagtaaatgaggatattcaacccatgacagcttttgaaagtgagaaggaaatagaattgcctaaggaggtgccagaaaagcttccagaggctgctgattttggaactacgtcttctctgcattttgtccacatgagaggattacctttccaagccaatgcccaagacattataaacttttttgctccactcaagcctgttagaatcaccatggaatacagctccagtgggaaggccactggagaagctgatgtgcactttgagacccatgaggatgctgttgcagcgatgctcaaggatcggtcccacgttcatcataggtatattgaactgttcctgaattcatgtccaaaaggaaaataagactctaggggctccagataataagggtgaagcaagaagcatttcatttgcacatctttcttggacttgggatatacagttccagtttattagcagcaactgctagggaaatgattttggtgttttgggttaattgcttctaagaaaagtttcatagtggactgtttagaagaagaaatgaaagatccagtttgggattatgaaataaaccacaaattaaaatttttgtttaaactgtccaggatctgatttaaaaatatggtctttgttttatatgattaaatggtttgttttcatagatgatatgttactcattgtaaagaccacatatttttattcagcagtgttctttaaacggtttcatttaaaaagtaactttttttttttgcctgtgaattgagtgctctgatgtaaaacttctcatggagtgaaacagtgatttattttaaccaaacattcaccaaagcaaagaacggtttcagacctttgaactggtatggtttggcagaata

SEQ ID NO: 138785 - DNA, 1794 bp, Homo sapiens
  Payload ID: 7188
  Gene Symbol: GRSF1
  Gene Name: G-rich RNA sequence binding factor 1
  Uniprot ID: Q12849
  ENST ID: ENST00000502323
  CDS Start-End: 263-1219
gcacacagttgcgtgggctggcttgtagggaaggagcctgtccccatcgcgccgttccctctcctgtccccagggaaagacgagctgtcccggtttactgaaggtcacctctgcaactccactcatacagaaggagtccaaaactacttacctggaagaccttccaccaccccctgagtatgaattggccccgtccaagttagaagaggaagtggatgatgtctttctcattcgagctcaaggactgccctggtcatgcactatggaagatgtgcttaactttttttcagactgcagaatccgcaacggtgagaatggaatacattttctcctaaacagagatgggaaacgaaggggtgatgccttaattgaaatggagtcagagcaggatgtgcagaaagccttagagaagcaccgcatgtacatgggccagcggtatgtggaagtatatgagataaacaatgaagatgtggatgccttaatgaagagcttgcaggtcaaatcttcgcctgtggtaaatgatggtgtggttcgtttgagaggacttccttatagttgcaatgagaaagacattgtagacttctttgcaggactgaatatagttgacattacttttgtgatggactatagagggaggcgaaaaacaggggaagcctatgtgcaatttgaagaaccagaaatggccaaccaagccctgttgaaacacagggaagaaattggtaatcgatacatcgagatatttccaagcagaaggaatgaagttcgaacacatgtcggttcttataagggaaagaaaatcgcatcttttcctactgctaagtatataactgagccagaaatggtctttgaagaacatgaagtaaatgaggatattcaacccatgacagcttttgaaagtgagaaggaaatagaattgcctaaggaggtgccagaaaagcttccagaggctgctgattttggaactacgtcttctctgcattttgtccacatgagaggattacctttccaagccaatgcccaagacattataaacttttttgctccactcaagcctgttagaatcaccatggaatacagctccagtgggaaggccactggagaagctgatgtgcactttgagacccatgaggatgctgttgcagcgatgctcaaggatcggtcccacgttcatcataggtatattgaactgttcctgaattcatgtccaaaaggaaaataagactctaggggctccagataataagggtgaagcaagaagcatttcatttgcacatctttcttggacttgggatatacagttccagtttattagcagcaactgctagggaaatgattttggtgttttgggttaattgcttctaagaaaagtttcatagtggactgtttagaagaagaaatgaaagatccagtttgggattatgaaataaaccacaaattaaaatttttgtttaaactgtccaggatctgatttaaaaatatggtctttgttttatatgattaaatggtttgttttcatagatgatatgttactcattgtaaagaccacatatttttattcagcagtgttctttaaacggtttcatttaaaaagtaactttttttttttgcctgtgaattgagtgctctgatgtaaaacttctcatggagtgaaacagtgatttattttaaccaaacattcaccaaagcaaagaacggtttcagacctttgaactggtatggtttggcagaatagttttaaattttgctgtatttgattacttagagataggaatttttaaaaatcaaaacaaaaaa

SEQ ID NO: 138786 - DNA, 2491 bp, Homo sapiens
  Payload ID: 7188
  Gene Symbol: GRSF1
  Gene Name: G-rich RNA sequence binding factor 1
  ENST ID: ENST00000499044
  CDS Start-End: 1-1362
gcggccgccgtcccgacgcgcagctacagccaggtacgtgggcgccgtgagggacctggcgcgagatccctcccgggccgcgtgcacgcgcccccgcgcccctccgtccctccgtgtgcgcctcgcgggcacgcccggggatccgcgacactcgccgcacacccgcccccgtccaccctgtgctcctattgggccctggaacaagggaagctctcccaggcgtcgggtcttctgcttgttttgttctcgcctcgagtctctggtcggttgggcagtgagtccaaaactacttacctggaagaccttccaccaccccctgagtatgaattggccccgtccaagttagaagaggaagtggatgatgtctttctcattcgagctcaaggactgccctggtcatgcactatggaagatgtgcttaactttttttcagactgcagaatccgcaacggtgagaatggaatacattttctcctaaacagagatgggaaacgaaggggtgatgccttaattgaaatggagtcagagcaggatgtgcagaaagccttagagaagcaccgcatgtacatgggccagcggtatgtggaagtatatgagataaacaatgaagatgtggatgccttaatgaagagcttgcaggtcaaatcttcgcctgtggtaaatgatggtgtggttcgtttgagaggacttccttatagttgcaatgagaaagacattgtagacttctttgcaggactgaatatagttgacattacttttgtgatggactatagagggaggcgaaaaacaggggaagcctatgtgcaatttgaagaaccagaaatggccaaccaagccctgttgaaacacagggaagaaattggtaatcgatacatcgagatatttccaagcagaaggaatgaagttcgaacacatgtcggttcttataagggaaagaaaatcgcatcttttcctactgctaagtatataactgagccagaaatggtctttgaagaacatgaagtaaatgaggatattcaacccatgacagcttttgaaagtgagaaggaaatagaattgcctaaggaggtgccagaaaagcttccagaggctgctgattttggaactacgtcttctctgcattttgtccacatgagaggattacctttccaagccaatgcccaagacattataaacttttttgctccactcaagcctgttagaatcaccatggaatacagctccagtgggaaggccactggagaagctgatgtgcactttgagacccatgaggatgctgttgcagcgatgctcaaggatcggtcccacgttcatcataggtatattgaactgttcctgaattcatgtccaaaaggaaaataagactctaggggctccagataataagggtgaagcaagaagcatttcatttgcacatctttcttggacttgggatatacagttccagtttattagcagcaactgctagggaaatgattttggtgttttgggttaattgcttctaagaaaagtttcatagtggactgtttagaagaagaaatgaaagatccagtttgggattatgaaataaaccacaaattaaaatttttgtttaaactgtccaggatctgatttaaaaatatggtctttgttttatatgattaaatggtttgttttcatagatgatatgttactcattgtaaagaccacatatttttattcagcagtgttctttaaacggtttcatttaaaaagtaactttttttttttgcctgtgaattgagtgctctgatgtaaaacttctcatggagtgaaacagtgatttattttaaccaaacattcaccaaagcaaagaacggtttcagacctttgaactggtatggtttggcagaatagttttaaattttgctgtatttgattacttagagataggaatttttaaaaatcaaaacaaaaaataccacagcttagtgtaaatgacaatttggcggttttatgtctttagaaatgttttgcctttctaagccttgtgctaaaggcgtataacggtggtgcctatctacttaagggggcattctagtcttaacttaaaagttgtctaaactgtccctccctggctttttttggtttggggtagacctaagggtgtttgttagtctcaaaactgtgaagtgacatgtcagaacagtccagactggtaagaaaattaatggcttcacttgaatttaaaccagctctagataggaaaaaaatcagtctcctcatttgctttttaaatggagtagtacatcccatattttagaacaagtaggggtgccttgcttaaataaaaatagcatttaatgtataattgtgtgaagggtttatggataaagctgtacttctgtcacaatgtggcagtactttctgctttaatattaaacagcttgttatttaaatattggacaaaatggctggcttcaaaatatagtcattaataaactaactttatgtgcacctgtgtaggagaatc

SEQ ID NO: 138787 - DNA, 925 bp, Homo sapiens
  Payload ID: 7188
  Gene Symbol: GRSF1
  Gene Name: G-rich RNA sequence binding factor 1
  ENST ID: ENST00000506453
  CDS Start-End: 1-345
aaacgaaggggtgatgccttaattgaaatggagtcagagcaggatgtgcagaaagccttagagaagcaccgcatgtacatgggccagcggtatgtggaagtatatgagataaacaatgaagatgtggatgccttaatgaagagcttgcaggtcaaatcttcgcctgtggtaaatgatggtgtggttcgtttgagaggacttccttatagttgcaatgagaaagacattgtagacttctttgcagatacatcgagatatttccaagcagaaggaatgaagttcgaacacatgtcggttcttataagggaaagaaaatcgcatcttttcctactgctaagtatataactgagccagaaatggtctttgaagaacatgaagtaaatgaggatattcaacccatgacagcttttgaaagtgagaaggaaatagaattgcctaaggaggtgccagaaaagcttccagaggctgctgattttggaactacgtcttctctgcattttgtccacatgagaggattacctttccaagccaatgcccaagacattataaacttttttgctccactcaagcctgttagaatcaccatggaatacagctccagtgggaaggccactggagaagctgatgtgcactttgagacccatgaggatgctgttgcagcgatgctcaaggatcggtcccacgttcatcataggtatattgaactgttcctgaattcatgtccaaaaggaaaataagactctaggggctccagataataagggtgaagcaagaagcatttcatttgcacatctttcttggacttgggatatacagttccagtttattagcagcaactgctagggaaatgattttggtgttttgggttaattgcttctaagaaaagtttcatagtggactgtttagaagaagaaatgaaagatcc

SEQ ID NO: 138788 - DNA, 2682 bp, Homo sapiens
  Payload ID: 7188
  Gene Symbol: GRSF1
  Gene Name: G-rich RNA sequence binding factor 1
  ENST ID: ENST00000545193
  CDS Start-End: 54-1328
caccatcgctgctggagcagctgccttcaggccctgcgccgcctccggagtccatggccggcacgcgctgggtactcggggcgctgctccggggctgcggctgtaactgcagcagctgccggcgcaccggcgccgcctgcctgcccttctactccgccgcgtcctactctgccctccgtgcctctctgctgccgcagtcgctggcggcggcggccgccgtcccgacgcgcagctacagccaggagtccaaaactacttacctggaagaccttccaccaccccctgagtatgaattggccccgtccaagttagaagaggaagtggatgatgtctttctcattcgagctcaaggactgccctggtcatgcactatggaagatgtgcttaactttttttcagactgcagaatccgcaacggtgagaatggaatacattttctcctaaacagagatgggaaacgaaggggtgatgccttaattgaaatggagtcagagcaggatgtgcagaaagccttagagaagcaccgcatgtacatgggccagcggtatgtggaagtatatgagataaacaatgaagatgtggatgccttaatgaagagcttgcaggtcaaatcttcgcctgtggtaaatgatggtgtggttcgtttgagaggacttccttatagttgcaatgagaaagacattgtagacttctttgcaggactgaatatagttgacattacttttgtgatggactatagagggaggcgaaaaacaggggaagcctatgtgcaatttgaagaaccagaaatggccaaccaagccctgttgaaacacagggaagaaattggtaatcgatacatcgagatatttccaagcagaaggaatgaagttcgaacacatgtcggttcttataagggaaagaaaatcgcatcttttcctactgctaagtatataactgagccagaaatggtctttgaagaacatgaagtaaatgaggatattcaacccatgacagcttttgaaagtgagaaggaaatagaattgcctaaggaggtgccagaaaagcttccagaggctgctgattttggaactacgtcttctctgcattttgtccacatgagaggattacctttccaagccaatgcccaagacattataaacttttttgctccactcaagcctgttagaatcaccatggaatacagctccagtgggaaggccactggagaagctgatgtgcactttgagacccatgaggatgctgttgcagcgatgctcaaggatcggtcccacgttcatcataggtatattgaactgttcctgaattcatgtccaaaaggaaaataagactctaggggctccagataataagggtgaagcaagaagcatttcatttgcacatctttcttggacttgggatatacagttccagtttattagcagcaactgctagggaaatgattttggtgttttgggttaattgcttctaagaaaagtttcatagtggactgtttagaagaagaaatgaaagatccagtttgggattatgaaataaaccacaaattaaaatttttgtttaaactgtccaggatctgatttaaaaatatggtctttgttttatatgattaaatggtttgttttcatagatgatatgttactcattgtaaagaccacatatttttattcagcagtgttctttaaacggtttcatttaaaaagtaactttttttttttgcctgtgaattgagtgctctgatgtaaaacttctcatggagtgaaacagtgatttattttaaccaaacattcaccaaagcaaagaacggtttcagacctttgaactggtatggtttggcagaatagttttaaattttgctgtatttgattacttagagataggaatttttaaaaatcaaaacaaaaaataccacagcttagtgtaaatgacaatttggcggttttatgtctttagaaatgttttgcctttctaagccttgtgctaaaggcgtataacggtggtgcctatctacttaagggggcattctagtcttaacttaaaagttgtctaaactgtccctccctggctttttttggtttggggtagacctaagggtgtttgttagtctcaaaactgtgaagtgacatgtcagaacagtccagactggtaagaaaattaatggcttcacttgaatttaaaccagctctagataggaaaaaaatcagtctcctcatttgctttttaaatggagtagtacatcccatattttagaacaagtaggggtgccttgcttaaataaaaatagcatttaatgtataattgtgtgaagggtttatggataaagctgtacttctgtcacaatgtggcagtactttctgctttaatattaaacagcttgttatttaaatattggacaaaatggctggcttcaaaatatagtcattaataaactaactttatgtgcacctgtgtaggagaatcaaaatcctgtatgctttctttgccttgttcctgttctcagggtgacgactgccaccaggagatgcagttctagttcttaaaattaaatttgcccaggtttctgacaggtgatacctggaagagagactatgtcttctcttacttaatacataaccatctttgattaccagctaagatgcgaaatcactgtactgtagtcaataaatgaagacttgtttcaggctg

SEQ ID NO: 138789 - DNA, 1516 bp, Homo sapiens
  Payload ID: 7189
  Gene Symbol: GCOM1
  Gene Name: GRINL1A complex locus 1
  ENST ID: ENST00000380568
  CDS Start-End: 3-1340
ggatgctgcgctccacgtccacggtcaccctgctctcgggcggcgccgccaggacgcccggggcgcccagcaggagggcaaatgtttgcagactacggctgaccgtacctcctgagagtccagttcctgagcaatgtgaaaagaagattgagagaaaagagcagcttcttgacctgagcaatggagaacctaccaggaaacttcctcagggtgttgtttatggtgtggtgcgaagatcagatcaaaatcagcagaaagaaatggtggtgtatgggtggtccaccagtcagctgaaagaagagatgaactacatcaaagatgtgagagccactttggaaaaggtgagaaagcgaatgtatggagactatgatgagatgagacagaagattcgacagctcacccaggaactatcagtttcccatgctcagcaggagtatctggagaatcacatccaaacccagtcgtctgccctggatcgttttaatgccatgaactcagccttggcatcagattccattggcctgcagaaaaccctcgtggatgtgactttggaaaacagcaacattaaggatcaaatcagaaatctgcagcagacgtatgaagcatccatggacaagctgagggaaaagcagaggcagttggaggtagcgcaagttgaaaaccagctgctaaaaatgaaggtggaatcgtcccaagaagccaatgctgaggtgatgcgagagatgaccaagaagctgtacagccagtatgaggagaagctgcaggaagaacagaggaagcacagtgctgagaaggaggctcttttggaagaaaccaatagttttctgaaagcgattgaagaagccaataaaaagatgcaagcagcagagatcagcctagaggagaaagaccagaggatcggggagctggacaggctgattgagcgcatggaaaaggaacgtcatcaactgcaacttcaactcctagaacatgaaacagaaatgtctggggagttaactgattctgacaaggaaaggtatcagcagttggaggaggcatcagccagcctccgtgagcggatcagacacctagatgacatggtgcattgccagcagaagaaagtcaagcagatggtcgaggagattgaatcattaaagaaaaagttgcaacagaaacagctcttaatactgcagcttttagaaaagatatctttcttagaaggagagaataatgaactacaaagcaggttggactatttaacagaaacccaggccaagaccgaagtggaaaccagagagataggagtgggctgtgatcttctacccaggagatgcaagcaaagctcgcagcgcaaaaattagctgaaagactgaatattaaaatgcggagttataatccagaaggggagtcttcagggagataccgagaagtaagggatgaagatgacgattggtcctctgatgaattctgaagataatctcctaaatcactgacgttgagatgtcatcatcttacatcagactttctaactagtatc

SEQ ID NO: 138790 - DNA, 1846 bp, Homo sapiens
  Payload ID: 7189
  Gene Symbol: GCOM1
  Gene Name: GRINL1A complex locus 1
  ENST ID: ENST00000380569
  CDS Start-End: 128-1780
gcggtgcagctgaggctgcaagtagccggcgccgtcccgcgtcgcccccgcgcagggcgggccccgcacgcttattctgcccgggaggaacgccggcgtccagcccgctaccgaccgccgctgcgggatgctgcgctccacgtccacggtcaccctgctctcgggcggcgccgccaggacgcccggggcgcccagcaggagggcaaatgtttgcagactacggctgaccgtacctcctgagagtccagttcctgagcaatgtgaaaagaagattgagagaaaagagcagcttcttgacctgagcaatggagaacctaccaggaaacttcctcagggtgttgtttatggtgtggtgcgaagatcagatcaaaatcagcagaaagaaatggtggtgtatgggtggtccaccagtcagctgaaagaagagatgaactacatcaaagatgtgagagccactttggaaaaggtgagaaagcgaatgtatggagactatgatgagatgagacagaagattcgacagctcacccaggaactatcagtttcccatgctcagcaggagtatctggagaatcacatccaaacccagtcgtctgccctggatcgttttaatgccatgaactcagccttggcatcagattccattggcctgcagaaaaccctcgtggatgtgactttggaaaacagcaacattaaggatcaaatcagaaatctgcagcagacgtatgaagcatccatggacaagctgagggaaaagcagaggcagttggaggtagcgcaagttgaaaaccagctgctaaaaatgaaggtggaatcgtcccaagaagccaatgctgaggtgatgcgagagatgaccaagaagctgtacagccagtatgaggagaagctgcaggaagaacagaggaagcacagtgctgagaaggaggctcttttggaagaaaccaatagttttctgaaagcgattgaagaagccaataaaaagatgcaagcagcagagatcagcctagaggagaaagaccagaggatcggggagctggacaggctgattgagcgcatggaaaaggaacgtcatcaactgcaacttcaactcctagaacatgaaacagaaatgtctggggagttaactgattctgacaaggaaaggtatcagcagttggaggaggcatcagccagcctccgtgagcggatcagacacctagatgacatggtgcattgccagcagaagaaagtcaagcagatggtcgaggagattgaatcattaaagaaaaagttgcaacagaaacagctcttaatactgcagcttttagaaaagatatctttcttagaaggagagaataatgaactacaaagcaggttggactatttaacagaaacccaggccaagaccgaagtggaaaccagagagataggagtgggctgtgatcttctacccaggttaccttttcgacaaaatgattcatctagtcattgccagaagagtgggtctcctatttcctcagaagagcggcggcgcagggataagcagcatcttgatgacatcacagcagctcggcttctaccacttcaccatatgcccacgcagctgctctccatagaagaatccttggcacttcagaaacagcagaaacagaattatgaggagatgcaagcaaagctcgcagcgcaaaaattagctgaaagactgaatattaaaatgcggagttataatccagaaggggagtcttcagggagataccgagaagtaagggatgaagatgacgattggtcctctgatgaattctgaagataatctcctaaatcactgacgttgagatgtcatcatcttacatcagactttctaactagtatc

SEQ ID NO: 138791 - DNA, 2601 bp, Homo sapiens
  Payload ID: 7189
  Gene Symbol: GCOM1
  Gene Name: GRINL1A complex locus 1
  ENST ID: ENST00000488175
  CDS Start-End: 3-1403
ggatgctgcgctccacgtccacggtcaccctgctctcgggcggcgccgccaggacgcccggggcgcccagcaggagggcaaatgtttgcagactacggctgaccgtacctcctgagagtccagttcctgagcaatgtgaaaagaagattgagagaaaagagcagcttcttgacctgagcaatggagaacctaccaggaaacttcctcagggtgttgtttatggtgtggtgcgaagatcagatcaaaatcagcagaaagaaatggtggtgtatgggtggtccaccagtcagctgaaagaagagatgaactacatcaaagatgtgagagccactttggaaaaggtgagaaagcgaatgtatggagactatgatgagatgagacagaagattcgacagctcacccaggaactatcagtttcccatgctcagcaggagtatctggagaatcacatccaaacccagtcgtctgccctggatcgttttaatgccatgaactcagccttggcatcagattccattggcctgcagaaaaccctcgtggatgtgactttggaaaacagcaacattaaggatcaaatcagaaatctgcagcagacgtatgaagcatccatggacaagctgagggaaaagcagaggcagttggaggtagcgcaagttgaaaaccagctgctaaaaatgaaggtggaatcgtcccaagaagccaatgctgaggtgatgcgagagatgaccaagaagctgtacagccagtatgaggagaagctgcaggaagaacagaggaagcacagtgctgagaaggaggctcttttggaagaaaccaatagttttctgaaagcgattgaagaagccaataaaaagatgcaagcagcagagatcagcctagaggagaaagaccagaggatcggggagctggacaggctgattgagcgcatggaaaaggaacgtcatcaactgcaacttcaactcctagaacatgaaacagaaatgtctggggagttaactgattctgacaaggaaaggtatcagcagttggaggaggcatcagccagcctccgtgagcggatcagacacctagatgacatggtgcattgccagcagaagaaagtcaagcagatggtcgaggagattgaatcattaaagaaaaagttgcaacagaaacagctcttaatactgcagcttttagaaaagatatctttcttagaaggagagaataatgaactacaaagcaggttggactatttaacagaaacccaggccaagaccgaagtggaaaccagagagataggagtgggctgtgatcttctacccagccaaacaggcaggactcgtgaaattgtgatgccttctaggaactacaccccatacacaagagtcctggagttaaccatgaagaaaactctgacttaggcactcagaggcatacactttttacagatggacaaaagctctggaaccctgtggcttcaaatcctttgggaagggtgactgttgtttcccctacacacagtgtaagccggaatgggaatcgctgaggctctgatccacttctaagacaggaaggaaagtgaaggcagagtgagcaggcaaagtagaaaattcgaaaaggtcctcaacgagtttgtacagctgctcccactccctcatcacctcttgtgggcctttggaaatgtatgttggaggagacattttggattgttgcaatgacttgggagtgccatagcacctagcaggcagaagccagaaacaccaaatgtcttaacaatgcttgaggcggtgctacaaatgaagtccttctccaaatgcattgagccccaagaaaaatcgctgattctgaggaaccttccaactttaacaatttcaggacgtccctaagctgagctaggaggcaccacgcacaggccggaggcaccacgcacaggccagagtctcccaaatcctgtcccgcactctctcccaccttattaatggccagctcatctttcaagtttcgacttgaaccacttctcagagatatcttcccaggtgcccatcccaacgttactattatatcataatttgattctccctccccccatccccccgccaactctgtaaaccccaagtataacacaggacgttgctatttgttgactgacacatagtgcttggtgaggtcacgctggcgctgaatactttttgtataaaccgacgaacagctgatgaccgcatgaatgctcacacaaggggaaagggcgccaagccaaggagccggcgtcatccgacgtaacttccgccctttaacgctcctgcggacgcccccttctcccagtccgtgtttgtttccggaatttcaataaagctcgattcggctcgaagaagaccccgttcttccgggaaaatggcgactcccgctcgtgccccggagtcaccgccgtccgcggatccggcgctagtagcggggcctgccgaggaagccgagtgcccgccgccgcgccagcctcagcccgcgcagaatgtgctcgctgccccgcggcttcgagccccaagctcccgaggacttggcgcagcggagtttggtggagctgcgggaaatgttgaagcgccaggagagacttttgcgcaacga

SEQ ID NO: 138792 - DNA, 2275 bp, Homo sapiens
  Payload ID: 7189
  Gene Symbol: GCOM1
  Gene Name: GRINL1A complex locus 1
  ENST ID: ENST00000471563
  CDS Start-End: 3-1196
ggatgctgcgctccacgtccacggtcaccctgctctcgggcggcgccgccaggacgcccggggcgcccagcaggagggcaaatgtttgcagactacggctgaccgtacctcctgagagtccagttcctgagcaatgtgaaaagaagattgagagaaaagagcagcttcttgacctgagcaatggagaacctaccaggaaacttcctcagggtgttgtttatggtgtggtgcgaagatcagatcaaaatcagcagaaagaaatggtggtgtatgggtggtccaccagtcagctgaaagaagagatgaactacatcaaagataaaaccctcgtggatgtgactttggaaaacagcaacattaaggatcaaatcagaaatctgcagcagacgtatgaagcatccatggacaagctgagggaaaagcagaggcagttggaggtagcgcaagttgaaaaccagctgctaaaaatgaaggtggaatcgtcccaagaagccaatgctgaggtgatgcgagagatgaccaagaagctgtacagccagtatgaggagaagctgcaggaagaacagaggaagcacagtgctgagaaggaggctcttttggaagaaaccaatagttttctgaaagcgattgaagaagccaataaaaagatgcaagcagcagagatcagcctagaggagaaagaccagaggatcggggagctggacaggctgattgagcgcatggaaaaggaacgtcatcaactgcaacttcaactcctagaacatgaaacagaaatgtctggggagttaactgattctgacaaggaaaggtatcagcagttggaggaggcatcagccagcctccgtgagcggatcagacacctagatgacatggtgcattgccagcagaagaaagtcaagcagatggtcgaggagattgaatcattaaagaaaaagttgcaacagaaacagctcttaatactgcagcttttagaaaagatatctttcttagaaggagagaataatgaactacaaagcaggttggactatttaacagaaacccaggccaagaccgaagtggaaaccagagagataggagtgggctgtgatcttctacccagccaaacaggcaggactcgtgaaattgtgatgccttctaggaactacaccccatacacaagagtcctggagttaaccatgaagaaaactctgacttaggcactcagaggcatacactttttacagatggacaaaagctctggaaccctgtggcttcaaatcctttgggaagggtgactgttgtttcccctacacacagtgtaagccggaatgggaatcgctgaggctctgatccacttctaagacaggaaggaaagtgaaggcagagtgagcaggcaaagtagaaaattcgaaaaggtcctcaacgagtttgtacagctgctcccactccctcatcacctcttgtgggcctttggaaatgtatgttggaggagacattttggattgttgcaatgacttgggagtgccatagcacctagcaggcagaagccagaaacaccaaatgtcttaacaatgcttgaggcggtgctacaaatgaagtccttctccaaatgcattgagccccaagaaaaatcgctgattctgaggaaccttccaactttaacaatttcaggacgtccctaagctgagctaggaggcaccacgcacaggccggaggcaccacgcacaggccagagtctcccaaatcctgtcccgcactctctcccaccttattaatggccagctcatctttcaagtttcgacttgaaccacttctcagagatatcttcccagtgcttggtgaggtcacgctggcgctgaatactttttgtataaaccgacgaacagctgatgaccgcatgaatgctcacacaaggggaaagggcgccaagccaaggagccggcgtcatccgacgtaacttccgccctttaacgctcctgcggacgcccccttctcccagtccgtgtttgtttccggaatttcaataaagctcgattcggctcgaagaagaccccgttcttccgggaaaatggcgactcccgctcgtgccccggagtcaccgccgtccgcggatccggcgctagtagcggggcctgccgaggaagccgagtgcccgccgccgcgccagcctcagcccgcgcagaatgtgctcgctgccccgcggcttcgagccccaagctcccgaggacttggcgcagcggagtttggtggagctgcgggaaatgttgaagcgccaggagagacttttgcgcaacga

SEQ ID NO: 138793 - DNA, 2508 bp, Homo sapiens
  Payload ID: 7189
  Gene Symbol: GCOM1
  Gene Name: GRINL1A complex locus 1
  ENST ID: ENST00000468886
  CDS Start-End: 3-1310
ggatgctgcgctccacgtccacggtcaccctgctctcgggcggcgccgccaggacgcccggggcgcccagcaggagggcaaatgtttgcagactacggctgaccgtacctcctgagagtccagttcctgagcaatgtgaaaagaagattgagagaaaagagcagcttcttgacctgagcaatggagaacctaccaggaaacttcctcagggtgttgtttatggtgtggtgcgaagatcagatcaaaatcagcagaaagaaatggtggtgtatgggtggtccaccagtcagctgaaagaagagatgaactacatcaaagatgtttcccatgctcagcaggagtatctggagaatcacatccaaacccagtcgtctgccctggatcgttttaatgccatgaactcagccttggcatcagattccattggcctgcagaaaaccctcgtggatgtgactttggaaaacagcaacattaaggatcaaatcagaaatctgcagcagacgtatgaagcatccatggacaagctgagggaaaagcagaggcagttggaggtagcgcaagttgaaaaccagctgctaaaaatgaaggtggaatcgtcccaagaagccaatgctgaggtgatgcgagagatgaccaagaagctgtacagccagtatgaggagaagctgcaggaagaacagaggaagcacagtgctgagaaggaggctcttttggaagaaaccaatagttttctgaaagcgattgaagaagccaataaaaagatgcaagcagcagagatcagcctagaggagaaagaccagaggatcggggagctggacaggctgattgagcgcatggaaaaggaacgtcatcaactgcaacttcaactcctagaacatgaaacagaaatgtctggggagttaactgattctgacaaggaaaggtatcagcagttggaggaggcatcagccagcctccgtgagcggatcagacacctagatgacatggtgcattgccagcagaagaaagtcaagcagatggtcgaggagattgaatcattaaagaaaaagttgcaacagaaacagctcttaatactgcagcttttagaaaagatatctttcttagaaggagagaataatgaactacaaagcaggttggactatttaacagaaacccaggccaagaccgaagtggaaaccagagagataggagtgggctgtgatcttctacccagccaaacaggcaggactcgtgaaattgtgatgccttctaggaactacaccccatacacaagagtcctggagttaaccatgaagaaaactctgacttaggcactcagaggcatacactttttacagatggacaaaagctctggaaccctgtggcttcaaatcctttgggaagggtgactgttgtttcccctacacacagtgtaagccggaatgggaatcgctgaggctctgatccacttctaagacaggaaggaaagtgaaggcagagtgagcaggcaaagtagaaaattcgaaaaggtcctcaacgagtttgtacagctgctcccactccctcatcacctcttgtgggcctttggaaatgtatgttggaggagacattttggattgttgcaatgacttgggagtgccatagcacctagcaggcagaagccagaaacaccaaatgtcttaacaatgcttgaggcggtgctacaaatgaagtccttctccaaatgcattgagccccaagaaaaatcgctgattctgaggaaccttccaactttaacaatttcaggacgtccctaagctgagctaggaggcaccacgcacaggccggaggcaccacgcacaggccagagtctcccaaatcctgtcccgcactctctcccaccttattaatggccagctcatctttcaagtttcgacttgaaccacttctcagagatatcttcccaggtgcccatcccaacgttactattatatcataatttgattctccctccccccatccccccgccaactctgtaaaccccaagtataacacaggacgttgctatttgttgactgacacatagtgcttggtgaggtcacgctggcgctgaatactttttgtataaaccgacgaacagctgatgaccgcatgaatgctcacacaaggggaaagggcgccaagccaaggagccggcgtcatccgacgtaacttccgccctttaacgctcctgcggacgcccccttctcccagtccgtgtttgtttccggaatttcaataaagctcgattcggctcgaagaagaccccgttcttccgggaaaatggcgactcccgctcgtgccccggagtcaccgccgtccgcggatccggcgctagtagcggggcctgccgaggaagccgagtgcccgccgccgcgccagcctcagcccgcgcagaatgtgctcgctgccccgcggcttcgagccccaagctcccgaggacttggcgcagcggagtttggtggagctgcgggaaatgttgaagcgccaggagagacttttgcgcaacga

SEQ ID NO: 138794 - DNA, 1536 bp, Homo sapiens
  Payload ID: 7189
  Gene Symbol: GCOM1
  Gene Name: GRINL1A complex locus 1
  ENST ID: ENST00000477282
  CDS Start-End: 3-1142
ggatgctgcgctccacgtccacggtcaccctgctctcgggcggcgccgccaggacgcccggggcgcccagcaggagggcaaatgtttgcagactacggctgaccgtacctcctgagagtccagttcctgagcaatgtgaaaagaagattgagagaaaagagcagcttcttgacctgagcaatggagaacctaccaggaaacttcctcagggtgttgtttatggtgtggtgcgaagatcagatcaaaatcagcagaaagaaatggtggtgtatgggtggtccaccagtcagctgaaagaagagatgaactacatcaaagatgtgagagccactttggaaaaggtgagaaagcgaatgtatggagactatgatgagatgagacagaagattcgacagctcacccaggaactatcagtttcccatgctcagcaggagtatctggagaatcacatccaaacccagtcgtctgccctggatcgttttaatgccatgaactcagccttggcatcagattccattggcctgcagaaaaccctcgtggatgtgactttggaaaacagcaacattaaggatcaaatcagaaatctgcagcagacgtatgaagcatccatggacaagctgagggaaaagcagaggcagttggaggtagcgcaagttgaaaaccagctgctaaaaatgaaggtggaatcgtcccaagaagccaatgctgaggtgatgcgagagatgaccaagaagctgtacagccagtatgaggagaagctgcaggaagaacagaggaagcacagtgctgagaaggaggctcttttggaagaaaccaatagttttctgaaagcgattgaagaagccaataaaaagatgcaagcagcagagatcagcctagaggagaaagaccagaggatcggggagctggacaggctgattgagcgcatggaaaaggaacgtcatcaactgcaacttcaactcctagaacatgaaacagaaatgtctggggagttaactgattctgacaaggaaaggtatcagcagttggaggaggcatcagccagcctccgtgagcggatcagacacctagatgacatggtgcattgccagcagaagaaagtcaagcagatggtcgaggaggttaccttttcgacaaaatgattcatctagtcattgccagaagagtgggtctcctatttcctcagaagagcggcggcgcagggataagcagcatcttgatgacatcacagcagctcggcttctaccacttcaccatatgcccacgcagctgctctccatagaagaatccttggcacttcagaaacagcagaaacagaattatgaggagatgcaagcaaagctcgcagcgcaaaaattagctgaaagactgaatattaaaatgcggagttataatccagaaggggagtcttcagggagataccgagaagtaagggatgaagatgacgattggtcctctgatgaattctgaagataatctcctaaatcactgacgttgagatgtcatcatcttacatcagactttctaactagtatc

SEQ ID NO: 138795 - DNA, 2032 bp, Homo sapiens
  Payload ID: 7189
  Gene Symbol: GCOM1
  Gene Name: GRINL1A complex locus 1
  ENST ID: ENST00000496101
  CDS Start-End: 3-1250
ggatgctgcgctccacgtccacggtcaccctgctctcgggcggcgccgccaggacgcccggggcgcccagcaggagggcaaatgtttgcagactacggctgaccgtacctcctgagagtccagttcctgagcaatgtgaaaagaagattgagagaaaagagcagcttcttgacctgagcaatggagaacctaccaggaaacttcctcagggtgttgtttatggtgtggtgcgaagatcagatcaaaatcagcagaaagaaatggtggtgtatgggtggtccaccagtcagctgaaagaagagatgaactacatcaaagatgtttcccatgctcagcaggagtatctggagaatcacatccaaacccagtcgtctgccctggatcgttttaatgccatgaactcagccttggcatcagattccattggcctgcagaaaaccctcgtggatgtgactttggaaaacagcaacattaaggatcaaatcagaaatctgcagcagacgtatgaagcatccatggacaagctgagggaaaagcagaggcagttggaggtagcgcaagttgaaaaccagctgctaaaaatgaaggtggaatcgtcccaagaagccaatgctgaggtgatgcgagagatgaccaagaagctgtacagccagtatgaggagaagctgcaggaagaacagaggaagcacagtgctgagaaggaggctcttttggaagaaaccaatagttttctgaaagcgattgaagaagccaataaaaagatgcaagcagcagagatcagcctagaggagaaagaccagaggatcggggagctggacaggctgattgagcgcatggaaaaggaacgtcatcaactgcaacttcaactcctagaacatgaaacagaaatgtctggggagttaactgattctgacaaggaaaggtatcagcagttggaggaggcatcagccagcctccgtgagcggatcagacacctagatgacatggtgcattgccagcagaagaaagtcaagcagatggtcgaggagaataatgaactacaaagcaggttggactatttaacagaaacccaggccaagaccgaagtggaaaccagagagataggagtgggctgtgatcttctacccaggcaaagtagaaaattcgaaaaggtcctcaacgagtttgtacagctgctcccactccctcatcacctcttgtgggcctttggaaatgtatgttggaggagacattttggattgttgcaatgacttgggagtgccatagcacctagcaggcagaagccagaaacaccaaatgtcttaacaatgcttgaggcggtgctacaaatgaagtccttctccaaatgcattgagccccaagaaaaatcgctgattctgaggaaccttccaactttaacaatttcaggacgtccctaagctgagctaggaggcaccacgcacaggccggaggcaccacgcacaggccagagtctcccaaatcctgtcccgcactctctcccaccttattaatggccagctcatctttcaagtttcgacttgaaccacttctcagagatatcttcccagtgcttggtgaggtcacgctggcgctgaatactttttgtataaaccgacgaacagctgatgaccgcatgaatgctcacacaaggggaaagggcgccaagccaaggagccggcgtcatccgacgtaacttccgccctttaacgctcctgcggacgcccccttctcccagtccgtgtttgtttccggaatttcaataaagctcgattcggctcgaagaagaccccgttcttccgggaaaatggcgactcccgctcgtgccccggagtcaccgccgtccgcggatccggcgctagtagcggggcctgccgaggaagccgagtgcccgccgccgcgccagcctcagcccgcgcagaatgtgctcgctgccccgcggcttcgagccccaagctcccgaggacttggcgcagcggagtttggtggagctgcgggaaatgttgaagcgccaggagagacttttgcgcaacga

SEQ ID NO: 138796 - DNA, 1694 bp, Homo sapiens
  Payload ID: 7189
  Gene Symbol: GCOM1
  Gene Name: GRINL1A complex locus 1
  ENST ID: ENST00000463717
  CDS Start-End: 3-1247
ggatgctgcgctccacgtccacggtcaccctgctctcgggcggcgccgccaggacgcccggggcgcccagcaggagggcaaatgtttgcagactacggctgaccgtacctcctgagagtccagttcctgagcaatgtgaaaagaagattgagagaaaagagcagcttcttgacctgagcaatggagaacctaccaggaaacttcctcagggtgttgtttatggtgtggtgcgaagatcagatcaaaatcagcagaaagaaatggtggtgtatgggtggtccaccagtcagctgaaagaagagatgaactacatcaaagatgtgagagccactttggaaaaggtgagaaagcgaatgtatggagactatgatgagatgagacagaagattcgacagctcacccaggaactatcagtttcccatgctcagcaggagtatctggagaatcacatccaaacccagtcgtctgccctggatcgttttaatgccatgaactcagccttggcatcagattccattggcctgcagaaaaccctcgtggatgtgactttggaaaacagcaacattaaggatcaaatcagaaatctgcagcagacgtatgaagcatccatggacaagctgagggaaaagcagaggcagttggaggtagcgcaagttgaaaaccagctgctaaaaatgaaggtggaatcgtcccaagaagccaatgctgaggtgatgcgagagatgaccaagaagctgtacagccagtatgaggagaagctgcaggaagaacagaggaagcacagtgctgagaaggaggctcttttggaagaaaccaatagttttctgaaagcgattgaagaagccaataaaaagatgcaagcagcagagatcagcctagaggagaaagaccagaggatcggggagctggacaggctgattgagcgcatggaaaaggaacgtcatcaactgcaacttcaactcctagaacatgaaacagaaatgtctggggagttaactgattctgacaaggaaaggtatcagcagttggaggaggcatcagccagcctccgtgagcggatcagacacctagatgacatggtgcattgccagcagaagaaagtcaagcagatggtcgaggagattgaatcattaaagaaaaagttgcaacagaaacagctcttaatactgcagcttttagaaaagatatctttcttagaaggagagggaaggaaaggcctaaaagggagactaaagatgagttgctaaaaaagagagaacagaagcaaagagaccagaaggttaccttttcgacaaaatgattcatctagtcattgccagaagagtgggtctcctatttcctcagaagagcggcggcgcagggataagcagcatcttgatgacatcacagcagctcggcttctaccacttcaccatatgcccacgcagctgctctccatagaagaatccttggcacttcagaaacagcagaaacagaattatgaggagatgcaagcaaagctcgcagcgcaaaaattagctgaaagactgaatattaaaatgcggagttataatccagaaggggagtcttcagggagataccgagaagtaagggatgaagatgacgattggtcctctgatgaattctgaagataatctcctaaatcactgacgttgagatgtcatcatcttacatcagactttctaactagtatc

SEQ ID NO: 138797 - DNA, 3156 bp, Homo sapiens
  Payload ID: 7189
  Gene Symbol: GCOM1
  Gene Name: GRINL1A complex locus 1
  ENST ID: ENST00000460962
  CDS Start-End: 3-1319
ggatgctgcgctccacgtccacggtcaccctgctctcgggcggcgccgccaggacgcccggggcgcccagcaggagggcaaatgtttgcagactacggctgaccgtacctcctgagagtccagttcctgagcaatgtgaaaagaagattgagagaaaagagcagcttcttgacctgagcaatggagaacctaccaggaaacttcctcagggtgttgtttatggtgtggtgcgaagatcagatcaaaatcagcagaaagaaatggtggtgtatgggtggtccaccagtcagctgaaagaagagatgaactacatcaaagatgtgagagccactttggaaaaggtgagaaagcgaatgtatggagactatgatgagatgagacagaagattcgacagctcacccaggaactatcagtttcccatgctcagcaggagtatctggagaatcacatccaaacccagtcgtctgccctggatcgttttaatgccatgaactcagccttggcatcagattccattggcctgcagaaaaccctcgtggatgtgactttggaaaacagcaacattaaggatcaaatcagaaatctgcagcagacgtatgaagcatccatggacaagctgagggaaaagcagaggcagttggaggtagcgcaagttgaaaaccagctgctaaaaatgaaggtggaatcgtcccaagaagccaatgctgaggtgatgcgagagatgaccaagaagctgtacagccagtatgaggagaagctgcaggaagaacagaggaagcacagtgctgagaaggaggctcttttggaagaaaccaatagttttctgaaagcgattgaagaagccaataaaaagatgcaagcagcagagatcagcctagaggagaaagaccagaggatcggggagctggacaggctgattgagcgcatggaaaaggaacgtcatcaactgcaacttcaactcctagaacatgaaacagaaatgtctggggagttaactgattctgacaaggaaaggtatcagcagttggaggaggcatcagccagcctccgtgagcggatcagacacctagatgacatggtgcattgccagcagaagaaagtcaagcagatggtcgaggagaataatgaactacaaagcaggttggactatttaacagaaacccaggccaagaccgaagtggaaaccagagagataggagtgggctgtgatcttctacccagccaaacaggcaggactcgtgaaattgtgatgccttctaggaactacaccccatacacaagagtcctggagttaaccatgaagaaaactctgacttaggcactcagaggcatacactttttacagatggacaaaagctctggaaccctgtggcttcaaatcctttgggaagggtgactgttgtttcccctacacacagtgtaagccggaatgggaatcgctgaggctctgatccacttctaagacaggaaggaaagtgaaggcagagtgagcaggtaaatacctagcagaagaatggctgggtcaaacggtatattttaagaaactgccaaactggtttccaaagaggttgtactattttgcattcccattagcagtgtatcaaagttccagttgctctacatcctttacaacacttggaatggtcagtctttctggcaaagtagaaaattcgaaaaggtcctcaacgagtttgtacagctgctcccactccctcatcacctcttgtgggcctttggaaatgtatgttggaggagacattttggattgttgcaatgacttgggagtgccatagcacctagcaggcagaagccagaaacaccaaatgtcttaacaatgcttgaggcggtgctacaaatgaagtccttctccaaatgcattgagccccaagaaaaatcgctgattctgaggaaccttccaactttaacaatttcaggacgtccctaagctgagctaggaggcaccacgcacaggccggaggcaccacgcacaggccagagtctcccaaatcctgtcccgcactctctcccaccttattaatggccagctcatctttcaagtttcgacttgaaccacttctcagagatatcttcccagaaaattcatttgcaaattgcccgacaaaggtaaaaagatctttgactcttttgccaaactgaaagctgccattgcagaatgtgaagaagttagaagaaaaagtgaactgtttaaccctgttagtttagactgtaagctaaggcaaaaagcaattgcagaagttgatgtgggtacagataaggcccagaattctgacccgatacttgatacttcatcactagttcctggatgttcctctgtagataacatcaagtcatctcaaacctcacaaaaccagggacttggacgtcctactcttgaaggtgatgaagagacttcagaggttgagtacacagtgaataagggcccagcttccagcaatagagacagggtaccaccttcatctgaagctagtgagcatcacccgcggcatcgtgtttcaagtcaagcggaagatacttccagcagctttgacaacctgtttattgacaggttacagaggatcaccattgcggaccaaggtgaacaacagtcagaagaaaacgcaagtactaagaacttgacaggcctttccagtgggactgagaagaaacctcattacatggaagtgctagaaatgcgagccaaaaacccagtgccccagctgcgtaaatttaaaaccaatgtgttaccttttcgacaaaatgattcatctagtcattgccagaagagtgggtctcctatttcctcagaagagcggcggcgcagggataagcagcatcttgatgacatcacagcagctcggcttctaccacttcaccatatgcccacgcagctgctctccatagaagaatccttggcacttcagaaacagcagaaacagaattatgaggagatgcaagcaaagctcgcagcgcaaaaattagctgaaagactgaatattaaaatgcggagttataatccagaaggggagtcttcagggagataccgagaagtaagggatgaagatgacgattggtcctctgatgaattctgaagataatctcctaaatcactgacgttgagatgtcatcatcttacatcagactttctaactagtatc

SEQ ID NO: 138798 - DNA, 2500 bp, Homo sapiens
  Payload ID: 7189
  Gene Symbol: GCOM1
  Gene Name: GRINL1A complex locus 1
  ENST ID: ENST00000496627
  CDS Start-End: 3-1175
ggatgctgcgctccacgtccacggtcaccctgctctcgggcggcgccgccaggacgcccggggcgcccagcaggagggcaaatgtttgcagactacggctgaccgtacctcctgagagtccagttcctgagcaatgtgaaaagaagattgagagaaaagagcagcttcttgacctgagcaatggagaacctaccaggaaacttcctcagggtgttgtttatggtgtggtgcgaagatcagatcaaaatcagcagaaagaaatggtggtgtatgggtggtccaccagtcagctgaaagaagagatgaactacatcaaagatgtgagagccactttggaaaaggtgagaaagcgaatgtatggagactatgatgagatgagacagaagattcgacagctcacccaggaactatcagtttcccatgctcagcaggagtatctggagaatcacatccaaacccagtcgtctgccctggatcgttttaatgccatgaactcagccttggcatcagattccattggcctgcagaaaaccctcgtggatgtgactttggaaaacagcaacattaaggatcaaatcagaaatctgcagcagacgtatgaagcatccatggacaagctgagggaaaagcagaggcagttggaggtagcgcaagttgaaaaccagctgctaaaaatgaaggtggaatcgtcccaagaagccaatgctgaggtgatgcgagagatgaccaagaagctgtacagccagtatgaggagaagctgcaggaagaacagaggaagcacagtgctgagaaggaggctcttttggaagaaaccaatagttttctgaaagcgattgaagaagccaataaaaagatgcaagcagcagagatcagcctagaggagaaagaccagaggatcggggagctggacaggctgattgagcgcatggaaaaggaacgtcatcaactgcaacttcaactcctagaacatgaaacagaaatgtctggggagttaactgattctgacaaggaaaggtatcagcagttggaggaggcatcagccagcctccgtgagcggatcagacacctagatgacatggtgcattgccagcagaagaaagtcaagcagatggtcgaggagatcatgtcgcacgagctcttctccagatttagtctccggctctttggaagatgataagttggtagcctgctctgggttggaagcgattcctttattgttcgtgattagaagaacacttgtacactctctgctgggaagaggtggtatttatctatgatgagccaatgaacaaaacaggaaggacatattatttaaaggaaaatttgaccatgtggggctcttgtttgtgaaaacacccacatactgtcaccctgacttgtacagcctcaaactgcagagtcaagagaactcacagatccacagagtatttttaggaacttgagtagacattgaagaaggaactgcaatgaaaaaggctactgaaaaaccattcagaaagatccaggtggaggcttggaagatgaatccttacttatggaaaagctgccaaagacatctgctaaggagatgggaagagagcttgaagaatgttagtgctctgggaaggaggtgctcccaccagatcacccccaagaaagtacaggagcagccagattgaatcattaaagaaaaagttgcaacagaaacagctcttaatactgcagcttttagaaaagatatctttcttagaaggagagccaaacaggcaggactcgtgaaattgtgatgccttctaggaactacaccccatacacaagagtcctggagttaaccatgaagaaaactctgacttaggcactcagaggcatacactttttacagatggacaaaagctctggaaccctgtggcttcaaatcctttgggaagggtgactgttgtttcccctacacacagtgtaagccggaatgggaatcgctgaggctctgatccacttctaagacaggaaggaaagtgaaggcagagtgagcagggaaggaaaggcctaaaagggagactaaagatgagttgctaaaaaagagagaacagaagcaaagagaccagaaggttaccttttcgacaaaatgattcatctagtcattgccagaagagtgggtctcctatttcctcagaagagcggcggcgcagggataagcagcatcttgatgacatcacagcagctcggcttctaccacttcaccatatgcccacgcagctgctctccatagaagaatccttggcacttcagaaacagcagaaacagaattatgaggagatgcaagcaaagctcgcagcgcaaaaattagctgaaagactgaatattaaaatgcggagttataatccagaaggggagtcttcagggagataccgagaagtaagggatgaagatgacgattggtcctctgatgaattctgaagataatctcctaaatcactgacgttgagatgtcatcatcttacatcagactttctaactagtatc

SEQ ID NO: 138799 - DNA, 1620 bp, Homo sapiens
  Payload ID: 7189
  Gene Symbol: GCOM1
  Gene Name: GRINL1A complex locus 1
  ENST ID: ENST00000482814
  CDS Start-End: 3-1226
ggatgctgcgctccacgtccacggtcaccctgctctcgggcggcgccgccaggacgcccggggcgcccagcaggagggcaaatgtttgcagactacggctgaccgtacctcctgagagtccagttcctgagcaatgtgaaaagaagattgagagaaaagagcagcttcttgacctgagcaatggagaacctaccaggaaacttcctcagggtgttgtttatggtgtggtgcgaagatcagatcaaaatcagcagaaagaaatggtggtgtatgggtggtccaccagtcagctgaaagaagagatgaactacatcaaagatgtgagagccactttggaaaaggtgagaaagcgaatgtatggagactatgatgagatgagacagaagattcgacagctcacccaggaactatcagtttcccatgctcagcaggagtatctggagaatcacatccaaacccagtcgtctgccctggatcgttttaatgccatgaactcagccttggcatcagattccattggcctgcagaaaaccctcgtggatgtgactttggaaaacagcaacattaaggatcaaatcagaaatctgcagcagacgtatgaagcatccatggacaagctgagggaaaagcagaggcagttggaggtagcgcaagttgaaaaccagctgctaaaaatgaaggtggaatcgtcccaagaagccaatgctgaggtgatgcgagagatgaccaagaagctgtacagccagtatgaggagaagctgcaggaagaacagaggaagcacagtgctgagaaggaggctcttttggaagaaaccaatagttttctgaaagcgattgaagaagccaataaaaagatgcaagcagcagagatcagcctagaggagaaagaccagaggatcggggagctggacaggctgattgagcgcatggaaaaggaacgtcatcaactgcaacttcaactcctagaacatgaaacagaaatgtctggggagttaactgattctgacaaggaaaggtatcagcagttggaggaggcatcagccagcctccgtgagcggatcagacacctagatgacatggtgcattgccagcagaagaaagtcaagcagatggtcgaggagattgaatcattaaagaaaaagttgcaacagaaacagctcttaatactgcagcttttagaaaagatatctttcttagaaggagaggttaccttttcgacaaaatgattcatctagtcattgccagaagagtgggtctcctatttcctcagaagagcggcggcgcagggataagcagcatcttgatgacatcacagcagctcggcttctaccacttcaccatatgcccacgcagctgctctccatagaagaatccttggcacttcagaaacagcagaaacagaattatgaggagatgcaagcaaagctcgcagcgcaaaaattagctgaaagactgaatattaaaatgcggagttataatccagaaggggagtcttcagggagataccgagaagtaagggatgaagatgacgattggtcctctgatgaattctgaagataatctcctaaatcactgacgttgagatgtcatcatcttacatcagactttctaactagtatc

SEQ ID NO: 138800 - DNA, 2329 bp, Homo sapiens
  Payload ID: 7189
  Gene Symbol: GCOM1
  Gene Name: GRINL1A complex locus 1
  ENST ID: ENST00000587652
  CDS Start-End: 22-2319
gctaccgaccgccgctgcgggatgctgcgctccacgtccacggtcaccctgctctcgggcggcgccgccaggacgcccggggcgcccagcaggagggcaaatgtttgcagactacggctgaccgtacctcctgagagtccagttcctgagcaatgtgaaaagaagattgagagaaaagagcagcttcttgacctgagcaatggagaacctaccaggaaacttcctcagggtgttgtttatggtgtggtgcgaagatcagatcaaaatcagcagaaagaaatggtggtgtatgggtggtccaccagtcagctgaaagaagagatgaactacatcaaagatgtgagagccactttggaaaaggtgagaaagcgaatgtatggagactatgatgagatgagacagaagattcgacagctcacccaggaactatcagtttcccatgctcagcaggagtatctggagaatcacatccaaacccagtcgtctgccctggatcgttttaatgccatgaactcagccttggcatcagattccattggcctgcagaaaaccctcgtggatgtgactttggaaaacagcaacattaaggatcaaatcagaaatctgcagcagacgtatgaagcatccatggacaagctgagggaaaagcagaggcagttggaggtagcgcaagttgaaaaccagctgctaaaaatgaaggtggaatcgtcccaagaagccaatgctgaggtgatgcgagagatgaccaagaagctgtacagccagtatgaggagaagctgcaggaagaacagaggaagcacagtgctgagaaggaggctcttttggaagaaaccaatagttttctgaaagcgattgaagaagccaataaaaagatgcaagcagcagagatcagcctagaggagaaagaccagaggatcggggagctggacaggctgattgagcgcatggaaaaggaacgtcatcaactgcaacttcaactcctagaacatgaaacagaaatgtctggggagttaactgattctgacaaggaaaggtatcagcagttggaggaggcatcagccagcctccgtgagcggatcagacacctagatgacatggtgcattgccagcagaagaaagtcaagcagatggtcgaggagattgaatcattaaagaaaaagttgcaacagaaacagctcttaatactgcagcttttagaaaagatatctttcttagaaggagagaataatgaactacaaagcaggttggactatttaacagaaacccaggccaagaccgaagtggaaaccagagagataggagtgggctgtgatcttctacccagaaaattcatttgcaaattgcccgacaaaggtaaaaagatctttgactcttttgccaaactgaaagctgccattgcagaatgtgaagaagttagaagaaaaagtgaactgtttaaccctgttagtttagactgtaagctaaggcaaaaagcaattgcagaagttgatgtgggtacagataaggcccagaattctgacccgatacttgatacttcatcactagttcctggatgttcctctgtagataacatcaagtcatctcaaacctcacaaaaccagggacttggacgtcctactcttgaaggtgatgaagagacttcagaggttgagtacacagtgaataagggcccagcttccagcaatagagacagggtaccaccttcatctgaagctagtgagcatcacccgcggcatcgtgtttcaagtcaagcggaagatacttccagcagctttgacaacctgtttattgacaggttacagaggatcaccattgcggaccaaggtgaacaacagtcagaagaaaacgcaagtactaagaacttgacaggcctttccagtgggactgagaagaaacctcattacatggaagtgctagaaatgcgagccaaaaacccagtgccccagctgcgtaaatttaaaaccaatgtgttaccttttcgacaaaatgattcatctagtcattgccagaagagtgggtctcctatttcctcagaagagcggcggcgcagggataagcagcatcttgatgacatcacagcagctcggcttctaccacttcaccatatgcccacgcagctgctctccatagaagaatccttggcacttcagaaacagcagaaacagaattatgaggagatgcaagcaaagctcgcagcgcaaaaattagctgaaagactgaatattaaaatgcggagttataatccagaaggggagtcttcagggagataccgagaagtaagggatgaagatgacgattggtcctctgatgaattctgaagataatctc

SEQ ID NO: 138801 - DNA, 4149 bp, Homo sapiens
  Payload ID: 7190
  Gene Symbol: GCC1
  Gene Name: GRIP and coiled-coil domain containing 1
  Uniprot ID: Q96CN9
  ENST ID: ENST00000321407
  CDS Start-End: 426-2753
acggaagcgccgttgtcggcaggcagctttagttaggatgtcgtgatgggaccgagctcagcgtaaccctctggccgacgtgggccgagggggccggcccgggctgctgtggcccagacgagcggagagtgcggagcggcttctgggccagcgctaacgagccctggcagtgcgcacctctggtgccagtgtcgccccgcctccggggtagaatccgccccagccctccgggcctgggaccgggcggccgctttcgccagtccgtccggccgttccgcattaggtccgggataactaggtggagtaggtgtgcggcccgccgccggacagcccgctcgctgtttctttaagcccccgcctgcgtcttcacggccctctcccgttctgctggaaagctgacgtggggcaatccgttcagaccctccatggagaagtttgggatgaatttcgggggcggcccgagcaagaaggacttgctggagactatagagacccagaagaagcagcttctccagtaccaggcacggctcaaggatgtggtccgtgcctataaaagcctgctgaaggagaaagaggcattagaggccagcatcaaggtgctgtcggtatcccacgaggcagatgtgggcctcgcaggtgtccagcttccaggcctcacctttcctgactctgtggatgaccggtgctccactcacagcgaggatagcactgggaccgccactagcttggatactgcggccagtctcaccagcaccaagggtgagtttggggtagaagatgacagaccggcccgtggaccaccacctccaaagtccgaagaggccagttggtccgagagtggcgttagcagtagcagtggggatgggccatttgcaggtggggaggtggacaaaagactgcaccagctgaagactcagttggctactttgaccagttctttggctacagtcactcaggagaagtcccgcatggaggcttcttacttggctgacaagaaaaagatgaaacaggacttagaggatgccagtaacaaggcggaggaggagagggcccgcctggagggagaattgaaggggctgcaggagcaaatagcagaaaccaaagcccggcttatcacgcagcagcatgatcgggcccaagagcagagtgaccatgccttgatgctgcgtgagctccagaagctgctgcaggaggagaggacccagcgccaggacttggagcttaggttagaagagacccgagaagccttggcaggacgagcatatgcagctgaacagatggaaggatttgaactgcagaccaagcagctgacccgtgaggtggaggagctgaaaagtgaactgcaggccattcgagatgagaagaatcagccagatccccggctgcaagaacttcaggaagaggctgcccgccttaagagccatttccaggctcagttacagcaggaaatgagaaagacagctcttgcagaggatcaactccgtcagcaatctcaggtagaagaacagagggtggcagccctggagaatcaaatatccgaggtgtctgagctgctaggcacctacgagaaagccaagcagaaggaccagctggccattcagaagctgaaggagcgcattctgcagctggacctggagaacaagacactggctctagcagcctccagcaggtcccctttagacagccatggagaggagtccagtctggatgtcaatgtcctgaaagataagatggagaagctgaagaggctgctgcaggttgcggccaggaaaagccaggtgaccctggatgtggagaagctctgtgacctggagataatgcccagctcggaggctgctgatggggagaaggctactgcactctattaccaacaggagctgaaacagctgaaggaagagtttgagaggtacaagatgagagcccaggttgtcctcaaaagcaagaataccaaagatggtaacctgggaaaggagctggaggcagcccaggaacagcttgcagagctgaaggagaagtatatttccctgcggctctcctgcgaggagctggagcaccaacaccagcaggaggctgatgactggaagcaggagctggcccggctgcagcagctccaccggcaggagctggagcggtgccagctggacttcagggaccgcacactgaaactggaggaggagctgcacaagcagcgggatcgtgccctagctgtgctcaccgagaaggacttggaactggagcaactgcgttctgtggccttggcctctgggctgccaggacgcagaagtcctgtgggtggtggcggtcctggggacccagctgacacatcatcctctgatagcctgacccaagcattacaacttgcagcggccaatgagcccactttctttctgtacgctgagcaactggcccgcaaggaggtggagatcacatcactgaggaagcagaagcacaggctggaggtcgaggtgcatcagctgcaggatcggctgctggaggagggcgaacggcatcgtgaggaggttgcagccctgcagagccacatcgaaaagaacatcagggaccagagcagggagggagccaatctggagtacctcaaaaacatcatctaccgcttcctgaccttacctgactccctgggccgccagcagactctcacagccatactgactatcttgcacttcagtccagaggagaaacaagtgataatgcgactcccaaccagtgccagctggtggccttctggcaagagatgatgccattttcatgaattcctggaatttctgtgcctcttttatgtgggaaagggcaggctctggtttctgctgcctcttctcttacattgtcatttatttcttcactgtgttgagctgggaggagtcttcaatgtgggaagggattttctgccaaatgccattaatgctgctttatccttaggccctagagatactgaaagtcctggggcagtatcttctgatggtgtgcatgtgaggagaagatgaggttaggactgagaagtgcagaagttggaacagtggtaaggctgttttaaaataagatgttttgttttaataatatgctcctggcacaaagctaggagtaaatgtgactccaaagggagttcagttaatctctgaaatgcacaaaacctagctattttctccctctcatcacagtctgagtctggtccattgctaccccaattctctggggacataaaaccaggctggaaagggaccaggaagtttgaaatagtgacatatcatccactagtcccaagggctaaggaatagtgagtttattctggaaggaactgggaagcttagtctaattagtgcctggggatgacctatgcaatcacaccgcttatgaccatcctagagagggccctgagcaccagcttgatcttagggatttccaaagtaacctgctttttgcctggatagggttaaaatagacctttcttgcctatccttgccttaacctatctgcctgaggttggcctgagattgtgagtcaacgactttgctatcttttcctcagtgttgaactttcattaagaaataaagtcctagcttcttacagagaggggtccaaatggtgaatgctcatcctgcctggattcaaggaattagctcagagattggcccctagcttttctgcctttgtagggacagcaaaaggggaaaatttgctgcagaaaattccaaaagattgctgtagctctcacagggaagtggtaaagatcagctaaacctgggttggggtgctttctgcccagtgggtcttggcataagtagattaatcctgctcttttaagaaaaggcaacttattcaggcagtctggaaagggggttctcagaaaactcagtttctttattccttcttttctcccaactactgttactggttatagaggtctttggactctaaagaccaatgtttggccactaactggactaatatgtatctttctgtgatttcatcatagaggtctgttttgtgagggtttggggtgcagaaaactttgattaaatcttaatgggaggctgggtgacctggattatctacagtgagcagacttaaatggaacagaagtttatgtgtccaaatgatggaatcattaaacctgagtgacttgacctgtgtggt

SEQ ID NO: 138802 - DNA, 7537 bp, Homo sapiens
  Payload ID: 7191
  Gene Symbol: GCC2
  Gene Name: GRIP and coiled-coil domain containing 2
  Uniprot ID: Q8IWJ2
  ENST ID: ENST00000309863
  CDS Start-End: 715-5769
ccttcgggaaagggtggcctcgggccccctactctacagagtctcctcccacggctgcccagttccctggccgactatcttgcctccaccacatcaccatcagtaccgggcggctgcagggcagagctgtccagggacctcctcacagcctccagagtcaagaaatgcctcctcagggaagccctctaccgcatccctgacctgtgagtcacggagctcccgggcaccatgctggccacaaatgcctaaggagccccccggaaccagctgtgggtcccgcaggcactcgcaggctagcggacacctttggaggactgagagacctgtcctgcaatccaatgttcctcactctcacaagattttacagacgtggaaaccgaggcccgaggccccaaggggtaatcggcccgccttcccatgccaataaccggcagtggcgggacccacacctactccgtgacctgcaggcccaggggtcgagccccaggtagaacgtctagacggactccgcccttagcgccgtacggggaaccttctcccggacgcagacacggaagcggaagtgctgccgagctgtagctatggagacgtggggggcgggccgcccggagagcgcgacctttgacctgcagtagagcctacgtcagaggctggcgcaaacagaagtgcagcggtggcggcggctggttgcgggccggcggcgggctggcggagatggaggatcttgttcaagatggggtggcttcaccagctacccctgggaccgggaaatctaagctggaaacattgcccaaagaagacctcatcaagtttgccaagaaacagatgatgctaatacagaaagctaaatcaaggtgtacagaattggagaaagaaattgaagaactcagatcaaaacctgttactgaaggaactggtgatattattaaggcattaactgaacgtctggatgctcttcttctggaaaaagcagagactgagcaacagtgtctttctctgaaaaaggaaaatataaaaatgaagcaagaggttgaggattctgtaacaaagatgggagatgcacataaggagttggaacaatcacatataaactatgtgaaagaaattgaaaatttgaaaaatgagttgatggcagtacgttccaaatacagtgaagacaaagctaacttacaaaagcagctggaagaagcaatgaatacgcaattagaactttcagaacaacttaaatttcagaacaactctgaagataatgttaaaaaactacaagaagagattgagaaaattaggccaggctttgaggagcaaattttatatctgcaaaagcaattagacgctaccactgatgaaaagaaggaaacagttactcaactccaaaatatcattgaggctaattctcagcattaccaaaaaaatattaatagtttgcaggaagagcttttacagttgaaagctatacaccaagaagaggtgaaagagttgatgtgccagattgaagcatcagctaaggaacatgaagcagagataaataagttgaacgagctaaaagagaacttagtaaaacaatgtgaggcaagtgaaaagaacatccagaagaaatatgaatgtgagttagaaaatttaaggaaagccacctcaaatgcaaaccaagacaatcagatatgttctattctcttgcaagaaaatacatttgtagaacaagtagtaaatgaaaaagtcaaacacttagaagataccttaaaagaacttgaatctcaacacagtatcttaaaagatgaggtaacttatatgaataatcttaagttaaaacttgaaatggatgctcaacatataaaggatgagttttttcatgaacgggaagacttagagtttaaaattaatgaattattactagctaaagaagaacagggctgtgtaattgaaaaattaaaatctgagctagcaggtttaaataaacagttttgctatactgtagaacagcataacagagaagtacagagtcttaaggaacaacatcaaaaagaaatatcagaactaaatgagacatttttgtcagattcagaaaaagaaaaattaacattaatgtttgaaatacagggtcttaaggaacagtgtgaaaacctacagcaagaaaagcaagaagcaattttaaattatgagagtttacgagagattatggaaattttacaaacagaactgggggaatctgctggaaaaataagtcaagagttcgaatcaatgaagcaacagcaagcatctgatgttcatgaactgcagcagaagctcagaactgcttttactgaaaaagatgcccttctcgaaactgtgaatcgcctccagggagaaaatgaaaagttactatctcaacaagaattggtaccagaacttgaaaataccataaagaaccttcaagaaaagaatggagtatacttacttagtctcagtcaaagagataccatgttaaaagaattagaaggaaagataaattctcttactgaggaaaaagatgattttataaataaactgaaaaattcccatgaagaaatggataatttccataagaaatgtgaaagggaagaaagattgattcttgaacttgggaagaaagtagagcaaacaatccagtacaacagtgaactagaacaaaaggtaaatgaattaacaggaggactagaggagactttaaaagaaaaggatcaaaatgaccaaaaactagaaaaacttatggttcaaatgaaagttctctctgaagacaaagaagtattgtcagctgaagtgaagtctctttatgaggaaaacaataaactcagttcagaaaaaaaacagttgagtagggatttggaggtttttttgtctcaaaaagaagatgttatccttaaagaacatattactcaattagaaaagaaacttcagttaatggttgaagagcaagataatttaaataaactgcttgaaaatgagcaagttcagaagttatttgttaaaactcagttgtatggttttcttaaagaaatgggatcagaagtttcagaagacagtgaagagaaagatgttgttaatgtcctacaggcagtcggtgaatccttggcaaaaataaatgaggaaaaatgcaacctggcttttcagcgtgatgaaaaagtattagagttagaaaaagagattaagtgccttcaagaagagagtgtagttcagtgtgaagaacttaagtctttattgagagactatgagcaagagaaagttctcttaaggaaagagttagaagaaatacagtcagaaaaagaggccctgcagtctgatcttctagaaatgaagaatgctaatgaaaaaacaaggcttgaaaatcagaatcttttaattcaagttgaagaagtatctcaaacatgtagcaaaagtgaaatccataatgaaaaagaaaaatgttttataaaggaacatgaaaacctaaagccactactagaacaaaaagaattacgagataggagagcagagttgatactattaaaggattccttagcaaaatcaccttctgtaaaaaatgatcctctgtcttcagtaaaagagttggaagaaaaaatagaaaatctggaaaaagaatgcaaagaaaaggaggagaaaataaataagataaaattagttgccgtaaaggcaaagaaagaactagattccagcagaaaagagacccagactgtgaaggaagaacttgaatctcttcgatcagaaaaggaccagttatctgcttccatgagagatctcattcaaggagcagaaagctataagaatcttttattagaatatgaaaagcagtcagagcaactggatgtggaaaaagaacgtgctaataattttgagcatcgtattgaagaccttacaagacaattaagaaattcgactttgcagtgtgaaacaataaattctgataatgaagatctcctggctcgtattgagacattacagtctaatgccaaattattagaagtacagattttagaagtccagagagccaaagcaatggtagacaaagaattagaagctgaaaaacttcagaaagaacagaagataaaggaacatgccactactgtaaatgaacttgaagaacttcaggtacaacttcaaaagcaaaagaaacagcttcagaaaaccatgcaagaattagagctggttaaaaaggatgcccaacaaaccacattgatgaatatggaaatagctgattatgaacgtttgatgaaagaactaaatcaaaagttaactaataaaaacaacaagatagaagatttggagcaagaaataaaaattcaaaaacagaaacaagaaaccctacaagaagaaataacttcattacagtcttcagtacaacaatatgaagaaaaaaacaccaaaatcaagcaattgcttgtgaaaaccaaaaaggaactggcagattcaaagcaagcagaaactgatcacttaatacttcaagcatctttaaaaggtgagctggaggcaagccagcagcaagtagaagtctataaaatacagctggctgaaataacatcagagaagcacaaaatccacgagcacctgaaaacctctgcggaacagcaccagcgtacgctaagtgcataccagcagagagtgacagcactacaggaagagtgccgtgctgccaaggcagaacaagctactgtaacctctgaattcgagagctacaaagtccgagttcataatgttctaaaacaacagaaaaataaatctatgtctcaggctgaaactgagggcgctaaacaagaaagggaacatctggaaatgctgattgaccagctaaaaatcaaattacaagatagccaaaataacttacagattaatgtatctgaacttcaaacattgcagtctgaacatgatacactgctagaaaggcacaacaagatgctgcaggaaactgtgtccaaagaggcggaactccgggaaaaattgtgttcaatacagtcagagaacatgatgatgaaatctgaacatacacagactgtgagtcagctaacatcccagaacgaggtccttcgaaatagcttccgagatcaagtgcgacatttgcaggaagaacacagaaagacagtggagacattacagcagcagctctccaagatggaagcacagctcttccagcttaagaatgaaccgaccacaagaagcccagtttcctctcaacaatctttgaagaaccttcgagaaaggagaaacacagacctcccgcttctagacatgcacactgtaacccgggaagagggagaaggcatggagacaactgatacggagtctgtgtcttccgccagcacatacacacagtctttagagcagctgcttaactctcccgaaactaaacttgagcctccattatggcatgctgaatttaccaaagaagaattggttcagaagctcagttccaccacaaaaagtgcagatcacttaaacggcctgcttcgggaaacagaagcaaccaatgcaattcttatggagcaaattaagcttctcaaaagtgaaataagaagattggaaaggaatcaagagcgagagaagtctgcagctaacctggaatacttgaagaacgtcttgctgcagttcattttcttgaaaccaggtagtgaaagagagagacttcttcctgttataaatacgatgttgcagctcagccctgaagaaaagggaaaacttgctgcggttgctcaaggtgaggaagaaaatgcttcccgttcttctggatgggcatcctatcttcatagttggtctggacttcgataggttgatggaaggaatatttttattaaccaaatagaatctatttacaaaaatggttcacgtatattaccacaattcttttgtcaaaaagtgtgtatatatgtttgcatctacatatatttgtacatctatatgacagatgtattttaaaagtttcatcttgaagtaaaagtacaacagcttgaagtgttgatagcaggccacagccctctaactcatgtgatttcccatgcatgctgccagaataaaaccaccaggaatgaattcactccccacttctctggaacctcaggacccgcccatttctcggcagtactgtgaattttgaagttaaactaaattttggtaccataccaactggaatttaggctttaaaaataatgtttcaaggccaggtgtggtgattcatgcctgaaatcccactactttgggaggctgaggctggagaattgcttgaggctagtgagctgtgactcccactgcactccagctcggggaacagagcgagaccttgtctctaaaaataatagtaataaaataaaaataacgttttatgactatttattgcaaggtcagagttacagattgttataaattgttgagaaatttttgtgattagaatatgaaggaaaaagctttgttggtaaaagtgacatgttaaggggctatgaagtaaatatgctgcagttaattatgctaagttaaaatacagtttagttatttgctttaaaataaactcttctttttttctttaaagtatactatctcaaaactcattatgttgtcagagccctagagctggctagtgtaacactgactatgagtaggtgggcccacacttgagttgaggtgatttcatggtgtctttccaggctcttgatagggtgtcactgcatgcaagccatgaatctgttttgagaatcctctccattttcccaaataaaaacctatcacaacagtgactatatcactcagcattggatctaaatataaaagtggtgctttcagtgtttttggcagatagtgttccataagctttccatcagaagggattttagacaccttagaggtccgtgctacatcgtcacagttcctccgaataaccttaggtggtagtgttacttgcctttgacacctctgcatatgttttaatgactagatccaaactgtgttgttcttaaatcaaaaattggataatttgtaatatttatgtgttaatcacacagtatgctctctgaagttctcttaagccttcagtttatactcttaatttaattttctttctgagctggagaactggctttgcactttggttacacagaacattggtttccaattcagtttaactgaaatttgctgctgatatgttgagtttgttctttaaaaaatagctcatatatctcatctttcctcctgtcttagaagaacagacctaactagtgaatgtattaatgaaaatgcatctatttcagagctgacatgaagagtttagtttttttactttataaactgtgaatatgagtatgccagctgcatacgatgtaactaatcatatttaaatatatttcactttctctttgactttagaccttttgaagtctgtataaacttgttttgaaatatagtctctgcttacgaatgtcataacaaaataattttttgcatgataaaaaattactttgattacaaaaggcatattctttcatggtttctgcaatgagaggaagtgtaatgattattttaatatttctattaaatatgtttaactgta

SEQ ID NO: 138803 - DNA, 1366 bp, Homo sapiens
  Payload ID: 7191
  Gene Symbol: GCC2
  Gene Name: GRIP and coiled-coil domain containing 2
  ENST ID: ENST00000393321
  CDS Start-End: 1-744
aatcttttattagaatatgaaaagcagtcagagcaactggatgtggaaaaagaacgtgctaataattttgagcatcgtattgaagaccttacaagacaattaagaaattcgactttgcagtgtgaaacaataaattctgataatgaagatctcctggctcgtattgagacattacagtctaatgccaaattattagaagtacagattttagaagtccagagagccaaagcaatggtagacaaagaattagaagctgaaaaacttcagaaagaacagaagataaaggaacatgccactactgtaaatgaacttgaagaacttcaggtacaacttcaaaagcaaaagaaacagcttcagaaaaccatgcaagaattagagctggttaaaaaggatgcccaacaaaccacattgatgaatatggaaatagctgattatgaacgtttgatgaaagaactaaatcaaaagttaactaataaaaacaacaagatagaagatttggagcaagaaataaaaattcaaaaacagaaacaagaaaccctacaagaagaaataacttcattacagtcttcagtacaacaatatgaagaaaaaaacaccaaaatcaagcaattgcttgtgaaaaccaaaaaggaactggcagattcaaagcaagcagaaactgatcacttaatacttcaagcatctttaaaaggtgagctggaggcaagccagcagcaagtagaagtctataaatttgtattttaaggaaaacctctttaactagtgaagataggatttgctaaagctaaatttaaagatttacccccagatacagctggctgaaataacatcagagaagcacaaaatccacgagcacctgaaaacctctgcggaacagcaccagcgtacgctaagtgcataccagcagagagtgacagcactacaggaagagtgccgtgctgccaaggcagaacaagctactgtaacctctgaattcgagagctacaaagtccgagttcataatgttctaaaacaacagaaaaataaatctatgtctcaggctgaaactgagggcgctaaacaagaaagggaacatctggaaatgctgattgaccagctaaaaatcaaattacaagatagccaaaataacttacagattaatgtatctgaacttcaaacattgcagtctgaacatgatacactgctagaaaggcacaacaagatgctgcaggaaactgtgtccaaagaggcggaactccgggaaaagtaagactgttagcagcactaacgctgtaccagacagcaatgtatttctttgttgaaacttctaatatgttgatccttgagataaatgcagattagaaaataaaaaatagacatttctaaa

SEQ ID NO: 138804 - DNA, 2908 bp, Homo sapiens
  Payload ID: 7191
  Gene Symbol: GCC2
  Gene Name: GRIP and coiled-coil domain containing 2
  ENST ID: ENST00000409896
  CDS Start-End: 160-2908
gtttgcttcctgctcctggttagcactgctgggagatcctgctatttttcgaacataaagcagtctaagaaggtttatatagtggtgtagtggaaggagcagtgacataggctggaaacattgcccaaagaagacctcatcaagtttgccaagaaacagatgatgctaatacagaaagctaaatcaaggtgtacagaattggagaaagaaattgaagaactcagatcaaaacctgttactgaaggaactggtgatattattaaggcattaactgaacgtctggatgctcttcttctggaaaaagcagagactgagcaacagtgtctttctctgaaaaaggaaaatataaaaatgaagcaagaggttgaggattctgtaacaaagatgggagatgcacataaggagttggaacaatcacatataaactatgtgaaagaaattgaaaatttgaaaaatgagttgatggcagtacgttccaaatacagtgaagacaaagctaacttacaaaagcagctggaagaagcaatgaatacgcaattagaactttcagaacaacttaaatttcagaacaactctgaagataatgttaaaaaactacaagaagagattgagaaaattaggccaggctttgaggagcaaattttatatctgcaaaagcaattagacgctaccactgatgaaaagaaggaaacagttactcaactccaaaatatcattgaggctaattctcagcattaccaaaaaaatattaatagtttgcaggaagagcttttacagttgaaagctatacaccaagaagaggtgaaagagttgatgtgccagattgaagcatcagctaaggaacatgaagcagagataaataagttgaacgagctaaaagagaacttagtaaaacaatgtgaggcaagtgaaaagaacatccagaagaaatatgaatgtgagttagaaaatttaaggaaagccacctcaaatgcaaaccaagacaatcagatatgttctattctcttgcaagaaaatacatttgtagaacaagtagtaaatgaaaaagtcaaacacttagaagataccttaaaagaacttgaatctcaacacagtatcttaaaagatgaggtaacttatatgaataatcttaagttaaaacttgaaatggatgctcaacatataaaggatgagttttttcatgaacgggaagacttagagtttaaaattaatgaattattactagctaaagaagaacagggctgtgtaattgaaaaattaaaatctgagctagcaggtttaaataaacagttttgctatactgtagaacagcataacagagaagtacagagtcttaaggaacaacatcaaaaagaaatatcagaactaaatgagacatttttgtcagattcagaaaaagaaaaattaacattaatgtttgaaatacagggtcttaaggaacagtgtgaaaacctacagcaagaaaagcaagaagcaattttaaattatgagagtttacgagagattatggaaattttacaaacagaactgggggaatctgctggaaaaataagtcaagagttcgaatcaatgaagcaacagcaagcatctgatgttcatgaactgcagcagaagctcagaactgcttttactgaaaaagatgcccttctcgaaactgtgaatcgcctccagggagaaaatgaaaagttactatctcaacaagaattggtaccagaacttgaaaataccataaagaaccttcaagaaaagaatggagtatacttacttagtctcagtcaaagagataccatgttaaaagaattagaaggaaagataaattctcttactgaggaaaaagatgattttataaataaactgaaaaattcccatgaagaaatggataatttccataagaaatgtgaaagggaagaaagattgattcttgaacttgggaagaaagtagagcaaacaatccagtacaacagtgaactagaacaaaaggtaaatgaattaacaggaggactagaggagactttaaaagaaaaggatcaaaatgaccaaaaactagaaaaacttatggttcaaatgaaagttctctctgaagacaaagaagtattgtcagctgaagtgaagtctctttatgaggaaaacaataaactcagttcagaaaaaaaacagttgagtagggatttggaggtttttttgtctcaaaaagaagatgttatccttaaagaacatattactcaattagaaaagaaacttcagttaatggttgaagagcaagataatttaaataaactgcttgaaaatgagcaagttcagaagttatttgttaaaactcagttgtatggttttcttaaagaaatgggatcagaagtttcagaagacagtgaagagaaagatgttgttaatgtcctacaggcagtcggtgaatccttggcaaaaataaatgaggaaaaatgcaacctggcttttcagcgtgatgaaaaagtattagagttagaaaaagagattaagtgccttcaagaagagagtgtagttcagtgtgaagaacttaagtctttattgagagactatgagcaagagaaagttctcttaaggaaagagttagaagaaatacagtcagaaaaagaggccctgcagtctgatcttctagaaatgaagaatgctaatgaaaaaacaaggcttgaaaatcagaatcttttaattcaagttgaagaagtatctcaaacatgtagcaaaagtgaaatccataatgaaaaagaaaaatgttttataaaggaacatgaaaacctaaagccactactagaacaaaaagaattacgagataggagagcagagttgatactattaaaggattccttagcaaaatcaccttctgtaaaaaatgatcctctgtcttcagtaaaagagttggaagaaaaaatag

SEQ ID NO: 138805 - DNA, 786 bp, Homo sapiens
  Payload ID: 7191
  Gene Symbol: GCC2
  Gene Name: GRIP and coiled-coil domain containing 2
  ENST ID: ENST00000409821
  CDS Start-End: 45-786
gcggtggcggcggctggttgcgggccggcggcgggctggcggagatggaggtaactcaggatcttgttcaagatggggtggcttcaccagctacccctgggaccgggaaatctaagctggaaacattgcccaaagaagacctcatcaagtttgccaagaaacagatgatgctaatacagaaagctaaatcaaggtgtacagaattggagaaagaaattgaagaactcagatcaaaacctgttactgaaggaactggtgatattattaaggcattaactgaacgtctggatgctcttcttctggaaaaagcagagactgagcaacagtgtctttctctgaaaaaggaaaatataaaaatgaagcaagaggttgaggattctgtaacaaagatgggagatgcacataaggagttggaacaatcacatataaactatgtgaaagaaattgaaaatttgaaaaatgagttgatggcagtacgttccaaatacagtgaagacaaagctaacttacaaaagcagctggaagaagcaatgaatacgcaattagaactttcagaacaacttaaatttcagaacaactctgaagataatgttaaaaaactacaagaagagattgagaaaattaggccaggctttgaggagcaaattttatatctgcaaaagcaattagacgctaccactgatgaaaagaaggaaacagttactcaactccaaaatatcattgaggctaattctcagcattaccaaaaaaatattaatagtttgcaggaagagcttttacagttga

SEQ ID NO: 138806 - DNA, 540 bp, Homo sapiens
  Payload ID: 7191
  Gene Symbol: GCC2
  Gene Name: GRIP and coiled-coil domain containing 2
  ENST ID: ENST00000447558
  CDS Start-End: 1-263
aggaggagaaaataaataagataaaattagttgccgtaaaggcaaagaaagaactagattccagcagaaaagagacccagactgtgaaggaagaacttgaatctcttcgatcagaaaaggaccagttatctgcttccatgagagatctcattcaaggagcagaaagctataagaatatgaaaagcagtcagagcaactggatgtggaaaaagaacgtgctaataattttgagcatcgtattgaagaccttacaagacaattaagaaattcgactttgcagtgtgaaacaataaattctgataatgaagatctcctggctcgtattgagacattacagtctaatgccaaattattagaagtacagattttagaagtccagagagccaaagcaatggtagacaaagaattagaagctgaaaaacttcagaaagaacagaagataaaggaacatgccactactgtaaatgaacttgaagaacttcaggtacaacttcaaaagcaaaagaaacagcttcagaaaaccatgcaagaattagagct

SEQ ID NO: 138807 - DNA, 6772 bp, Homo sapiens
  Payload ID: 7191
  Gene Symbol: GCC2
  Gene Name: GRIP and coiled-coil domain containing 2
  Uniprot ID: Q8IWJ2
  ENST ID: ENST00000482325
  CDS Start-End: 36-173
gcggctggttgcgggccggcggcgggctggcggagatggaggatcttgttcaagatggggtggcttcaccagctacccctgggaccgggaaatctaagaattggagaaagaaattgaagaactcagatcaaaacctgttactgaaggaactggtgatattattaaggcattaactgaacgtctggatgctcttcttctggaaaaagcagagactgagcaacagtgtctttctctgaaaaaggaaaatataaaaatgaagcaagaggttgaggattctgtaacaaagatgggagatgcacataaggagttggaacaatcacatataaactatgtgaaagaaattgaaaatttgaaaaatgagttgatggcagtacgttccaaatacagtgaagacaaagctaacttacaaaagcagctggaagaagcaatgaatacgcaattagaactttcagaacaacttaaatttcagaacaactctgaagataatgttaaaaaactacaagaagagattgagaaaattaggccaggctttgaggagcaaattttatatctgcaaaagcaattagacgctaccactgatgaaaagaaggaaacagttactcaactccaaaatatcattgaggctaattctcagcattaccaaaaaaatattaatagtttgcaggaagagcttttacagttgaaagctatacaccaagaagaggtgaaagagttgatgtgccagattgaagcatcagctaaggaacatgaagcagagataaataagttgaacgagctaaaagagaacttagtaaaacaatgtgaggcaagtgaaaagaacatccagaagaaatatgaatgtgagttagaaaatttaaggaaagccacctcaaatgcaaaccaagacaatcagatatgttctattctcttgcaagaaaatacatttgtagaacaagtagtaaatgaaaaagtcaaacacttagaagataccttaaaagaacttgaatctcaacacagtatcttaaaagatgaggtaacttatatgaataatcttaagttaaaacttgaaatggatgctcaacatataaaggatgagttttttcatgaacgggaagacttagagtttaaaattaatgaattattactagctaaagaagaacagggctgtgtaattgaaaaattaaaatctgagctagcaggtttaaataaacagttttgctatactgtagaacagcataacagagaagtacagagtcttaaggaacaacatcaaaaagaaatatcagaactaaatgagacatttttgtcagattcagaaaaagaaaaattaacattaatgtttgaaatacagggtcttaaggaacagtgtgaaaacctacagcaagaaaagcaagaagcaattttaaattatgagagtttacgagagattatggaaattttacaaacagaactgggggaatctgctggaaaaataagtcaagagttcgaatcaatgaagcaacagcaagcatctgatgttcatgaactgcagcagaagctcagaactgcttttactgaaaaagatgcccttctcgaaactgtgaatcgcctccagggagaaaatgaaaagttactatctcaacaagaattggtaccagaacttgaaaataccataaagaaccttcaagaaaagaatggagtatacttacttagtctcagtcaaagagataccatgttaaaagaattagaaggaaagataaattctcttactgaggaaaaagatgattttataaataaactgaaaaattcccatgaagaaatggataatttccataagaaatgtgaaagggaagaaagattgattcttgaacttgggaagaaagtagagcaaacaatccagtacaacagtgaactagaacaaaaggtaaatgaattaacaggaggactagaggagactttaaaagaaaaggatcaaaatgaccaaaaactagaaaaacttatggttcaaatgaaagttctctctgaagacaaagaagtattgtcagctgaagtgaagtctctttatgaggaaaacaataaactcagttcagaaaaaaaacagttgagtagggatttggaggtttttttgtctcaaaaagaagatgttatccttaaagaacatattactcaattagaaaagaaacttcagttaatggttgaagagcaagataatttaaataaactgcttgaaaatgagcaagttcagaagttatttgttaaaactcagttgtatggttttcttaaagaaatgggatcagaagtttcagaagacagtgaagagaaagatgttgttaatgtcctacaggcagtcggtgaatccttggcaaaaataaatgaggaaaaatgcaacctggcttttcagcgtgatgaaaaagtattagagttagaaaaagagattaagtgccttcaagaagagagtgtagttcagtgtgaagaacttaagtctttattgagagactatgagcaagagaaagttctcttaaggaaagagttagaagaaatacagtcagaaaaagaggccctgcagtctgatcttctagaaatgaagaatgctaatgaaaaaacaaggcttgaaaatcagaatcttttaattcaagttgaagaagtatctcaaacatgtagcaaaagtgaaatccataatgaaaaagaaaaatgttttataaaggaacatgaaaacctaaagccactactagaacaaaaagaattacgagataggagagcagagttgatactattaaaggattccttagcaaaatcaccttctgtaaaaaatgatcctctgtcttcagtaaaagagttggaagaaaaaatagaaaatctggaaaaagaatgcaaagaaaaggaggagaaaataaataagataaaattagttgccgtaaaggcaaagaaagaactagattccagcagaaaagagacccagactgtgaaggaagaacttgaatctcttcgatcagaaaaggaccagttatctgcttccatgagagatctcattcaaggagcagaaagctataagaatcttttattagaatatgaaaagcagtcagagcaactggatgtggaaaaagaacgtgctaataattttgagcatcgtattgaagaccttacaagacaattaagaaattcgactttgcagtgtgaaacaataaattctgataatgaagatctcctggctcgtattgagacattacagtctaatgccaaattattagaagtacagattttagaagtccagagagccaaagcaatggtagacaaagaattagaagctgaaaaacttcagaaagaacagaagataaaggaacatgccactactgtaaatgaacttgaagaacttcaggtacaacttcaaaagcaaaagaaacagcttcagaaaaccatgcaagaattagagctggttaaaaaggatgcccaacaaaccacattgatgaatatggaaatagctgattatgaacgtttgatgaaagaactaaatcaaaagttaactaataaaaacaacaagatagaagatttggagcaagaaataaaaattcaaaaacagaaacaagaaaccctacaagaagaaataacttcattacagtcttcagtacaacaatatgaagaaaaaaacaccaaaatcaagcaattgcttgtgaaaaccaaaaaggaactggcagattcaaagcaagcagaaactgatcacttaatacttcaagcatctttaaaaggtgagctggaggcaagccagcagcaagtagaagtctataaaatacagctggctgaaataacatcagagaagcacaaaatccacgagcacctgaaaacctctgcggaacagcaccagcgtacgctaagtgcataccagcagagagtgacagcactacaggaagagtgccgtgctgccaaggcagaacaagctactgtaacctctgaattcgagagctacaaagtccgagttcataatgttctaaaacaacagaaaaataaatctatgtctcaggctgaaactgagggcgctaaacaagaaagggaacatctggaaatgctgattgaccagctaaaaatcaaattacaagatagccaaaataacttacagattaatgtatctgaacttcaaacattgcagtctgaacatgatacactgctagaaaggcacaacaagatgctgcaggaaactgtgtccaaagaggcggaactccgggaaaaattgtgttcaatacagtcagagaacatgatgatgaaatctgaacatacacagactgtgagtcagctaacatcccagaacgaggtccttcgaaatagcttccgagatcaagtgcgacatttgcaggaagaacacagaaagacagtggagacattacagcagcagctctccaagatggaagcacagctcttccagcttaagaatgaaccgaccacaagaagcccagtttcctctcaacaatctttgaagaaccttcgagaaaggagaaacacagacctcccgcttctagacatgcacactgtaacccgggaagagggagaaggcatggagacaactgatacggagtctgtgtcttccgccagcacatacacacagtctttagagcagctgcttaactctcccgaaactaaacttgagcctccattatggcatgctgaatttaccaaagaagaattggttcagaagctcagttccaccacaaaaagtgcagatcacttaaacggcctgcttcgggaaacagaagcaaccaatgcaattcttatggagcaaattaagcttctcaaaagtgaaataagaagattggaaaggaatcaagagcgagagaagtctgcagctaacctggaatacttgaagaacgtcttgctgcagttcattttcttgaaaccaggtagtgaaagagagagacttcttcctgttataaatacgatgttgcagctcagccctgaagaaaagggaaaacttgctgcggttgctcaaggtgaggaagaaaatgcttcccgttcttctggatgggcatcctatcttcatagttggtctggacttcgataggttgatggaaggaatatttttattaaccaaatagaatctatttacaaaaatggttcacgtatattaccacaattcttttgtcaaaaagtgtgtatatatgtttgcatctacatatatttgtacatctatatgacagatgtattttaaaagtttcatcttgaagtaaaagtacaacagcttgaagtgttgatagcaggccacagccctctaactcatgtgatttcccatgcatgctgccagaataaaaccaccaggaatgaattcactccccacttctctggaacctcaggacccgcccatttctcggcagtactgtgaattttgaagttaaactaaattttggtaccataccaactggaatttaggctttaaaaataatgtttcaaggccaggtgtggtgattcatgcctgaaatcccactactttgggaggctgaggctggagaattgcttgaggctagtgagctgtgactcccactgcactccagctcggggaacagagcgagaccttgtctctaaaaataatagtaataaaataaaaataacgttttatgactatttattgcaaggtcagagttacagattgttataaattgttgagaaatttttgtgattagaatatgaaggaaaaagctttgttggtaaaagtgacatgttaaggggctatgaagtaaatatgctgcagttaattatgctaagttaaaatacagtttagttatttgctttaaaataaactcttctttttttctttaaagtatactatctcaaaactcattatgttgtcagagccctagagctggctagtgtaacactgactatgagtaggtgggcccacacttgagttgaggtgatttcatggtgtctttccaggctcttgatagggtgtcactgcatgcaagccatgaatctgttttgagaatcctctccattttcccaaataaaaacctatcacaacagtgactatatcactcagcattggatctaaatataaaagtggtgctttcagtgtttttggcagatagtgttccataagctttccatcagaagggattttagacaccttagaggtccgtgctacatcgtcacagttcctccgaataaccttaggtggtagtgttacttgcctttgacacctctgcatatgttttaatgactagatccaaactgtgttgttcttaaatcaaaaattggataatttgtaatatttatgtgttaatcacacagtatgctctctgaagttctcttaagccttcagtttatactcttaatttaattttctttctgagctggagaactggctttgcactttggttacacagaacattggtttccaattcagtttaactgaaatttgctgctgatatgttgagtttgttctttaaaaaatagctcatatatctcatctttcctcctgtcttagaagaacagacctaactagtgaatgtattaatgaaaatgcatctatttcagagctgacatgaagagtttagtttttttactttataaactgtgaatatgagtatgccagctgcatacgatgtaactaatcatatttaaatatatttcactttctctttgactttagaccttttgaagtctgtataaacttgttttgaaatatagtctctgcttacgaatgtcataacaaaataattttttgcatgataaaaaattactttgattacaaaaggcatattctttcatggtttctgcaatgagaggaagtgtaatgattattttaatatttctattaaatatgtttaactgt

SEQ ID NO: 138808 - DNA, 982 bp, Homo sapiens
  Payload ID: 7191
  Gene Symbol: GCC2
  Gene Name: GRIP and coiled-coil domain containing 2
  ENST ID: ENST00000462897
  CDS Start-End: 1-441
cttaagtctttattgagagactatgagcaagagaaagttctcttaaggaaagagttagaagaaatacagtcagaaaaagaggccctgcagtctgatcttctagaaatgaagaatgctaatgaaaaaacaaggcttgaaaatcagaatcttttaattcaagttgaagaagtatctcaaacatgtagcaaaagtgaaatccataatgaaaaagaaaaatgttttataaaggaacatgaaaacctaaagccactactagaacaaaaagaattacgagataggagagcagagttgatactattaaaggattccttagcaaaatcaccttctgtaaaaaatgatcctctgtcttcagtaaaagagttggaagaaaaaataggaaaaaatcgactagaaaggggaaaattattgctgcagaagaaggagggagaattgttgctctgatgcttgagtaggtaatgagacgcaggatgaaatgcagatgtggaacaattggcctttgctccgcacacagacacttcactatggcagccagagggaaggcaccggtgcaagtaaattaataggccaggacagaaattcagatcataactgaatttttagaaacaaataccaagaagtcctgaactcaggagttcaagctaaagaagttaacagagatcaatattggataggtaaaacatattacaggtttcgttgtgaaaatcagacccagcagccaagaggaggagtgcacttatggagcataaatgttgatctgcatctgatatctctgatacttgatcctaatttgcacactatcacctaaagtcctagcatacctgcatttccaggaaatctaatgagaaagaagtcctgaaagcctctaattcctggaaacatatgaaacggctagaaaaaagtagactattttggaggattaaagacaatggaaactttttacattgtttgtctcacataatgaataaaattccactttaaaaaa

SEQ ID NO: 138809 - DNA, 774 bp, Homo sapiens
  Payload ID: 7191
  Gene Symbol: GCC2
  Gene Name: GRIP and coiled-coil domain containing 2
  ENST ID: ENST00000492785
  CDS Start-End: 1-383
agaaagttctcttaaggaaagagttagaagaaatacagtcagaaaaagaggccctgcagtctgatcttctagaaatgaagaatgctaatgaaaaaacaaggcttgaaaatcagaatcttttaattcaagttgaagaagtatctcaaacatgtagcaaaagtgaaatccataatgaaaaagaaaaatgttttataaaggaacatgaaaacctaaagccactactagaacaaaaagaattacgagataggagagcagagttgatactattaaaggattccttagcaaaatcaccttctgtaaaaaatgatcctctgtcttcagtaaaagagttggaagaaaaaataggtaactatggttttgcagatgttgtcacaattaattagacagattcttcttagtgttagaatagattgggaaatatagtagccaaataatgagttgttaaaaacacagttcgtagctgtcttttcctcgagctcacattcttgcccctctaacacctgtttgccttctctttcaaaagtgttactttctattgtttaacccaagcaagattggtgtgatttataaatggcttcatgatttattttggatttttcattcatttagcaaattttatttaaatgcccaactattctagaccctggtgatagaaaagtggttgaggtacagaccatgtgctcagagatctcactgttgtttgaggtgtggacaagatacagtactaacagcataggaacttaacactgttttgagttaaaaaaaaaaaaaaaa

SEQ ID NO: 138810 - DNA, 2356 bp, Homo sapiens
  Payload ID: 7191
  Gene Symbol: GCC2
  Gene Name: GRIP and coiled-coil domain containing 2
  ENST ID: ENST00000614209
  CDS Start-End: 288-2339
tgaatacgcaattagaactttcagaacaacttaaatttcagaacaactctgaagataatgttaaaaaactacaagaagagattgagaaaattaggccaggctttgaggagcaaattttatatctgcaaaagcaattagacgctaccactgatgaaaagaaggaaacagttactcaactccaaaatatcattgaggctaattctcagcattaccaaaaaaatattaatagtttgcaggaagagcttttacagttgaaagctatacaccaagaagaggtgaaagagttgatgtgccagattgaagcatcagctaaggaacatgaagcagagataaataagttgaacgagctaaaagagaacttagtaaaacaatgtgaggcaagtgaaaagaacatccagaagaaatatgaatgtgagttagaaaatttaaggaaagccacctcaaatgcaaaccaagacaatcagatatgttctattctcttgcaagaaaatacatttgtagaacaagtagtaaatgaaaaagtcaaacacttagaagataccttaaaagaacttgaatctcaacacagtatcttaaaagatgaggtaacttatatgaataatcttaagttaaaacttgaaatggatgctcaacatataaaggatgagttttttcatgaacgggaagacttagagtttaaaattaatgaattattactagctaaagaagaacagggctgtgtaattgaaaaattaaaatctgagctagcaggtttaaataaacagttttgctatactgtagaacagcataacagagaagtacagagtcttaaggaacaacatcaaaaagaaatatcagaactaaatgagacatttttgtcagattcagaaaaagaaaaattaacattaatgtttgaaatacagggtcttaaggaacagtgtgaaaacctacagcaagaaaagcaagaagcaattttaaattatgagagtttacgagagattatggaaattttacaaacagaactgggggaatctgctggaaaaataagtcaagagttcgaatcaatgaagcaacagcaagcatctgatgttcatgaactgcagcagaagctcagaactgcttttactgaaaaagatgcccttctcgaaactgtgaatcgcctccagggagaaaatgaaaagttactatctcaacaagaattggtaccagaacttgaaaataccataaagaaccttcaagaaaagaatggagtatacttacttagtctcagtcaaagagataccatgttaaaagaattagaaggaaagataaattctcttactgaggaaaaagatgattttataaataaactgaaaaattcccatgaagaaatggataatttccataagaaatgtgaaagggaagaaagattgattcttgaacttgggaagaaagtagagcaaacaatccagtacaacagtgaactagaacaaaaggtaaatgaattaacaggaggactagaggagactttaaaagaaaaggatcaaaatgaccaaaaactagaaaaacttatggttcaaatgaaagttctctctgaagacaaagaagtattgtcagctgaagtgaagtctctttatgaggaaacaataaactcagttcagaaaaaacagttgagtagggatttggaggtttttttgtctcaaaaagaagatgttatccttaaagaacatattactcaattagaaaagaaacttcagttaatggttgaagagcaagataatttaaataaactgcttgaaaatgagcaagttcagaagttatttgttaaaactcagttgtatggttttcttaaagaaatgggatcagaagtttcagaagacagtgaagagaaagatgttgttaatgtcctacaggcagtcggtgaatccttggcaaaaataaatgaggaaaaatgcaacctggcttttcagcgtgatgaaaaagtattagagttagaaaaagagattaagtgccttcaagaagagagtgtagttcagtgtgaagaacttaagtctttattgagagactatgagcaagagaaagttctcttaaggaaagagttagaagaaatacagtcagaaaaagaggccctgcagtctgatcttctagaaatgaagaatgctaatgaaaaaacaaggcttgaaaatcagaatcttttaattcaagttgaagaagtatctcaaacatgtagcaaaagtgaaatccataatgaaaaagaaaaatgttttataaaggaacatgaaaacctaaagccactactagaacaaaaagaattacgagataggagagcagagttgatactattaaaggattccttagcaaaatcaccttctaaaaaatgatcctctgtcttcagtaa

SEQ ID NO: 138811 - DNA, 3031 bp, Homo sapiens
  Payload ID: 7192
  Gene Symbol: GRIPAP1
  Gene Name: GRIP1 associated protein 1
  Uniprot ID: Q4V328
  ENST ID: ENST00000376423
  CDS Start-End: 36-2561
gcgcagaaagctggcgggggggtggggggaggaacatggcgcaagctctgtctgaggaggagtttcagcggatgcaggctcagctcctggaactccggacaaacaactaccagctttcagatgaactacgcaagaatggtgttgaactcaccagtcttcgacagaaggtcgcctacttggataaggagttcagcaaagctcagaaggcactgagcaagagcaagaaagctcaggaagtcgaggtattgctgagtgaaaatgagatgctgcaggcaaagctgcacagccaggaggaggacttccgtttgcagaacagcacactaatggccgagttcagcaagctctgcagccagatggaacagctggagcaagagaaccagcaactgaaggagggggctgcaggagcaggggttgcccaagctgggcccctcgtggatggggagctgctgaggctacaggctgaaaacacagccttgcagaagaacgtggcagccctgcaggaacgctatgggaaagaagccgggaagttctcagctgtcagtgagggccagggggatcccccagggggcctggcccccaccgtcctggcccccatgccgttggcagaggtggagctgaaatgggaaatggagaaagaggagaagagattgctctgggaacagctgcaaggcttagagagctcaaagcaggccgaaacatccaggctgcaggaggaacttgctaagctctccgagaaactgaaaaagaaacaagaaagtttttgccgtctgcagacagaaaaggagactctgtttaatgacagcaggaacaagattgaggaattacaacaacggaaggaagctgatcacaaagcccagttggctcgaacccagaagctgcagcaggaacttgaggctgccaatcagagcttggcagagctgagagatcagcggcagggggagcgcctggaacatgcagcagctttgcgggccctacaagatcaggtatccatccagagtgcagatgcacaggaacaagtggaagggcttttggctgagaacaatgccttgaggactagcctggctgccctggagcagatccaaacagcaaagacccaagaactgaatatgctccgggaacagaccactgggctggcagctgagttgcagcagcagcaggctgagtacgaggaccttatgggacagaaagatgacctcaactcccagctccaggagtcattacgggccaatagtcgactgctggaacaacttcaagaaatagggcaggagaaggagcagttgacccaggaattacaggaggctcggaagagtgcggagaagcggaaggccatgctggatgagctagcaatggaaacgctgcaagagaagtcccagcacaaggaagagctgggagcagttcgtctacggcatgagaaggaggtgctgggggtgcgtgcccgctatgagcgtgagctccgagagctgcatgaagacaagaagcgtcaggaggaggagctccgtgggcagatccgggaggagaaggcccggacacgggagctggagactctccagcagacagtggaagaacttcaagctcaggtacattccatggatggagccaagggctggtttgaacggcgcttgaaggaagccgaggaatccctgcagcagcagcagcaggaacaagaggaagccctcaagcagtgtcgggagcagcacgctgccgagctgaagggcaaggaggaggagctacaggatgtacgggatcagctcgagcaggcccaggaggagcgggactgccacctgaagaccattagcagcctgaagcaggaggtgaaggacacagtggatgggcagaggatcctggagaagaagggcagtgctgcgctcaaggacctcaagcggcagctgcatttggagcggaaacgggcagataagctgcaggagcgactgcaggacatcctcactaacagcaagagccgctcaggccttgaggagctggttctctcagagatgaactcaccaagccggacccagacaggggacagcagtagcatctcctccttcagctaccgggagatcttgcgggaaaaggagagctcggctgttccagccaggtccttatccagcagccctcaagcccagccccctcggccagcagagctgtcagatgaggaagtggctgagctctttcagcggctggcagagacacagcaggagaaatggatgctggaggagaaggtgaagcacctggaagtgagcagtgcttccatggcagaggacctctgccggaagagcgccatcattgagacctacgtcatggacagccggatcgatgtgtctgtggcagcaggccacacagaccgcagcgggctgggcagcgtcctgagagacctagtgaagccaggtgacgagaaccttcgggagatgaacaagaagctgcagaacatgctggaggagcagctcaccaagaatatgcacttgcacaaggatatggaagttctgtcccaggaaattgtgcggctcagcaaggagtgcgtggggcctcctgacccagacctagagccaggagaaaccagctaaagacctgcaggctgcacccacctcctccccttcctaccccctaggatgctattcccttgggctgtggtggaaaaatgagggctggagccaaaatcaaatagcttgggagactggacattaaaggggctagaggcctgatggttagtgttaatgatcctgtcttagggcagaggccaccagggagtggggatcctgagggaaggggcagggatttctccttcttcttggtcctggctcccaagggcttctgtcttcatctctgcatgagctctccttcccagagaccaactctttttattttattttattttattttttaatttatgtctggagcctggctactctgcatttgggattggggatgctgggtgggtgtgtggtccatgttcagcgttctagcaacacgtgtgtgtgtgtgtgtgtaaaggctatgcagccaaaataccatctggccagacgggcccacccac

SEQ ID NO: 138812 - DNA, 2908 bp, Homo sapiens
  Payload ID: 7192
  Gene Symbol: GRIPAP1
  Gene Name: GRIP1 associated protein 1
  ENST ID: ENST00000593475
  CDS Start-End: 6-2438
ggaacatggcgcaagctctgtctgaggaggagtttcagcggatgcaggctcagctcctggaactccggacaaacaactaccagctttcagatgaactacgcaagaatggtgttgaactcaccagtcttcgacagaaggtcgcctacttggataaggagttcagcaaagctcagaaggcactgagcaagagcaagaaagctcaggaagtcgaggtattgctgagtgaaaatgagatgctgcaggcaaagctgcacagccaggaggaggacttccgtttgcagaacagcacactaatggccgagttcagcaagctctgcagccagatggaacagctggagcaagagaaccagcaactgaaggagggggctgcaggagcaggggttgcccaagctgggcccctcgtggatggggagctgctgaggctacaggctgaaaacacagccttgcagaagaacgtggcagccctgcaggaacgctatgggaaagaagccgggaagttctcagctgtcagtgagggccagggggatcccccagggggcctggcccccaccgtcctggcccccatgccgttggcagaggtggagctgaaatgggaaatggagaaagaggagaagagattgctctgggaacagctgcaaggcttagagagctcaaagcaggccgaaacatccaggctgcaggaggaacttgctaagctctccgagaaactgaaaaagaaacaagaaagtttttgccgtctgcagacagaaaaggagactctgtttaatgacagcaggaacaagattgaggaattacaacaacggaaggaagctgatcacaaagcccagttggctcgaacccagaagctgcagcaggaacttgaggctgccaatcagagcttggcagagctgagagatcagcggcagggggagcgcctggaacatgcagcagctttgcgggccctacaagatcagatccaaacagcaaagacccaagaactgaatatgctccgggaacagaccactgggctggcagctgagttgcagcagcagcaggctgagtacgaggaccttatgggacagaaagatgacctcaactcccagctccaggagtcattacgggccaatagtcgactgctggaacaacttcaagaaatagggcaggagaaggagcagttgacccaggaattacaggaggctcggaagagtgcggagaagcggaaggccatgctggatgagctagcaatggaaacgctgcaagagaagtcccagcacaaggaagagctgggagcagttcgtctacggcatgagaaggaggtgctgggggtgcgtgcccgctatgagcgtgagctccgagagctgcatgaagacaagaagcgtcaggaggaggagctccgtgggcagatccgggaggagaaggcccggacacgggagctggagactctccagcagacagtggaagaacttcaagctcaggtacattccatggatggagccaagggctggtttgaacggcgcttgaaggaagccgaggaatccctgcagcagcagcagcaggaacaagaggaagccctcaagcagtgtcgggagcagcacgctgccgagctgaagggcaaggaggaggagctacaggatgtacgggatcagctcgagcaggcccaggaggagcgggactgccacctgaagaccattagcagcctgaagcaggaggtgaaggacacagtggatgggcagaggatcctggagaagaagggcagtgctgcgctcaaggacctcaagcggcagctgcatttggagcggaaacgggcagataagctgcaggagcgactgcaggacatcctcactaacagcaagagccgctcaggccttgaggagctggttctctcagagatgaactcaccaagccggacccagacaggggacagcagtagcatctcctccttcagctaccgggagatcttgcgggaaaaggagagctcggctgttccagccaggtccttatccagcagccctcaagcccagccccctcggccagcagagctgtcagatgaggaagtggctgagctctttcagcggctggcagagacacagcaggagaaatggatgctggaggagaaggtgaagcacctggaagtgagcagtgcttccatggcagaggacctctgccggaagagcgccatcattgagacctacgtcatggacagccggatcgatgtgtctgtggcagcaggccacacagaccgcagcgggctgggcagcgtcctgagagacctagtgaagccaggtgacgagaaccttcgggagatgaacaagaagctgcagaacatgctggaggagcagctcaccaagaatatgcacttgcacaaggatatggaagttctgtcccaggaaattgtgcggctcagcaaggagtgcgtggggcctcctgacccagacctagagccaggagaaaccagctaaagacctgcaggctgcacccacctcctccccttcctaccccctaggatgctattcccttgggctgtggtggaaaaatgagggctggagccaaaatcaaatagcttgggagactggacattaaaggggctagaggcctgatggttagtgttaatgatcctgtcttagggcagaggccaccagggagtggggatcctgagggaaggggcagggatttctccttcttcttggtcctggctcccaagggcttctgtcttcatctctgcatgagctctccttcccagagaccaactctttttattttattttattttattttttaatttatgtctggagcctggctactctgcatttgggattggggatgctgggtgggtgtgtggtccatgttcagcgttctagcaacacgtgtgtgtgtgtgtgtgtaaaggctatgcagccaaaataccatctggccagacgggcccacccac

SEQ ID NO: 138813 - DNA, 2881 bp, Homo sapiens
  Payload ID: 7192
  Gene Symbol: GRIPAP1
  Gene Name: GRIP1 associated protein 1
  ENST ID: ENST00000622599
  CDS Start-End: 21-2411
gggggggtggggggaggaacatggcgcaagctctgtctgaggaggagtttcagcggatgcaggctcagctcctggaactccggacaaacaactaccagctttcagatgaactacgcaagaatggtgttgaactcaccagtcttcgacagaaggtcgcctacttggataaggagttcagcaaagctcagaagctctgcagccagatggaacagctggagcaagagaaccagcaactgaaggagggggctgcaggagcaggggttgcccaagctgggcccctcgtggatggggagctgctgaggctacaggctgaaaacacagccttgcagaagaacgtggcagccctgcaggaacgctatgggaaagaagccgggaagttctcagctgtcagtgagggccagggggatcccccagggggcctggcccccaccgtcctggcccccatgccgttggcagaggtggagctgaaatgggaaatggagaaagaggagaagagattgctctgggaacagctgcaaggcttagagagctcaaagcaggccgaaacatccaggctgcaggaggaacttgctaagctctccgagaaactgaaaaagaaacaagaaagtttttgccgtctgcagacagaaaaggagactctgtttaatgacagcaggaacaagattgaggaattacaacaacggaaggaagctgatcacaaagcccagttggctcgaacccagaagctgcagcaggaacttgaggctgccaatcagagcttggcagagctgagagatcagcggcagggggagcgcctggaacatgcagcagctttgcgggccctacaagatcaggtatccatccagagtgcagatgcacaggaacaagtggaagggcttttggctgagaacaatgccttgaggactagcctggctgccctggagcagatccaaacagcaaagacccaagaactgaatatgctccgggaacagaccactgggctggcagctgagttgcagcagcagcaggctgagtacgaggaccttatgggacagaaagatgacctcaactcccagctccaggagtcattacgggccaatagtcgactgctggaacaacttcaagaaatagggcaggagaaggagcagttgacccaggaattacaggaggctcggaagagtgcggagaagcggaaggccatgctggatgagctagcaatggaaacgctgcaagagaagtcccagcacaaggaagagctgggagcagttcgtctacggcatgagaaggaggtgctgggggtgcgtgcccgctatgagcgtgagctccgagagctgcatgaagacaagaagcgtcaggaggaggagctccgtgggcagatccgggaggagaaggcccggacacgggagctggagactctccagcagacagtggaagaacttcaagctcaggtacattccatggatggagccaagggctggtttgaacggcgcttgaaggaagccgaggaatccctgcagcagcagcagcaggaacaagaggaagccctcaagcagtgtcgggagcagcacgctgccgagctgaagggcaaggaggaggagctacaggatgtacgggatcagctcgagcaggcccaggaggagcgggactgccacctgaagaccattagcagcctgaagcaggaggtgaaggacacagtggatgggcagaggatcctggagaagaagggcagtgctgcgctcaaggacctcaagcggcagctgcatttggagcggaaacgggcagataagctgcaggagcgactgcaggacatcctcactaacagcaagagccgctcaggccttgaggagctggttctctcagagatgaactcaccaagccggacccagacaggggacagcagtagcatctcctccttcagctaccgggagatcttgcgggaaaaggagagctcggctgttccagccaggtccttatccagcagccctcaagcccagccccctcggccagcagagctgtcagatgaggaagtggctgagctctttcagcggctggcagagacacagcaggagaaatggatgctggaggagaaggtgaagcacctggaagtgagcagtgcttccatggcagaggacctctgccggaagagcgccatcattgagacctacgtcatggacagccggatcgatgtgtctgtggcagcaggccacacagaccgcagcgggctgggcagcgtcctgagagacctagtgaagccaggtgacgagaaccttcgggagatgaacaagaagctgcagaacatgctggaggagcagctcaccaagaatatgcacttgcacaaggatatggaagttctgtcccaggaaattgtgcggctcagcaaggagtgcgtggggcctcctgacccagacctagagccaggagaaaccagctaaagacctgcaggctgcacccacctcctccccttcctaccccctaggatgctattcccttgggctgtggtggaaaaatgagggctggagccaaaatcaaatagcttgggagactggacattaaaggggctagaggcctgatggttagtgttaatgatcctgtcttagggcagaggccaccagggagtggggatcctgagggaaggggcagggatttctccttcttcttggtcctggctcccaagggcttctgtcttcatctctgcatgagctctccttcccagagaccaactctttttattttattttattttattttttaatttatgtctggagcctggctactctgcatttgggattggggatgctgggtgggtgtgtggtccatgttcagcgttctagcaacacgtgtgtgtgtgtgtgtgtaaaggctatgcagccaaaataccatctggccagacgggcccacccac

SEQ ID NO: 138814 - DNA, 553 bp, Homo sapiens
  Payload ID: 7192
  Gene Symbol: GRIPAP1
  Gene Name: GRIP1 associated protein 1
  ENST ID: ENST00000611705
  CDS Start-End: 485-553
gcagaaagctggcgggggggtggggggaggaacatggcgcaagctctgtctgaggaggagtttcagcggatgcagtacttggagagacagatcactgggtcctggagaggacaggagtaggaaagattctgtgaaggccaagccctctgaccttgagcagactaccagagaacaacagagtctttctctgtcacccaggctatagtgtgcagtggcacgatctcagctcactgcaacctccacctcccgggttcaagtgattctcctatctcagcttccctagtagctgggattacaggctcagctcctggaactccggacaaacaactaccagctttcagatgaactacgcaagaatggtgttgaactcaccagtcttcgacagaaggtcgcctacttggataaggagttcagcaaagctcagaaggcactgagcaagagcaagaaagctcaggaagtcgaggtattgctgagtgaaaatgagatgctgcaggcaaagctgcacagccaggaggaggacttccgtttgcagaacagcacactaatggccgag

SEQ ID NO: 138815 - DNA, 531 bp, Homo sapiens
  Payload ID: 7192
  Gene Symbol: GRIPAP1
  Gene Name: GRIP1 associated protein 1
  ENST ID: ENST00000617369
  CDS Start-End: 323-531
gcaagctctgtctgaggaggagtttcagcggatgcagtacttggagagacagatcactgggtcctggagaggacaggagtaggaaagattctgtgaaggccaagccctctgaccttgagcagactaccagagaacagctcagctcctggaactccggacaaacaactaccagctttcagatgaactacgcaagaatggtgttgaactcaccagtcttcgacagaaggtcgcctacttggataaggagttcagcaaagctcagaaggcactgagcaagagcaagaaagctcaggaagtcgaggtattgctgagtgaaaatgagatgctgcaggcaaagctgcacagccaggaggaggacttccgtttgcagaacagcacactaatggccgagttcagcaagctctgcagccagatggaacagctggagcaagagaaccagcaactgaaggagggggctgcaggagcaggggttgcccaagctgggcccctcgtggatggggagctgctgaggctacaggctgaaaacacagc

SEQ ID NO: 138816 - DNA, 471 bp, Homo sapiens
  Payload ID: 7192
  Gene Symbol: GRIPAP1
  Gene Name: GRIP1 associated protein 1
  ENST ID: ENST00000621664
  CDS Start-End: 1-184
cagccaggaggaggacttccgtttgcagaacagcacactaatggccgagttcagcaagccctgcaggaacgctatgggaaagaagccgggaagttctcagctgtcagtgagggccagggggatcccccagggggcctggcccccaccgtcctggcccccatgccgttggcagaggtggagctgaaatgggaaatggagaaagaggagaagagattgctctgggaacagctgcaaggcttagagagctcaaagcaggccgaaacatccaggctgcaggaggaacttgctaagctctccgagaaactgaaaaagaaacaagaaagtttttgccgtctgcagacagaaaaggagactctgtttaatgacagcaggaacaagattgaggaattacaacaacggaaggaagctgatcacaaagcccagttggctcgaacccagaagctgcagcaggaacttgaggctgccaatcag

SEQ ID NO: 138817 - DNA, 904 bp, Homo sapiens
  Payload ID: 7192
  Gene Symbol: GRIPAP1
  Gene Name: GRIP1 associated protein 1
  ENST ID: ENST00000619107
  CDS Start-End: 1-904
ggccaatagtcgactgctggaacaacttcaagaaatagggcaggagaaggagcagttgacccaggaattacaggaggctcggaagagtgcggagaagcggaaggccatgctggatgagctagcaatggaaacgctgcaagagaagtcccagcacaaggaagagctgggagcagttcgtctacggcatgagaaggaggtgctgggggtgcgtgcccgctatgagcgtgagctccgagagctgcatgaagacaagaagcgtcaggaggaggagctccgtgggcagatccgggaggagaaggcccggacacgggagctggagactctccagcagacagtggaagaacttcaagctcaggtacattccatggatggagccaagggctggtttgaacggcgcttgaaggaagccgagggcaaggaggaggagctacaggatgtacgggatcagctcgagcaggcccaggaggagcgggactgccacctgaagaccattagcagcctgaagcaggaggtgaaggacacagtggatgggcagaggatcctggagaagaagggcagtgctgcgctcaaggacctcaagcggcagctgcatttggagcggaaacgggcagataagctgcaggagcgactgcaggacatcctcactaacagcaagagccgctcaggccttgaggagctggttctctcagagatgaactcaccaagccggacccagacaggggacagcagtagcatctcctccttcagctaccgggagatcttgcgggaaaaggagagctcggctgttccagccaggtccttatccagcagccctcaagcccagccccctcggccagcagagctgtcagatgaggaagtggctgagctctttcagcggctggcagagacacagcaggagaaatgg

SEQ ID NO: 138818 - DNA, 367 bp, Homo sapiens
  Payload ID: 7192
  Gene Symbol: GRIPAP1
  Gene Name: GRIP1 associated protein 1
  ENST ID: ENST00000622231
  CDS Start-End: 5-367
gcggatgcaggctcagctcctggaactccggacaaacaactaccagctttcagatgaactacgcaagaatggtgttgaactcaccagtcttcgacagaaggtcgcctacttggataaggagttcagcaaagctcagaaggcactgagcaagagcaagaaagctcaggaagtcgaggtattgctgagtgaaaatgagatgctgcaggcaaagctgcacagccaggaggaggacttccgtttgcagaacagcacactaatggccgagttcagcaaggaacgctatgggaaagaagccgggaagttctcagctgtcagtgagggccagggggatcccccagggggcctggcccccaccgtcctggccccc

SEQ ID NO: 138819 - DNA, 1972 bp, Homo sapiens
  Payload ID: 7193
  Gene Symbol: GC
  Gene Name: group-specific component (vitamin D binding protein)
  Uniprot ID: P02774
  ENST ID: ENST00000273951
  CDS Start-End: 345-1769
atattaagtaaactttagtgaggaacagcagtggaaaataatctatataccttggctcttttgcagtttgacaaagttaatgattaaaatctcctagattttccactacagtatccccagggtgtctatttaccttgattgatattattttatctcttttgggccaaagataacagccccttgcttctgtgtttaataataattctgtgttgcttctgagattaataattgattaattcatagtcaggaatctttgtaaaaaggaaaccaattacttttggctaccacttttacatggtcacctacaggagagaggaggtgctgcaagactctctggtagaaaaatgaagagggtcctggtactactgcttgctgtggcatttggacatgctttagagagaggccgggattatgaaaagaataaagtctgcaaggaattctcccatctgggaaaggaggacttcacatctctgtcactagtcctgtacagtagaaaatttcccagtggcacgtttgaacaggtcagccaacttgtgaaggaagttgtctccttgaccgaagcctgctgtgcggaaggggctgaccctgactgctatgacaccaggacctcagcactgtctgccaagtcctgtgaaagtaattctccattccccgttcacccaggcactgctgagtgctgcaccaaagagggcctggaacgaaagctctgcatggctgctctgaaacaccagccacaggaattccctacctacgtggaacccacaaatgatgaaatctgtgaggcgttcaggaaagatccaaaggaatatgctaatcaatttatgtgggaatattccactaattacggacaagctcctctgtcacttttagtcagttacaccaagagttatctttctatggtagggtcctgctgtacctctgcaagcccaactgtatgctttttgaaagagagactccagcttaaacatttatcacttctcaccactctgtcaaatagagtctgctcacaatatgctgcttatggggagaagaaatcaaggctcagcaatctcataaagttagcccaaaaagtgcctactgctgatctggaggatgttttgccactagctgaagatattactaacatcctctccaaatgctgtgagtctgcctctgaagattgcatggccaaagagctgcctgaacacacagtaaaactctgtgacaatttatccacaaagaattctaagtttgaagactgttgtcaagaaaaaacagccatggacgtttttgtgtgcacttacttcatgccagctgcccaactccccgagcttccagatgtagagttgcccacaaacaaagatgtgtgtgatccaggaaacaccaaagtcatggataagtatacatttgaactaagcagaaggactcatcttccggaagtattcctcagtaaggtacttgagccaaccctaaaaagccttggtgaatgctgtgatgttgaagactcaactacctgttttaatgctaagggccctctactaaagaaggaactatcttctttcattgacaagggacaagaactatgtgcagattattcagaaaatacatttactgagtacaagaaaaaactggcagagcgactaaaagcaaaattgcctgatgccacacccacggaactggcaaagctggttaacaagcactcagactttgcctccaactgctgttccataaactcacctcctctttactgtgattcagagattgatgctgaattgaagaatatcctgtagtcctgaagcatgtttattaactttgaccagagttggagccacccaggggaatgatctctgatgacctaacctaagcaaaaccactgagcttctgggaagacaactaggatactttctactttttctagctacaatatcttcatacaatgacaagtatgatgatttgctatcaaaataaattgaaatataatgcaaaccataaa

SEQ ID NO: 138820 - DNA, 1777 bp, Homo sapiens
  Payload ID: 7193
  Gene Symbol: GC
  Gene Name: group-specific component (vitamin D binding protein)
  Uniprot ID: P02774
  ENST ID: ENST00000504199
  CDS Start-End: 96-1577
actgttttttcaaagagattgcttactccaccaggagaatgatatctacctattctaccactggtgatgatctggactagtccaactggtaggaaatgctgtggtcttggagtgaggagagaggaggtgctgcaagactctctggtagaaaaatgaagagggtcctggtactactgcttgctgtggcatttggacatgctttagagagaggccgggattatgaaaagaataaagtctgcaaggaattctcccatctgggaaaggaggacttcacatctctgtcactagtcctgtacagtagaaaatttcccagtggcacgtttgaacaggtcagccaacttgtgaaggaagttgtctccttgaccgaagcctgctgtgcggaaggggctgaccctgactgctatgacaccaggacctcagcactgtctgccaagtcctgtgaaagtaattctccattccccgttcacccaggcactgctgagtgctgcaccaaagagggcctggaacgaaagctctgcatggctgctctgaaacaccagccacaggaattccctacctacgtggaacccacaaatgatgaaatctgtgaggcgttcaggaaagatccaaaggaatatgctaatcaatttatgtgggaatattccactaattacggacaagctcctctgtcacttttagtcagttacaccaagagttatctttctatggtagggtcctgctgtacctctgcaagcccaactgtatgctttttgaaagagagactccagcttaaacatttatcacttctcaccactctgtcaaatagagtctgctcacaatatgctgcttatggggagaagaaatcaaggctcagcaatctcataaagttagcccaaaaagtgcctactgctgatctggaggatgttttgccactagctgaagatattactaacatcctctccaaatgctgtgagtctgcctctgaagattgcatggccaaagagctgcctgaacacacagtaaaactctgtgacaatttatccacaaagaattctaagtttgaagactgttgtcaagaaaaaacagccatggacgtttttgtgtgcacttacttcatgccagctgcccaactccccgagcttccagatgtagagttgcccacaaacaaagatgtgtgtgatccaggaaacaccaaagtcatggataagtatacatttgaactaagcagaaggactcatcttccggaagtattcctcagtaaggtacttgagccaaccctaaaaagccttggtgaatgctgtgatgttgaagactcaactacctgttttaatgctaagggccctctactaaagaaggaactatcttctttcattgacaagggacaagaactatgtgcagattattcagaaaatacatttactgagtacaagaaaaaactggcagagcgactaaaagcaaaattgcctgatgccacacccacggaactggcaaagctggttaacaagcactcagactttgcctccaactgctgttccataaactcacctcctctttactgtgattcagagattgatgctgaattgaagaatatcctgtagtcctgaagcatgtttattaactttgaccagagttggagccacccaggggaatgatctctgatgacctaacctaagcaaaaccactgagcttctgggaagacaactaggatactttctactttttctagctacaatatcttcatacaatgacaagtatgatgatttgctatcaaaataaattgaaatataatgcaaaccat

SEQ ID NO: 138821 - DNA, 1510 bp, Homo sapiens
  Payload ID: 7193
  Gene Symbol: GC
  Gene Name: group-specific component (vitamin D binding protein)
  ENST ID: ENST00000509740
  CDS Start-End: 48-1094
gtcacctacaggagagaggaggtgctgcaagactctctggtagaaaaatgaagagggtcctggtactactgcttgctgtggcatttggacatgctttagagagaggccgggattatgaaaagaataaagtctgcaaggaattctcccatctgggaaaggaggacttcacatctctgtcactagtcctgtacagtagaaaatttcccagtggcacgtttgaacaggtcagccaacttgtgaaggaagttgtctccttgaccgaagcctgctgtgcggaaggggctgaccctgactgctatgacaccaggacctcagcactgtctgccaagtcctgtgaaagtaattctccattccccgttcacccaggcactgctgagtgctgcaccaaagagggcctggaacgaaagctctgcatggctgctctgaaacaccagccacaggaattccctacctacgtggaacccacaaatgatgaaatctgtgaggcgttcaggaaagatccaaaggaatatgctaatcaatttatgtgggaatattccactaattacggacaagctcctctgtcacttttagtcagttacaccaagagttatctttctatggtagggtcctgctgtacctctgcaagcccaactgtatgctttttgaaagagagactccagcttaaacatttatcacttctcaccactctgtcaaatagagtctgctcacaatatgctgcttatggggagaagaaatcaaggctcagcaatctcataaagttagcccaaaaagtgcctactgctgatctggaggatgttttgccactagctgaagatattactaacatcctctccaaatgctgtgagtctgcctctgaagattgcatggccaaagagctgcctgaacacacagtaaaactctgtgacaatttatccacaaagaattctaagtttgaagactgttgtcaagaaaaaacagccatggacgtttttgtgtgcacttacttcatgccagctgcccaactccccgagcttccagatgtagagttgcccacaaacaaagatgtgtgtgatccaggaaacaccaaagtcatggataaggccctctactaaagaaggaactatcttctttcattgacaagggacaagaactatgtgcagattattcagaaaatacatttactgagtacaagaaaaaactggcagagcgactaaaagcaaaattgcctgatgccacacccacggaactggcaaagctggttaacaagcactcagactttgcctccaactgctgttccataaactcacctcctctttactgtgattcagagattgatgctgaattgaagaatatcctgtagtcctgaagcatgtttattaactttgaccagagttggagccacccaggggaatgatctctgatgacctaacctaagcaaaaccactgagcttctgggaagacaactaggatactttctactttttctagctacaatatcttcatacaatgacaagtatgatgatttgct

SEQ ID NO: 138822 - DNA, 1567 bp, Homo sapiens
  Payload ID: 7193
  Gene Symbol: GC
  Gene Name: group-specific component (vitamin D binding protein)
  ENST ID: ENST00000513476
  CDS Start-End: 29-1459
aggtgctgcaagactctctggtagaaaaatgaagagggtcctggtactactgcttgctgtggcatttggacatgctttagagagaggccgggattatgaaaagaataaagtctgcaaggaattctcccatctgggaaaggaggacttcacatctctgtcactagtcctgtacagtagaaaatttcccagtggcacgtttgaacaggtcagccaacttgtgaaggaagttgtctccttgaccgaagcctgctgtgcggaaggggctgaccctgactgctatgacaccaggacctcagcactgtctgccaagtcctgtgaaagtaattctccattccccgttcacccaggcactgctgagtgctgcaccaaagagggcctggaacgaaagctctgcatggctgctctgaaacaccagccacaggaattccctacctacgtggaacccacaaatgatgaaatctgtgaggcgttcaggaaagatccaaaggaatatgctaatcaatttatgtgggaatattccactaattacggacaagctcctctgtcacttttagtcagttacaccaagagttatctttctatggtagggtcctgctgtacctctgcaagcccaactgtatgctttttgaaagagagactccagcttaaacatttatcacttctcaccactctgtcaaatagagtctgctcacaatatgctgcttatggggagaagaaatcaaggctcagcaatctcataaagttagcccaaaaagtgcctactgctgatctggaggatgttttgccactagctgaagatattactaacatcctctccaaatgctgtgagtctgcctctgaagattgcatggccaaagagctgcctgaacacacagtaaaactctgtgacaatttatccacaaagaattctaagtttgaagactgttgtcaagaaaaaacagccatggacgtttttgtgtgcacttacttcatgccagctgcccaactccccgagcttccagatgtagagttgcccacaaacaaagatgtgtgtgatccaggaaacaccaaagtcatggataagtatacatttgaactaagcagaaggactcatcttccggaagtattcctcagtaaggtacttgagccaaccctaaaaagccttggtgaatgctgtgatgttgaagactcaactacctgttttaatgctaagggccctctactaaagaaggaactatcttctttcattgacaagggacaagaactatgtgcagattattcagaaaatacatttactgagtacaagaaaaaactggcagagcgactaaaagcaaaattgcctgatgccacacccacggaactggcaaagctggttaacaagcactcagactttgcctccaactgctgttccataaactcacctcctctttactgtgattcagagaccagagttggagccacccaggggaatgatctctgatgacctaacctaagcaaaaccactgagcttctgggaagacaactaggatactttctactttttctagctacaatatcttcatacaatgacaagtatgatgatttgcta

SEQ ID NO: 138823 - DNA, 562 bp, Homo sapiens
  Payload ID: 7193
  Gene Symbol: GC
  Gene Name: group-specific component (vitamin D binding protein)
  ENST ID: ENST00000506245
  CDS Start-End: 128-562
atcaaaattcgtagaaaataatctgagtgtgtctttttgaatgaactaatcagaagatgacgaaatacagttgaataaaagggatacagaagagagaggaggtgctgcaagactctctggtagaaaaatgaagagggtcctggtactactgcttgctgtggcatttggacatgctttagagagaggccgggattatgaaaagaataaagtctgcaaggaattctcccatctgggaaaggaggacttcacatctctgtcactagtcctgtacagtagaaaatttcccagtggcacgtttgaacaggtcagccaacttgtgaaggaagttgtctccttgaccgaagcctgctgtgcggaaggggctgaccctgactgctatgacaccaggacctcagcactgtctgccaagtcctgtgaaagtaattctccattccccgttcacccaggcactgctgagtgctgcaccaaagagggcctggaacgaaagctctgcatggctgctctgaaacaccagccacaggaattccctacctacgtggaacccacaaatgatgaaatctgt

SEQ ID NO: 138824 - DNA, 803 bp, Homo sapiens
  Payload ID: 7194
  Gene Symbol: GADD45A
  Gene Name: growth arrest and DNA-damage-inducible, alpha
  Uniprot ID: P24522
  ENST ID: ENST00000370985
  CDS Start-End: 295-690
agtggctggtaggcagtggctgggaggcagcggcccaattagtgtcgtgcggcccgtggcgaggcgaggtccggggagcgagcgagcaagcaaggcgggaggggtggccggagctgcggcggctggcacaggaggaggagcccgggcgggcgaggggcggccggagagcgccagggcctgagctgccggagcggcgcctgtgagtgagtgcagaaagcaggcgcccgcgcgctagccgtggcaggagcagcccgcacgccgcgctctctccctgggcgacctgcagtttgcaatatgactttggaggaattctcggctggagagcagaagaccgaaagcgaccccgataacgtggtgttgtgcctgctggcggcggacgaggacgacgacagagatgtggctctgcagatccacttcaccctgatccaggcgttttgctgcgagaacgacatcaacatcctgcgcgtcagcaacccgggccggctggcggagctcctgctcttggagaccgacgctggccccgcggcgagcgagggcgccgagcagcccccggacctgcactgcgtgctggtgacgaatccacattcatctcaatggaaggatcctgccttaagtcaacttatttgtttttgccgggaaagtcgctacatggatcaatgggttccagtgattaatctccctgaacggtgatggcatctgaatgaaaataactgaaccaaattgcactgaagtttttgaaatacctttgtagttactcaagcagttactccctacactgatgcaaggattacagaaactgatgc

SEQ ID NO: 138825 - DNA, 1496 bp, Homo sapiens
  Payload ID: 7194
  Gene Symbol: GADD45A
  Gene Name: growth arrest and DNA-damage-inducible, alpha
  Uniprot ID: P24522
  ENST ID: ENST00000370986
  CDS Start-End: 435-932
ctgactccaggagctggggtcaaattgctggagcaggctgatttgcatagcccaatggccaagctgcatgcaaatgaggcggaaggtggttggctgagggttggcaggataaccccggagagcggggccctttgtcctccagtggctggtaggcagtggctgggaggcagcggcccaattagtgtcgtgcggcccgtggcgaggcgaggtccggggagcgagcgagcaagcaaggcgggaggggtggccggagctgcggcggctggcacaggaggaggagcccgggcgggcgaggggcggccggagagcgccagggcctgagctgccggagcggcgcctgtgagtgagtgcagaaagcaggcgcccgcgcgctagccgtggcaggagcagcccgcacgccgcgctctctccctgggcgacctgcagtttgcaatatgactttggaggaattctcggctggagagcagaagaccgaaaggatggataaggtgggggatgccctggaggaagtgctcagcaaagccctgagtcagcgcacgatcactgtcggggtgtacgaagcggccaagctgctcaacgtcgaccccgataacgtggtgttgtgcctgctggcggcggacgaggacgacgacagagatgtggctctgcagatccacttcaccctgatccaggcgttttgctgcgagaacgacatcaacatcctgcgcgtcagcaacccgggccggctggcggagctcctgctcttggagaccgacgctggccccgcggcgagcgagggcgccgagcagcccccggacctgcactgcgtgctggtgacgaatccacattcatctcaatggaaggatcctgccttaagtcaacttatttgtttttgccgggaaagtcgctacatggatcaatgggttccagtgattaatctccctgaacggtgatggcatctgaatgaaaataactgaaccaaattgcactgaagtttttgaaatacctttgtagttactcaagcagttactccctacactgatgcaaggattacagaaactgatgccaaggggctgagtgagttcaactacatgttctgggggcccggagatagatgactttgcagatggaaagaggtgaaaatgaagaaggaagctgtgttgaaacagaaaaataagtcaaaaggaacaaaaattacaaagaaccatgcaggaaggaaaactatgtattaatttagaatggttgagttacattaaaataaaccaaatatgttaaagtttaagtgtgcagccatagtttgggtatttttggtttatatgccctcaagtaaaagaaaagccgaaagggttaatcatatttgaaaaccatattttattgtattttgatgagatattaaattctcaaagttttattataaattctactaagttattttatgacatgaaaagttatttatgctataaattttttgaaacacaatacctacaataaactggtatgaataattgcatcatttc

SEQ ID NO: 138826 - DNA, 1142 bp, Homo sapiens
  Payload ID: 7194
  Gene Symbol: GADD45A
  Gene Name: growth arrest and DNA-damage-inducible, alpha
  ENST ID: ENST00000617962
  CDS Start-End: 319-501
ggagagcggggccctttgtcctccagtggctggtaggcagtggctgggaggcagcggcccaattagtgtcgtgcggcccgtggcgaggcgaggtccggggagcgagcgagcaagcaaggcgggaggggtggccggagctgcggcggctggcacaggaggaggagcccgggcgggcgaggggcggccggagagcgccagggcctgagctgccggagcggcgcctgtgagtgagtgcagaaagcaggcgcccgcgcgctagccgtggcaggagcagcccgcacgccgcgctctctccctgggcgacctgcagtttgcaatatgactttggaggaattctcggctggagagcagaagaccgaaaggatggataaggtgggggatgccctggaggaagtgctcagcaaagccctgagtcagcgcacgatcactgtcggggtgtacgaagcggccaagctgctcaacgtaatccacattcatctcaatggaaggatcctgccttaagtcaacttatttgtttttgccgggaaagtcgctacatggatcaatgggttccagtgattaatctccctgaacggtgatggcatctgaatgaaaataactgaaccaaattgcactgaagtttttgaaatacctttgtagttactcaagcagttactccctacactgatgcaaggattacagaaactgatgccaaggggctgagtgagttcaactacatgttctgggggcccggagatagatgactttgcagatggaaagaggtgaaaatgaagaaggaagctgtgttgaaacagaaaaataagtcaaaaggaacaaaaattacaaagaaccatgcaggaaggaaaactatgtattaatttagaatggttgagttacattaaaataaaccaaatatgttaaagtttaagtgtgcagccatagtttgggtatttttggtttatatgccctcaagtaaaagaaaagccgaaagggttaatcatatttgaaaaccatattttattgtattttgatgagatattaaattctcaaagttttattataaattctactaagttattttatgacatgaaaagttatttatgctataaattttttgaaacacaatacctacaataaactggtatgaataattgcatcatttc

SEQ ID NO: 138827 - DNA, 1373 bp, Homo sapiens
  Payload ID: 7195
  Gene Symbol: GADD45B
  Gene Name: growth arrest and DNA-damage-inducible, beta
  Uniprot ID: O75293
  ENST ID: ENST00000215631
  CDS Start-End: 233-715
agatcgccgaagcgtcggactaccgttggtttccgcaacttcctggattatcctcgccaaggactttgcaatatatttttccgccttttctggaaggatttcgctgcttcccgaaggtcttggacgagcgctctagctctgtgggaaggttttgggctctctggctcggattttgcaatttctccctggggactgccgtggagccgcatccactgtggattataattgcaacatgacgctggaagagctcgtggcgtgcgacaacgcggcgcagaagatgcagacggtgaccgccgcggtggaggagcttttggtggccgctcagcgccaggatcgcctcacagtgggggtgtacgagtcggccaagttgatgaatgtggacccagacagcgtggtcctctgcctcttggccattgacgaggaggaggaggatgacatcgccctgcaaatccacttcacgctcatccagtccttctgctgtgacaacgacatcaacatcgtgcgggtgtcgggcatgcagcgcctggcgcagctcctgggagagccggccgagacccagggcaccaccgaggcccgagacctgcattgtctcctggtcacgaaccctcacacggacgcctggaagagccacggcttggtggaggtggccagctactgcgaagaaagccggggcaacaaccagtgggtcccctacatctctcttcaggaacgctgaggcccttcccagcagcagaatctgttgagttgctgccacaaacaaaaaatacaataaatatttgaaccccctcccccccagcacaacccccccaaaacaacccaacccacgaggaccatcgggggcagagtcgttggagactgaagaggaagaggaggaggagaaggggagtgagcggccgcccccagggcggagatccaggagctggcggccgccgatccgatggagaaggggggacccaggccagcaggagacaggacccccgaagctgaggccttgggatggagcagaagccggagtggcggggcacgctgccgccttccccatcacggagggtccagactgtccactcgggggtggagtgagactgactgcaagccccaccctccttgagactggagctggcgtctgcatacgagagacttggttgaacttggttggtccttgtctgcaccctcgacaagaccacactttgggacttgggagctggggctgaagttgctctgtacccatgaactcccagtttgcgaattatagagacaatctattttgttacttgcacttgttattcgaaccactgagagcgagatgggaagcatagatatctatatttttatttctactatgagggccttgtaataaatttctaaagcctctg

SEQ ID NO: 138828 - DNA, 750 bp, Homo sapiens
  Payload ID: 7195
  Gene Symbol: GADD45B
  Gene Name: growth arrest and DNA-damage-inducible, beta
  ENST ID: ENST00000585359
  CDS Start-End: 214-396
ctaccgttggtttccgcaacttcctggattatcctcgccaaggactttgcaatatatttttccgccttttctggaaggatttcgctgcttcccgaaggtcttggacgagcgctctagctctgtgggaaggttttgggctctctggctcggattttgcaatttctccctggggactgccgtggagccgcatccactgtggattataattgcaacatgacgctggaagagctcgtggcgtgcgacaacgcggcgcagaagatgcagacggtgaccgccgcggtggaggagcttttggtggccgctcagcgccaggatcgcctcacagtgggggtgtacgagtcggccaagttgatgaatggacccagacagcgtggtcctctgcctcttggccattgacgaggaggaggaggatgacatcgccctgcaaatccacttcacgctcatccagtccttctgctgtgacaacgacatcaacatcgtgcgggtgtcgggcatgcagcgcctggcgcagctcctgggagagccggccgagacccagggcaccaccgaggcccgagacctgcattgtctcctggtcacgaaccctcacacggacgcctggaagagccacggcttggtggaggtggccagctactgcgaagaaagccggggcaacaaccagtgggtcccctacatctctcttcaggaacgctgaggcccttcccagcagcagaatctgttgagttgctgccacaaacaaaaaatacaata

SEQ ID NO: 138829 - DNA, 765 bp, Homo sapiens
  Payload ID: 7195
  Gene Symbol: GADD45B
  Gene Name: growth arrest and DNA-damage-inducible, beta
  ENST ID: ENST00000587345
  CDS Start-End: 212-742
accgttggtttccgcaacttcctggattatcctcgccaaggactttgcaatatatttttccgccttttctggaaggatttcgctgcttcccgaaggtcttggacgagcgctctagctctgtgggaaggttttgggctctctggctcggattttgcaatttctccctggggactgccgtggagccgcatccactgtggattataattgcaacatgacgctggaagagctcgtggcgtgcgacaacgcggcgcagaagatgcagacggtgaccgccgcggtggaggagcttttggtggccgctcagcgccaggatcgcctcacagtgggggtgtacgagtcggccaagttgatgaatgtggacccagacagcgtggtcctctgcctcttggccattgacgaggaggaggaggatgacatcgccctgcaaatccacttcacgctcatccagtccttctgctgtgacaacgacatcaacatcgtgcgggtgtcgggcatgcagcgcctggcgcagctcctgggagagccggccgagacccagggcaccaccgaggcccgagacctgcattgtctcctggtcacggtgagtcgggcctctgccctgccccgccacgcccgggcacctgggccggtgtttgtcaacaaagtcgggctgactggtcctgcacagctcagcgctcagccacgtttggcatgtcccgtgggcagccgggctggggcctcctcacccaggaagctattttgagcctgactgttttccccacacag

SEQ ID NO: 138830 - DNA, 373 bp, Homo sapiens
  Payload ID: 7195
  Gene Symbol: GADD45B
  Gene Name: growth arrest and DNA-damage-inducible, beta
  ENST ID: ENST00000593043
  CDS Start-End: 175-373
aacatgacgctggaagagctcgtggcgtgcgacaacgcggcgcagaagtaagtagccggggctgccgccgcctgaggtcagccgggacgggatgggtcgggttgggccgggccgggagcggaacgtagcacccggtggtccgcccgtcactgatccctctttcctggtctcaggatgcagacggtgaccgccgcggtggaggagcttttggtggccgctcagcgccaggatcgcctcacagtgggggtgtacgagtcggccaagttgatgaatgtggacccagacagcgtggtcctctgcctcttggccattgacgaggaggaggaggatgacatcgccctgcaaatccacttcacgctcatccagtccttct

SEQ ID NO: 138831 - DNA, 276 bp, Homo sapiens
  Payload ID: 7195
  Gene Symbol: GADD45B
  Gene Name: growth arrest and DNA-damage-inducible, beta
  ENST ID: ENST00000587887
  CDS Start-End: 78-276
aacatgacgctggaagagctcgtggcgtgcgacaacgcggcgcagaagtaagtagccggggctgccgccgcctgaggatgcagacggtgaccgccgcggtggaggagcttttggtggccgctcagcgccaggatcgcctcacagtgggggtgtacgagtcggccaagttgatgaatgtggacccagacagcgtggtcctctgcctcttggccattgacgaggaggaggaggatgacatcgccctgcaaatccacttcacgctcatccagtccttct

SEQ ID NO: 138832 - DNA, 1065 bp, Homo sapiens
  Payload ID: 7196
  Gene Symbol: GADD45G
  Gene Name: growth arrest and DNA-damage-inducible, gamma
  Uniprot ID: O95257
  ENST ID: ENST00000252506
  CDS Start-End: 110-589
cactcgctggtggtgggcgcgccgtgctgagctctggctgtcagtgtgttcgcccgcgtcccctccgcgctctccgcttgtggataactagctgctggttgatcgcactatgactctggaagaagtccgcggccaggacacagttccggaaagcacagccaggatgcagggtgccgggaaagcgctgcatgagttgctgctgtcggcgcagcgtcagggctgcctcactgccggcgtctacgagtcagccaaagtcttgaacgtggaccccgacaatgtgaccttctgtgtgctggctgcgggtgaggaggacgagggcgacatcgcgctgcagatccattttacgctgatccaggctttctgctgcgagaacgacatcgacatagtgcgcgtgggcgatgtgcagcggctggcggctatcgtgggcgccggcgaggaggcgggtgcgccgggcgacctgcactgcatcctcatttcgaaccccaacgaggacgcctggaaggatcccgccttggagaagctcagcctgttttgcgaggagagccgcagcgttaacgactgggtgcccagcatcaccctccccgagtgacagcccggcggggaccttggtctgatcgacgtggtgacgccccggggcgcctagagcgcggctggctctgtggaggggccctccgagggtgcccgagtgcggcgtggagactggcaggcggggggggcgcctggagagcgaggaggcgcggcctcccgaggaggggcccggtggcggcagggccaggctggtccgagctgaggactctgcaagtgtctggagcggctgctcgcccaggaaggcctaggctaggacgttggcctcagggccaggaaggacagactggccgggcaggcgtgactcagcagcctgcgctcggcaggaaggagcggcgccctggacttggtacagttgcaggagcgtgaaggacttagccgactgcgctgctttttcaaaacggatccgggcaatgcttcgttttctaaaggatgctgctgttgaagctttgaattttacaataaactttttgaaacaaa

SEQ ID NO: 138833 - DNA, 977 bp, Homo sapiens
  Payload ID: 7196
  Gene Symbol: GADD45G
  Gene Name: growth arrest and DNA-damage-inducible, gamma
  ENST ID: ENST00000375769
  CDS Start-End: 396-821
gctgagctctggctgtcagtgtgttcgcccgcgtcccctccgcgctctccgcttgtggataactagctgctggttgatcgcactatgactctggaagaagtccgcggccaggacacagttccggaaagcacagccaggtgggtttcagggcgctgagaaagccgctggtcggtcggcgaccgtcagggttttccagggtgggaatccgcggggtaggaggggagcgcgggggtccgggcgccagatcccggttggagagccggggtgcaggcgctgagccgggattggagtgtggttggagttggggagccaagggtgtgtgccggtggccggggctggggtctccgccgcgccctccggccggctcccgctcactgcgctggctcctccgcaggatgcagggtgccgggaaagcgctgcatgagttgctgctgtcggcgcagcgtcagggctgcctcactgccggcgtctacgagtcagccaaagtcttgaacgtggaccccgacaatgtgaccttctgtgtgctggctgcgggtgaggaggacgagggcgacatcgcgctgcagatccattttacgctgatccaggctttctgctgcgagaacgacatcgacatagtgcgcgtgggcgatgtgcagcggctggcggctatcgtgggcgccggcgaggaggcgggtgcgccgggcgacctgcactgcatcctcatttcgaaccccaacgaggacgcctggaaggatcccgccttggagaagctcagcctgttttgcgaggagagccgcagcgttaacgactgggtgcccagcatcaccctccccgagtgacagcccggcggggaccttggtctgatcgacgtggtgacgccccggggcgcctagagcgcggctggctctgtggaggggccctccgagggtgcccgagtgcggcgtggagactggcaggcggggggggcgcctggagagcgaggaggcgcggcctcc

SEQ ID NO: 138834 - DNA, 1782 bp, Homo sapiens
  Payload ID: 7197
  Gene Symbol: GADD45GIP1
  Gene Name: growth arrest and DNA-damage-inducible, gamma interacting protein 1
  Uniprot ID: Q8TAE8
  ENST ID: ENST00000316939
  CDS Start-End: 25-693
ctgtgaggaccccgcacagccaagatggcggcgtccgtgcgacaggcacgcagcctactaggtgtggcggcgaccctggccccgggttcccgtggctaccgggcgcggccgcccccgcgccgcaggccgggaccccggtggccagaccccgaggacctcctgaccccgcggtggcagctgggaccgcgctacgcggctaagcagttcgcgcgttacggcgccgcctccggggtggtccccggttcgttatggccgtcgccggagcagctgcgggagctggaggccgaagaacgcgaatggtacccgagcctggcgaccatgcaggagtcgctgcgggtgaagcagctggccgaagagcagaagcgtcgggagagggagcagcacatcgcagagtgcatggccaagatgccacagatgattgtgaactggcagcagcagcagcgggagaactgggagaaggcccaggctgacaaggagaggagggcccgactgcaggctgaggcccaggagctcctgggctaccaggtggacccaaggagtgcccgcttccaggagctgctccaggacctagagaagaaggagcgcaagcgcctcaaggaggaaaaacagaaacggaagaaggaggcgcgagctgctgcattggctgcagctgtggctcaagacccagcagcctctggggcacccagctcctgaggctttgtcccttcccaataaagcctgctacctggcagtacccctgaagagatctgcgtcctctcaaggtgtgcctctctgggtcccctggttcctcccccaatacttaagagctggggaatcccccacttggctgtactcaaaaggggacagggactctaggccctgctgactaactggggcttcagtgggaggaaaaggggggtgtacaatgggcaaataatggagaagcagatggcagaagagaagaaggcttctgtttaccaacattcatctccagtaattagccaattacaaggctggtggggggggaagtatagccaaaacagactgtggtgatgatggtgggggccggggagaagcagtccttgtaacgttgggctggggtccactgcctggaaatgacacactgggggaggagacaccggaagcctcaatctgcagggactcacagactcctctcccccttccaggcacccgtcaccatgcctgcctgtgcccagccagccccccaagacccagacaggtgggcgcggggagccccagcaggcacagaccatagggctagtttttaaaactttattcacttcaaaacctttatcagagacacggttctgttctggggtgggggtggccttgacaatgagctgatgttagcccttctccaggctggaggccaaggccagactggggagggggccttgggcctttcaggacttgccctagatggaaagatttgggccactccaatggaggatcaaagttggggctccagcttcccctcatcctagaagaggatgggggggggtcctcaggggtttttcggaggatggagaggcaagcagccgcctttccgtctggctgcagagagctgggacagaggccaagaggggcccatctgtcgcctcccagtcctgccagcttctctgagcaggctgggctggggaggaggacggggggacagctgtctggcccgggagatgggaacaggggccactttaggaggacaggaagctggactgtttgcttgtttttttaagatttttgatttttttttccatttcttaaataaacatgaatatatatata

SEQ ID NO: 138835 - DNA, 2827 bp, Homo sapiens
  Payload ID: 7198
  Gene Symbol: GAS1
  Gene Name: growth arrest-specific 1
  Uniprot ID: P54826
  ENST ID: ENST00000298743
  CDS Start-End: 411-1448
agcagccggcacggggacagccggccgcacaacggatctgcaggcgcggagcaaaatgcacccgccgcgccgcgcggtcctgcagccccgccacggccccgcggcccgcacccccccggggcgacagtgagcctctcccgccaccaccgggggccgagcggagggctctcgggtgggagagcgggaccagatctcgacagctgttcatttccaggaagccaccgcagccagagcgaaaggggaccttctgccaccagcggggcatcagccagcggcgcgcatggatttatgaagacactcatgcaagaagtgggcaggacttggacaaacttttccaccggctccgcgtccgccgctccccgcgcctcgtctcctttcccctcctctcccggcggccgccgctgcccgcgatggtggccgcgctgctgggcggcggcggcgaggcccgcggggggacagtgccgggcgcctggctgtgcctgatggcgctgctgcagctgctgggctcggcgccgcggggatcggggctggcgcacggccgccgcctcatctgctggcaggcgctgctgcagtgccagggggagccggagtgcagctacgcctacaaccagtacgccgaggcgtgcgcgccggtgctggcgcagcacggcgggggcgacgcgcccggggccgccgccgccgctttcccggcctcggccgcctctttctcgtcgcgctggcgctgcccgagtcactgcatctcggccctcattcagctcaaccacacgcgccgcgggcccgccctggaggactgtgactgcgcgcaggacgagaactgcaagtccaccaagcgcgccattgagccgtgcctgccccggacgagcggcggcggcgcgggcggccccggcgcgggcggggtcatgggctgcaccgaggcccggcggcgctgcgaccgcgacagccgctgcaacctggcgctgagccgctacctgacctactgcggcaaagtcttcaacgggctgcgctgcacggacgaatgccgcaccgtcattgaggacatgctggctatgcccaaggcggcgctgctcaacgactgcgtgtgcgacggcctcgagcggcccatctgcgagtcggtcaaggagaacatggcccgcctgtgcttcggcgccgagctgggcaacggccccggcagcagcggctcggacgggggcctggacgactactacgatgaggactacgatgacgagcagcgcaccgggggcgcgggtggtgagcagccgctggacgacgacgacggcgtcccgcacccaccgcgcccgggcagcggcgctgctgcatcgggcggccgcggggacctgccctatgggcctgggcgcaggagcagcggcggcggcggccgcttggcgccccggggcgcctggaccccactcgcctccatcttgctgctgctgcttgggccgctcttttagccctcgcgccccccgccgttggctgcgggagagcccgcgtcccactcccgtgctcgcctcgaccccgcgccgggcacctgtggcttgggacagatagaagggatggttggggatacttcccaaaactttttccaagtcaacttggtgtagccggttccccggccacgactctgggcacttcccctgaagctcctctccggagcttgacttcttggacctcctcccccgccccaattccaagctccagaaactcccaactcgtctgccgtccagaaagctagctgcagtgttcaggacgtccgggaggaagcaagcatgtgggggacagaacagtagtcctggactcgaaagggaaggtgctgaccagtggggccttagcaatttgaagggttgggaaggaggaattatatttgcaaaggggctgtctattagcatatttcctttgagggggcaaaaaaaagtgccagtatcgacttttacagattgtggccagtgaggatattataatcctatgtaaacagaaaagtcccacttaccgattcattctttcactgtttgtatctgcgcccagaattctcagtgacgtgggggtgagggtgggtggcgattgccttagagggaacccctaaattggttttggataagtttgagcccttgaccttaatttcattgctaccactctgatctcttagcacatttcttaggattaagggtccaaaaatgctgatctaaggggttgccatggtgttgaacaatgcaactttttatttaaaaaagctctgcactgccatgtatgaaagtctctttatgatgtttgtttttttgtcatttttgttctttacatcaagaaattttatgtttaaatatgcggagaatgtatattgcctctgctcctatcagggttgctaaaccctggtacatcgtatataaaatgtattaaaactggggtttgttaccagttgctgtactttgtatatagaatttttataaattgtatgcttcagaaataatttatttttaaaaagaaattaaaagttttaaactcacatccatattacacctttcccccctgaaatgtatagaatccatttgtcatcaggaatcaaaacccacagtccattgtgaagtgtgctatatttagaacagtcttaaaatgtacagtgtattttatagaattgaagttaacattcttattttcaagagaatttatggacgttgtagaaatgtacaaatgcatttccaaactgccttaaacgttgtatttttatagacatgttttttaaaaatcctaagtttttaaataactatggatttgtgtattttttttggttatttgttttattaaaacatgtacatcagtaaagagttttaaacaatga

SEQ ID NO: 138836 - DNA, 2170 bp, Homo sapiens
  Payload ID: 7199
  Gene Symbol: GAS2
  Gene Name: growth arrest-specific 2
  Uniprot ID: O43903
  ENST ID: ENST00000278187
  CDS Start-End: 249-1190
gagattcacagaggcaaggcagagaacaagacctgtgcttctttactccaaactcttagcagtgtggacactgattaactgcagctggggtctgatttgcccagcctgtctttgatattgatcaatgaactccttctcaaggaatgctttcctctaactgcggtgaaggtggtggctctggtggttctctccaacatgggtgtctgggttttgactgcctaagagaaggtattacaagtggataaataatgtgcactgctctgagcccaaaggtacgcagtggacctggcctctctgatatgcatcagtatagccaatggctagccagcagacatgaagctaatttgctaccaatgaaagaagatctggccttgtggttaaccaatctattagggaaggagattacagcagaaacttttatggagaagttggacaatggtgccttgctctgtcaacttgcagaaactatgcaggagaaattcaaggagagcatggatgctaacaagcccacaaagaatctaccgttgaagaagatcccatgcaaaaccagtgcaccctcgggctccttttttgccagagacaatacagcaaatttcttatcctggtgccgagatttaggggtggatgaaacgtgtctatttgaatcggaaggtttggtcctccacaagcaacccagagaagtgtgtctctgtctgctagagcttggccggattgcagccaggtatggtgtggagcctcctggtttgataaagctggaaaaagagattgaacaagaagaaacactttctgccccttctccttcaccttctccttcatcaaagtcttctggaaaaaagagtacaggaaacttactggatgatgcagtgaaacgaatttctgaagatcctccttgcaaatgcccaaacaagttctgtgtggagcggctctcccaaggaagataccgagtgggagaaaagatcctcttcattaggatgctgcacaacaaacatgtcatggtccgtgtgggaggaggctgggaaacttttgcagggtatttgttgaaacacgacccctgccgaatgctgcagatctcccgtgtggatggcaaaacatcccctatccaaagcaaatctccaactctaaaggacatgaatccagataactacttggtggtctctgccagttataaggctaagaaggaaattaagtgaaacaaattggtcatgacaaggggaccctcataatggcctgtatccacttctccagtatagtcagtttagttcatatgttctgaaaactgttttggagaaagatagacagaaaaatgtcatcatattgaaaaatgttcaaagagtagcactatttatttttaatgcttctgtagaatatgacctattaaaagaaaatctaaactcaaatttaaattatccaaattttaggcaaattattatttctcaatatgcgaacacagtatttagaacacaatattagaaacacaattctaactaaagataaataaggagaaaacatttaggatttgcagataagtcaacagaaagtgcctgctttacactcatgagtaaaagcactccagacatttttataattgcaagatttttatgcttttttttttttttttttacaaaatgatgattagtgtgataatgtgctgcaaaaaatatccaacagcactacacataagtacagagtattcacaatagtaatatgttactggaaaggccacttccgaaaagtttacattcacttggaaggctgccttaaagtatatctcttatctatgaccaaatatctggggtacttttagaagttttcagtacacccccttagagaatagcttatgagttatttcacacattcctgagcacatggctgtgtttagaatgatctagtgtaattcatacatgagctgacatacgttgatactttgacgagtaaattgtacagtcaaatgttcattgatttcatgttatttcaaagcattttcttattaaaaatatatctttagttaatcctattttgctatgctttctagtaaagtaaattcactgtagctaatgatgttacagacttacgtatacccttgtatacctgggacagggctgttttataccaataaacagcaaaatattgtccttactcattcaagaattaaaaggataaattttaaaaa

SEQ ID NO: 138837 - DNA, 2286 bp, Homo sapiens
  Payload ID: 7199
  Gene Symbol: GAS2
  Gene Name: growth arrest-specific 2
  Uniprot ID: O43903
  ENST ID: ENST00000454584
  CDS Start-End: 306-1247
ttttacttccgctcggtctatgaggactgatgaaatgtaggaaatctgtttctggcagggagaaaaaatcgttttcccaaacagcactaaaaggagccatcagagaagtatgaagaggggtagtgcggctgtagctgctgccgctgccgccaggctggtggggtgcggggagcggctgctgcaggacctgtgcctggagggggccggccccgagaagctgcaggagcccagcccggagcccaagcgcctctgagagccgccagcagcccagctcgggacgcgggggtattacaagtggataaataatgtgcactgctctgagcccaaaggtacgcagtggacctggcctctctgatatgcatcagtatagccaatggctagccagcagacatgaagctaatttgctaccaatgaaagaagatctggccttgtggttaaccaatctattagggaaggagattacagcagaaacttttatggagaagttggacaatggtgccttgctctgtcaacttgcagaaactatgcaggagaaattcaaggagagcatggatgctaacaagcccacaaagaatctaccgttgaagaagatcccatgcaaaaccagtgcaccctcgggctccttttttgccagagacaatacagcaaatttcttatcctggtgccgagatttaggggtggatgaaacgtgtctatttgaatcggaaggtttggtcctccacaagcaacccagagaagtgtgtctctgtctgctagagcttggccggattgcagccaggtatggtgtggagcctcctggtttgataaagctggaaaaagagattgaacaagaagaaacactttctgccccttctccttcaccttctccttcatcaaagtcttctggaaaaaagagtacaggaaacttactggatgatgcagtgaaacgaatttctgaagatcctccttgcaaatgcccaaacaagttctgtgtggagcggctctcccaaggaagataccgagtgggagaaaagatcctcttcattaggatgctgcacaacaaacatgtcatggtccgtgtgggaggaggctgggaaacttttgcagggtatttgttgaaacacgacccctgccgaatgctgcagatctcccgtgtggatggcaaaacatcccctatccaaagcaaatctccaactctaaaggacatgaatccagataactacttggtggtctctgccagttataaggctaagaaggaaattaagtgaaacaaattggtcatgacaaggggaccctcataatggcctgtatccacttctccagtatagtcagtttagttcatatgttctgaaaactgttttggagaaagatagacagaaaaatgtcatcatattgaaaaatgttcaaagagtagcactatttatttttaatgcttctgtagaatatgacctattaaaagaaaatctaaactcaaatttaaattatccaaattttaggcaaattattatttctcaatatgcgaacacagtatttagaacacaatattagaaacacaattctaactaaagataaataaggagaaaacatttaggatttgcagataagtcaacagaaagtgcctgctttacactcatgagtaaaagcactccagacatttttataattgcaagatttttatgcttttttttttttttttttacaaaatgatgattagtgtgataatgtgctgcaaaaaatatccaacagcactacacataagtacagagtattcacaatagtaatatgttactggaaaggccacttccgaaaagtttacattcacttggaaggctgccttaaagtatatctcttatctatgaccaaatatctggggtacttttagaagttttcagtacacccccttagagaatagcttatgagttatttcacacattcctgagcacatggctgtgtttagaatgatctagtgtaattcatacatgagctgacatacgttgatactttgacgagtaaattgtacagtcaaatgttcattgatttcatgttatttcaaagcattttcttattaaaaatatatctttagttaatcctattttgctatgctttctagtaaagtaaattcactgtagctaatgatgttacagacttacgtatacccttgtatacctgggacagggctgttttataccaataaacagcaaaatattgtccttactcattcaagaattaaaaggataaattttaaaaatgttatctgtctctaaatcaatgcctcattctgaaatcaagttaattttcaaatggcaa

SEQ ID NO: 138838 - DNA, 2241 bp, Homo sapiens
  Payload ID: 7199
  Gene Symbol: GAS2
  Gene Name: growth arrest-specific 2
  Uniprot ID: O43903
  ENST ID: ENST00000524701
  CDS Start-End: 249-674
gagattcacagaggcaaggcagagaacaagacctgtgcttctttactccaaactcttagcagtgtggacactgattaactgcagctggggtctgatttgcccagcctgtctttgatattgatcaatgaactccttctcaaggaatgctttcctctaactgcggtgaaggtggtggctctggtggttctctccaacatgggtgtctgggttttgactgcctaagagaaggtattacaagtggataaataatgtgcactgctctgagcccaaaggtacgcagtggacctggcctctctgatatgcatcagtatagccaatggctagccagcagacatgaagctaatttgctaccaatgaaagaagatctggccttgtggttaaccaatctattagggaaggagattacagcagaaacttttatggagaagttggacaatggtgccttgctctgtcaacttgcagaaactatgcaggagaaattcaaggagagcatggatgctaacaagcccacaaagaatctaccgttgaagaagatcccatgcaaaaccagtgcaccctcgggctccttttttgccagagacaatacagcaaatttcttatcctggtgccgagatttaggggtggatgaaacgtgtctatttgaatcggaaggtttgggatttggaggccagtgactatgcttcatctatttctctgagaaagaatctactcaacaagaaaaggtcctccacaagcaacccagagaagtgtgtctctgtctgctagagcttggccggattgcagccaggtatggtgtggagcctcctggtttgataaagctggaaaaagagattgaacaagaagaaacactttctgccccttctccttcaccttctccttcatcaaagtcttctggaaaaaagagtacaggaaacttactggatgatgcagtgaaacgaatttctgaagatcctccttgcaaatgcccaaacaagttctgtgtggagcggctctcccaaggaagataccgagtgggagaaaagatcctcttcattaggatgctgcacaacaaacatgtcatggtccgtgtgggaggaggctgggaaacttttgcagggtatttgttgaaacacgacccctgccgaatgctgcagatctcccgtgtggatggcaaaacatcccctatccaaagcaaatctccaactctaaaggacatgaatccagataactacttggtggtctctgccagttataaggctaagaaggaaattaagtgaaacaaattggtcatgacaaggggaccctcataatggcctgtatccacttctccagtatagtcagtttagttcatatgttctgaaaactgttttggagaaagatagacagaaaaatgtcatcatattgaaaaatgttcaaagagtagcactatttatttttaatgcttctgtagaatatgacctattaaaagaaaatctaaactcaaatttaaattatccaaattttaggcaaattattatttctcaatatgcgaacacagtatttagaacacaatattagaaacacaattctaactaaagataaataaggagaaaacatttaggatttgcagataagtcaacagaaagtgcctgctttacactcatgagtaaaagcactccagacatttttataattgcaagatttttatgcttttttttttttttttttacaaaatgatgattagtgtgataatgtgctgcaaaaaatatccaacagcactacacataagtacagagtattcacaatagtaatatgttactggaaaggccacttccgaaaagtttacattcacttggaaggctgccttaaagtatatctcttatctatgaccaaatatctggggtacttttagaagttttcagtacacccccttagagaatagcttatgagttatttcacacattcctgagcacatggctgtgtttagaatgatctagtgtaattcatacatgagctgacatacgttgatactttgacgagtaaattgtacagtcaaatgttcattgatttcatgttatttcaaagcattttcttattaaaaatatatctttagttaatcctattttgctatgctttctagtaaagtaaattcactgtagctaatgatgttacagacttacgtatacccttgtatacctgggacagggctgttttataccaataaacagcaaaatattgtccttactcattcaagaattaaaaggataaattttaaaaatgtta

SEQ ID NO: 138839 - DNA, 736 bp, Homo sapiens
  Payload ID: 7199
  Gene Symbol: GAS2
  Gene Name: growth arrest-specific 2
  ENST ID: ENST00000528582
  CDS Start-End: 193-736
ccgtgcgaatggggccatgccgaccaaagcgccgatggatgtggcgcaggtagcgcgcccactgcaaggcccggcgcacggtggcggggtcccaggtgctgacgtaggtagtgcttgagaccgccagaagctcggaaaagcgatccaggtgctgcagaagggattccatgaggtattacaagtggataaataatgtgcactgctctgagcccaaaggtacgcagtggacctggcctctctgatatgcatcagtatagccaatggctagccagcagacatgaagctaatttgctaccaatgaaagaagatctggccttgtggttaaccaatctattagggaaggagattacagcagaaacttttatggagaagttggacaatggtgccttgctctgtcaacttgcagaaactatgcaggagaaattcaaggagagcatggatgctaacaagcccacaaagaatctaccgttgaagaagatcccatgcaaaaccagtgcaccctcgggctccttttttgccagagacaatacagcaaatttcttatcctggtgccgagatttaggggtggatgaaacgtgtctatttgaatcggaaggtttggtcctccacaagcaacccagagaagtgtgtctctgtctgctagagcttggccggattgcagccaggtatggtgtggagcctcctggtttgataaagctggaaaaagagattgaacaagaagaaacactttctgccc

SEQ ID NO: 138840 - DNA, 579 bp, Homo sapiens
  Payload ID: 7199
  Gene Symbol: GAS2
  Gene Name: growth arrest-specific 2
  ENST ID: ENST00000534801
  CDS Start-End: 115-579
taatagggtgtaggtaaagttactgaacagccacatctcactttcaggaaagtagtggaagagattgtgtcttgagaagacaggcattttagaggtattacaagtggataaataatgtgcactgctctgagcccaaaggtacgcagtggacctggcctctctgatatgcatcagtatagccaatggctagccagcagacatgaagctaatttgctaccaatgaaagaagatctggccttgtggttaaccaatctattagggaaggagattacagcagaaacttttatggagaagttggacaatggtgccttgctctgtcaacttgcagaaactatgcaggagaaattcaaggagagcatggatgctaacaagcccacaaagaatctaccgttgaagaagatcccatgcaaaaccagtgcaccctcgggctccttttttgccagagacaatacagcaaatttcttatcctggtgccgagatttaggggtggatgaaacgtgtctatttgaatcggaaggtttggtcctccacaagcaacccagagaagtgtgtctctgtctgctagagcttggccggatt

SEQ ID NO: 138841 - DNA, 547 bp, Homo sapiens
  Payload ID: 7199
  Gene Symbol: GAS2
  Gene Name: growth arrest-specific 2
  ENST ID: ENST00000533363
  CDS Start-End: 140-547
gttggacaggctctttctctaagagtgggtattcactgcagggggtgactttctgattctctggaaacaaccatgtgttccttatccctattgcggaacaccccggacaaccgcagcacgtattacaagtggataaataatgtgcactgctctgagcccaaaggtacgcagtggacctggcctctctgatatgcatcagtatagccaatggctagccagcagacatgaagctaatttgctaccaatgaaagaagatctggccttgtggttaaccaatctattagggaaggagattacagcagaaacttttatggagaagttggacaatggtgccttgctctgtcaacttgcagaaactatgcaggagaaattcaaggagagcatggatgctaacaagcccacaaagaatctaccgttgaagaagatcccatgcaaaaccagtgcaccctcgggctccttttttgccagagacaatacagcaaatttcttatcctggtgccgagatttaggggtggatgaaacgtgtctatttgaatcggaaggtttg

SEQ ID NO: 138842 - DNA, 712 bp, Homo sapiens
  Payload ID: 7199
  Gene Symbol: GAS2
  Gene Name: growth arrest-specific 2
  ENST ID: ENST00000532398
  CDS Start-End: 98-712
cattataatgtcatgatgacaacattttgtgagagaagtctgtataaaaagcaattgctcttttgtttccaaaacaggtattacaagtggataaataatgtgcactgctctgagcccaaaggtacgcagtggacctggcctctctgatatgcatcagtatagccaatggctagccagcagacatgaagctaatttgctaccaatgaaagaagatctggccttgtggttaaccaatctattagggaaggagattacagcagaaacttttatggagaagttggacaatggtgccttgctctgtcaacttgcagaaactatgcaggagaaattcaaggagagcatggatgctaacaagcccacaaagaatctaccgttgaagaagatcccatgcaaaaccagtgcaccctcgggctccttttttgccagagacaatacagcaaatttcttatcctggtgccgagatttaggggtggatgaaacgtgtctatttgaatcggaaggtttggtcctccacaagcaacccagagaagtgtgtctctgtctgctagagcttggccggattgcagccaggtatggtgtggagcctcctggtttgataaagctggaaaaagagattgaacaagaagaaacactttctgccccttctccttcaccttctccttcatcaaagtcttctggaaaaaagagtacaggaaacttactggatgatgca

SEQ ID NO: 138843 - DNA, 674 bp, Homo sapiens
  Payload ID: 7199
  Gene Symbol: GAS2
  Gene Name: growth arrest-specific 2
  Uniprot ID: O43903
  ENST ID: ENST00000630668
  CDS Start-End: 249-674
gagattcacagaggcaaggcagagaacaagacctgtgcttctttactccaaactcttagcagtgtggacactgattaactgcagctggggtctgatttgcccagcctgtctttgatattgatcaatgaactccttctcaaggaatgctttcctctaactgcggtgaaggtggtggctctggtggttctctccaacatgggtgtctgggttttgactgcctaagagaaggtattacaagtggataaataatgtgcactgctctgagcccaaaggtacgcagtggacctggcctctctgatatgcatcagtatagccaatggctagccagcagacatgaagctaatttgctaccaatgaaagaagatctggccttgtggttaaccaatctattagggaaggagattacagcagaaacttttatggagaagttggacaatggtgccttgctctgtcaacttgcagaaactatgcaggagaaattcaaggagagcatggatgctaacaagcccacaaagaatctaccgttgaagaagatcccatgcaaaaccagtgcaccctcgggctccttttttgccagagacaatacagcaaatttcttatcctggtgccgagatttaggggtggatgaaacgtgtctatttgaatcggaaggtttgggatttggaggccagtga

SEQ ID NO: 138844 - DNA, 1803 bp, Homo sapiens
  Payload ID: 7200
  Gene Symbol: GAS2L1
  Gene Name: growth arrest-specific 2 like 1
  Uniprot ID: Q99501
  ENST ID: ENST00000406549
  CDS Start-End: 151-1515
gacggcggcgaggaggaggccgcggcgcgggacgcatagagctgcggctcgggcggcgcctccctgcggcggcccggcccggctccggcccccgctggggcaatgctccccggggccgcgggatgagccagtgactcggccggtccgggcatggcagacccagtggcgggcatcgcgggctcggcggccaagagcgtgcggccatttcgctccagtgaggcctacgtggaggccatgaaggaggacctggccgagtggctcaatgccttgtacggcctgggtctcccgggtggtggcgatggcttcctgacagggctggccacgggcacgaccctgtgccaacatgccaacgccgtgaccgaggctgcccgtgcattggcagccgcccgcccggcccgaggtgtggccttccaggcgcacagtgtagtgcctggctccttcatggcgcgcgacaacgtggccaccttcatcggctggtgccgcgtggagctgggtgtgccggaggtgctcatgtttgagactgaggacctggtgctgcgcaagaacgagaagagcgtggtgctgtgcctgctggaggtggcgcggcgtggggcacgcctgggcctgctggccccacgcctcgtgcagtttgagcaggagattgagcgggagctgcgtgctgcacccccagcccccaacgcccctgccgctggggaggacaccactgaaaccgcccccgcaccagggactcctgcccgcggcccccgcatgacacccagcgacctgcgcaacctcgacgagctggtgagggagattctgggccgctgcacctgccctgaccagtttcccatgatcaaggtctcagaggggaagtaccgtgtgggggactcgagcctgctcatctttgtgcgggtgctgaggagccacgtgatggtgcgagtgggtggtggctgggacacgctggagcattacctggacaagcacgacccgtgccgctgctcctccactgctcatcgcccaccccagccgagggtctgcaccttttctccacagagggtgtcgcccaccaccagtccccgccctgctagcccagtccctgggagtgagcgccggggctcccggcctgagatgactcccgttagcttacgaagcacaaaggaggggcccgagaccccacccagttcctcctcttcgtccctcagcgtcctgggtggcaaatgtggccaacctggggactctggccggacggccaatgggctgcctgggccccgaagccaagccctttccagctcctccgatgaaggcagcccctgccctggcatgggggggccactagatgcacctgggagccccctggcttgcactgaaccctcgaggacctgggcacggggtcggatggacacacagccagaccgtaaaccctcacgtatccccacgcctcggggcccccgccgcccctccggacccgcagagctggggacatggcatgccctgcactcagtcaccccgagggctgagccagattcctggatgtgatggaccagctcagctgtccccagaccccatcccttctccttttcctttgtggccttaacccttctgcatcagggagccccctctgcctcttgagtaccagacctcatgggaccagaccccttgggaccacatggcacaatgggacctctgttgtacattccggttgggggatgagcgttgctatttaattactaatattattgaatgccttagaggaggccgggcgagcccggtgttctgaagacctgtggcccagcagagcctctgacagtaaagttttgctccagc

SEQ ID NO: 138845 - DNA, 569 bp, Homo sapiens
  Payload ID: 7200
  Gene Symbol: GAS2L1
  Gene Name: growth arrest-specific 2 like 1
  ENST ID: ENST00000428622
  CDS Start-End: 140-569
gctatcgcttcctgccttcatcttgggaacaggccgtgctgtgcgccagcccggggagcccaccgtctggggaggggggcgattaaaaggtcccaacctcctccccaggagaccaaagagtgactcggccggtccgggcatggcagacccagtggcgggcatcgcgggctcggcggccaagagcgtgcggccatttcgctccagtgaggcctacgtggaggccatgaaggaggacctggccgagtggctcaatgccttgtacggcctgggtctcccgggtggtggcgatggcttcctgacagggctggccacgggcacgaccctgtgccaacatgccaacgccgtgaccgaggctgcccgtgcattggcagccgcccgcccggcccgaggtgtggccttccaggcgcacagtgtagtgcctggctccttcatggcgcgcgacaacgtggccaccttcatcggctggtgccgcgtggagctgggtgtgccggaggtgctcatgtttgagactgaggacctggtgctgcgcaagaacgagaagagcgtggtgctgtgcctgctggaggtgg

SEQ ID NO: 138846 - DNA, 745 bp, Homo sapiens
  Payload ID: 7200
  Gene Symbol: GAS2L1
  Gene Name: growth arrest-specific 2 like 1
  ENST ID: ENST00000416823
  CDS Start-End: 331-745
cccgggaggaggtgactttgcagcctccagccgctatcgcttcctgccttcatcttgggaacaggccgtgctgtgcgccagcccggggagcccaccgtctggggaggggggcgattaaaaggtcccaacctcctccccaggagaccaaagaggatccgaattccagggaggcggggcggagacggcggcgaggaggaggccgcggcgcgggacgcatagagctgcggctcgggcggcgcctccctgcggcggcccggcccggctccggcccccgctggggcaatgctccccggggccgcgggatgagccagtgactcggccggtccgggcatggcagacccagtggcgggcatcgcgggctcggcggccaagagcgtgcggccatttcgctccagtgaggcctacgtggaggccatgaaggaggacctggccgagtggctcaatgccttgtacggcctgggtctcccgggtggtggcgatggcttcctgacagggctggccacgggcacgaccctgtgccaacatgccaacgccgtgaccgaggctgcccgtgcattggcagccgcccgcccggcccgaggtgtggccttccaggcgcacagtgtagtgcctggctccttcatggcgcgcgacaacgtggccaccttcatcggctggtgccgcgtggagctgggtgtgccggaggtgctcatgtttgagactgaggacctggtgctgcgcaagaacgagaagagcgtggtgctgt

SEQ ID NO: 138847 - DNA, 2483 bp, Homo sapiens
  Payload ID: 7200
  Gene Symbol: GAS2L1
  Gene Name: growth arrest-specific 2 like 1
  ENST ID: ENST00000621062
  CDS Start-End: 150-2195
ggacgcatagagctgcggctcgggcggcgcctccctgcggcggcccggcccggctccggcccccgctggggcaatgctccccggggccgcgggatgagccagcgatcctgaactgtgttcctgcccacagtgactcggccggtccgggcatggcagacccagtggcgggcatcgcgggctcggcggccaagagcgtgcggccatttcgctccagtgaggcctacgtggaggccatgaaggaggacctggccgagtggctcaatgccttgtacggcctgggtctcccgggtggtggcgatggcttcctgacagggctggccacgggcacgaccctgtgccaacatgccaacgccgtgaccgaggctgcccgtgcattggcagccgcccgcccggcccgaggtgtggccttccaggcgcacagtgtagtgcctggctccttcatggcgcgcgacaacgtggccaccttcatcggctggtgccgcgtggagctgggtgtgccggaggtgctcatgtttgagactgaggacctggtgctgcgcaagaacgagaagagcgtggtgctgtgcctgctggaggtggcgcggcgtggggcacgcctgggcctgctggccccacgcctcgtgcagtttgagcaggagattgagcgggagctgcgtgctgcacccccagcccccaacgcccctgccgctggggaggacaccactgaaaccgcccccgcaccagggactcctgcccgcggcccccgcatgacacccagcgacctgcgcaacctcgacgagctggtgagggagattctgggccgctgcacctgccctgaccagtttcccatgatcaaggtctcagaggggaagtaccgtgtgggggactcgagcctgctcatctttgtgcgggtgctgaggagccacgtgatggtgcgagtgggtggtggctgggacacgctggagcattacctggacaagcacgacccgtgccgctgctcctccactgctcatcgcccaccccagccgagggtctgcaccttttctccacagagggtgtcgcccaccaccagtccccgccctgctagcccagtccctgggagtgagcgccggggctcccggcctgagatgactcccgttagcttacgaagcacaaaggaggggcccgagaccccacccaggccccgggatcagctgcccccccatccccgctcccgccgctactccggggacagtgactcctcagcctcctccgcccagagcggcccccttggtacccgcagtgatgacacaggcactggcccccggagggagcgacccagccggcggctgaccacaggcaccccggcctctccgagacggcctcctgccctgcgcagccagtcccgagaccggctggatcgcggccggccccggggggccccaggaggcaggggagcccagctgtcggtccccagccctgcccggcgggcccggagccagagccgcgaggagcaggctgtgctgcttgtgcgcagggatcgagacgggcagcactcatgggtgccaaggggcaggggcagtgggggctcgggcaggagcaccccccagactccccgtgcccgcagccctgcagcaccccggctttcccgggtctccagccccagtccagagttgggcaccacaccggccagcatcttccgcacacccctgcagctcgacccgcagcaggagcagcagctgttccggcgcctggaagaggagttcctggccaatgcccgggcccttgaggctgttgctagcgtgacccccactggaccagcccctgacccagctcgggcccccgaccctccagctcctgactctgcctattgttcctccagttcctcctcttcgtccctcagcgtcctgggtggcaaatgtggccaacctggggactctggccggacggccaatgggctgcctgggccccgaagccaagccctttccagctcctccgatgaaggcagcccctgccctggcatgggggggccactagatgcacctgggagccccctggcttgcactgaaccctcgaggacctgggcacggggtcggatggacacacagccagaccgtaaaccctcacgtatccccacgcctcggggcccccgccgcccctccggacccgcagagctggggacatggcatgccctgcactcagtcaccccgagggctgagccagattcctggatgtgatggaccagctcagctgtccccagaccccatcccttctccttttcctttgtggccttaacccttctgcatcagggagccccctctgcctcttgagtaccagacctcatgggaccagaccccttgggaccacatggcacaatgggacctctgttgtacattccggttgggggatgagcgttgctatttaattactaatattattgaatgccttagaggaggccgggcgagcccggtgttctgaagacctgtggcccagcagagcctctgacagtaaagttttgctccagc

SEQ ID NO: 138848 - DNA, 2925 bp, Homo sapiens
  Payload ID: 7200
  Gene Symbol: GAS2L1
  Gene Name: growth arrest-specific 2 like 1
  ENST ID: ENST00000616432
  CDS Start-End: 592-2637
cgcggcggtgccgtttatctggccaggggaggtccacccgggaggaggtgactttgcagcctccagccgctatcgcttcctgccttcatcttgggaacaggccgtgctgtgcgccagcccggggagcccaccgtctggggaggggggcgattaaaaggtcccaacctcctccccaggagaccaaagaggttggacggggccccgggtactaggctgggtgggggttgggcgcctgggccggtcgcagttgtctgggggccctggggctctctgcgtcgagagcgctcgaagacccgggattcctggcccgatcgcgggcggggggagaccccagctccaccccagctcccgccggctcggggaaggggcggcccctttaagagcgcgcggccccgcccgccccctccgggcaggatccgaattccagggaggcggggcggagacggcggcgaggaggaggccgcggcgcgggacgcatagagctgcggctcgggcggcgcctccctgcggcggcccggcccggctccggcccccgctggggcaatgctccccggggccgcgggatgagccagtgactcggccggtccgggcatggcagacccagtggcgggcatcgcgggctcggcggccaagagcgtgcggccatttcgctccagtgaggcctacgtggaggccatgaaggaggacctggccgagtggctcaatgccttgtacggcctgggtctcccgggtggtggcgatggcttcctgacagggctggccacgggcacgaccctgtgccaacatgccaacgccgtgaccgaggctgcccgtgcattggcagccgcccgcccggcccgaggtgtggccttccaggcgcacagtgtagtgcctggctccttcatggcgcgcgacaacgtggccaccttcatcggctggtgccgcgtggagctgggtgtgccggaggtgctcatgtttgagactgaggacctggtgctgcgcaagaacgagaagagcgtggtgctgtgcctgctggaggtggcgcggcgtggggcacgcctgggcctgctggccccacgcctcgtgcagtttgagcaggagattgagcgggagctgcgtgctgcacccccagcccccaacgcccctgccgctggggaggacaccactgaaaccgcccccgcaccagggactcctgcccgcggcccccgcatgacacccagcgacctgcgcaacctcgacgagctggtgagggagattctgggccgctgcacctgccctgaccagtttcccatgatcaaggtctcagaggggaagtaccgtgtgggggactcgagcctgctcatctttgtgcgggtgctgaggagccacgtgatggtgcgagtgggtggtggctgggacacgctggagcattacctggacaagcacgacccgtgccgctgctcctccactgctcatcgcccaccccagccgagggtctgcaccttttctccacagagggtgtcgcccaccaccagtccccgccctgctagcccagtccctgggagtgagcgccggggctcccggcctgagatgactcccgttagcttacgaagcacaaaggaggggcccgagaccccacccaggccccgggatcagctgcccccccatccccgctcccgccgctactccggggacagtgactcctcagcctcctccgcccagagcggcccccttggtacccgcagtgatgacacaggcactggcccccggagggagcgacccagccggcggctgaccacaggcaccccggcctctccgagacggcctcctgccctgcgcagccagtcccgagaccggctggatcgcggccggccccggggggccccaggaggcaggggagcccagctgtcggtccccagccctgcccggcgggcccggagccagagccgcgaggagcaggctgtgctgcttgtgcgcagggatcgagacgggcagcactcatgggtgccaaggggcaggggcagtgggggctcgggcaggagcaccccccagactccccgtgcccgcagccctgcagcaccccggctttcccgggtctccagccccagtccagagttgggcaccacaccggccagcatcttccgcacacccctgcagctcgacccgcagcaggagcagcagctgttccggcgcctggaagaggagttcctggccaatgcccgggcccttgaggctgttgctagcgtgacccccactggaccagcccctgacccagctcgggcccccgaccctccagctcctgactctgcctattgttcctccagttcctcctcttcgtccctcagcgtcctgggtggcaaatgtggccaacctggggactctggccggacggccaatgggctgcctgggccccgaagccaagccctttccagctcctccgatgaaggcagcccctgccctggcatgggggggccactagatgcacctgggagccccctggcttgcactgaaccctcgaggacctgggcacggggtcggatggacacacagccagaccgtaaaccctcacgtatccccacgcctcggggcccccgccgcccctccggacccgcagagctggggacatggcatgccctgcactcagtcaccccgagggctgagccagattcctggatgtgatggaccagctcagctgtccccagaccccatcccttctccttttcctttgtggccttaacccttctgcatcagggagccccctctgcctcttgagtaccagacctcatgggaccagaccccttgggaccacatggcacaatgggacctctgttgtacattccggttgggggatgagcgttgctatttaattactaatattattgaatgccttagaggaggccgggcgagcccggtgttctgaagacctgtggcccagcagagcctctgacagtaaagttttgctccagc

SEQ ID NO: 138849 - DNA, 2482 bp, Homo sapiens
  Payload ID: 7200
  Gene Symbol: GAS2L1
  Gene Name: growth arrest-specific 2 like 1
  ENST ID: ENST00000611648
  CDS Start-End: 149-2194
atagagctgcggctcgggcggcgcctccctgcggcggcccggcccggctccggcccccgctggggcaatgctccccggggccgcgggatgagccaggtgagcgcggagacccccagcactccctgcctgtgactcggccggtccgggcatggcagacccagtggcgggcatcgcgggctcggcggccaagagcgtgcggccatttcgctccagtgaggcctacgtggaggccatgaaggaggacctggccgagtggctcaatgccttgtacggcctgggtctcccgggtggtggcgatggcttcctgacagggctggccacgggcacgaccctgtgccaacatgccaacgccgtgaccgaggctgcccgtgcattggcagccgcccgcccggcccgaggtgtggccttccaggcgcacagtgtagtgcctggctccttcatggcgcgcgacaacgtggccaccttcatcggctggtgccgcgtggagctgggtgtgccggaggtgctcatgtttgagactgaggacctggtgctgcgcaagaacgagaagagcgtggtgctgtgcctgctggaggtggcgcggcgtggggcacgcctgggcctgctggccccacgcctcgtgcagtttgagcaggagattgagcgggagctgcgtgctgcacccccagcccccaacgcccctgccgctggggaggacaccactgaaaccgcccccgcaccagggactcctgcccgcggcccccgcatgacacccagcgacctgcgcaacctcgacgagctggtgagggagattctgggccgctgcacctgccctgaccagtttcccatgatcaaggtctcagaggggaagtaccgtgtgggggactcgagcctgctcatctttgtgcgggtgctgaggagccacgtgatggtgcgagtgggtggtggctgggacacgctggagcattacctggacaagcacgacccgtgccgctgctcctccactgctcatcgcccaccccagccgagggtctgcaccttttctccacagagggtgtcgcccaccaccagtccccgccctgctagcccagtccctgggagtgagcgccggggctcccggcctgagatgactcccgttagcttacgaagcacaaaggaggggcccgagaccccacccaggccccgggatcagctgcccccccatccccgctcccgccgctactccggggacagtgactcctcagcctcctccgcccagagcggcccccttggtacccgcagtgatgacacaggcactggcccccggagggagcgacccagccggcggctgaccacaggcaccccggcctctccgagacggcctcctgccctgcgcagccagtcccgagaccggctggatcgcggccggccccggggggccccaggaggcaggggagcccagctgtcggtccccagccctgcccggcgggcccggagccagagccgcgaggagcaggctgtgctgcttgtgcgcagggatcgagacgggcagcactcatgggtgccaaggggcaggggcagtgggggctcgggcaggagcaccccccagactccccgtgcccgcagccctgcagcaccccggctttcccgggtctccagccccagtccagagttgggcaccacaccggccagcatcttccgcacacccctgcagctcgacccgcagcaggagcagcagctgttccggcgcctggaagaggagttcctggccaatgcccgggcccttgaggctgttgctagcgtgacccccactggaccagcccctgacccagctcgggcccccgaccctccagctcctgactctgcctattgttcctccagttcctcctcttcgtccctcagcgtcctgggtggcaaatgtggccaacctggggactctggccggacggccaatgggctgcctgggccccgaagccaagccctttccagctcctccgatgaaggcagcccctgccctggcatgggggggccactagatgcacctgggagccccctggcttgcactgaaccctcgaggacctgggcacggggtcggatggacacacagccagaccgtaaaccctcacgtatccccacgcctcggggcccccgccgcccctccggacccgcagagctggggacatggcatgccctgcactcagtcaccccgagggctgagccagattcctggatgtgatggaccagctcagctgtccccagaccccatcccttctccttttcctttgtggccttaacccttctgcatcagggagccccctctgcctcttgagtaccagacctcatgggaccagaccccttgggaccacatggcacaatgggacctctgttgtacattccggttgggggatgagcgttgctatttaattactaatattattgaatgccttagaggaggccgggcgagcccggtgttctgaagacctgtggcccagcagagcctctgacagtaaagttttgctccagc

SEQ ID NO: 138850 - DNA, 3382 bp, Homo sapiens
  Payload ID: 7200
  Gene Symbol: GAS2L1
  Gene Name: growth arrest-specific 2 like 1
  ENST ID: ENST00000618518
  CDS Start-End: 1049-3094
atagagctgcggctcgggcggcgcctccctgcggcggcccggcccggctccggcccccgctggggcaatgctccccggggccgcgggatgagccaggtgagcgcggagacccccagcactccctgcctggtgcgcatggacgggggtggggaggcggggcgggaagcggcgtcctcggcctctgttccccggggctgtgtgaccttgggcggccccgcaccctctctgggcccagagccccagcaccggcagggcctgcggaggccgctctgagtcctggccccgcaggcaccggcctggagcgctggggaggcttcttggaggaggcggggcctggccctggccccggatcgccgagaccggccacgctgcgccgcctggacgccgggctcctccacccacagctctgcgaccttcacgagctcgaccctttctgcgcctcagtttcctcatctataaaatggagataatgcctccgcgcgctgagcccgagcgcggtcgtgctgttacactattgctgctgctatgtcgttaatgacggcacagcccttatggaaggggggccaaggaaggcacggggaccttcccgcaggacatggggtgggcaccagccctaagccatgcacataacccactctgaggtcaggacctgggttcctttcgtgtccactgggggccttagccgttgtcttcacttctctaggtcccagcccttcacaatgggcgcgcctccctgcctgagagggaggccccagccaagccccagtttccaccgcaaaaagccacacagcaaacacttaatggaccctaaatttataaaaattatcccatagagtcctatgaggcagggaatgttactgtacccatttcgcagatgaggaaacttggggcaccgacatttcccagagccaacatgtaaaccaggcatttggcctgagtgacagactggtgcaggtggccagcagcttaatttgtactgagcgcttactgggtccccacagcgatcctgaactgtgttcctgcccacagtgactcggccggtccgggcatggcagacccagtggcgggcatcgcgggctcggcggccaagagcgtgcggccatttcgctccagtgaggcctacgtggaggccatgaaggaggacctggccgagtggctcaatgccttgtacggcctgggtctcccgggtggtggcgatggcttcctgacagggctggccacgggcacgaccctgtgccaacatgccaacgccgtgaccgaggctgcccgtgcattggcagccgcccgcccggcccgaggtgtggccttccaggcgcacagtgtagtgcctggctccttcatggcgcgcgacaacgtggccaccttcatcggctggtgccgcgtggagctgggtgtgccggaggtgctcatgtttgagactgaggacctggtgctgcgcaagaacgagaagagcgtggtgctgtgcctgctggaggtggcgcggcgtggggcacgcctgggcctgctggccccacgcctcgtgcagtttgagcaggagattgagcgggagctgcgtgctgcacccccagcccccaacgcccctgccgctggggaggacaccactgaaaccgcccccgcaccagggactcctgcccgcggcccccgcatgacacccagcgacctgcgcaacctcgacgagctggtgagggagattctgggccgctgcacctgccctgaccagtttcccatgatcaaggtctcagaggggaagtaccgtgtgggggactcgagcctgctcatctttgtgcgggtgctgaggagccacgtgatggtgcgagtgggtggtggctgggacacgctggagcattacctggacaagcacgacccgtgccgctgctcctccactgctcatcgcccaccccagccgagggtctgcaccttttctccacagagggtgtcgcccaccaccagtccccgccctgctagcccagtccctgggagtgagcgccggggctcccggcctgagatgactcccgttagcttacgaagcacaaaggaggggcccgagaccccacccaggccccgggatcagctgcccccccatccccgctcccgccgctactccggggacagtgactcctcagcctcctccgcccagagcggcccccttggtacccgcagtgatgacacaggcactggcccccggagggagcgacccagccggcggctgaccacaggcaccccggcctctccgagacggcctcctgccctgcgcagccagtcccgagaccggctggatcgcggccggccccggggggccccaggaggcaggggagcccagctgtcggtccccagccctgcccggcgggcccggagccagagccgcgaggagcaggctgtgctgcttgtgcgcagggatcgagacgggcagcactcatgggtgccaaggggcaggggcagtgggggctcgggcaggagcaccccccagactccccgtgcccgcagccctgcagcaccccggctttcccgggtctccagccccagtccagagttgggcaccacaccggccagcatcttccgcacacccctgcagctcgacccgcagcaggagcagcagctgttccggcgcctggaagaggagttcctggccaatgcccgggcccttgaggctgttgctagcgtgacccccactggaccagcccctgacccagctcgggcccccgaccctccagctcctgactctgcctattgttcctccagttcctcctcttcgtccctcagcgtcctgggtggcaaatgtggccaacctggggactctggccggacggccaatgggctgcctgggccccgaagccaagccctttccagctcctccgatgaaggcagcccctgccctggcatgggggggccactagatgcacctgggagccccctggcttgcactgaaccctcgaggacctgggcacggggtcggatggacacacagccagaccgtaaaccctcacgtatccccacgcctcggggcccccgccgcccctccggacccgcagagctggggacatggcatgccctgcactcagtcaccccgagggctgagccagattcctggatgtgatggaccagctcagctgtccccagaccccatcccttctccttttcctttgtggccttaacccttctgcatcagggagccccctctgcctcttgagtaccagacctcatgggaccagaccccttgggaccacatggcacaatgggacctctgttgtacattccggttgggggatgagcgttgctatttaattactaatattattgaatgccttagaggaggccgggcgagcccggtgttctgaagacctgtggcccagcagagcctctgacagtaaagttttgctccagc

SEQ ID NO: 138851 - DNA, 2238 bp, Homo sapiens
  Payload ID: 7200
  Gene Symbol: GAS2L1
  Gene Name: growth arrest-specific 2 like 1
  Uniprot ID: Q99501
  ENST ID: ENST00000610653
  CDS Start-End: 133-1146
gccgcggcgcgggacgcatagagctgcggctcgggcggcgcctccctgcggcggcccggcccggctccggcccccgctggggcaatgctccccggggccgcgggatgagccagtgactcggccggtccgggcatggcagacccagtggcgggcatcgcgggctcggcggccaagagcgtgcggccatttcgctccagtgaggcctacgtggaggccatgaaggaggacctggccgagtggctcaatgccttgtacggcctgggtctcccgggtggtggcgatggcttcctgacagggctggccacgggcacgaccctgtgccaacatgccaacgccgtgaccgaggctgcccgtgcattggcagccgcccgcccggcccgaggtgtggccttccaggcgcacagtgtagtgcctggctccttcatggcgcgcgacaacgtggccaccttcatcggctggtgccgcgtggagctgggtgtgccggaggtgctcatgtttgagactgaggacctggtgctgcgcaagaacgagaagagcgtggtgctgtgcctgctggaggtggcgcggcgtggggcacgcctgggcctgctggccccacgcctcgtgcagtttgagcaggagattgagcgggagctgcgtgctgcacccccagcccccaacgcccctgccgctggggaggacaccactgaaaccgcccccgcaccagggactcctgcccgcggcccccgcatgacacccagcgacctgcgcaacctcgacgagctggtgagggagattctgggccgctgcacctgccctgaccagtttcccatgatcaaggtctcagaggggaagtaccgtgtgggggactcgagcctgctcatctttgtgcgggtgctgaggagccacgtgatggtgcgagtgggtggtggctgggacacgctggagcattacctggacaagcacgacccgtgccgctgctcctccactgctcatcgcccaccccagccgagggtctgcaccttttctccacagagggtgtcgcccaccaccagtccccgccctgctagcccagtccctgggagtgagcgccggggctcccggcctgagatgactcccgttagcttacgaagcacaaaggaggggcccgagaccccacccaggtgagatgcaggaggacgaggagtgaggggtccagagggtgggggggcgtcagccctggcctgcatgatgggttgcctgtgcgccagagtgactcacaccctgggaaaagttcccgtgggtgggggcgggcctggcttcccatctccatggcaacccaaccaaaccaacaacacagctggggcgggccctgtggctgggcggcagccagtccagctcttgcttcctctggcccgtcctgggaaggggggtgtctagagcccaggaaacttcttcttccgtggcttttggggccctgggccgctggaggaagctgctcacttctccctggaagtccccaggacagaccgatgcccctgacagccccgtccaccagccacataccctgctgttcctctccctgcctgttctgcatgccagtccttccgtggtaccccatctgtctctattgtccccctgccccaggccccgggatcagctgcccccccatccccgctcccgccgctactccggggacagtgactcctcagcctcctccgcccagagcggcccccttggtacccgcagtgatgacacaggcactggcccccggagggagcgacccagccggcggctgaccacaggcaccccggcctctccgagacggcctcctgccctgcgcagccagtcccgagaccggctggatcgcggccggccccggggggccccaggaggcaggggagcccagctgtcggtccccagccctgcccggcgggcccggagccagagccgcgaggagcaggctgtgctgcttgtgcgcagggatcgagacgggcagcactcatgggtgccaaggggcaggggcagtgggggctcgggcaggagcaccccccagactccccgtgcccgcagccctgcagcaccccggctttcccgggtctccagccccagtccagagttgggcaccacaccggccagcatcttccgcacacccctgcagctcgacccgcagcaggagcagcagctgttccggcgcctggaagaggagttcctggccaatgcccgggcccttgaggctgttgctagcgtgacccccactggaccagcccctgacccagc

SEQ ID NO: 138852 - DNA, 2661 bp, Homo sapiens
  Payload ID: 7201
  Gene Symbol: GAS2L2
  Gene Name: growth arrest-specific 2 like 2
  ENST ID: ENST00000604063
  CDS Start-End: 29-2623
ccacctcctgccctgctggggtccagccatgtcccagcctgcgggaggcaggaggaagcccaggaccctagggccgcctgtgtgcagtatccggcctttcaagtcgagtgagcagtacctggaggccatgaaggaagacctggctgagtggcttcgcgacctctatgggctggacatcgacgcagccaacttcctgcaggtgctggaaacgggcctggtgctgtgccaacacgccaacgttgtcactgacgctgccctggccttcctggctgaggcacctgcccaagcccagaagattcccatgccccgggtcggggtctcctgcaatggggccgcccagccaggtaccttccaggccagggacaatgtctctaacttcatccagtggtgtcgaaaggagatgggcatccaagaggtgctgatgttcgagacggaggacttggtgctgcgcaagaacgtgaagaacgtggtgctgtgtttgctggagctgggccgccgggcgtggcgctttggtgttgcggcgcccacactcgtgcagctggaggaggagatcgaggaggaggtgcggcgggagctgccctgccacttccgcaacctggaccagatggtgcagagccttgtgagccactgcacgtgcccagtgcagttctccatggtcaaagtgtctgaggggaagtaccgtgtgggtgactccaacaccctcatcttcatccggatcctccggaaccatgtgatggtacgtgtagggggcggctgggacacactgggccattacctggacaaacatgacccctgccgctgcacatccctctcacacaagccaggcagcttcctgaagcccccggccccaccagtgcagcatgaagtaagggtacaggatggaccctcacagacccagcctacaatgaccatcagccgctcacagagcccaccaccccctgtggactggaagacatatacctcttcagaccgaaggctgaggccccccaccccatcctcccccagaccccgcagggaacggggagcagggacgggggcctccagagagatggcaccattcctgaggtgccaggagaggtctctcatcccatcttggaggcagccgacagctggggacagcccacccagcccccagtcctcatctacccaaaaaggccgagacccacagtgtacctcgtcaggaaagagggaggagagatacccccctgaactccccaggggaaggattcccacatcttgggttcatgaagaaacagacagctggggaaccgacgccgggaaccccaccccacaaagactccgagccattgaggccaccaccaaagggatatcagcaagaggaccatctcccctgcctcgttcctttggcccagccgagtgcctgggcctcaggctgccactccgggatgaggccaagggtgcgttcttccagttcagggagccagagtctgtccgttctccaacccctgtccaaggcctaaccaagatccccatccggctgccccctgctcgccccccaacaccaggaaggagctttcctggtgctacaagtggaagtcccaggacagaacttgggagagaccccatcccactaagggccgtcactgtggacctggctgggtccacgcatggggactgctctgtggaagtgaggcaggaggaccagcagctggacatccaggtcatggcagaggccagagagtcctgggacctgggcctacaggagcaggaggggcggtacacacctctgcccttgggcgggaacaaggagcaagccatctactgtagccttgaagaggagattttgggcaacatgaagctgctagaagtcaggagtgcctgtccgcagggcacaaggtctggggtcatccctcgcagtggggtctacatccccaggctggctgggcagtggcctgagcctgggggtccttatgacaaagccatccaagaactggctcaggggtccccatccctccttaaagtggacctggaagcctggaaggcagccccgactggctcccctaagccagctgttaccccaggaccgggaagcctcaaagggaagttgggagccagacagagtgggcccaggacaaaggcaagcctgagtgccaagggcacccacatgaggaaggtcccacctcagggagggcaggactgctcggcttctactgtgtctgccagcccggaggcccccacaccttcgcccttggaccccaactctgacaaagccaaggcatgtctgagcaagggcaggagaactctccggaagcccaagagggtcccgtccatctacaagctgaagctgagacccaggattcggccccggagagaccacaggcctgagaagcagccttcacgaatccccaggccactggcctatgtcttcctgggtccagccaggcagccccccaaggacaggctgttgagagctgtgctgggcagcaagggaggggaggcatcccgggtggatggagcttcagtaggtgaggaggaggaggaaggaaaggaggagaaagagccagccgctccattggagagcagcccccaacctccagagggcctgcaacctcactggcttaatcaagctccacttccacctgaggaggagtcctgggtctgaggcacatgagcgtgttgggtaggagggaagcaaaaagg

SEQ ID NO: 138853 - DNA, 3014 bp, Homo sapiens
  Payload ID: 7201
  Gene Symbol: GAS2L2
  Gene Name: growth arrest-specific 2 like 2
  Uniprot ID: Q8NHY3
  ENST ID: ENST00000604641
  CDS Start-End: 29-2671
ccacctcctgccctgctggggtccagccatgtcccagcctgcgggaggcaggaggaagcccaggaccctagggccgcctgtgtgcagtatccggcctttcaagtcgagtgagcagtacctggaggccatgaaggaagacctggctgagtggcttcgcgacctctatgggctggacatcgacgcagccaacttcctgcaggtgctggaaacgggcctggtgctgtgccaacacgccaacgttgtcactgacgctgccctggccttcctggctgaggcacctgcccaagcccagaagattcccatgccccgggtcggggtctcctgcaatggggccgcccagccaggtaccttccaggccagggacaatgtctctaacttcatccagtggtgtcgaaaggagatgggcatccaagaggtgctgatgttcgagacggaggacttggtgctgcgcaagaacgtgaagaacgtggtgctgtgtttgctggagctgggccgccgggcgtggcgctttggtgttgcggcgcccacactcgtgcagctggaggaggagatcgaggaggaggtgcggcgggagctggccctgcccccgcccgacccctcgccgccagcgccccccaggcgccagccctgccacttccgcaacctggaccagatggtgcagagccttgtgagccactgcacgtgcccagtgcagttctccatggtcaaagtgtctgaggggaagtaccgtgtgggtgactccaacaccctcatcttcatccggatcctccggaaccatgtgatggtacgtgtagggggcggctgggacacactgggccattacctggacaaacatgacccctgccgctgcacatccctctcacacaagccaggcagcttcctgaagcccccggccccaccagtgcagcatgaagtaagggtacaggatggaccctcacagacccagcctacaatgaccatcagccgctcacagagcccaccaccccctgtggactggaagacatatacctcttcagaccgaaggctgaggccccccaccccatcctcccccagaccccgcagggaacggggagcagggacgggggcctccagagagatggcaccattcctgaggtgccaggagaggtctctcatcccatcttggaggcagccgacagctggggacagcccacccagcccccagtcctcatctacccaaaaaggccgagacccacagtgtacctcgtcaggaaagagggaggagagatacccccctgaactccccaggggaaggattcccacatcttgggttcatgaagaaacagacagctggggaaccgacgccgggaaccccaccccacaaagactccgagccattgaggccaccaccaaagggatatcagcaagaggaccatctcccctgcctcgttcctttggcccagccgagtgcctgggcctcaggctgccactccgggatgaggccaagggtgcgttcttccagttcagggagccagagtctgtccgttctccaacccctgtccaaggcctaaccaagatccccatccggctgccccctgctcgccccccaacaccaggaaggagctttcctggtgctacaagtggaagtcccaggacagaacttgggagagaccccatcccactaagggccgtcactgtggacctggctgggtccacgcatggggactgctctgtggaagtgaggcaggaggaccagcagctggacatccaggtcatggcagaggccagagagtcctgggacctgggcctacaggagcaggaggggcggtacacacctctgcccttgggcgggaacaaggagcaagccatctactgtagccttgaagaggagattttgggcaacatgaagctgctagaagtcaggagtgcctgtccgcagggcacaaggtctggggtcatccctcgcagtggggtctacatccccaggctggctgggcagtggcctgagcctgggggtccttatgacaaagccatccaagaactggctcaggggtccccatccctccttaaagtggacctggaagcctggaaggcagccccgactggctcccctaagccagctgttaccccaggaccgggaagcctcaaagggaagttgggagccagacagagtgggcccaggacaaaggcaagcctgagtgccaagggcacccacatgaggaaggtcccacctcagggagggcaggactgctcggcttctactgtgtctgccagcccggaggcccccacaccttcgcccttggaccccaactctgacaaagccaaggcatgtctgagcaagggcaggagaactctccggaagcccaagagggtcccgtccatctacaagctgaagctgagacccaggattcggccccggagagaccacaggcctgagaagcagccttcacgaatccccaggccactggcctatgtcttcctgggtccagccaggcagccccccaaggacaggctgttgagagctgtgctgggcagcaagggaggggaggcatcccgggtggatggagcttcagtaggtgaggaggaggaggaaggaaaggaggagaaagagccagccgctccattggagagcagcccccaacctccagagggcctgcaacctcactggcttaatcaagctccacttccacctgaggaggagtcctgggtctgaggcacatgagcgtgttgggtaggagggaagcaaaaaggatggccatgtatacactggattcacagctgcgggaacagaagggatgttccctcacctccacacagggccttgggcaggagtgggtcagaagacaaatatagactccatctgctcatctgagcaaaggggcaacccactgctctcactccaactccagaggtaggccaggggcagtaggaccatcctgtatctcattactctcccctagaacggctcaccacactcctggcctctggcccctggccatgcccacctgtttccataactcccataagttattaaatgcatgtgattctgcccttga

SEQ ID NO: 138854 - DNA, 2655 bp, Homo sapiens
  Payload ID: 7201
  Gene Symbol: GAS2L2
  Gene Name: growth arrest-specific 2 like 2
  ENST ID: ENST00000618498
  CDS Start-End: 29-670
ccacctcctgccctgctggggtccagccatgtcccagcctgcgggaggcaggaggaagcccaggaccctagggccgcctgtgtgcagtatccggcctttcaagtcgagtgagcagtacctggaggccatgaaggaagacctggctgagtggcttcgcgacctctatgggctggacatcgacgcagccaacttcctgcaggtgctggaaacgggcctggtgctgtgccaacacgccaacgttgtcactgacgctgccctggccttcctggctgaggcacctgcccaagcccagaagattcccatgccccgggtcggggtctcctgcaatggggccgcccagccaggtaccttccaggccagggacaatgtctctaacttcatccagtggtgtcgaaaggagatgggcatccaagaggtgctgatgttcgagacggaggacttggtgctgcgcaagaacgtgaagaacgtggtgctgtgtttgctggagctgggccgccgggcgtggcgctttggtgttgcggcgcccacactcgtgcagctggaggaggagatcgaggaggaggtgcggcgggagctggccctgccacttccgcaacctggaccagatggtgcagagccttgtgagccactgcacgtgcccagtgcagttctccatggtcaaagtgtctgaggggaagtaccgtgtgggtgactccaacaccctcatcttcatccggatcctccggaaccatgtgatggtacgtgtagggggcggctgggacacactgggccattacctggacaaacatgacccctgccgctgcacatccctctcacacaagccaggcagcttcctgaagcccccggccccaccagtgcagcatgaagtaagggtacaggatggaccctcacagacccagcctacaatgaccatcagccgctcacagagcccaccaccccctgtggactggaagacatatacctcttcagaccgaaggctgaggccccccaccccatcctcccccagaccccgcagggaacggggagcagggacgggggcctccagagagatggcaccattcctgaggtgccaggagaggtctctcatcccatcttggaggcagccgacagctggggacagcccacccagcccccagtcctcatctacccaaaaaggccgagacccacagtgtacctcgtcaggaaagagggaggagagatacccccctgaactccccaggggaaggattcccacatcttgggttcatgaagaaacagacagctggggaaccgacgccgggaaccccaccccacaaagactccgagccattgaggccaccaccaaagggatatcagcaagaggaccatctcccctgcctcgttcctttggcccagccgagtgcctgggcctcaggctgccactccgggatgaggccaagggtgcgttcttccagttcagggagccagagtctgtccgttctccaacccctgtccaaggcctaaccaagatccccatccggctgccccctgctcgccccccaacaccaggaaggagctttcctggtgctacaagtggaagtcccaggacagaacttgggagagaccccatcccactaagggccgtcactgtggacctggctgggtccacgcatggggactgctctgtggaagtgaggcaggaggaccagcagctggacatccaggtcatggcagaggccagagagtcctgggacctgggcctacaggagcaggaggggcggtacacacctctgcccttgggcgggaacaaggagcaagccatctactgtagccttgaagaggagattttgggcaacatgaagctgctagaagtcaggagtgcctgtccgcagggcacaaggtctggggtcatccctcgcagtggggtctacatccccaggctggctgggcagtggcctgagcctgggggtccttatgacaaagccatccaagaactggctcaggggtccccatccctccttaaagtggacctggaagcctggaaggcagccccgactggctcccctaagccagctgttaccccaggaccgggaagcctcaaagggaagttgggagccagacagagtgggcccaggacaaaggcaagcctgagtgccaagggcacccacatgaggaaggtcccacctcagggagggcaggactgctcggcttctactgtgtctgccagcccggaggcccccacaccttcgcccttggaccccaactctgacaaagccaaggcatgtctgagcaagggcaggagaactctccggaagcccaagagggtcccgtccatctacaagctgaagctgagacccaggattcggccccggagagaccacaggcctgagaagcagccttcacgaatccccaggccactggcctatgtcttcctgggtccagccaggcagccccccaaggacaggctgttgagagctgtgctgggcagcaagggaggggaggcatcccgggtggatggagcttcagtaggtgaggaggaggaggaaggaaaggaggagaaagagccagccgctccattggagagcagcccccaacctccagagggcctgcaacctcactggcttaatcaagctccacttccacctgaggaggagtcctgggtctgaggcacatgagcgtgttgggtaggagggaagc

SEQ ID NO: 138855 - DNA, 2218 bp, Homo sapiens
  Payload ID: 7202
  Gene Symbol: GAS2L3
  Gene Name: growth arrest-specific 2 like 3
  Uniprot ID: Q86XJ1
  ENST ID: ENST00000266754
  CDS Start-End: 134-2218
caggcggcggcggcagcggcggcggttggtcaggggcgtgttggccccgcacagattgagccgagttgtcgccccgctgggagaagtgaccctcctgcgcctgaaaagaaatttcatttcaatataggtgactatgcagcctgcaattcaagtatggtttggagaagatctgcctctaagtcctcggagtcctctgactcccagacacggaccaggattggctaatgtttgtcagtacgatgagtggatagctgtgaggcatgaagccactttgttgcccatgcaagaagatctgtcaatctggttatctggtttattaggtattaaagttaaggcagaaaaattattggaagaacttgataatggagtactattatgtcaactgattgatgttcttcaaaacatggtgaaaacatgcaactctgaagaatcagggaattttccaatgagaaaagtgccctgtaagaaagatgctgcatcaggttcattctttgctcgggacaataccgcaaacttccttcactggtgtagggacattggggttgatgaaacttacctctttgaatctgaaggtttagttttgcacaaagatccaagacaggtgtatctttgtcttcttgaaattggtcgaattgtgtcaagatacggggttgagccaccagtgttagtaaaacttgagaaagaaattgagttagaagagactttgcttaatacttctgggcctgaagattccatcagcattccaaaatcatgctgtcggcatgaagagctacatgaagctgttaaacatattgctgaggaccctccttgtagttgttctcatcgattttctattgagtatttatctgaaggacggtaccgactaggggataaaatactctttataagaatgcttcatggaaaacatgtcatggttcgcgttggtggaggctgggatactcttcaaggatttttgcttaaatatgacccctgtcgaatattacagtttgccacattagaacaaaaaattttagcatttcaaaaaggagtttctaatgaaagtgtacctgattcgcctgccagaacacctcagcctcctgaaatgaatcctttgtcagcagttaacatgtttcagaaacaaaattcaaaacccagcgtgccagttagtattccaaaaagcaaagaaaaacagggacgtccaccaggtgcattggtgccagcatcttcactgaaaggaggtaatctgggctctatgtcagtccgttctaaattgccaaattctccagcagcatcttctcatcccaagctcaagtcttcaaaaggcataacgaagaaaccgcaggctccttcaaacaatgcatcatcttcacttgcttcattaaatccagtaggtaaaaacacttcttcaccagctttaccaagaactgcaccttgtatatctgagtcaccgagaaaatgtatttcatcccccaatacccccaaggccaaggttattccagcccagaattcagcagatctgcccgagtccacacttttgccaaataagtgttcaggaaaaactcaacctaagtatttgaaacataatcatatttcttccagagataatgcagtatctcacttagctgcacattcaaattcatcctcaaaatgtcccaagctgcctaaagcaaatatacctgtaagacctaaaccttctttccagtcctctgcaaaaatgacaaaaaccagttccaaaaccatagccacgggtctaggaacacagtctcaaccatccgatggagccccacaagcaaagccagtcccagcacagaaacttaaatcggccttgaatttaaatcagccagtttctgtgtcctcagtttctcctgtaaaagccacacagaaatcaaaagataagaatatagtttcagctaccaaaaagcagcctcagaataaaagtgcatttcagaagacaggacccagctccttgaagtctcctggccgtaccccactgtccatcgtgagcctaccccagtcttctaccaaaacacaaactgcaccgaagtcagcacagactgtcgctaagagccagcattcaactaaagggcctcccagaagtggcaaaaccccagcttcaatcaggaaaccaccctcatctgttaaggatgcagatagtggagataaaaaacctactgcaaagaaaaaggaagatgatgaccattattttgtcatgactggaagtaagaaacctagaaaataa

SEQ ID NO: 138856 - DNA, 2229 bp, Homo sapiens
  Payload ID: 7202
  Gene Symbol: GAS2L3
  Gene Name: growth arrest-specific 2 like 3
  Uniprot ID: Q86XJ1
  ENST ID: ENST00000539410
  CDS Start-End: 132-2216
cagtcgagtaaacacattcctaaatcttgtaatttgggggtttgggggagtagcaaaactgccactgttaactgtatgttaatattttgttcttttttcagaaaagaaatttcatttcaatataggtgactatgcagcctgcaattcaagtatggtttggagaagatctgcctctaagtcctcggagtcctctgactcccagacacggaccaggattggctaatgtttgtcagtacgatgagtggatagctgtgaggcatgaagccactttgttgcccatgcaagaagatctgtcaatctggttatctggtttattaggtattaaagttaaggcagaaaaattattggaagaacttgataatggagtactattatgtcaactgattgatgttcttcaaaacatggtgaaaacatgcaactctgaagaatcagggaattttccaatgagaaaagtgccctgtaagaaagatgctgcatcaggttcattctttgctcgggacaataccgcaaacttccttcactggtgtagggacattggggttgatgaaacttacctctttgaatctgaaggtttagttttgcacaaagatccaagacaggtgtatctttgtcttcttgaaattggtcgaattgtgtcaagatacggggttgagccaccagtgttagtaaaacttgagaaagaaattgagttagaagagactttgcttaatacttctgggcctgaagattccatcagcattccaaaatcatgctgtcggcatgaagagctacatgaagctgttaaacatattgctgaggaccctccttgtagttgttctcatcgattttctattgagtatttatctgaaggacggtaccgactaggggataaaatactctttataagaatgcttcatggaaaacatgtcatggttcgcgttggtggaggctgggatactcttcaaggatttttgcttaaatatgacccctgtcgaatattacagtttgccacattagaacaaaaaattttagcatttcaaaaaggagtttctaatgaaagtgtacctgattcgcctgccagaacacctcagcctcctgaaatgaatcctttgtcagcagttaacatgtttcagaaacaaaattcaaaacccagcgtgccagttagtattccaaaaagcaaagaaaaacagggacgtccaccaggtgcattggtgccagcatcttcactgaaaggaggtaatctgggctctatgtcagtccgttctaaattgccaaattctccagcagcatcttctcatcccaagctcaagtcttcaaaaggcataacgaagaaaccgcaggctccttcaaacaatgcatcatcttcacttgcttcattaaatccagtaggtaaaaacacttcttcaccagctttaccaagaactgcaccttgtatatctgagtcaccgagaaaatgtatttcatcccccaatacccccaaggccaaggttattccagcccagaattcagcagatctgcccgagtccacacttttgccaaataagtgttcaggaaaaactcaacctaagtatttgaaacataatcatatttcttccagagataatgcagtatctcacttagctgcacattcaaattcatcctcaaaatgtcccaagctgcctaaagcaaatatacctgtaagacctaaaccttctttccagtcctctgcaaaaatgacaaaaaccagttccaaaaccatagccacgggtctaggaacacagtctcaaccatccgatggagccccacaagcaaagccagtcccagcacagaaacttaaatcggccttgaatttaaatcagccagtttctgtgtcctcagtttctcctgtaaaagccacacagaaatcaaaagataagaatatagtttcagctaccaaaaagcagcctcagaataaaagtgcatttcagaagacaggacccagctccttgaagtctcctggccgtaccccactgtccatcgtgagcctaccccagtcttctaccaaaacacaaactgcaccgaagtcagcacagactgtcgctaagagccagcattcaactaaagggcctcccagaagtggcaaaaccccagcttcaatcaggaaaccaccctcatctgttaaggatgcagatagtggagataaaaaacctactgcaaagaaaaaggaagatgatgaccattattttgtcatgactggaagtaagaaacctagaaaataaatacatactcatt

SEQ ID NO: 138857 - DNA, 2742 bp, Homo sapiens
  Payload ID: 7202
  Gene Symbol: GAS2L3
  Gene Name: growth arrest-specific 2 like 3
  ENST ID: ENST00000537247
  CDS Start-End: 955-2727
atgtggaactccattttaataggagcagcttctttgctgcatttttaaaaaatggtcttggaagcttcttacttccgagaagtggatctttgttgcggacaaaggattatttatgctaaaggaaaatgtattccccactgaattagctcgtgggaagcataacaagctcattaggaatgctcacttgtactttggccttttgctgtggtggagagaagggaaaatgacatcaaaaaggacattctgttgtcttttgccttcctgcaaagaaaatgtgttataatattaggcttttcagtatggtttagctcaggttcaactttggtactagaagaaatgttcctgaaaggaaagtgaaaagaaatttcatttcaatataggtgactatgcagcctgcaattcaagtatggtttggagaagatctgcctctaagtcctcggagtcctctgactcccagacacggaccaggattggctaatgtttgtcagtacgatgagtggatagctgtgaggcatgaagccactttgttgcccatgcaagaagatctgtcaatctggttatctggtttattaggtattaaagttaaggcagaaaaattattggaagaacttgataatggagtactattatgtcaactgattgatgttcttcaaaacatggtgaaaacatgcaactctgaagaatcagggaaagagtcttgctctgttgcccaggttggagtacagtggcacgatcatagcttactgtatcctggaactactgggctcaagtgatcctctcacctcagcctcctgagcagctgggactttagctacatgcaaccacgtctggctaatattaaaagaaatattttgtagagatgaggtcacactgtttcccaggctggtcttgaactcctagcctcaagcaatcctgcttcagcctccgaaagtactgggattacaaaattttccaatgagaaaagtgccctgtaagaaagatgctgcatcaggttcattctttgctcgggacaataccgcaaacttccttcactggtgtagggacattggggttgatgaaacttacctctttgaatctgaaggtttagttttgcacaaagatccaagacaggtgtatctttgtcttcttgaaattggtcgaattgtgtcaagatacggggttgagccaccagtgttagtaaaacttgagaaagaaattgagttagaagagactttgcttaatacttctgggcctgaagattccatcagcattccaaaatcatgctgtcggcatgaagagctacatgaagctgttaaacatattgctgaggaccctccttgtagttgttctcatcgattttctattgagtatttatctgaaggacggtaccgactaggggataaaatactctttataagaatgcttcatggaaaacatgtcatggttcgcgttggtggaggctgggatactcttcaaggatttttgcttaaatatgacccctgtcgaatattacagtttgccacattagaacaaaaaattttagcatttcaaaaaggagtttctaatgaaagtgtacctgattcgcctgccagaacacctcagcctcctgaaatgaatcctttgtcagcagttaacatgtttcagaaacaaaattcaaaacccagcgtgccagttagtattccaaaaagcaaagaaaaacagggacgtccaccaggtgcattggtgccagcatcttcactgaaaggaggtaatctgggctctatgtcagtccgttctaaattgccaaattctccagcagcatcttctcatcccaagctcaagtcttcaaaaggcataacgaagaaaccgcaggctccttcaaacaatgcatcatcttcacttgcttcattaaatccagtaggtaaaaacacttcttcaccagctttaccaagaactgcaccttgtatatctgagtcaccgagaaaatgtatttcatcccccaatacccccaaggccaaggttattccagcccagaattcagcagatctgcccgagtccacacttttgccaaataagtgttcaggaaaaactcaacctaagtatttgaaacataatcatatttcttccagagataatgcagtatctcacttagctgcacattcaaattcatcctcaaaatgtcccaagctgcctaaagcaaatatacctgtaagacctaaaccttctttccagtcctctgcaaaaatgacaaaaaccagttccaaaaccatagccacgggtctaggaacacagtctcaaccatccgatggagccccacaagcaaagccagtcccagcacagaaacttaaatcggccttgaatttaaatcagccagtttctgtgtcctcagtttctcctgtaaaagccacacagaaatcaaaagataagaatatagtttcagctaccaaaaagcagcctcagaataaaagtgcatttcagaagacaggacccagctccttgaagtctcctggccgtaccccactgtccatcgtgagcctaccccagtcttctaccaaaacacaaactgcaccgaagtcagcacagactgtcgctaagagccagcattcaactaaagggcctcccagaagtggcaaaaccccagcttcaatcaggaaaccaccctcatctgttaaggatgcagatagtggagataaaaaacctactgcaaagaaaaaggaagatgatgaccattattttgtcatgactggaagtaagaaacctagaaaataaatacatactcattat

SEQ ID NO: 138858 - DNA, 567 bp, Homo sapiens
  Payload ID: 7202
  Gene Symbol: GAS2L3
  Gene Name: growth arrest-specific 2 like 3
  ENST ID: ENST00000550295
  CDS Start-End: 420-567
ctcttttcctggcgaacttttacgcgctgtctcggggcctccgcgcctcagcctgagggctccaggagccccccgctctctgaggccccgaagctgaggtttgttgggtctcccggctgcgggagccagtacgctctgcgtttgcctggctgcggcagtcgcgtgctctgattggctcctggggccgtcaagatcagaacactgaggctcagagaagttaactactccaaagtcatatagccagtattttctggagctgtaattcaaatcagatgtgttcaataccttctactaccccattgctgtctttatgatttgtaacagatggagccatgacattttgaattctccccatcataccgtataacgtgagaaaggattgaaaatgtaaaagaaatttcatttcaatataggtgactatgcagcctgcaattcaagtatggtttggagaagatctgcctctaagtcctcggagtcctctgactcccagacacggaccaggattggctaatgtttgtcagtacgatgagtggatagctgtgaggcatgaagccactttgttgccca

SEQ ID NO: 138859 - DNA, 2340 bp, Homo sapiens
  Payload ID: 7202
  Gene Symbol: GAS2L3
  Gene Name: growth arrest-specific 2 like 3
  Uniprot ID: Q86XJ1
  ENST ID: ENST00000547754
  CDS Start-End: 227-2311
gtcaggggcgtgttggccccgcacagattgagccgagttgtcgccccgctgggagaagtgaccctcctgcgcctgatcagaacactgaggctcagagaagttaactactccaaagtcatatagccagtattttctggagctgtaattcaaatcagatgtgttcaataccttctactaccccattgctgtctttatgaaaagaaatttcatttcaatataggtgactatgcagcctgcaattcaagtatggtttggagaagatctgcctctaagtcctcggagtcctctgactcccagacacggaccaggattggctaatgtttgtcagtacgatgagtggatagctgtgaggcatgaagccactttgttgcccatgcaagaagatctgtcaatctggttatctggtttattaggtattaaagttaaggcagaaaaattattggaagaacttgataatggagtactattatgtcaactgattgatgttcttcaaaacatggtgaaaacatgcaactctgaagaatcagggaattttccaatgagaaaagtgccctgtaagaaagatgctgcatcaggttcattctttgctcgggacaataccgcaaacttccttcactggtgtagggacattggggttgatgaaacttacctctttgaatctgaaggtttagttttgcacaaagatccaagacaggtgtatctttgtcttcttgaaattggtcgaattgtgtcaagatacggggttgagccaccagtgttagtaaaacttgagaaagaaattgagttagaagagactttgcttaatacttctgggcctgaagattccatcagcattccaaaatcatgctgtcggcatgaagagctacatgaagctgttaaacatattgctgaggaccctccttgtagttgttctcatcgattttctattgagtatttatctgaaggacggtaccgactaggggataaaatactctttataagaatgcttcatggaaaacatgtcatggttcgcgttggtggaggctgggatactcttcaaggatttttgcttaaatatgacccctgtcgaatattacagtttgccacattagaacaaaaaattttagcatttcaaaaaggagtttctaatgaaagtgtacctgattcgcctgccagaacacctcagcctcctgaaatgaatcctttgtcagcagttaacatgtttcagaaacaaaattcaaaacccagcgtgccagttagtattccaaaaagcaaagaaaaacagggacgtccaccaggtgcattggtgccagcatcttcactgaaaggaggtaatctgggctctatgtcagtccgttctaaattgccaaattctccagcagcatcttctcatcccaagctcaagtcttcaaaaggcataacgaagaaaccgcaggctccttcaaacaatgcatcatcttcacttgcttcattaaatccagtaggtaaaaacacttcttcaccagctttaccaagaactgcaccttgtatatctgagtcaccgagaaaatgtatttcatcccccaatacccccaaggccaaggttattccagcccagaattcagcagatctgcccgagtccacacttttgccaaataagtgttcaggaaaaactcaacctaagtatttgaaacataatcatatttcttccagagataatgcagtatctcacttagctgcacattcaaattcatcctcaaaatgtcccaagctgcctaaagcaaatatacctgtaagacctaaaccttctttccagtcctctgcaaaaatgacaaaaaccagttccaaaaccatagccacgggtctaggaacacagtctcaaccatccgatggagccccacaagcaaagccagtcccagcacagaaacttaaatcggccttgaatttaaatcagccagtttctgtgtcctcagtttctcctgtaaaagccacacagaaatcaaaagataagaatatagtttcagctaccaaaaagcagcctcagaataaaagtgcatttcagaagacaggacccagctccttgaagtctcctggccgtaccccactgtccatcgtgagcctaccccagtcttctaccaaaacacaaactgcaccgaagtcagcacagactgtcgctaagagccagcattcaactaaagggcctcccagaagtggcaaaaccccagcttcaatcaggaaaccaccctcatctgttaaggatgcagatagtggagataaaaaacctactgcaaagaaaaaggaagatgatgaccattattttgtcatgactggaagtaagaaacctagaaaataaatacatactcattataaaaaaagagaaaa

SEQ ID NO: 138860 - DNA, 3948 bp, Homo sapiens
  Payload ID: 7202
  Gene Symbol: GAS2L3
  Gene Name: growth arrest-specific 2 like 3
  ENST ID: ENST00000552854
  CDS Start-End: 1-1176
gtacctgattcgcctgccagaacacctcagcctcctgaaatgaatcctttgtcagcagttaacatgtttcagaaacaaaattcaaaacccagcgtgccagttagtattccaaaaagcaaagaaaaacagggacgtccaccaggtgcattggtgccagcatcttcactgaaaggaggtaatctgggctctatgtcagtccgttctaaattgccaaattctccagcagcatcttctcatcccaagctcaagtcttcaaaaggcataacgaagaaaccgcaggctccttcaaacaatgcatcatcttcacttgcttcattaaatccagtaggtaaaaacacttcttcaccagctttaccaagaactgcaccttgtatatctgagtcaccgagaaaatgtatttcatcccccaatacccccaaggccaaggttattccagcccagaattcagcagatctgcccgagtccacacttttgccaaataagtgttcaggaaaaactcaacctaagtatttgaaacataatcatatttcttccagagataatgcagtatctcacttagctgcacattcaaattcatcctcaaaatgtcccaagctgcctaaagcaaatatacctgtaagacctaaaccttctttccagtcctctgcaaaaatgacaaaaaccagttccaaaaccatagccacgggtctaggaacacagtctcaaccatccgatggagccccacaagcaaagccagtcccagcacagaaacttaaatcggccttgaatttaaatcagccagtttctgtgtcctcagtttctcctgtaaaagccacacagaaatcaaaagataagaatatagtttcagctaccaaaaagcagcctcagaataaaagtgcatttcagaagacaggacccagctccttgaagtctcctggccgtaccccactgtccatcgtgagcctaccccagtcttctaccaaaacacaaactgcaccgaagtcagcacagactgtcgctaagagccagcattcaactaaagggcctcccagaagtggcaaaaccccagcttcaatcaggaaaccaccctcatctgttaaggatgcagatagtggagataaaaaacctactgcaaagaaaaaggaagatgatgaccattattttgtcatgactggaagtaagaaacctagaaaataaatacatactcattataaaaaaagagaaaaggaagaatgaatgtgttagcttcacatcttaaaagtttctcctatttgtgtctgtctaaataggtgcagacactaaggatagtgaggatggaggctgggatgaggaaagggttcatcagaattcacatatctgaattcactggaaagagcccttctgaagcaaacagttgtaaaatcactgcaaggtttttattaataatagacatgtatatgattttcagtctatagcatctttgttaacatctgccttttgcaggaaatgtaaaagttatttaacactacaagaattttaacaatagttgctctatttttgaatatgtattaaatatggagttcatatacctgctaatatcaacggtggtgctcttactattagttaattgcattttggttaaaaaaaaaaaagcaacagtttggcacttgtcctacaaaaggcacctaatttaattttctgatcaggattgcctgatccaacagtgctaagtcatggctgctgctgactagcttggcattattctgtgttaggtagaattcttattatttatttttttaagctttccaaattggaaggaactgattgtttcatgtggcttatatttacattggtaatattttgtcaccaatatttttggttaaaaaaaatccaacaaattaacttactgaaatataaacaaattttgtaaacaattttttatattatctataaaaacgtagacaccttatgtttcacatgttgtgcaatgtgacaggggaagctgatttagtagcttttagcatattaaaaataattttttataatgtaatttcctgtgagtgcagacctgacattttacattaaaataatgtgaaacatcagaattatgttttaacaactttaaaattaagatgatgttaaaataattttagagttatgctatgtaaaaattctatcatgaaattatttttctctagatagcacaataccaattttaattaatttcttccaattaggttacttttctttaataaagttatgctgccttcagttttccaatggcaagtagacaggatatgttcaaggttttctgcactgtaggcacagtctctcaagcatatcctgatcatgtaatgactgcataaactccatcaacctaaggtgatacttgtaaataatttatttttaagggatggtgactttaaaaattattaatgaactttgagaagttttaagagtgcttttaaaacttcacagtattgccaattatcttaggttattcagtattcaggtttgtgtttctctgttttaaactaaaatgtgttttctgaagaaaaaaataatagtttacacaaatgtacaatcatagaataagcattttaagctggcgactagtgttctatagattacaaagcaagaaaactttctatgaagataaatgaccttttgcctgaagagtacagataaaatcaaagatgtgtgcaagctagtttttggaagaagtgatgcttctcttctttaaagagacagtcaccaaatacttggtttaactcgactattgacttgggcattgagagagatgatatatacatctttggaaagtgaagtcaatgttcaagaggtgatagaagctttactttttagtgatcagaaatatttagtgcatcttttcagacaggaagaattttatcatcaagtattcccttataaaaccaagtaacacttctttatcagtaacttttagaacttaaaagaaagcaaaaagtaaatggaattgtaggcaatttatgaatcctagtagattttacaatatgtaatttatgttgtttacagtatataaacactaagttttgtgttaaatgtgatcaggaataaaagtatcccacaggcatctgacacaaattccagaattagccaaagaattgtttatttgaggccaggcaatcccagcattttgggaagccaagttgggctgatctcaaactcctgacctcaggtgatccacctgcctcagcctcccaaagcgctgggattacaggcatgagccatcacacccagcgaaaagttttgtttgaataaacaatatccgaaagacaattagtttcttcagatgtattttgaaattctcctaaagagctagtgtttctattcattttcacaatttaaaaacagctcttaacattgctgaagttgggagaactttccatctcttcttaataacagtgcaagattttgtaaattcttttttgtgtttaatgtttaataaaacgagtattaagcttaaattactgaagtacctgggagaagtaatgatgtgtactttcaaaaaaatggaaaatgcttttattttattttctataatttgttaacatgatatgtaaaattaaacttcggagcacaatgaaatgccgattatttttaccttgtttgggcttaaagtaggtatttaaggtttatgtgttcaaaatgccttggtaaattggatgacctctaactttactgtccatatggagtttgtcattctttatggataagagaacttaaggaaaagttactgtttttcttcagtctttttatatctatctgatttaaaatctgttactttattaaaaggcttcaacaacaggttgttaggatgtagtcttacatccaggttcacataataaccccatttgaatccaaatttgtgtatattttcttatgccagcagtatttgtatccaattttaacttaggtttgttttcttgagtattaaaatttaaacatata

SEQ ID NO: 138861 - DNA, 2490 bp, Homo sapiens
  Payload ID: 7203
  Gene Symbol: GAS6
  Gene Name: growth arrest-specific 6
  Uniprot ID: Q14393
  ENST ID: ENST00000327773
  CDS Start-End: 148-2184
gcttgaggtgccgcagccgccgccgccgccgccgccgcgatgtgaccttcagggccgccaggacgggatgaccggagcctccgccccgcggcgcccgcggctcgcctcggcctcccgggcgctctgaccgcgcgtccccggcccgccatggccccttcgctctcgcccgggcccgccgccctgcgccgcgcgccgcagctgctgctgctgctgctggccgcggagtgcgcgcttgccgcgctgttgccggcgcgcgaggccacgcagttcctgcggcccaggcagcgccgcgcctttcaggtcttcgaggaggccaagcagggccacctggagagggagtgcgtggaggagctgtgcagccgcgaggaggcgcgggaggtgttcgagaacgaccccgagacggattatttttacccaagatacttagactgcatcaacaagtatgggtctccgtacaccaaaaactcaggcttcgccacctgcgtgcaaaacctgcctgaccagtgcacgcccaacccctgcgataggaaggggacccaagcctgccaggacctcatgggcaacttcttctgcctgtgtaaagctggctgggggggccggctctgcgacaaagatgtcaacgaatgcagccaggagaacgggggctgcctccagatctgccacaacaagccgggtagcttccactgttcctgccacagcggcttcgagctctcctctgatggcaggacctgccaagacatagacgagtgcgcagactcggaggcctgcggggaggcgcgctgcaagaacctgcccggctcctactcctgcctctgtgacgagggctttgcgtacagctcccaggagaaggcttgccgagatgtggacgagtgtctgcagggccgctgtgagcaggtctgcgtgaactccccagggagctacacctgccactgtgacgggcgtgggggcctcaagctgtcccaggacatggacacctgtgaggacatcttgccgtgcgtgcccttcagcgtggccaagagtgtgaagtccttgtacctgggccggatgttcagtgggacccccgtgatccgactgcgcttcaagaggctgcagcccaccaggctggtagctgagtttgacttccggacctttgaccccgagggcatcctcctctttgccggaggccaccaggacagcacctggatcgtgctggccctgagagccggccggctggagctgcagctgcgctacaacggtgtcggccgtgtcaccagcagcggcccggtcatcaaccatggcatgtggcagacaatctctgttgaggagctggcgcggaatctggtcatcaaggtcaacagggatgctgtcatgaaaatcgcggtggccggggacttgttccaaccggagcgaggactgtatcatctgaacctgaccgtgggaggtattcccttccatgagaaggacctcgtgcagcctataaaccctcgtctggatggctgcatgaggagctggaactggctgaacggagaagacaccaccatccaggaaacggtgaaagtgaacacgaggatgcagtgcttctcggtgacggagagaggctctttctaccccgggagcggcttcgccttctacagcctggactacatgcggacccctctggacgtcgggactgaatcaacctgggaagtagaagtcgtggctcacatccgcccagccgcagacacaggcgtgctgtttgcgctctgggcccccgacctccgtgccgtgcctctctctgtggcactggtagactatcactccacgaagaaactcaagaagcagctggtggtcctggccgtggagcatacggccttggccctaatggagatcaaggtctgcgacggccaagagcacgtggtcaccgtctcgctgagggacggtgaggccaccctggaggtggacggcaccaggggccagagcgaggtgagcgccgcgcagctgcaggagaggctggccgtgctcgagaggcacctgcggagccccgtgctcacctttgctggcggcctgccagatgtgccggtgacttcagcgccagtcaccgcgttctaccgcggctgcatgacactggaggtcaaccggaggctgctggacctggacgaggcggcgtacaagcacagcgacatcacggcccactcctgcccccccgtggagcccgccgcagcctaggcccccacgggacgcggcaggcttctcagtctctgtccgagacagccgggaggagcctgggggctcctcaccacgtggggccatgctgagagctgggctttcctctgtgaccatcccggcctgtaacatatctgtaaatagtgagatggacttggggcctctgacgccgcgcactcagccgtgggcccgggcgcggggaggccggcgcagcgcagagcgggctcgaagaaaataattctctattatttttattaccaagcgcttctttctgactctaaaatatggaaaataaaatatttacagaaa

SEQ ID NO: 138862 - DNA, 8033 bp, Homo sapiens
  Payload ID: 7204
  Gene Symbol: GAS7
  Gene Name: growth arrest-specific 7
  Uniprot ID: O60861
  ENST ID: ENST00000323816
  CDS Start-End: 164-1414
gattttcttccctggagtgagaagcaggcagaggatcactcggtggctgtgtataccctgcctttggtggtggcaccccagtcagaaacgggaccctgaagctgggatttaggatgctggctgtgtcacctcggtctccccaagattgaacgcaagacgagccatgaagcctggaatggtcccccctccgccgggagaagaaagccagacggtcatccttccacctggctggcagagctacctgtcgcctcagggccggcggtactatgtcaacacgaccaccaatgagaccacctgggaacgtcccagcagttctcctgggattccagccagccctggctctcacaggagctctctgcctccaacagtgaatggataccacgcatcagggaccccagcgcaccctccagagactgcccacatgagtgtccgaaaatccaccggtgattcccagaacctgggatcctcatcgccaagcaaaaagcagagcaaggaaaacaccatcacaataaactgtgtgacgttccctcacccagacacgatgccggaacagcagctgctgaaaccaaccgagtggagctactgcgactacttctgggctgataagaaggacccccaaggcaacggcaccgtggctgggtttgaactactgctccagaaacagctgaagggcaaacaaatgcagaaggaaatgtcagaattcatccgggaaaggataaagattgaagaagactatgcgaagaacttagctaagctctctcagaactccttggcttcacaggaggaaggctccttgggagaggcgtgggcccaggtgaagaagagcctggcggacgaagcagaagttcacctcaagttctctgccaagcttcacagcgaggtggagaagcccctgatgaacttccgtgagaacttcaagaaagacatgaagaagtgcgaccaccacattgccgaccttcgcaagcagctcgccagccgctatgcctcggtggagaaggcccggaaagccctcacagagcggcagagagacctggagatgaagacccagcagctggagatcaagctgagcaacaagacagaggaggacatcaagaaggcgcggagaaagtccacacaggctggagacgacctcatgcgctgtgtggatctctacaaccaggcccagtccaaatggtttgaagagatggtgaccaccacattggagctagagcggctggaggtggagagggtagagatgatccggcagcacctgtgccagtacacgcagctgcggcatgaaacagacatgttcaaccaaagcacagtcgagcccgtggatcagctgcttcgaaaagtggacccggccaaagacagggagctgtgggtcagagagcacaagacgggcaacatccgccctgtggacatggagatctagatgggcctgtgcagcttcggggggtcctgctggggaggggggctgggctcccaccatggggcccatgccgagtggatgccccccaccctctctcctgggccactgaggagaggggagagagctggtgattccagaagggtgacccggacagcctagctgggggctcccccatattcccaggcccagaagacagacccacagccctgcccttgtctctgaggctgaagaccccctgactcccatgctgtgcttgccgctctgaaacaaacagaggctggaactttgtggtccttgccgagttttgtaggggtcactgtcacatgcttgtgccctggaagccccaaggctcttcctccagctggctcccttgtctccagggctttggaggatcagggtagggagggctctgtctctaagccaggtgtcaggatcagaatcatgggtagaaggtgccattcagctcacagccgcacccagaatcctttgcagccctccttctttatttttttcccattgcattctgggagtccacatctggctttctcagccactgttcatcaccaggggttttaggaggaaggcttggctcctgtcttcccagacccaccatgcctggagaggtcaggatggaactacctcattcggcaaattagccccaaattgagcgctgaatcgtgtcccatgagatcaggcgccatctgtaaagtctcctctggaaatgccaatccatccttcccccagctgcttcctcggggaggcccctgcccccaccctgccagcccttcccagtctcattagaggaagctttccaaagttctcagttatcaagacctcatccagctcgtccaaaggcttcagggatggaaacaaaccagctcgtctcagaggccagcaagctggggcctgtccgccacggtgccctgtgcacctttgggctgccctggcccccactctcccgggccgcccaccacaggctcttaatggggccgggtcagtcctacatgtgagatgggttagggcaagtctttgccatcccccagatggctctgtcttcttgtgtatggcagggctgggactgctgtcccttgtacagttttctgtcactggtgggcactggacaggcatagcagactctcttgtggccacactaggttgtcgcctttcaggcagtgtcccgccacctttgcttcccgctccttctggacattccagagccctgcaccaaacccttacttggtgtctgcacctcctttccctctctccatcttccaatccctggaaaagtctggtctgagtgtgacttgggaagctttcagtgctgctgtttggcccagctcattactttctccctttctctaccacagcaaacacattctccaccatgtcagtctaaagagtctaaaggggccgggagaagcatgagcgaggggcagattctagtcgggagcccatgccctggaaatccatctttcttcatctttcccattgaccactttgggtttgacctgcacatctgcagtgagggcagaattcaacaagcacaactcactggtctttcagtcaacgtgctagaaaccgatgacttattaatctctaattttttggcgcctctttcattgaatgagaattgctttcgtatagttcacattagaaaaatgcctaatatactaaagtaaaccaaacgttgtcacttttctcttgttcttgaaacattgcaaccaaaaaggtcagcacaaaggccttcacctacgtgaagacctcctggtaggatctgtccatgggatggagaaccactctgtccagatctggggttgggtcatgacaccagctaccaattttagaatattatttcttggtttctttatgaaaaatgggtgctagtggtaattgctttgtggcttagtaaactactctgtggatgatttccaaacattcaaagccaatagccttgttattaacaagatattttgagtacaatatggctcattgacttttccattacatctgaggattccagagtcctctgttcatccctgggatagagtgagccctcttgcgtcttccagggtagctcaggttggcccagtttgggccagtccatttttggaggtcactctttcccccctcatcccctcacctccttctctttacccccttcacgtacttcctttctttcttccctctgttattcattcatcaagcaggttaaagccattgtgctaagatctaatctgaggacactataatggccctgtcgtcagggaagcccgtgatcgctcgttttcaggggtcttaccggtcagcaaccttggcattgatacataggcactctacagaatttaagttttcagaggtaagtctgttgttctgattaatctgcattcattcagcgaatgctcaagacaagccaggcatgctgagaagcggcgctctagttgtatgtaagatgggcattcctctgctctcctctattctccatgtcgactgagaagagtataataagaacattgtaccctctccacacttaaccctctgggattctttattataatataaaccaccgtcgtgaggcatttacctgttggatggaaggtagacagcaacaagattttaatcacctggtcaccagaccctcacggcccatatccaattcgaatttcagaaatttctctgtttgctttaaataactctttacaaataagggtcgggcacggtggctcacgcctgtaatcccagctctttgggaggccgaggtgggcagatcacgaggtcaggagatcgagaccatcctggctaacatggtgaaaccccgtctctgctaaaaatacaaaaaattagccagatgtggtggtgcacacctgtagtcccaactattcggcaggctgaggcagtagaatcgcttgaacctgggaggcggagattgcagtgaaccaagatcgggccactgcactccagcttgggtgacagagcaagactccatctcaaaaaaattataaataactctttgcaaataggaaagtgaagctcaagggtaaccagtgaggctatgaaattgccagtgaattaagaccagggctagagtcaacagtccagaacccctatccgtatgaacaggggcccgtttctggttgaaatcaaggttaggatgcaactgagaaaataaaagactgcactttggagaggcaagcacgctatccgggttgttgttttgttttatgtcttggtgcttaggtgaggacttagctgggtttattcaaagtgggcgggtctgggctattcttgagaatgtcccttccatttctgagaacaagtcagccccttctacctgcctccacccaggagactgatgcacaagatctgtttgtgaaagcctgatttaaaaagaaaaaaaaaattccttaagccaaatggtgttccaagttggttgctgtgacaacctccaggaagagccacttgttaccctctattctttctagtgctttcagtcagtggcaacacataggccccttggaccgtggggatggcggccctgagattctgtcagtgggaccaccctgggcctcctttctacctccactcagcaccctgttggccaaggagaatttctgcggtgggaggcagtgctctgctagtcaggattgataaacagctgggcacaccgaaacagtgtaccaacgaattcaccaaccaggggtttctttccctaccctttgtgaaaaccaatcaattactagatgagtggatggatgcagaaaaatctgggctgagccaaagtcccttttggaaatacaagccataacattcgaaggacatcagcgaccttggcttgtttaggtgattttacttccagctgcaggtagtcttgacaaggagtgtttaaacagaaggctcaagatgcattccttgtgtaggtcggagagagcacttctaatgttaagtggggtacagatcagctgcccccccacgtagcctggacatcgtcttatccccataatccttgccatccctacaaggcccatcgccaccaccttttcccaggtttattgaggtatgattgacatccagtaaaattcaccctttggaaatatacagctctgtgaattttgacaaatttagtgtcttgtgaccatcaccaagatcaacctgtttttaaccctccaaaaaattcccttctcctgccctctttccctggcaaccctgattgattatctgatcctataattttgccttttctagaatgtcatataaatggagtcacactgatgtcgccttttgagtctggcatctttccctcagcttaatgcttttgagtcattcatgatgtgtgcgtgtggtttgttccttctccttgccgggaagtatttcattgcatgggcgtactactctgcttctttatttttacactgagcctttcgccctggaagttcttggcccagggtcttcaacttgtttgcacgaccacttccagcttgctgcttccttcagttccccaggctcctcctccaaatgccagctgtgcccacaagctgttcttagggctcacactcgccttttggcgcgtggtgggtttttggtagtgcagaaagaatccagggatgggaggggaagggacggatgggtgctcaattgctgctcacgtctgctgcaacctgaagcttgcatctcagccagcagatctgctcccttctgggacccaggcttcagtgtcacacggtccttggctatgtattgggcgttggaggctttgaaaggcgagcagaagcagcatggacaagaaggctggggctggccctggggctcatcatgatgctttcctggatctgttgcttcatctgcaagctgagggtgtttgttctagatgagtgtctcaggccaccggcaactgcatgtacctcctccctttctcatttccaatgatgtaccctgtacacgtgttcatgctgtgtctggctctcatctgcacaatcgtgcatagaattgcctcaagtcctggtgagagagatgccgtggtacttttccatttagattcaaatggagctaaaattaagagttttatgagctgttaagaatgaggtagtttctcctaggaccccccaaagacagtgcaagtaatgaccgtttggatctcattcgtcgatctttgatagtatgttctggagtctactccccaggagccaggacaggcgtgaagatggagtccttgtcgcagctggagccttgcctagctggtgatcacacagcctggcctgtacctgcaccccactggatggtggtacatggtggcagggacaggaccacacccagttaaggccagaccaggctgagtgtgacccctgaggtaaacactccactaagctgtgtcttgttcatgccccctgctcagtgaaaggtgagtcccgagaccagttgggtacctctctatgcgaaccagagacatttctggatccaggccaggtgaagattagggccaggaagcctgagcccccggggcctcaaggtagggagccgaagaggctgccaggactctgctgggttgaaatttgccggggaggactcttgtctccccctcaggagtatttttgttgaggctttcctggaggtgaagaagcaattcccattgcagcaggttagagcgagaatcagacagagggcaaaaaccaattcgcttctccccacgttctaaatgctggggcatggctgtcaggagggcttcctgggaggtgtctctgggggtggggtgaggttggggcgatggcctttggagattgcgtgtggtgttcaggactgttccttggtgtttgagggaaactttagtgggattgcagtggaatgtaaggtcagggcacgtgggtgctctctcggggtggggtgactgggagacctagagggaaagcctgctatgcagggggagagcacaggactggccctgctctgcggcctcctttgtcccataacctgaagttaagtcacatcccctgtcgggacctccgtgcactcatctgtcaagtgggggcgcttcccttccagcatcacctgcagcagacgggctctcgggagtcgtgggttccaggcagctgtgtggacccagggacagacattcaaagggacgccagccatccttagtgacaggggccccaacttagcatcccttcccttccgttaggaaggagatgaccggaagcaaccccttcacagacacgagcacatcggcaaaccctatgaaagtggaattttctaacaaaataaacttgcttgtttgatctgttttctgtaacttttgctaaatactttatacatttttcatgttaaagagccgtgtctcccgccagcactcctcaccccggtatgaatgtgtttcctccacattgtatatccttccaccctctggctgcctagatcagtaaataaaattgatgtaatataatttataagtaacactgttgaaaccctgatcccagtggaggctgtaacccacctgcccccgcaccacccccctgacccctgttaccgcatttgtgtgtattaatgctgaagaattaaatgtttaaagagtttaaattttgaaggcgtttgctatatacagttgtcctgcattattataaagagttttcaggaagtt

SEQ ID NO: 138863 - DNA, 929 bp, Homo sapiens
  Payload ID: 7204
  Gene Symbol: GAS7
  Gene Name: growth arrest-specific 7
  ENST ID: ENST00000396115
  CDS Start-End: 146-691
attgcttctgggtttggggtgtgagaggatgcagagtgggagaccttaaaaccgtctgatctggctgctaaagcgagtgtctgacgaccacccattaacaccagcgagtagcgtttgctcacggctttaggataagaagcctggaatggtcccccctccgccgggagaagaaagccagacggtcatccttccacctggctggcagagctacctgtcgcctcagggccggcggtactatgtcaacacgaccaccaatgagaccacctgggaacgtcccagcagttctcctgggattccagccagccctggctctcacaggagctctctgcctccaacagtgaatggataccacgcatcagggaccccagcgcaccctccagagactgcccacatgagtgtccgaaaatccaccggtgattcccagaacctgggatcctcatcgccaagcaaaaagcagagcaaggaaaacaccatcacagagctagagcggctggaggtggagagggtagagatgatccggcagcacctgtgccagtacacgcagctgcggcatgaaacagacatgttcaaccaaagcacagtcgagcccgtggatcagctgcttcgaaaagtggacccggccaaagacagggagctgtgggtcagagagcacaagacgggcaacatccgccctgtggacatggagatctagatgggcctgtgcagcttcggggggtcctgctggggaggggggctgggctcccaccatggggcccatgccgagtggatgccccccaccctctctcctgggccactgaggagaggggagagagctggtgattccagaagggtgacccggacagcctagctgggggctcccccatattcccaggcccagaagacagacccacagccctgcccttgtctctgaggctgaagaccccctgact

SEQ ID NO: 138864 - DNA, 4970 bp, Homo sapiens
  Payload ID: 7204
  Gene Symbol: GAS7
  Gene Name: growth arrest-specific 7
  Uniprot ID: O60861
  ENST ID: ENST00000432992
  CDS Start-End: 162-1592
gtcccccgcctgcctgaggacccccgcgcaccccagagacggcgcgcgcccagagcgcgggagcccggagcgccgggcgcctgggaccccgcggagccgctgcccagcccgtggggctcggcgggaatgcaggctgcgctgtgaacccgggcgccaaggccatgtccggcgctcgctgccggaccctgtaccccttctccggggagcggcacggccaggggctgcgcttcgccgcgggcgagctgatcacgctgctgcaggtcccggacggcggctggtgggaaggcgagaaggaggacgggctccgtggctggttcccggcgagctacgtgcagttgctggagaagcctggaatggtcccccctccgccgggagaagaaagccagacggtcatccttccacctggctggcagagctacctgtcgcctcagggccggcggtactatgtcaacacgaccaccaatgagaccacctgggaacgtcccagcagttctcctgggattccagccagccctggctctcacaggagctctctgcctccaacagtgaatggataccacgcatcagggaccccagcgcaccctccagagactgcccacatgagtgtccgaaaatccaccggtgattcccagaacctgggatcctcatcgccaagcaaaaagcagagcaaggaaaacaccatcacaataaactgtgtgacgttccctcacccagacacgatgccggaacagcagctgctgaaaccaaccgagtggagctactgcgactacttctgggctgataagaaggacccccaaggcaacggcaccgtggctgggtttgaactactgctccagaaacagctgaagggcaaacaaatgcagaaggaaatgtcagaattcatccgggaaaggataaagattgaagaagactatgcgaagaacttagctaagctctctcagaactccttggcttcacaggaggaaggctccttgggagaggcgtgggcccaggtgaagaagagcctggcggacgaagcagaagttcacctcaagttctctgccaagcttcacagcgaggtggagaagcccctgatgaacttccgtgagaacttcaagaaagacatgaagaagtgcgaccaccacattgccgaccttcgcaagcagctcgccagccgctatgcctcggtggagaaggcccggaaagccctcacagagcggcagagagacctggagatgaagacccagcagctggagatcaagctgagcaacaagacagaggaggacatcaagaaggcgcggagaaagtccacacaggctggagacgacctcatgcgctgtgtggatctctacaaccaggcccagtccaaatggtttgaagagatggtgaccaccacattggagctagagcggctggaggtggagagggtagagatgatccggcagcacctgtgccagtacacgcagctgcggcatgaaacagacatgttcaaccaaagcacagtcgagcccgtggatcagctgcttcgaaaagtggacccggccaaagacagggagctgtgggtcagagagcacaagacgggcaacatccgccctgtggacatggagatctagatgggcctgtgcagcttcggggggtcctgctggggaggggggctgggctcccaccatggggcccatgccgagtggatgccccccaccctctctcctgggccactgaggagaggggagagagctggtgattccagaagggtgacccggacagcctagctgggggctcccccatattcccaggcccagaagacagacccacagccctgcccttgtctctgaggctgaagaccccctgactcccatgctgtgcttgccgctctgaaacaaacagaggctggaactttgtggtccttgccgagttttgtaggggtcactgtcacatgcttgtgccctggaagccccaaggctcttcctccagctggctcccttgtctccagggctttggaggatcagggtagggagggctctgtctctaagccaggtgtcaggatcagaatcatgggtagaaggtgccattcagctcacagccgcacccagaatcctttgcagccctccttctttatttttttcccattgcattctgggagtccacatctggctttctcagccactgttcatcaccaggggttttaggaggaaggcttggctcctgtcttcccagacccaccatgcctggagaggtcaggatggaactacctcattcggcaaattagccccaaattgagcgctgaatcgtgtcccatgagatcaggcgccatctgtaaagtctcctctggaaatgccaatccatccttcccccagctgcttcctcggggaggcccctgcccccaccctgccagcccttcccagtctcattagaggaagctttccaaagttctcagttatcaagacctcatccagctcgtccaaaggcttcagggatggaaacaaaccagctcgtctcagaggccagcaagctggggcctgtccgccacggtgccctgtgcacctttgggctgccctggcccccactctcccgggccgcccaccacaggctcttaatggggccgggtcagtcctacatgtgagatgggttagggcaagtctttgccatcccccagatggctctgtcttcttgtgtatggcagggctgggactgctgtcccttgtacagttttctgtcactggtgggcactggacaggcatagcagactctcttgtggccacactaggttgtcgcctttcaggcagtgtcccgccacctttgcttcccgctccttctggacattccagagccctgcaccaaacccttacttggtgtctgcacctcctttccctctctccatcttccaatccctggaaaagtctggtctgagtgtgacttgggaagctttcagtgctgctgtttggcccagctcattactttctccctttctctaccacagcaaacacattctccaccatgtcagtctaaagagtctaaaggggccgggagaagcatgagcgaggggcagattctagtcgggagcccatgccctggaaatccatctttcttcatctttcccattgaccactttgggtttgacctgcacatctgcagtgagggcagaattcaacaagcacaactcactggtctttcagtcaacgtgctagaaaccgatgacttattaatctctaattttttggcgcctctttcattgaatgagaattgctttcgtatagttcacattagaaaaatgcctaatatactaaagtaaaccaaacgttgtcacttttctcttgttcttgaaacattgcaaccaaaaaggtcagcacaaaggccttcacctacgtgaagacctcctggtaggatctgtccatgggatggagaaccactctgtccagatctggggttgggtcatgacaccagctaccaattttagaatattatttcttggtttctttatgaaaaatgggtgctagtggtaattgctttgtggcttagtaaactactctgtggatgatttccaaacattcaaagccaatagccttgttattaacaagatattttgagtacaatatggctcattgacttttccattacatctgaggattccagagtcctctgttcatccctgggatagagtgagccctcttgcgtcttccagggtagctcaggttggcccagtttgggccagtccatttttggaggtcactctttcccccctcatcccctcacctccttctctttacccccttcacgtacttcctttctttcttccctctgttattcattcatcaagcaggttaaagccattgtgctaagatctaatctgaggacactataatggccctgtcgtcagggaagcccgtgatcgctcgttttcaggggtcttaccggtcagcaaccttggcattgatacataggcactctacagaatttaagttttcagaggtaagtctgttgttctgattaatctgcattcattcagcgaatgctcaagacaagccaggcatgctgagaagcggcgctctagttgtatgtaagatgggcattcctctgctctcctctattctccatgtcgactgagaagagtataataagaacattgtaccctctccacacttaaccctctgggattctttattataatataaaccaccgtcgtgaggcatttacctgttggatggaaggtagacagcaacaagattttaatcacctggtcaccagaccctcacggcccatatccaattcgaatttcagaaatttctctgtttgctttaaataactctttacaaataagggtcgggcacggtggctcacgcctgtaatcccagctctttgggaggccgaggtgggcagatcacgaggtcaggagatcgagaccatcctggctaacatggtgaaaccccgtctctgctaaaaatacaaaaaattagccagatgtggtggtgcacacctgtagtcccaactattcggcaggctgaggcagtagaatcgcttgaacctgggaggcggagattgcagtgaaccaagatcgggccactgcactccagcttgggtgacagagcaagactccatctcaaaaaaattataaataactctttgcaaataggaaagtgaagctcaagggtaaccagtgaggctatgaaattgccagtgaattaagaccagggctagagtcaacagtccagaacccctatccgtatgaacaggggcccgtttctggttgaaatcaaggttaggatgcaactgagaaaataaaagactgcactttggagaggcaagcacgctatccgggttgttgttttgttttatgtcttggtgcttaggtgaggacttagctgggtttattcaaagtgggcgggtctgggctattcttgagaatgtcccttccatttctgagaacaagtcagccccttctacctgcctccacccaggagactgatgcacaagatctgtttgtgaaagcctgattt

SEQ ID NO: 138865 - DNA, 8003 bp, Homo sapiens
  Payload ID: 7204
  Gene Symbol: GAS7
  Gene Name: growth arrest-specific 7
  Uniprot ID: O60861
  ENST ID: ENST00000437099
  CDS Start-End: 146-1384
attgcttctgggtttggggtgtgagaggatgcagagtgggagaccttaaaaccgtctgatctggctgctaaagcgagtgtctgacgaccacccattaacaccagcgagtagcgtttgctcacggctttaggataagaagcctggaatggtcccccctccgccgggagaagaaagccagacggtcatccttccacctggctggcagagctacctgtcgcctcagggccggcggtactatgtcaacacgaccaccaatgagaccacctgggaacgtcccagcagttctcctgggattccagccagccctggctctcacaggagctctctgcctccaacagtgaatggataccacgcatcagggaccccagcgcaccctccagagactgcccacatgagtgtccgaaaatccaccggtgattcccagaacctgggatcctcatcgccaagcaaaaagcagagcaaggaaaacaccatcacaataaactgtgtgacgttccctcacccagacacgatgccggaacagcagctgctgaaaccaaccgagtggagctactgcgactacttctgggctgataagaaggacccccaaggcaacggcaccgtggctgggtttgaactactgctccagaaacagctgaagggcaaacaaatgcagaaggaaatgtcagaattcatccgggaaaggataaagattgaagaagactatgcgaagaacttagctaagctctctcagaactccttggcttcacaggaggaaggctccttgggagaggcgtgggcccaggtgaagaagagcctggcggacgaagcagaagttcacctcaagttctctgccaagcttcacagcgaggtggagaagcccctgatgaacttccgtgagaacttcaagaaagacatgaagaagtgcgaccaccacattgccgaccttcgcaagcagctcgccagccgctatgcctcggtggagaaggcccggaaagccctcacagagcggcagagagacctggagatgaagacccagcagctggagatcaagctgagcaacaagacagaggaggacatcaagaaggcgcggagaaagtccacacaggctggagacgacctcatgcgctgtgtggatctctacaaccaggcccagtccaaatggtttgaagagatggtgaccaccacattggagctagagcggctggaggtggagagggtagagatgatccggcagcacctgtgccagtacacgcagctgcggcatgaaacagacatgttcaaccaaagcacagtcgagcccgtggatcagctgcttcgaaaagtggacccggccaaagacagggagctgtgggtcagagagcacaagacgggcaacatccgccctgtggacatggagatctagatgggcctgtgcagcttcggggggtcctgctggggaggggggctgggctcccaccatggggcccatgccgagtggatgccccccaccctctctcctgggccactgaggagaggggagagagctggtgattccagaagggtgacccggacagcctagctgggggctcccccatattcccaggcccagaagacagacccacagccctgcccttgtctctgaggctgaagaccccctgactcccatgctgtgcttgccgctctgaaacaaacagaggctggaactttgtggtccttgccgagttttgtaggggtcactgtcacatgcttgtgccctggaagccccaaggctcttcctccagctggctcccttgtctccagggctttggaggatcagggtagggagggctctgtctctaagccaggtgtcaggatcagaatcatgggtagaaggtgccattcagctcacagccgcacccagaatcctttgcagccctccttctttatttttttcccattgcattctgggagtccacatctggctttctcagccactgttcatcaccaggggttttaggaggaaggcttggctcctgtcttcccagacccaccatgcctggagaggtcaggatggaactacctcattcggcaaattagccccaaattgagcgctgaatcgtgtcccatgagatcaggcgccatctgtaaagtctcctctggaaatgccaatccatccttcccccagctgcttcctcggggaggcccctgcccccaccctgccagcccttcccagtctcattagaggaagctttccaaagttctcagttatcaagacctcatccagctcgtccaaaggcttcagggatggaaacaaaccagctcgtctcagaggccagcaagctggggcctgtccgccacggtgccctgtgcacctttgggctgccctggcccccactctcccgggccgcccaccacaggctcttaatggggccgggtcagtcctacatgtgagatgggttagggcaagtctttgccatcccccagatggctctgtcttcttgtgtatggcagggctgggactgctgtcccttgtacagttttctgtcactggtgggcactggacaggcatagcagactctcttgtggccacactaggttgtcgcctttcaggcagtgtcccgccacctttgcttcccgctccttctggacattccagagccctgcaccaaacccttacttggtgtctgcacctcctttccctctctccatcttccaatccctggaaaagtctggtctgagtgtgacttgggaagctttcagtgctgctgtttggcccagctcattactttctccctttctctaccacagcaaacacattctccaccatgtcagtctaaagagtctaaaggggccgggagaagcatgagcgaggggcagattctagtcgggagcccatgccctggaaatccatctttcttcatctttcccattgaccactttgggtttgacctgcacatctgcagtgagggcagaattcaacaagcacaactcactggtctttcagtcaacgtgctagaaaccgatgacttattaatctctaattttttggcgcctctttcattgaatgagaattgctttcgtatagttcacattagaaaaatgcctaatatactaaagtaaaccaaacgttgtcacttttctcttgttcttgaaacattgcaaccaaaaaggtcagcacaaaggccttcacctacgtgaagacctcctggtaggatctgtccatgggatggagaaccactctgtccagatctggggttgggtcatgacaccagctaccaattttagaatattatttcttggtttctttatgaaaaatgggtgctagtggtaattgctttgtggcttagtaaactactctgtggatgatttccaaacattcaaagccaatagccttgttattaacaagatattttgagtacaatatggctcattgacttttccattacatctgaggattccagagtcctctgttcatccctgggatagagtgagccctcttgcgtcttccagggtagctcaggttggcccagtttgggccagtccatttttggaggtcactctttcccccctcatcccctcacctccttctctttacccccttcacgtacttcctttctttcttccctctgttattcattcatcaagcaggttaaagccattgtgctaagatctaatctgaggacactataatggccctgtcgtcagggaagcccgtgatcgctcgttttcaggggtcttaccggtcagcaaccttggcattgatacataggcactctacagaatttaagttttcagaggtaagtctgttgttctgattaatctgcattcattcagcgaatgctcaagacaagccaggcatgctgagaagcggcgctctagttgtatgtaagatgggcattcctctgctctcctctattctccatgtcgactgagaagagtataataagaacattgtaccctctccacacttaaccctctgggattctttattataatataaaccaccgtcgtgaggcatttacctgttggatggaaggtagacagcaacaagattttaatcacctggtcaccagaccctcacggcccatatccaattcgaatttcagaaatttctctgtttgctttaaataactctttacaaataagggtcgggcacggtggctcacgcctgtaatcccagctctttgggaggccgaggtgggcagatcacgaggtcaggagatcgagaccatcctggctaacatggtgaaaccccgtctctgctaaaaatacaaaaaattagccagatgtggtggtgcacacctgtagtcccaactattcggcaggctgaggcagtagaatcgcttgaacctgggaggcggagattgcagtgaaccaagatcgggccactgcactccagcttgggtgacagagcaagactccatctcaaaaaaattataaataactctttgcaaataggaaagtgaagctcaagggtaaccagtgaggctatgaaattgccagtgaattaagaccagggctagagtcaacagtccagaacccctatccgtatgaacaggggcccgtttctggttgaaatcaaggttaggatgcaactgagaaaataaaagactgcactttggagaggcaagcacgctatccgggttgttgttttgttttatgtcttggtgcttaggtgaggacttagctgggtttattcaaagtgggcgggtctgggctattcttgagaatgtcccttccatttctgagaacaagtcagccccttctacctgcctccacccaggagactgatgcacaagatctgtttgtgaaagcctgatttaaaaagaaaaaaaaaattccttaagccaaatggtgttccaagttggttgctgtgacaacctccaggaagagccacttgttaccctctattctttctagtgctttcagtcagtggcaacacataggccccttggaccgtggggatggcggccctgagattctgtcagtgggaccaccctgggcctcctttctacctccactcagcaccctgttggccaaggagaatttctgcggtgggaggcagtgctctgctagtcaggattgataaacagctgggcacaccgaaacagtgtaccaacgaattcaccaaccaggggtttctttccctaccctttgtgaaaaccaatcaattactagatgagtggatggatgcagaaaaatctgggctgagccaaagtcccttttggaaatacaagccataacattcgaaggacatcagcgaccttggcttgtttaggtgattttacttccagctgcaggtagtcttgacaaggagtgtttaaacagaaggctcaagatgcattccttgtgtaggtcggagagagcacttctaatgttaagtggggtacagatcagctgcccccccacgtagcctggacatcgtcttatccccataatccttgccatccctacaaggcccatcgccaccaccttttcccaggtttattgaggtatgattgacatccagtaaaattcaccctttggaaatatacagctctgtgaattttgacaaatttagtgtcttgtgaccatcaccaagatcaacctgtttttaaccctccaaaaaattcccttctcctgccctctttccctggcaaccctgattgattatctgatcctataattttgccttttctagaatgtcatataaatggagtcacactgatgtcgccttttgagtctggcatctttccctcagcttaatgcttttgagtcattcatgatgtgtgcgtgtggtttgttccttctccttgccgggaagtatttcattgcatgggcgtactactctgcttctttatttttacactgagcctttcgccctggaagttcttggcccagggtcttcaacttgtttgcacgaccacttccagcttgctgcttccttcagttccccaggctcctcctccaaatgccagctgtgcccacaagctgttcttagggctcacactcgccttttggcgcgtggtgggtttttggtagtgcagaaagaatccagggatgggaggggaagggacggatgggtgctcaattgctgctcacgtctgctgcaacctgaagcttgcatctcagccagcagatctgctcccttctgggacccaggcttcagtgtcacacggtccttggctatgtattgggcgttggaggctttgaaaggcgagcagaagcagcatggacaagaaggctggggctggccctggggctcatcatgatgctttcctggatctgttgcttcatctgcaagctgagggtgtttgttctagatgagtgtctcaggccaccggcaactgcatgtacctcctccctttctcatttccaatgatgtaccctgtacacgtgttcatgctgtgtctggctctcatctgcacaatcgtgcatagaattgcctcaagtcctggtgagagagatgccgtggtacttttccatttagattcaaatggagctaaaattaagagttttatgagctgttaagaatgaggtagtttctcctaggaccccccaaagacagtgcaagtaatgaccgtttggatctcattcgtcgatctttgatagtatgttctggagtctactccccaggagccaggacaggcgtgaagatggagtccttgtcgcagctggagccttgcctagctggtgatcacacagcctggcctgtacctgcaccccactggatggtggtacatggtggcagggacaggaccacacccagttaaggccagaccaggctgagtgtgacccctgaggtaaacactccactaagctgtgtcttgttcatgccccctgctcagtgaaaggtgagtcccgagaccagttgggtacctctctatgcgaaccagagacatttctggatccaggccaggtgaagattagggccaggaagcctgagcccccggggcctcaaggtagggagccgaagaggctgccaggactctgctgggttgaaatttgccggggaggactcttgtctccccctcaggagtatttttgttgaggctttcctggaggtgaagaagcaattcccattgcagcaggttagagcgagaatcagacagagggcaaaaaccaattcgcttctccccacgttctaaatgctggggcatggctgtcaggagggcttcctgggaggtgtctctgggggtggggtgaggttggggcgatggcctttggagattgcgtgtggtgttcaggactgttccttggtgtttgagggaaactttagtgggattgcagtggaatgtaaggtcagggcacgtgggtgctctctcggggtggggtgactgggagacctagagggaaagcctgctatgcagggggagagcacaggactggccctgctctgcggcctcctttgtcccataacctgaagttaagtcacatcccctgtcgggacctccgtgcactcatctgtcaagtgggggcgcttcccttccagcatcacctgcagcagacgggctctcgggagtcgtgggttccaggcagctgtgtggacccagggacagacattcaaagggacgccagccatccttagtgacaggggccccaacttagcatcccttcccttccgttaggaaggagatgaccggaagcaaccccttcacagacacgagcacatcggcaaaccctatgaaagtggaattttctaacaaaataaacttgcttgtttgatctgttttctgtaacttttgctaaatactttatacatttttcatgttaaagagccgtgtctcccgccagcactcctcaccccggtatgaatgtgtttcctccacattgtatatccttccaccctctggctgcctagatcagtaaataaaattgatgtaatataatttataagtaacactgttgaaaccctgatcccagtggaggctgtaacccacctgcccccgcaccacccccctgacccctgttaccgcatttgtgtgtattaatgctgaagaattaaatgtttaaagagtttaaattttgaaggcgtttgctatatacagttgtcctgcattattataaagagttttcaggaagtt

SEQ ID NO: 138866 - DNA, 1799 bp, Homo sapiens
  Payload ID: 7204
  Gene Symbol: GAS7
  Gene Name: growth arrest-specific 7
  Uniprot ID: O60861
  ENST ID: ENST00000542249
  CDS Start-End: 169-1407
cctctctgctcccagaggagctgtcctctgtgcaggggctctgaatgctcaggtgcttctcactgctcatgctcacgcaaccccggaggtcacgtgtgtgctgcctctgacctcaggggtttatgggccgcagacttcccaatgtcacgctactgtaggaagcctggaatggtcccccctccgccgggagaagaaagccagacggtcatccttccacctggctggcagagctacctgtcgcctcagggccggcggtactatgtcaacacgaccaccaatgagaccacctgggaacgtcccagcagttctcctgggattccagccagccctggctctcacaggagctctctgcctccaacagtgaatggataccacgcatcagggaccccagcgcaccctccagagactgcccacatgagtgtccgaaaatccaccggtgattcccagaacctgggatcctcatcgccaagcaaaaagcagagcaaggaaaacaccatcacaataaactgtgtgacgttccctcacccagacacgatgccggaacagcagctgctgaaaccaaccgagtggagctactgcgactacttctgggctgataagaaggacccccaaggcaacggcaccgtggctgggtttgaactactgctccagaaacagctgaagggcaaacaaatgcagaaggaaatgtcagaattcatccgggaaaggataaagattgaagaagactatgcgaagaacttagctaagctctctcagaactccttggcttcacaggaggaaggctccttgggagaggcgtgggcccaggtgaagaagagcctggcggacgaagcagaagttcacctcaagttctctgccaagcttcacagcgaggtggagaagcccctgatgaacttccgtgagaacttcaagaaagacatgaagaagtgcgaccaccacattgccgaccttcgcaagcagctcgccagccgctatgcctcggtggagaaggcccggaaagccctcacagagcggcagagagacctggagatgaagacccagcagctggagatcaagctgagcaacaagacagaggaggacatcaagaaggcgcggagaaagtccacacaggctggagacgacctcatgcgctgtgtggatctctacaaccaggcccagtccaaatggtttgaagagatggtgaccaccacattggagctagagcggctggaggtggagagggtagagatgatccggcagcacctgtgccagtacacgcagctgcggcatgaaacagacatgttcaaccaaagcacagtcgagcccgtggatcagctgcttcgaaaagtggacccggccaaagacagggagctgtgggtcagagagcacaagacgggcaacatccgccctgtggacatggagatctagatgggcctgtgcagcttcggggggtcctgctggggaggggggctgggctcccaccatggggcccatgccgagtggatgccccccaccctctctcctgggccactgaggagaggggagagagctggtgattccagaagggtgacccggacagcctagctgggggctcccccatattcccaggcccagaagacagacccacagccctgcccttgtctctgaggctgaagaccccctgactcccatgctgtgcttgccgctctgaaacaaacagaggctggaactttgtggtccttgccgagttttgtaggggtcactgtcacatgcttgtgccctggaagccccaaggctcttcctccagctggctcccttgtctccagggctttggaggatca

SEQ ID NO: 138867 - DNA, 732 bp, Homo sapiens
  Payload ID: 7204
  Gene Symbol: GAS7
  Gene Name: growth arrest-specific 7
  ENST ID: ENST00000584146
  CDS Start-End: 194-732
aggaagccggcggagtcttggtgctgagtctgagggcttcaggcaggacccaagactctcctctgaggtagcagcccccagagaaggttagctgttctctgatggccaagtctctgaatctctgacctttagaagaaaatgaagactctgccggggtccagcctgtctcctgcataactactggaagcctggaatggtcccccctccgccgggagaagaaagccagacggtcatccttccacctggctggcagagctacctgtcgcctcagggccggcggtactatgtcaacacgaccaccaatgagaccacctgggaacgtcccagcagttctcctgggattccagccagccctggctctcacaggagctctctgcctccaacagtgaatggataccacgcatcagggaccccagcgcaccctccagagactgcccacatgagtgtccgaaaatccaccggtgattcccagaacctgggatcctcatcgccaagcaaaaagcagagcaaggaaaacaccatcacaataaactgtgtgacgttccctcacccagacacgatgccggaacagcagctgctgaaaccaaccgagtggagctactgcgactacttctgggctgataagaaggacccccaaggcaacggcaccgtggctgggtttgaactactgctccagaaacagctgaagggcaaacaaatgcagaaggaaatgtcagaattcatccgggaaag

SEQ ID NO: 138868 - DNA, 554 bp, Homo sapiens
  Payload ID: 7204
  Gene Symbol: GAS7
  Gene Name: growth arrest-specific 7
  ENST ID: ENST00000584389
  CDS Start-End: 171-554
acagtcccctggtttcttgagcccaaccccaatgctgtaattctgtttattttgctgaatatgaaatccatatggttctgatttcttccttgtaatccgtcatctctgtgtggcttcggagccagcaaccacgcaaagtggctttgaagttgttgttctggaagcctggaatggtcccccctccgccgggagaagaaagccagacggtcatccttccacctggctggcagagctacctgtcgcctcagggccggcggtactatgtcaacacgaccaccaatgagaccacctgggaacgtcccagcagttctcctgggattccagccagccctggctctcacaggagctctctgcctccaacagtgaatggataccacgcatcagggaccccagcgcaccctccagagactgcccacatgagtgtccgaaaatccaccggtgattcccagaacctgggatcctcatcgccaagcaaaaagcagagcaaggaaaacaccatcacaataaactgtgtgacgttccctcacccagacacgatgccggaacagcagctg

SEQ ID NO: 138869 - DNA, 1528 bp, Homo sapiens
  Payload ID: 7204
  Gene Symbol: GAS7
  Gene Name: growth arrest-specific 7
  Uniprot ID: O60861
  ENST ID: ENST00000579158
  CDS Start-End: 115-1353
aatgtcacgctactgtagggtgaattcatcagcctttgccttcctggtttaaaaactcttgcaaaaatgccaaatgggtgtgaccttttctttcttctccaacagaagcctggaatggtcccccctccgccgggagaagaaagccagacggtcatccttccacctggctggcagagctacctgtcgcctcagggccggcggtactatgtcaacacgaccaccaatgagaccacctgggaacgtcccagcagttctcctgggattccagccagccctggctctcacaggagctctctgcctccaacagtgaatggataccacgcatcagggaccccagcgcaccctccagagactgcccacatgagtgtccgaaaatccaccggtgattcccagaacctgggatcctcatcgccaagcaaaaagcagagcaaggaaaacaccatcacaataaactgtgtgacgttccctcacccagacacgatgccggaacagcagctgctgaaaccaaccgagtggagctactgcgactacttctgggctgataagaaggacccccaaggcaacggcaccgtggctgggtttgaactactgctccagaaacagctgaagggcaaacaaatgcagaaggaaatgtcagaattcatccgggaaaggataaagattgaagaagactatgcgaagaacttagctaagctctctcagaactccttggcttcacaggaggaaggctccttgggagaggcgtgggcccaggtgaagaagagcctggcggacgaagcagaagttcacctcaagttctctgccaagcttcacagcgaggtggagaagcccctgatgaacttccgtgagaacttcaagaaagacatgaagaagtgcgaccaccacattgccgaccttcgcaagcagctcgccagccgctatgcctcggtggagaaggcccggaaagccctcacagagcggcagagagacctggagatgaagacccagcagctggagatcaagctgagcaacaagacagaggaggacatcaagaaggcgcggagaaagtccacacaggctggagacgacctcatgcgctgtgtggatctctacaaccaggcccagtccaaatggtttgaagagatggtgaccaccacattggagctagagcggctggaggtggagagggtagagatgatccggcagcacctgtgccagtacacgcagctgcggcatgaaacagacatgttcaaccaaagcacagtcgagcccgtggatcagctgcttcgaaaagtggacccggccaaagacagggagctgtgggtcagagagcacaagacgggcaacatccgccctgtggacatggagatctagatgggcctgtgcagcttcggggggtcctgctggggaggggggctgggctcccaccatggggcccatgccgagtggatgccccccaccctctctcctgggccactgaggagaggggagagagctggtgattccagaagggtgacccggacagcctagctgggggctcccccatatt

SEQ ID NO: 138870 - DNA, 544 bp, Homo sapiens
  Payload ID: 7204
  Gene Symbol: GAS7
  Gene Name: growth arrest-specific 7
  ENST ID: ENST00000580043
  CDS Start-End: 226-544
aatgtagtgggttctttgtgaaagaacagcaatgagcaaagccacaggaacctccgctggggtgcccagaacactggccctgggctagcgacttgcctcagccccatttcccggagaggctgccatgaagaggaagccggcggagtcttggtgctgagtctgagggcttcaggcaggacccaagactctcctctgaggtagcagcccccagagaagaagcctggaatggtcccccctccgccgggagaagaaagccagacggtcatccttccacctggctggcagagctacctgtcgcctcagggccggcggtactatgtcaacacgaccaccaatgagaccacctgggaacgtcccagcagttctcctgggattccagccagccctggctctcacaggagctctctgcctccaacagtgaatggataccacgcatcagggaccccagcgcaccctccagagactgcccacatgagtgtccgaaaatccaccggtgattcccagaacctgggatcctcatcgccaagcaaaaagcagagcaagg

SEQ ID NO: 138871 - DNA, 2417 bp, Homo sapiens
  Payload ID: 7204
  Gene Symbol: GAS7
  Gene Name: growth arrest-specific 7
  Uniprot ID: O60861
  ENST ID: ENST00000580865
  CDS Start-End: 157-1167
aattcgccttcagcccgagagctgggcgtgggaacagcgtggggtcagggagacccctgcttgccctggcccagaatatggtgacttaggattcagactgagcatccctgattccccagcgcctccaccctcagggaacctgaatggggggaaaaaatgtccaatatggagaacagctttgacgatgtttcttgcctctctccccagaacctgggatcctcatcgccaagcaaaaagcagagcaaggaaaacaccatcacaataaactgtgtgacgttccctcacccagacacgatgccggaacagcagctgctgaaaccaaccgagtggagctactgcgactacttctgggctgataagaaggacccccaaggcaacggcaccgtggctgggtttgaactactgctccagaaacagctgaagggcaaacaaatgcagaaggaaatgtcagaattcatccgggaaaggataaagattgaagaagactatgcgaagaacttagctaagctctctcagaactccttggcttcacaggaggaaggctccttgggagaggcgtgggcccaggtgaagaagagcctggcggacgaagcagaagttcacctcaagttctctgccaagcttcacagcgaggtggagaagcccctgatgaacttccgtgagaacttcaagaaagacatgaagaagtgcgaccaccacattgccgaccttcgcaagcagctcgccagccgctatgcctcggtggagaaggcccggaaagccctcacagagcggcagagagacctggagatgaagacccagcagctggagatcaagctgagcaacaagacagaggaggacatcaagaaggcgcggagaaagtccacacaggctggagacgacctcatgcgctgtgtggatctctacaaccaggcccagtccaaatggtttgaagagatggtgaccaccacattggagctagagcggctggaggtggagagggtagagatgatccggcagcacctgtgccagtacacgcagctgcggcatgaaacagacatgttcaaccaaagcacagtcgagcccgtggatcagctgcttcgaaaagtggacccggccaaagacagggagctgtgggtcagagagcacaagacgggcaacatccgccctgtggacatggagatctagatgggcctgtgcagcttcggggggtcctgctggggaggggggctgggctcccaccatggggcccatgccgagtggatgccccccaccctctctcctgggccactgaggagaggggagagagctggtgattccagaagggtgacccggacagcctagctgggggctcccccatattcccaggcccagaagacagacccacagccctgcccttgtctctgaggctgaagaccccctgactcccatgctgtgcttgccgctctgaaacaaacagaggctggaactttgtggtccttgccgagttttgtaggggtcactgtcacatgcttgtgccctggaagccccaaggctcttcctccagctggctcccttgtctccagggctttggaggatcagggtagggagggctctgtctctaagccaggtgtcaggatcagaatcatgggtagaaggtgccattcagctcacagccgcacccagaatcctttgcagccctccttctttatttttttcccattgcattctgggagtccacatctggctttctcagccactgttcatcaccaggggttttaggaggaaggcttggctcctgtcttcccagacccaccatgcctggagaggtcaggatggaactacctcattcggcaaattagccccaaattgagcgctgaatcgtgtcccatgagatcaggcgccatctgtaaagtctcctctggaaatgccaatccatccttcccccagctgcttcctcggggaggcccctgcccccaccctgccagcccttcccagtctcattagaggaagctttccaaagttctcagttatcaagacctcatccagctcgtccaaaggcttcagggatggaaacaaaccagctcgtctcagaggccagcaagctggggcctgtccgccacggtgccctgtgcacctttgggctgccctggcccccactctcccgggccgcccaccacaggctcttaatggggccgggtcagtcctacatgtgagatgggttagggcaagtctttgccatcccccagatggctctgtcttcttgtgtatggcagggctgggactgctgtcccttgtacagttttctgtcactggtgggcactggacaggcatagcagactctcttgtggccacactaggttgtcgcctttcaggcagtgtcccgccacctttgcttcccgctccttctggacattccagagccctgcaccaaacccttacttggtgtctgcacctcc

SEQ ID NO: 138872 - DNA, 553 bp, Homo sapiens
  Payload ID: 7204
  Gene Symbol: GAS7
  Gene Name: growth arrest-specific 7
  ENST ID: ENST00000583882
  CDS Start-End: 157-393
aattcgccttcagcccgagagctgggcgtgggaacagcgtggggtcagggagacccctgcttgccctggcccagaatatggtgacttaggattcagactgagcatccctgattccccagcgcctccaccctcagggaacctgaatggggggaaaaaatgtccaatatggagaacagctttgacgatgtttcttgcctctctccccagaacctgggatcctcatcgccaagcaaaaagcagagcaaggaaaacaccatcacaataaactgtgtgacgttccctcacccagacacgatgccggaacagcagctgctgaaaccaaccgagtggagctactgcgactacttctgggctgaagaccccctgactcccatgctgtgcttgccgctctgaaacaaacagaggctggaactttgtggtccttgccgagttttgtaggggtcactgtcacatgcttgtgccctggaagccccaaggctcttcctccagctggctcccttgtctccagggctttggaggatcagggtagggagggctctgtctctaagccagg

SEQ ID NO: 138873 - DNA, 3535 bp, Homo sapiens
  Payload ID: 7204
  Gene Symbol: GAS7
  Gene Name: growth arrest-specific 7
  Uniprot ID: O60861
  ENST ID: ENST00000585266
  CDS Start-End: 312-1562
agaaacattgcatctggaaagtccagaacaagttgttaatttcccagcaagcactggagcggatttggaaggaactatgcaatgtagtgggttctttgtgaaagaacagcaatgagcaaagccacaggaacctccgctggggtgcccagaacactggccctgggctagcgacttgcctcagccccatttcccggagaggctgccatgaagaggaagccggcggagtcttggtgctgagtctgagggcttcaggcaggacccaagactctcctctgaggtagcagcccccagagaaggttagctgttctctgatgaagcctggaatggtcccccctccgccgggagaagaaagccagacggtcatccttccacctggctggcagagctacctgtcgcctcagggccggcggtactatgtcaacacgaccaccaatgagaccacctgggaacgtcccagcagttctcctgggattccagccagccctggctctcacaggagctctctgcctccaacagtgaatggataccacgcatcagggaccccagcgcaccctccagagactgcccacatgagtgtccgaaaatccaccggtgattcccagaacctgggatcctcatcgccaagcaaaaagcagagcaaggaaaacaccatcacaataaactgtgtgacgttccctcacccagacacgatgccggaacagcagctgctgaaaccaaccgagtggagctactgcgactacttctgggctgataagaaggacccccaaggcaacggcaccgtggctgggtttgaactactgctccagaaacagctgaagggcaaacaaatgcagaaggaaatgtcagaattcatccgggaaaggataaagattgaagaagactatgcgaagaacttagctaagctctctcagaactccttggcttcacaggaggaaggctccttgggagaggcgtgggcccaggtgaagaagagcctggcggacgaagcagaagttcacctcaagttctctgccaagcttcacagcgaggtggagaagcccctgatgaacttccgtgagaacttcaagaaagacatgaagaagtgcgaccaccacattgccgaccttcgcaagcagctcgccagccgctatgcctcggtggagaaggcccggaaagccctcacagagcggcagagagacctggagatgaagacccagcagctggagatcaagctgagcaacaagacagaggaggacatcaagaaggcgcggagaaagtccacacaggctggagacgacctcatgcgctgtgtggatctctacaaccaggcccagtccaaatggtttgaagagatggtgaccaccacattggagctagagcggctggaggtggagagggtagagatgatccggcagcacctgtgccagtacacgcagctgcggcatgaaacagacatgttcaaccaaagcacagtcgagcccgtggatcagctgcttcgaaaagtggacccggccaaagacagggagctgtgggtcagagagcacaagacgggcaacatccgccctgtggacatggagatctagatgggcctgtgcagcttcggggggtcctgctggggaggggggctgggctcccaccatggggcccatgccgagtggatgccccccaccctctctcctgggccactgaggagaggggagagagctggtgattccagaagggtgacccggacagcctagctgggggctcccccatattcccaggcccagaagacagacccacagccctgcccttgtctctgaggctgaagaccccctgactcccatgctgtgcttgccgctctgaaacaaacagaggctggaactttgtggtccttgccgagttttgtaggggtcactgtcacatgcttgtgccctggaagccccaaggctcttcctccagctggctcccttgtctccagggctttggaggatcagggtagggagggctctgtctctaagccaggtgtcaggatcagaatcatgggtagaaggtgccattcagctcacagccgcacccagaatcctttgcagccctccttctttatttttttcccattgcattctgggagtccacatctggctttctcagccactgttcatcaccaggggttttaggaggaaggcttggctcctgtcttcccagacccaccatgcctggagaggtcaggatggaactacctcattcggcaaattagccccaaattgagcgctgaatcgtgtcccatgagatcaggcgccatctgtaaagtctcctctggaaatgccaatccatccttcccccagctgcttcctcggggaggcccctgcccccaccctgccagcccttcccagtctcattagaggaagctttccaaagttctcagttatcaagacctcatccagctcgtccaaaggcttcagggatggaaacaaaccagctcgtctcagaggccagcaagctggggcctgtccgccacggtgccctgtgcacctttgggctgccctggcccccactctcccgggccgcccaccacaggctcttaatggggccgggtcagtcctacatgtgagatgggttagggcaagtctttgccatcccccagatggctctgtcttcttgtgtatggcagggctgggactgctgtcccttgtacagttttctgtcactggtgggcactggacaggcatagcagactctcttgtggccacactaggttgtcgcctttcaggcagtgtcccgccacctttgcttcccgctccttctggacattccagagccctgcaccaaacccttacttggtgtctgcacctcctttccctctctccatcttccaatccctggaaaagtctggtctgagtgtgacttgggaagctttcagtgctgctgtttggcccagctcattactttctccctttctctaccacagcaaacacattctccaccatgtcagtctaaagagtctaaaggggccgggagaagcatgagcgaggggcagattctagtcgggagcccatgccctggaaatccatctttcttcatctttcccattgaccactttgggtttgacctgcacatctgcagtgagggcagaattcaacaagcacaactcactggtctttcagtcaacgtgctagaaaccgatgacttattaatctctaattttttggcgcctctttcattgaatgagaattgctttcgtatagttcacattagaaaaatgcctaatatactaaagtaaaccaaacgttgtcacttttctcttgttcttgaaacattgcaaccaaaaaggtcagcacaaaggccttcacctacgtgaagacctcctggtaggatctgtccatgggatggagaaccactctgtccagatctggggttgggtcatgacaccagctaccaattttagaatattatttcttggtttctttatgaaaaatgggtgctagtggtaattgctttgtggcttagtaaactactctgtggatgatttccaaacattcaaagccaatagccttgttattaacaagatattttgagt

SEQ ID NO: 138874 - DNA, 556 bp, Homo sapiens
  Payload ID: 7204
  Gene Symbol: GAS7
  Gene Name: growth arrest-specific 7
  ENST ID: ENST00000578599
  CDS Start-End: 134-556
ctatatataaatgctgctttgcacagtgaattagccgatgccacggggaagcagcggatgtggggatggtggcagaaaatgaccagcgtgtcagatttgcataaggacacaccacaaggctgagaagcctggaatggtcccccctccgccgggagaagaaagccagacggtcatccttccacctggctggcagagctacctgtcgcctcagggccggcggtactatgtcaacacgaccaccaatgagaccacctgggaacgtcccagcagttctcctgggattccagccagccctggctctcacaggagctctctgcctccaacagtgaatggataccacgcatcagggaccccagcgcaccctccagagactgcccacatgagtgtccgaaaatccaccggtgattcccagaacctgggatcctcatcgccaagcaaaaagcagagcaaggaaaacaccatcacaataaactgtgtgacgttccctcacccagacacgatgccggaacagcagctgctgaaaccaaccgagtggagctactgcgactacttctgg

SEQ ID NO: 138875 - DNA, 3185 bp, Homo sapiens
  Payload ID: 7205
  Gene Symbol: GAS8
  Gene Name: growth arrest-specific 8
  Uniprot ID: O95995
  ENST ID: ENST00000268699
  CDS Start-End: 123-1559
ggagtctcgcgaggatcttgtgacttatcgcggcatcgcccagcggttgccgggaaacggcgtggcttccgggggcgggcgccctggtcccggagtcgccgctgggcctgtccgctggcgtcatggcaccgaaaaagaaagggaagaaaggcaaagccaaaggcaccccgattgtcgatgggctcgctccagaggacatgagcaaggagcaggtggaggagcatgtcagccgcatccgggaggagctggaccgcgagcgggaggaacgaaactacttccagctggagcgggacaagatccacaccttctgggagatcacacggaggcagctggaggagaagaaggctgagctgcggaacaaagaccgggagatggaagaagccgaggagaggcaccaggtggagatcaaggtgtacaagcagaaagtgaagcacctgctatatgagcaccagaacaacctgacagagatgaaggctgagggcactgtagtcatgaagctggcacagaaagagcaccgcatacaggagagtgtgctgcgcaaggacatgcgggcactgaaggtggagctcaaggagcaggagctggccagtgaggtggtggtgaagaacctgcggctgaaacacaccgaggagatcaccaggatgcggaatgattttgagaggcaagttcgagaaattgaggccaagtatgataagaagatgaagatgctgagggacgaactcgacttgcggagaaagactgagctccacgaagtggaggagaggaagaatggccagatccacacgctgatgcagcgccacgaggaggccttcaccgacattaagaactactacaacgacatcaccctcaacaacctggccctcatcaactccctcaaggagcagatggaggacatgcggaagaaggaggaccacctggagagggagatggcagaggtgtctgggcagaacaagcgcctggcagaccctctccagaaggctcgggaggagatgagcgagatgcagaaacagctcgcaaactacgagagggacaagcagatcctgctttgcacaaaagcccgtttgaaagtcagggagaaagagctgaaagacctgcagtgggagcatgaagtgttagagcagcgattcaccaaggtgcagcaggagcgggacgagctctatcggaagttcaccgcagccatccaggaggtgcagcagaagacagggttcaagaacctcgtgctagaacgcaagctgcaggctctgagcgccgctgtggagaagaaggaggtgcagttcaacgaggtcctggctgcctctaacctggaccctgcagccctgacgctggtgtcccgcaagctggaggatgttcttgagtcgaagaacagcaccatcaaggacctgcagtatgagctggcccaggtctgtaaggcccataacgacctgctgcgcacgtatgaggcaaagctgctggccttcgggatccctctggacaacgtgggcttcaagcccttggaaacagctgtgatcggacagacactgggccagggccccgcgggactggtgggcaccccgacgtagctgcccccctggggggccacagcccagagaaccagcctaggaacactcgggatgacaccccttatcacaccaaggacagcaagttttttagattttatcatcagcaaatgaaagcttttcacatgttcttgccatcctctttcctggctctgtggaggagaaccacctgcaggaccctcacccatggtgtccctgtcgctcccttccctgggtgccgcacgtccagcctgtgtccaggcctactccctggtctcacctccgaccacagtcggcggcaccttctcagagtgccccgcactcacctgggggttggggcagtgccgcgctgtgctgcctgtcttcgcgccactgttgtcccaccgaatggacagctttgcaggtgctggcactaacttcattgacacctgagtcacagctgcccagtgggattctccagggggccgggacttccctaggaagtggtgagccaatgctccctgatgagcacaaagcccgctctgttgagggctgggtgggtgcagccagcgtgcgggaacgggcaggcagcctcccgctgccagtcttcgctctaactccctcggtaggtgatgtaggaccaggggcacgtggaacttctgggccttgctggtgatggttaaaacaacctgagatggagaggccaggagagagtataaggggatagcagcaaaccacctatctggccccaacacacctgagagaattcagcagcccagactgagggtctgggatggggtgaaccttccgcaccagagggacactccacagaagccacagcccagtaagtcaggcgcttctgcggcggctccagtgtggggtgaggcagtgaggttaggcccagagagctggagttggctcagatgaaaacctctgtcaacaaagaggggatgaatcacccttggcccagcctccccacaaagcctgaccctgggcaggtgagtgacgggtgtgtcctcgtagagtctattgctgcctggacacctttcttttgggagctcaaagcaagtgagctcacctacctgccaccgcccaggaccagtctgcccactgcctaaatgatgcccggccagcaggacctggcctgcagatcccagtgagtcatgagcctcagccccctccagcccactggggctctcacctccacatgtgggtagaagctttcctgccccctcttcctccagtagccctcagtgtcgaaggtgagcttgtaggtgcctgccttcatctggtccaggacagtgaccatctgggtctgtgtagctggggagaggatgaggctgcagagatggggaccagaagccccccaccccagctttcctgggtctgcatcccagtgggcctcagacactgccctgccacctgtcagacttgggtgagcagacacagtgaggctgttaggtcctgcagttccagagcagtctagggacaccactgccctgtctttaggaaatcacaacacagagaagcaaaaagggaaaaagtctcccacaatttatcccatgagcaagaaccactttatagctggcatatatttttccagattttctctatgcataagtatatttgtttaaaaacttataaagtggattatactatttgtattgtttt

SEQ ID NO: 138876 - DNA, 3200 bp, Homo sapiens
  Payload ID: 7205
  Gene Symbol: GAS8
  Gene Name: growth arrest-specific 8
  Uniprot ID: O95995
  ENST ID: ENST00000536122
  CDS Start-End: 213-1574
gacccttccctcgcgggccgcgccccgccgcggacaccaccgggacctggctgcgccctcccgaccccggccgggcgtccggggctcctgcgcactcacttggcggccgcgcccgctggcgtcctcttgttctcttccaggcaccgaaaaagaaagggaagaaaggcaaagccaaaggcaccccgattgtcgatgggctcgctccagaggacatgagcaaggagcaggtggaggagcatgtcagccgcatccgggaggagctggaccgcgagcgggaggaacgaaactacttccagctggagcgggacaagatccacaccttctgggagatcacacggaggcagctggaggagaagaaggctgagctgcggaacaaagaccgggagatggaagaagccgaggagaggcaccaggtggagatcaaggtgtacaagcagaaagtgaagcacctgctatatgagcaccagaacaacctgacagagatgaaggctgagggcactgtagtcatgaagctggcacagaaagagcaccgcatacaggagagtgtgctgcgcaaggacatgcgggcactgaaggtggagctcaaggagcaggagctggccagtgaggtggtggtgaagaacctgcggctgaaacacaccgaggagatcaccaggatgcggaatgattttgagaggcaagttcgagaaattgaggccaagtatgataagaagatgaagatgctgagggacgaactcgacttgcggagaaagactgagctccacgaagtggaggagaggaagaatggccagatccacacgctgatgcagcgccacgaggaggccttcaccgacattaagaactactacaacgacatcaccctcaacaacctggccctcatcaactccctcaaggagcagatggaggacatgcggaagaaggaggaccacctggagagggagatggcagaggtgtctgggcagaacaagcgcctggcagaccctctccagaaggctcgggaggagatgagcgagatgcagaaacagctcgcaaactacgagagggacaagcagatcctgctttgcacaaaagcccgtttgaaagtcagggagaaagagctgaaagacctgcagtgggagcatgaagtgttagagcagcgattcaccaaggtgcagcaggagcgggacgagctctatcggaagttcaccgcagccatccaggaggtgcagcagaagacagggttcaagaacctcgtgctagaacgcaagctgcaggctctgagcgccgctgtggagaagaaggaggtgcagttcaacgaggtcctggctgcctctaacctggaccctgcagccctgacgctggtgtcccgcaagctggaggatgttcttgagtcgaagaacagcaccatcaaggacctgcagtatgagctggcccaggtctgtaaggcccataacgacctgctgcgcacgtatgaggcaaagctgctggccttcgggatccctctggacaacgtgggcttcaagcccttggaaacagctgtgatcggacagacactgggccagggccccgcgggactggtgggcaccccgacgtagctgcccccctggggggccacagcccagagaaccagcctaggaacactcgggatgacaccccttatcacaccaaggacagcaagttttttagattttatcatcagcaaatgaaagcttttcacatgttcttgccatcctctttcctggctctgtggaggagaaccacctgcaggaccctcacccatggtgtccctgtcgctcccttccctgggtgccgcacgtccagcctgtgtccaggcctactccctggtctcacctccgaccacagtcggcggcaccttctcagagtgccccgcactcacctgggggttggggcagtgccgcgctgtgctgcctgtcttcgcgccactgttgtcccaccgaatggacagctttgcaggtgctggcactaacttcattgacacctgagtcacagctgcccagtgggattctccagggggccgggacttccctaggaagtggtgagccaatgctccctgatgagcacaaagcccgctctgttgagggctgggtgggtgcagccagcgtgcgggaacgggcaggcagcctcccgctgccagtcttcgctctaactccctcggtaggtgatgtaggaccaggggcacgtggaacttctgggccttgctggtgatggttaaaacaacctgagatggagaggccaggagagagtataaggggatagcagcaaaccacctatctggccccaacacacctgagagaattcagcagcccagactgagggtctgggatggggtgaaccttccgcaccagagggacactccacagaagccacagcccagtaagtcaggcgcttctgcggcggctccagtgtggggtgaggcagtgaggttaggcccagagagctggagttggctcagatgaaaacctctgtcaacaaagaggggatgaatcacccttggcccagcctccccacaaagcctgaccctgggcaggtgagtgacgggtgtgtcctcgtagagtctattgctgcctggacacctttcttttgggagctcaaagcaagtgagctcacctacctgccaccgcccaggaccagtctgcccactgcctaaatgatgcccggccagcaggacctggcctgcagatcccagtgagtcatgagcctcagccccctccagcccactggggctctcacctccacatgtgggtagaagctttcctgccccctcttcctccagtagccctcagtgtcgaaggtgagcttgtaggtgcctgccttcatctggtccaggacagtgaccatctgggtctgtgtagctggggagaggatgaggctgcagagatggggaccagaagccccccaccccagctttcctgggtctgcatcccagtgggcctcagacactgccctgccacctgtcagacttgggtgagcagacacagtgaggctgttaggtcctgcagttccagagcagtctagggacaccactgccctgtctttaggaaatcacaacacagagaagcaaaaagggaaaaagtctcccacaatttatcccatgagcaagaaccactttatagctggcatatatttttccagattttctctatgcataagtatatttgtttaaaaacttataaagtggattatactatttgtattgtttt

SEQ ID NO: 138877 - DNA, 3174 bp, Homo sapiens
  Payload ID: 7205
  Gene Symbol: GAS8
  Gene Name: growth arrest-specific 8
  ENST ID: ENST00000566266
  CDS Start-End: 40-147
ctggtcccggagtcgccgctgggcctgtccgctggcgtcatggcaccgaaaaagaaagggaagaaaggcaaagccaaaggcaccccgattgtcgatgggctcgctccagaggacatgagcaaggagcagctgtttatttttaggtgaagttgagtcctccctctttcttccttgcctttcgccggccacacgccccgttgccgtgcatgggcccctgctcagtgcctcacctgacccactgcacctggccaggtggaggagcatgtcagccgcatccgggaggagctggaccgcgagcgggaggaacgaaactacttccagctggagcgggacaagatccacaccttctgggagatcacacggaggcagctggaggagaagaaggctgagctgcggaacaaagaccgggagatggaagaagccgaggagaggcaccaggtggagatcaaggtgtacaagcagaaagtgaagcacctgctatatgagcaccagaacaacctgacagagatgaaggctgagggcactgtagtcatgaagctggcacagaaagagcaccgcatacaggagagtgtgctgcgcaaggacatgcgggcactgaaggtggagctcaaggagcaggagctggccagtgaggtggtggtgaagaacctgcggctgaaattgaggccaagtatgataagaagatgaagatgctgagggacgaactcgacttgcggagaaagactgagctccacgaagtggaggagaggaagaatggccagatccacacgctgatgcagcgccacgaggaggccttcaccgacattaagaactactacaacgacatcaccctcaacaacctggccctcatcaactccctcaaggagcagatggaggacatgcggaagaaggaggaccacctggagagggagatggcagaggtgtctgggcagaacaagcgcctggcagaccctctccagaaggctcgggaggagatgagcgagatgcagaaacagctcgcaaactacgagagggacaagcagatcctgctttgcacaaaagcccgtttgaaagtcagggagaaagagctgaaagacctgcagtgggagcatgaagtgttagagcagcgattcaccaaggtgcagcaggagcgggacgagctctatcggaagttcaccgcagccatccaggaggtgcagcagaagacagggttcaagaacctcgtgctagaacgcaagctgcaggctctgagcgccgctgtggagaagaaggaggtgcagttcaacgaggtcctggctgcctctaacctggaccctgcagccctgacgctggtgtcccgcaagctggaggatgttcttgagtcgaagaacagcaccatcaaggacctgcagtatgagctggcccaggtctgtaaggcccataacgacctgctgcgcacgtatgaggcaaagctgctggccttcgggatccctctggacaacgtgggcttcaagcccttggaaacagctgtgatcggacagacactgggccagggccccgcgggactggtgggcaccccgacgtagctgcccccctggggggccacagcccagagaaccagcctaggaacactcgggatgacaccccttatcacaccaaggacagcaagttttttagattttatcatcagcaaatgaaagcttttcacatgttcttgccatcctctttcctggctctgtggaggagaaccacctgcaggaccctcacccatggtgtccctgtcgctcccttccctgggtgccgcacgtccagcctgtgtccaggcctactccctggtctcacctccgaccacagtcggcggcaccttctcagagtgccccgcactcacctgggggttggggcagtgccgcgctgtgctgcctgtcttcgcgccactgttgtcccaccgaatggacagctttgcaggtgctggcactaacttcattgacacctgagtcacagctgcccagtgggattctccagggggccgggacttccctaggaagtggtgagccaatgctccctgatgagcacaaagcccgctctgttgagggctgggtgggtgcagccagcgtgcgggaacgggcaggcagcctcccgctgccagtcttcgctctaactccctcggtaggtgatgtaggaccaggggcacgtggaacttctgggccttgctggtgatggttaaaacaacctgagatggagaggccaggagagagtataaggggatagcagcaaaccacctatctggccccaacacacctgagagaattcagcagcccagactgagggtctgggatggggtgaaccttccgcaccagagggacactccacagaagccacagcccagtaagtcaggcgcttctgcggcggctccagtgtggggtgaggcagtgaggttaggcccagagagctggagttggctcagatgaaaacctctgtcaacaaagaggggatgaatcacccttggcccagcctccccacaaagcctgaccctgggcaggtgagtgacgggtgtgtcctcgtagagtctattgctgcctggacacctttcttttgggagctcaaagcaagtgagctcacctacctgccaccgcccaggaccagtctgcccactgcctaaatgatgcccggccagcaggacctggcctgcagatcccagtgagtcatgagcctcagccccctccagcccactggggctctcacctccacatgtgggtagaagctttcctgccccctcttcctccagtagccctcagtgtcgaaggtgagcttgtaggtgcctgccttcatctggtccaggacagtgaccatctgggtctgtgtagctggggagaggatgaggctgcagagatggggaccagaagccccccaccccagctttcctgggtctgcatcccagtgggcctcagacactgccctgccacctgtcagacttgggtgagcagacacagtgaggctgttaggtcctgcagttccagagcagtctagggacaccactgccctgtctttaggaaatcacaacacagagaagcaaaaagggaaaaagtctcccacaatttatcccatgagcaagaaccactttatagctggcatatatttttccagattttctctatgcataagtatatttgtttaaaaacttataaagtggattatactatttgtattgttttataa

SEQ ID NO: 138878 - DNA, 550 bp, Homo sapiens
  Payload ID: 7205
  Gene Symbol: GAS8
  Gene Name: growth arrest-specific 8
  ENST ID: ENST00000563936
  CDS Start-End: 199-550
gggccgcgccccgccgcggacaccaccgggacctggctgcgccctcccgaccccggccgggcgtccggggctcctgcgcactcacttggcggccgcgcccgctggcgtcctcttgttctcttccaggcaccgaaaaagaaagggaagaaaggcaaagccaaaggcaccccgattgtcgatgggctcgctccagaggacatgagcaaggagcaggtggaggagcatgtcagccgcatccgggaggagctggaccgcgagcgggaggaacgaaactacttccagctggagcgggacaagatccacaccttctgggagatcacacggaggcagctggaggagaagaaggctgagctgcggaacaaagaccgggagatggaagaagccgaggagaggcaccaggtggagatcaaggtgtacaagcagaaagtgaagcacctgctatatgagcaccagaacaacctgacagagatgaaggctgagggcactgtagtcatgaagctggcacagaaagagcaccgcatacaggagagtgtgctgcgcaaggacatgc

SEQ ID NO: 138879 - DNA, 479 bp, Homo sapiens
  Payload ID: 7205
  Gene Symbol: GAS8
  Gene Name: growth arrest-specific 8
  ENST ID: ENST00000564392
  CDS Start-End: 194-479
gagtggggaggaggcctcttcaggaagagcagtttatttttgtgaaaggaatacttactgatttcaaacatttggaactaaactggaacgtatttttctttccgatttctgcgtttttgaggcaccgaaaaagaaagggaagaaaggcaaagccaaaggcaccccgattgtcgatgggctcgctccagaggacatgagcaaggagcaggtggaggagcatgtcagccgcatccgggaggagctggaccgcgagcgggaggaacgaaactacttccagctggagcgggacaagatccacaccttctgggagatcacacggaggcagctggaggagaagaaggctgagctgcggaacaaagaccgggagatggaagaagccgaggagaggcaccaggtggagatcaaggtgtacaagcagaaagtgaagcacctgctatatgagcaccagaacaacctgacagagatgaaggctgagggca

SEQ ID NO: 138880 - DNA, 1394 bp, Homo sapiens
  Payload ID: 7205
  Gene Symbol: GAS8
  Gene Name: growth arrest-specific 8
  ENST ID: ENST00000565062
  CDS Start-End: 70-405
gaaacggcgtggcttccgggggcgggcgccctggtcccggagtcgccgctgggcctgtccgctggcgtcatggcaccgaaaaagaaagggaagaaaggcaaagccaaaggcaccccgattgtcgatgggctcgctccagaggacatgagcaaggagcaggtgaagttgagtcctccctctttcttccttgcctttcgccggccacacgccccgttgccgtgcatgggcccctgctcagtgcctcacctgacccactgcacctggccaggtggaggagcatgtcagccgcatccgggaggagctggaccgcgagcgggaggaacgaaactacttccagctggagcgggacaagatccacaccttctgggagatcacacggaggcagctggaggagaagaaggctgagctgcggaacaaagaccgggagatggaagaagccgaggagaggcaccaggtggagatcaaggtgtacaagcagaaagtgaagcacctgctatatgagcaccagaacaacctgacagagatgaaggctgagggcactgtagtcatgaagctggcacagaaagagcaccgcatacaggagagtgtgctgcgcaaggacatgcgggcactgaaggtggagctcaaggagcaggagctggccagtgaggtggtggtgaagaacctgcggctgaaacacaccgaggagatcaccaggatgcggaatgattttgagaggcaagttcgagaaattgaggccaagtatgataagaagatgaagatgctgagggacgaactcgacttgcggagaaagactgagctccacgaagtggaggagaggaagaatggccagatccacacgctgatgcagcgccacgaggaggccttcaccgacattaagaactactacaacgacatcaccctcaacaacctggccctcatcaactccctcaaggtgctgtgcgtgggctgggctggggaggcacactctgcctgtcctagaatgtgggctgcagagtcctggggatccagaccccagctctccaccccaacacacccagtactttttataagattgtttgacaatgcccctctcatatccttaactgaaattcctaaataacgtaacctatctctacctattgttaaaagcagtcaggatattgccctcaccgtagtgcagagggggaagtaatgaagtgtgttctggtttgtaaaagctcagatggaaccgcagtgagggccgtgatgtggctggagtggataggtgtcatagtcactgcctgcgacaggtggataggtgtcatcgtcactgcatgctggcagtgacaggattttctacagtagacaacggcccttggtggaatcttgaacaaagtatagtccttcagtctgcatggaagctgcattcccag

SEQ ID NO: 138881 - DNA, 486 bp, Homo sapiens
  Payload ID: 7205
  Gene Symbol: GAS8
  Gene Name: growth arrest-specific 8
  ENST ID: ENST00000561675
  CDS Start-End: 307-486
gcggccgcgcccgctggcgtcctcttgttctcttccaggtgaagttgagtcctccctctttcttccttgcctttcgccggccacacgccccgttgccgtgcatgggcccctgctcagtgcctcacctgacccactgcacctggccaggtggaggagcatgtcagccgcatccgggaggagctggaccgcgagcgggaggaacgaaactacttccagctggagcgggacaagatccacaccttctgggagatcacacggaggcagctggaggagaagaaggctgagctgcggaacaaagaccgggagatggaagaagccgaggagaggcaccaggtggagatcaaggtgtacaagcagaaagtgaagcacctgctatatgagcaccagaacaacctgacagagatgaaggctgagggcactgtagtcatgaagctggcacagaaagagcaccgcatacaggagagtgtgctgcgcaaggacatgcgg

SEQ ID NO: 138882 - DNA, 3308 bp, Homo sapiens
  Payload ID: 7205
  Gene Symbol: GAS8
  Gene Name: growth arrest-specific 8
  ENST ID: ENST00000620723
  CDS Start-End: 495-1682
ggagtctcgcgaggatcttgtgacttatcgcggcatcgcccagcggttgccgggaaacggcgtggcttccgggggcgggcgccctggtcccggagtcgccgctgggcctgtccgctggcgtcatggcaccgaaaaagaaagggaagaaaggcaaagccaaaggcaccccgattgtcgatgggctcgctccagaggacatgagcaaggagcagctgtttatttttaggtgaagttgagtcctccctctttcttccttgcctttcgccggccacacgccccgttgccgtgcatgggcccctgctcagtgcctcacctgacccactgcacctggccaggtggaggagcatgtcagccgcatccgggaggagctggaccgcgagcgggaggaacgaaactacttccagctggagcgggacaagatccacaccttctgggagatcacacggaggcagctggaggagaagaaggctgagctgcggaacaaagaccgggagatggaagaagccgaggagaggcaccaggtggagatcaaggtgtacaagcagaaagtgaagcacctgctatatgagcaccagaacaacctgacagagatgaaggctgagggcactgtagtcatgaagctggcacagaaagagcaccgcatacaggagagtgtgctgcgcaaggacatgcgggcactgaaggtggagctcaaggagcaggagctggccagtgaggtggtggtgaagaacctgcggctgaaacacaccgaggagatcaccaggatgcggaatgattttgagaggcaagttcgagaaattgaggccaagtatgataagaagatgaagatgctgagggacgaactcgacttgcggagaaagactgagctccacgaagtggaggagaggaagaatggccagatccacacgctgatgcagcgccacgaggaggccttcaccgacattaagaactactacaacgacatcaccctcaacaacctggccctcatcaactccctcaaggagcagatggaggacatgcggaagaaggaggaccacctggagagggagatggcagaggtgtctgggcagaacaagcgcctggcagaccctctccagaaggctcgggaggagatgagcgagatgcagaaacagctcgcaaactacgagagggacaagcagatcctgctttgcacaaaagcccgtttgaaagtcagggagaaagagctgaaagacctgcagtgggagcatgaagtgttagagcagcgattcaccaaggtgcagcaggagcgggacgagctctatcggaagttcaccgcagccatccaggaggtgcagcagaagacagggttcaagaacctcgtgctagaacgcaagctgcaggctctgagcgccgctgtggagaagaaggaggtgcagttcaacgaggtcctggctgcctctaacctggaccctgcagccctgacgctggtgtcccgcaagctggaggatgttcttgagtcgaagaacagcaccatcaaggacctgcagtatgagctggcccaggtctgtaaggcccataacgacctgctgcgcacgtatgaggcaaagctgctggccttcgggatccctctggacaacgtgggcttcaagcccttggaaacagctgtgatcggacagacactgggccagggccccgcgggactggtgggcaccccgacgtagctgcccccctggggggccacagcccagagaaccagcctaggaacactcgggatgacaccccttatcacaccaaggacagcaagttttttagattttatcatcagcaaatgaaagcttttcacatgttcttgccatcctctttcctggctctgtggaggagaaccacctgcaggaccctcacccatggtgtccctgtcgctcccttccctgggtgccgcacgtccagcctgtgtccaggcctactccctggtctcacctccgaccacagtcggcggcaccttctcagagtgccccgcactcacctgggggttggggcagtgccgcgctgtgctgcctgtcttcgcgccactgttgtcccaccgaatggacagctttgcaggtgctggcactaacttcattgacacctgagtcacagctgcccagtgggattctccagggggccgggacttccctaggaagtggtgagccaatgctccctgatgagcacaaagcccgctctgttgagggctgggtgggtgcagccagcgtgcgggaacgggcaggcagcctcccgctgccagtcttcgctctaactccctcggtaggtgatgtaggaccaggggcacgtggaacttctgggccttgctggtgatggttaaaacaacctgagatggagaggccaggagagagtataaggggatagcagcaaaccacctatctggccccaacacacctgagagaattcagcagcccagactgagggtctgggatggggtgaaccttccgcaccagagggacactccacagaagccacagcccagtaagtcaggcgcttctgcggcggctccagtgtggggtgaggcagtgaggttaggcccagagagctggagttggctcagatgaaaacctctgtcaacaaagaggggatgaatcacccttggcccagcctccccacaaagcctgaccctgggcaggtgagtgacgggtgtgtcctcgtagagtctattgctgcctggacacctttcttttgggagctcaaagcaagtgagctcacctacctgccaccgcccaggaccagtctgcccactgcctaaatgatgcccggccagcaggacctggcctgcagatcccagtgagtcatgagcctcagccccctccagcccactggggctctcacctccacatgtgggtagaagctttcctgccccctcttcctccagtagccctcagtgtcgaaggtgagcttgtaggtgcctgccttcatctggtccaggacagtgaccatctgggtctgtgtagctggggagaggatgaggctgcagagatggggaccagaagccccccaccccagctttcctgggtctgcatcccagtgggcctcagacactgccctgccacctgtcagacttgggtgagcagacacagtgaggctgttaggtcctgcagttccagagcagtctagggacaccactgccctgtctttaggaaatcacaacacagagaagcaaaaagggaaaaagtctcccacaatttatcccatgagcaagaaccactttatagctggcatatatttttccagattttctctatgcataagtatatttgtttaaaaacttataaagtggattatactatttgtattgtttt

SEQ ID NO: 138883 - DNA, 1691 bp, Homo sapiens
  Payload ID: 7206
  Gene Symbol: GAP43
  Gene Name: growth associated protein 43
  Uniprot ID: P17677
  ENST ID: ENST00000305124
  CDS Start-End: 367-1083
tccgagaaagagacggagagagagggaagaaaaagacagatagatagatattggggggaaggagaaaaaaggagaagagagggaagagaggacagcggagagagagcaccagagagagagggagagagagagagagcgctagagagagggagcgagcatgtgcgatgagcaatagctgtggaccttacagttgctgctaactgccctggtgtgtgtgagggagagagagggagggagggagagagagcgcgctagcgcgagagagcgagtgagcaagcgagcagaaaagaggtggagagggggggaataagaaagagagagaaggaaaggagagaaggcaggaagaaggcaagggacgagacaaccatgctgtgctgtatgagaagaaccaaacaggttgaaaaaaatgatgacgaccaaaagattgaacaagatggtatcaaaccagaagataaagctcataaggccgcaaccaaaattcaggctagcttccgtggacacataacaaggaaaaagctcaaaggagagaagaaggatgatgtccaagctgctgaggctgaagctaataagaaggatgaagcccctgttgccgatggggtggagaagaagggagaaggcaccactactgccgaagcagccccagccactggctccaagcctgatgagcccggcaaagcaggagaaactccttccgaggagaagaagggggagggtgatgctgccacagagcaggcagccccccaggctcctgcatcctcagaggagaaggccggctcagctgagacagaaagtgccactaaagcttccactgataactcgccgtcctccaaggctgaagatgccccagccaaggaggagcctaaacaagccgatgtgcctgctgctgtcactgctgctgctgccaccacccctgccgcagaggatgctgctgccaaggcaacagcccagcctccaacggagactggggagagcagccaagctgaagagaacatagaagctgtagatgaaaccaaacctaaggaaagtgcccggcaggacgagggtaaagaagaggaacctgaggctgaccaagaacatgcctgaactctaagaaatggctttccacatccccaccctcccctctcctgagcctgtctctccctaccctcttctcagctccactctgaagtcccttcctgtcctgctcacgtctgtgagtctgtcctttcccacccactagccctctttctctctgtgtggcaaacatttaaaaaaaaaaaaaaaaagcaggaaagatcccaagtcaaacagtgtggcttaaacattttttgtttcttggtgttgttatggcaagtttttggtaatgatgattcaatcattttgggaaattcttgcactgtatccaagttatttgatctggtgcgtgtggccctgtgggagtccactttcctctctctctctctctctgttccaagtgtgtgtgcaatgttccgttcatctgaggagtccaaaatatcgagtgaattcaaaatcatttttgttttcctccttttcaatgtgatggaatgaacaaaaaggaaaaaattcaaaaaacccagtttgttttaaaaataaataaataaagcaaatgtgccaattagcgtaaacttgcggctctaaggctcctttttcaacccgaatattaataaatcatgagagtaatcaaggtccaa

SEQ ID NO: 138884 - DNA, 1901 bp, Homo sapiens
  Payload ID: 7206
  Gene Symbol: GAP43
  Gene Name: growth associated protein 43
  Uniprot ID: P17677
  ENST ID: ENST00000393780
  CDS Start-End: 469-1293
acagttgctgctaactgccctggtgtgtgtgagggagagagagggagggagggagagagagcgcgctagcgcgagagagcgagtgagcaagcgagcagaaaagaggtggagagggggggaataagaaagagagagaaggaaaggagagaaggcaggaagaaggcaagggacgagacaaccatgctgtgctgtatgagaagaaccaaacagaattaaaagggaacctggtctctgggttgttttcaacatctcaagtgtgaattttccctgtcaaaatcttcacaaggaaaatgagtcacagcatcacctgggtgacgaggtcataacacctcagcccttgcttaaaaaattttatttctacttttctattgtaaagagatctcaaaacaggaagataaaattggactgacagctctacagcctagtcttttagacagtgaactaggccagcattggcagacactggcgatgacaaagtcctgctctgaattatgccaccccgcactccactttttaccttgcctgggaggcttgaggaaaaatcttcagagagcagttcgacctagtccttattcacttggcttcttgactttctggatttcaagggttgaaaaaaatgatgacgaccaaaagattgaacaagatggtatcaaaccagaagataaagctcataaggccgcaaccaaaattcaggctagcttccgtggacacataacaaggaaaaagctcaaaggagagaagaaggatgatgtccaagctgctgaggctgaagctaataagaaggatgaagcccctgttgccgatggggtggagaagaagggagaaggcaccactactgccgaagcagccccagccactggctccaagcctgatgagcccggcaaagcaggagaaactccttccgaggagaagaagggggagggtgatgctgccacagagcaggcagccccccaggctcctgcatcctcagaggagaaggccggctcagctgagacagaaagtgccactaaagcttccactgataactcgccgtcctccaaggctgaagatgccccagccaaggaggagcctaaacaagccgatgtgcctgctgctgtcactgctgctgctgccaccacccctgccgcagaggatgctgctgccaaggcaacagcccagcctccaacggagactggggagagcagccaagctgaagagaacatagaagctgtagatgaaaccaaacctaaggaaagtgcccggcaggacgagggtaaagaagaggaacctgaggctgaccaagaacatgcctgaactctaagaaatggctttccacatccccaccctcccctctcctgagcctgtctctccctaccctcttctcagctccactctgaagtcccttcctgtcctgctcacgtctgtgagtctgtcctttcccacccactagccctctttctctctgtgtggcaaacatttaaaaaaaaaaaaaaaaagcaggaaagatcccaagtcaaacagtgtggcttaaacattttttgtttcttggtgttgttatggcaagtttttggtaatgatgattcaatcattttgggaaattcttgcactgtatccaagttatttgatctggtgcgtgtggccctgtgggagtccactttcctctctctctctctctctgttccaagtgtgtgtgcaatgttccgttcatctgaggagtccaaaatatcgagtgaattcaaaatcatttttgttttcctccttttcaatgtgatggaatgaacaaaaaggaaaaaattcaaaaaacccagtttgttttaaaaataaataaataaagcaaatgtgccaattagcgtaaacttgcggctctaaggctcctttttcaacccgaatattaataaatcatgagagtaatcaaggtccaa

SEQ ID NO: 138885 - DNA, 2517 bp, Homo sapiens; identical to SEQ ID NO: 116699
  Payload ID: 7207
  Gene Symbol: GDF1
  Gene Name: growth differentiation factor 1
  Uniprot ID: P27539
  ENST ID: ENST00000247005
  CDS Start-End: 1347-2465

SEQ ID NO: 138886 - DNA, 2458 bp, Homo sapiens
  Payload ID: 7208
  Gene Symbol: GDF10
  Gene Name: growth differentiation factor 10
  Uniprot ID: P55107
  ENST ID: ENST00000580279
  CDS Start-End: 267-1703
gccgactcgggctcggctcggctctgcgctgctccggacggctgtgaccgctggccgggggctcgggccgccggtacccacggaccgcgcgcccgggtgcctgctccgctaagcccctcgccccgcgcggacctcggtatccagcgccctgctgcccgggctctccccgcgcgccctactgccgcgaggtcagtccgcagcctccggtgcgccagcgctcgccttcctcctcctggacttcggccctttgccgccctcaccacgccatggctcatgtccccgctcggaccagcccgggacccgggccccagctgctgctgctgctgctgccgttgtttctgctgttgctccgggatgtggccggcagccacagggcccccgcctggtccgcactgcccgcggccgccgacggcctgcagggggacagggatctccagcggcaccctggggacgcggccgccacgttgggccccagcgcccaggacatggtcgctgtccacatgcacaggctctatgagaagtacagccggcagggcgcgcggccgggagggggcaacacggtccgcagcttcagggccaggctggaagtggtcgaccagaaggccgtgtatttcttcaacctgacttccatgcaagactcggaaatgatccttacggccactttccacttctactcagagccgcctcggtggcctcgagcgctcgaggtgctatgcaagccgcgggccaagaacgcttcaggccgcccgctgcccctgggcccgcccacacgccagcacctgctcttccgcagcctctcgcagaacacggccacacaggggctactccgcggggccatggccctggcgcccccaccgcgcggcctgtggcaggccaaggacatctcccccatcgtcaaggcggcccgccgggatggcgagctgctcctctccgcccagctggattctgaggagagggacccgggggtgccccggcccagcccctatgcgccctacatcctagtctatgccaacgatctggccatctcggagcccaacagcgtggcagtgacgctgcagagatacgaccccttccctgccggagaccccgagccccgcgcagcccccaacaactcagcggacccccgcgtgcgccgagccgcgcaggccactgggcccctccaggacaacgagctgccggggctggatgagaggccgccgcgcgcccacgcacagcacttccacaagcaccagctgtggcccagccccttccgggcgctgaaaccccggccagggcgcaaagaccgcaggaagaagggccaggaggtgttcatggccgcctcgcaggtgctggactttgacgagaagacgatgcagaaagcccggaggaagcagtgggatgagccgagggtgtgctcccggaggtacctgaaggtggacttcgcagacatcggctggaatgaatggataatctcaccgaaatcttttgatgcctactactgcgcgggagcatgtgagttccccatgcctaagatcgttcgtccatccaaccatgccaccatccagagcattgtcagggctgtgggcatcatccctggcatcccagagccctgctgtgttcccgataagatgaactcccttggggtcctcttcctggatgagaatcggaatgtggttctgaaggtgtaccccaacatgtccgtggacacctgtgcctgccggtgagaccactccagggtggaaagaagccacgcccagcagagctgccttctcggagccttctgcaaccaggacttgtggtgcagctgcagacacagagcacagctcatgggcaacatcactggggcccagagagagctgtccgccagtgcatcattagggggtctttcattgctagtgactagccccttaaatgccagcctgagtacctgaaggaatctgggaattagccctggcctgaaagtggcccatcattcatacccactgttctgaaggcttgaaaacaaaacatatccacaacattggcttgatgtgatcatcatctcataactgagcaagaagactatgcaaatcttagggcgctcgctccctgcacacggaaagaactctgtttaaatgctcagttcagaacactttgggccacatagtgattttggaaaacaggataatcgtggtgtaaatgagtgtttcctttcaaagtccactgcagagcttttatccatatggtatgcacatgtagccaatattggtttctttttcttaatatatatattttattttaaaacaacaaaaagggagggcgttgacaccattccccacagagatagtcatgctgagtgtgggttgtttaaacatgcatattgaaataacacatatagtaacgtgggaatactaaaaaataaccaagattttatatttttgtaaattatactttctatactgtagattgtgtatgttatgtgtttttatggaaagctaat

SEQ ID NO: 138887 - DNA, 8657 bp, Homo sapiens
  Payload ID: 7209
  Gene Symbol: GDF11
  Gene Name: growth differentiation factor 11
  Uniprot ID: O95390
  ENST ID: ENST00000257868
  CDS Start-End: 38-1261
tccccgccccccagtcctccctcccctcccctccagcatggtgctcgcggccccgctgctgctgggcttcctgctcctcgccctggagctgcggccccggggggaggcggccgagggccccgcggcggcggcggcggcggcggcggcggcggcagcggcgggggtcgggggggagcgctccagccggccagccccgtccgtggcgcccgagccggacggctgccccgtgtgcgtttggcggcagcacagccgcgagctgcgcctagagagcatcaagtcgcagatcttgagcaaactgcggctcaaggaggcgcccaacatcagccgcgaggtggtgaagcagctgctgcccaaggcgccgccgctgcagcagatcctggacctacacgacttccagggcgacgcgctgcagcccgaggacttcctggaggaggacgagtaccacgccaccaccgagaccgtcattagcatggcccaggagacggacccagcagtacagacagatggcagccctctctgctgccattttcacttcagccccaaggtgatgttcacaaaggtactgaaggcccagctgtgggtgtacctacggcctgtaccccgcccagccacagtctacctgcagatcttgcgactaaaacccctaactggggaagggaccgcagggggagggggcggaggccggcgtcacatccgtatccgctcactgaagattgagctgcactcacgctcaggccattggcagagcatcgacttcaagcaagtgctacacagctggttccgccagccacagagcaactggggcatcgagatcaacgcctttgatcccagtggcacagacctggctgtcacctccctggggccgggagccgaggggctgcatccattcatggagcttcgagtcctagagaacacaaaacgttcccggcggaacctgggtctggactgcgacgagcactcaagcgagtcccgctgctgccgatatcccctcacagtggactttgaggctttcggctgggactggatcatcgcacctaagcgctacaaggccaactactgctccggccagtgcgagtacatgttcatgcaaaaatatccgcatacccatttggtgcagcaggccaatccaagaggctctgctgggccctgttgtacccccaccaagatgtccccaatcaacatgctctacttcaatgacaagcagcagattatctacggcaagatccctggcatggtggtggatcgctgtggctgctcttaaggtgggggatagaggatgcctcccccacagaccctaccccaagacccctagccctgcccccatccccccaagccctagagctccctccactcttcccgcgaacatcacaccgttccccgaccaagccgtgtgcaatacaacagagggaggcaggtgggaattgagggtgaggggtttgggggaaaggggaagcaggggcatagtcagggtggggagtgtttgaagtttgcagatgagaaggtttgacaaaaagacagagagatgtagagacagtgatagagacagaggaacaaaaagagcagcagtgagaaggcaaagagagaggcagaagagacagacgaggcagagacaaaacactgagaaagagactgaaatggagtaataaatgaaagccccacaccaagcctcctttcttccactggcaaggtgaggggcttggtatagtttggggagatcccctgactattcagtaggagaagaaatcaaaaatccattcttttctccttctctccctccaacagtggccaggggaaggggaagtgagggcaggggcaaaaagatttgggaatttttatttatttatttattgtgacttttcatttttttggtatttggctttactggaataggagggcccctgcccactgtgccccgtttatcccttattccccaaaccctgctctccccaacacctactcacttaagcacttgtataaagcctccagggttgggaatgggagtaaagggcaagagggcggacacatgaagtttagtttctaacccatcatcaccctaactcaaccttttctgagccaaatggcttgaattgaagccagttgtcatggaaatagtaagaggttagggtttaagagctggggatgcgggggtgggagagagaaccctcaacatccaggatctatataatgagagctactttaaaccctcaggtccaccctcatgatgctgagttatttagccagagggtgcagcctgcttatgcccaaattccctcagccaagagagagaccaaagagcctctggaatggccctgctcccagcctctatcttcaggtcaattagagagagtatagagaccccagagtcccctgggtctggaaagcgttaggagaggtcaagaaaggagcagtaaggaggctgaaggttacagggcatttgaatccaaatcactgctctgggctagggaatagagccagcagaccaaggtgggaaggattctggaagggggacattttagtctcctaaccccaaagctcagggtggaagaggggagaacaaggaagcagagtgtataattattttttccttttatttttggaatctaacagtacctggcagcagggaggggaaagtacagtggggaaaagcatctgacaaggccagttagaacagaggatgggaaggatggagactcccgggcttggaaggctaggaagcaggcagagactggttgccatttcaagtcactagctaggcccattcattcctcccacaaccctgacccattctcctctggactcactgtgcctcagtttcttcccctcaatggaatgagaaatgacagcacccgccacagccaagagatgaattctgagcacttaccacgggcactttatggacataaaatacctctcgctgtgggacagataaccagggcaccagagtagtggtgaagagatgtgaggcttaagaggagtcacaggcttcagagtacaagttcccctctgcctcccagctggacagtgcctagaagccaaggagttgagaatctcctgatccacaccctatccttacttcaccaccaggcctcttggctccaggcaagagcttagaggatgtcaggagaggtgggggtaagaatcttcagcaaaactgtcactctaagtagagccagcagttacgggtctgataaaaacagtactgaactaaagtaaagcccaagctggtgagcaaaactggatggctcattcttcccaagagcatgactctcccccttggccagttggtggaaggggcaaaggtatgtgaccacccttgagaaggtgatgttggtgagctttaacatcttattcctattcttatagtgagaaagtgaaacaagatctttcagtagaggaatgggcagggctgttaggctcttcagcttgccttcacccatatagcagctatgctaaccccaagcctctctggccctgttcttcatccttccttctgccccaatcctgaaggacaagacacacccggccatcaacaccactcacatttccttggtggaaggaaaggaacagagaagtgaagaacagatacctccctccaaggtcaaatgcctcgtgatcttggcagagtagggattgggcaataagcatcaggtatcttccctctacagattctagagagctggggcattaaatatgggggacacttagaatacagctccttaaataccaccaaataaagacctttgtgtgtgtgtggtgggtggggggggggcaggggtctttctcttatgaacataaatctgtgagctgaagtctcattcccctgttcctccctacccccaaagaggcacagagtgaagggacttggggggcacagctcagcaacccagtgggagttagcaccccctcccaccttatgatgtgtgtggacctggccagtgcccctctgaacatatcattattagtgtaattatcatttattttgtgtatttgtcacattgtgtgcatgacagcctttgttaagggtgtctgaggagtatggagctgacaggggcattggaatgccaggaaagaacttcttcaactgagatcaaggcttcctggagggaaccactgcaaaaaggccatcaggcagttttcaagttatgtgacagagggcaaagacggccatagggtgctctgagttttgggatggtcacatgacacaatccagcacttgaacctgaaaaaaaaaataaaagcggtcaaagagtttagaattcagtgctgagctcttctccctaatcaagtgccacatttacaccttggagaaccggaggtgaagaggatctgagacaggaaacctcgtgttcaatgactaagaagatggggtcctggagcaagacagaaaacactaagggcatggtggtataaggtttgggacatgcaggccaaggaaggatggaaagaggacaggaaactgggggtacctagaacaacccctctctgaaaagcttgagccaaaacagtcccaaagacaacaagacccctctcccagcctccacagaatggaagatctaaaggttctcttgagatgatccagctagtatggaagatctaaaggttctcttgagatgatccagctagtgtcctattctcctgcagtccctgttcctaggtttcctcaacgaagtttgacaaaaatctaaaccaacatagccaacgaacttgccttgttacacaagagtggctaaaatagcatctcaaatattctttcagttcactgtaaaaatttttcccatgtacctagagcacaattccccaggaatatgagttgggaatggcaaaagaatattgcctgactcacatttttcaaaaataaggaaagctggctgggcgcagtggcttacatctgtaatcccagcactttggggggccgaggcgggcggatcatgcaaggtccggagttcgagaccatgctggccaacattgtgaaacctcatctctactaaaatacccaaaattagccgggcgtggtggcgtgcgcctgtaatcccagctacatggaaggctgaggcagaagaatcgcttgaacccaggtggcggaggttgcagtgagctgagatcgcaccactgcactctagcatggtgacagagtgagactcccatctccaaaaaaaaaaaaaaaaaaaaaaaaaggaaagcaggacccagtggtgtgctcctgtagttccagctattcaggaggctgtggcaggaggaccacttgaggccagagggtcaaggctgcagtgtgctataattgggcctgtaaatagccactgtactccaagctgagcaacacagtaagacactgtctctaaaaataattaaagtaaaataaaaataaggaaagctcctgtgacatcaacctgatccagaattggggacagcgctactgcgggttcaatgtactgccatgttttccctgtcttatcagttctatcagcacactgaccccactcgagaccaactacaagactaaggctggaagtggttgagtagcagaagtgttatgtattctatcttcccaagggaaccatatccacatctacccctaactttggcctgagctgaaaatgggttttctctccctgtggctcatttgtttcctatattgagagaacacccaaaaaaagactactcaagatgactttttacaagtcttttctttatcctaaaacatcctccaaccgaaggcatgggaagctatcctatactctgaccttgcctatattttaaatggcaggggccccaagctaagaatcagcaggcagtggcatctacagcttctggtctgtagtggcgtagaagcaggaaaatcaatgctccaaagcaacaatgtccagctttcctgccagtgagctgggcttgagggagtgaatgggactctttctgccttttctttttctcaaaatacgactgcattaactgggtgtatgcacacacaaacatgttcaaactagggcactcatacctagctagaacctactcagggaaagaaatatgtatttccacagtaccctgatcacccagtaaaagctaatatttattgaataattactatgcaaattatggtaagcaaattgtagtgtgaatacatgatatgagaatatcacttaattcacacagcaaccttcacaatggggttccttttggtacagtctgaaaagagaatgattatctgcgcagggtctcagagctagtgtggtagaataagaaattaaacctaagtagttgctaaacaatattacattctaatctatcctattgaaagtgatccgggaggtagaaacctaaatacaggaataacataagggaaagagataacaagaaagttagggacaccttggactcaaagaatctggaaagatgtgaaacctgtaattttaaatccctttggaagggaaaaacaagaaaagtctagatatggcaagagaaggggaggttaaattttggggggattccaataatcagaaataagtggcattgccagaggccctcatataagagaacagcaaaaaagttatcctcccttaagttcctccctcactcctcatatcagacacagcaagagaactcagctcaacaccaagaagtcctgcccttattcacaccttccttcctatagccctcatcctcacagaagcttctagcctctatcttcagcagttcttaagaggtggggtggggggctgggcagtttagagtgagagtggaaaaaaagaataatcctagagaaccataaaaaagtacagatttacagctgaggaagctagttctccccacagcttttatagactccctcattaagagcttccaggtatgcagagaatgtcacagcttcaggaattggaatcagttaaccacatctggatgctggatcaactatagtagggaaacggggagaggaaggaagggtactaagatctcaggtaaacaattacaagcctcaatgtctgttccatctccaaacggaattactattttaaaactgaattgggaaaaaggcatcctgaactattcatgctcaaagagtatgtggagaatgactataatgagataggaaggggaggacttcatctggcttggaggttagagacttctgaccaacataggaacagctgctgaaatgggatgaaagaggttaataagaaaaaaaaaaaaatcctcacaaattggaaaacactgttcaaagatctaggggaagtaagatgagtgaggagaataattaggcttcaagaagagaatcctggcaagtaaggctgaatatctttctggaaggttatagaggataaagagacgaagaaaacttccaaaagatccactgttccacttcataatcagcatctgctctattccctcatgtatttttctctttttaaaaccatattcaggaagaaaccattagtgaatctataatctctcaagttacaaatcagatctattctgttttcagatgaaggcagagtagagagaggaaaagctagccccaagatcagagcctgaggtaaagaaaaggaaggcagacagaaaagagggaaaagggaaggtcattccaattttaaggtttatttggttgaagaggtgtcaaaaatttaaccagcattcccttttgttcacttctccaaagtctcagaatggggcaaacttcacaacaaatgggcagcagtttttggatctgctctccaaggcacaatttttctaaattatctaaactttaggtccctgctttcctcaccaaccagagactttggagaaataaagagatatcttgacattagaaaggtgatcaaactattaccatttcattaagcacaaaaccaggcaggttttagtagaaataaggataaaggattacaccacagcaacatgggacctgatcatagtaccaaagtcttcaggtaaggtgtcaggctcctaagtcttattaccaaaaatagctcaaacaaaaaccgagcttatataaagattaagaggagaaattctgcaataacatatccaaaaagattaagcaggtttcagatctacatgaacttgaagcctccagttccactgcttatgttcccaatgatttagctaacaatgcgtaacagctctgacatcctctgtcatgctttgattctgcatacaaaatttcttctgtctctgagggatatccagcccatctcccttcctgaactgactgaccaacatagtatcgtatcacatcacccttgaaatcagggcccttttcctttaatgtgggaccctggactccattttatccaagaaaaagtctgcattattagctaataacagaaggctactaatcactgcccttgtatttatatcctttgcaacacctaaaacctcccatgttctgttttatttcagtgggtcactacaagctgctggagcaaagacttggtgggtgggtaacttaacctcttcacagaggataaaaaatgcttgtgagtatgacagaagggaataaacaggcttaaagggtaaactcagtccttttccttgtcttctcttctaagggataaaggtattatggccaattctctataatatttgcccctgaagctccccttatctggtctaatctagctccaataaatcaaaggagcacctaataaaacacattgttctctttt

SEQ ID NO: 138888 - DNA, 1258 bp, Homo sapiens
  Payload ID: 7209
  Gene Symbol: GDF11
  Gene Name: growth differentiation factor 11
  ENST ID: ENST00000546799
  CDS Start-End: 1-1142
ccgcggcggcggcggcggcggcggcggcggcggcagcggcgggggtcgggggggagcgctccagccggccagccccgtccgtggcgcccgagccggacggctgccccgtgtgcgtttggcggcagcacagccgcgagctgcgcctagagagcatcaagtcgcagatcttgagcaaactgcggctcaaggaggcgcccaacatcagccgcgaggtggtgaagcagctgctgcccaaggcgccgccgctgcagcagatcctggacctacacgacttccagggcgacgcgctgcagcccgaggacttcctggaggaggacgagtaccacgccaccaccgagaccgtcattagcatggcccaggagacggacccagcagtacagacagatggcagccctctctgctgccattttcacttcagccccaaggtgatgttcacaaaggtactgaaggcccagctgtgggtgtacctacggcctgtaccccgcccagccacagtctacctgcagatcttgcgactaaaacccctaactggggaagggaccgcagggggagggggcggaggccggcgtcacatccgtatccgctcactgaagattgagctgcactcacgctcaggccattggcagagcatcgacttcaagcaagtgctacacagctggttccgccagccacagagcaactggggcatcgagatcaacgcctttgatcccagtggcacagacctggctgtcacctccctggggccgggagccgaggggctgcatccattcatggagcttcgagtcctagagaacacaaaacgttcccggcggaacctgggtctggactgcgacgagcactcaagcgagtcccgctgctgccgatatcccctcacagtggactttgaggctttcggctgggactggatcatcgcacctaagcgctacaaggccaactactgctccggccagtgcgagtacatgttcatgcaaaaatatccgcatacccatttggtgcagcaggccaatccaagaggctctgctgggccctgttgtacccccaccaagatgtccccaatcaacatgctctacttcaatgacaagcagcagattatctacggcaagatccctggcatggtggtggatcgctgtggctgctcttaagtgggtcactacaagctgctggagcaaagacttggtgggtgggtaacttaacctcttcacagaggataaaaaatgcttgtgagtatgacagaagggaataaacaggcttaaagggt

SEQ ID NO: 138889 - DNA, 1200 bp, Homo sapiens
  Payload ID: 7210
  Gene Symbol: GDF15
  Gene Name: growth differentiation factor 15
  Uniprot ID: Q99988
  ENST ID: ENST00000252809
  CDS Start-End: 33-959
agtcccagctcagagccgcaacctgcacagccatgcccgggcaagaactcaggacggtgaatggctctcagatgctcctggtgttgctggtgctctcgtggctgccgcatgggggcgccctgtctctggccgaggcgagccgcgcaagtttcccgggaccctcagagttgcactccgaagactccagattccgagagttgcggaaacgctacgaggacctgctaaccaggctgcgggccaaccagagctgggaagattcgaacaccgacctcgtcccggcccctgcagtccggatactcacgccagaagtgcggctgggatccggcggccacctgcacctgcgtatctctcgggccgcccttcccgaggggctccccgaggcctcccgccttcaccgggctctgttccggctgtccccgacggcgtcaaggtcgtgggacgtgacacgaccgctgcggcgtcagctcagccttgcaagaccccaggcgcccgcgctgcacctgcgactgtcgccgccgccgtcgcagtcggaccaactgctggcagaatcttcgtccgcacggccccagctggagttgcacttgcggccgcaagccgccagggggcgccgcagagcgcgtgcgcgcaacggggaccactgtccgctcgggcccgggcgttgctgccgtctgcacacggtccgcgcgtcgctggaagacctgggctgggccgattgggtgctgtcgccacgggaggtgcaagtgaccatgtgcatcggcgcgtgcccgagccagttccgggcggcaaacatgcacgcgcagatcaagacgagcctgcaccgcctgaagcccgacacggtgccagcgccctgctgcgtgcccgccagctacaatcccatggtgctcattcaaaagaccgacaccggggtgtcgctccagacctatgatgacttgttagccaaagactgccactgcatatgagcagtcctggtccttccactgtgcacctgcgcggaggacgcgacctcagttgtcctgccctgtggaatgggctcaaggttcctgagacacccgattcctgcccaaacagctgtatttatataagtctgttatttattattaatttattggggtgaccttcttggggactcgggggctggtctgatggaactgtgtatttatttaaaactctggtgataaaaataaagctgtctgaactgtt

SEQ ID NO: 138890 - DNA, 562 bp, Homo sapiens
  Payload ID: 7210
  Gene Symbol: GDF15
  Gene Name: growth differentiation factor 15
  ENST ID: ENST00000597765
  CDS Start-End: 544-562
ggggagaagcaggcaggagaaccgagtcttggccttaactggctggcaacgtaaaacctgccctccacaaggacaagatgaaaacttggggatttggaggggacaacaaattagactcaatcacaatttcaaacttttggatgtcaatatatccatcaagaaattgaaaagaggcctggcatggtggccgatgcctgtcatcccagcactttgggagaccaacgtcggaggatcacttgaggtcaggagttccagaccagcctgggcaacactcccaggctggaatggtgtcctcatatcgaggaagaggatactgaggcccagaaatgtgccctagctttactaggagcgcccccacctaaagatcctccccctaaatacacccccagaccccgcccagctgtggtcattggagtgtttactctgcaggcagggggaggagggcgggactgagcaggcggagacggacaaagtccggggactataaaggccggtccggcagcatctggtcagtcccagctcagagccgcaacctgcacagccatgcccgggcaagaactca

SEQ ID NO: 138891 - DNA, 890 bp, Homo sapiens
  Payload ID: 7210
  Gene Symbol: GDF15
  Gene Name: growth differentiation factor 15
  ENST ID: ENST00000595973
  CDS Start-End: 552-890
agaaagcaactagcacagccatgcccaggccaggacccgtgacacagcgatgctctcagatgctgctgatgttacagatgttgttgggggcaccctgagggggcaccctgactctgcaggtgagaaccttctggggttcctaggaccctcggacaagcactctgatccggatgactccaggtcccaggagttgcagaaacgccaccaggaccttcagagcaccagttagacaaggagagccaggaggagctgggccccaacctcatccaaaagcacagactcccaggctggaatggtgtcctcatatcgaggaagaggatactgaggcccagaaatgtgccctagctttactaggagcgcccccacctaaagatcctccccctaaatacacccccagaccccgcccagctgtggtcattggagtgtttactctgcaggcagggggaggagggcgggactgagcaggcggagacggacaaagtccggggactataaaggccggtccggcagcatctggtcagtcccagctcagagccgcaacctgcacagccatgcccgggcaagaactcaggacggtgaatggctctcagatgctcctggtgttgctggtgctctcgtggctgccgcatgggggcgccctgtctctggccgaggcgagccgcgcaagtttcccgggaccctcagagttgcactccgaagactccagattccgagagttgcggaaacgctacgaggacctgctaaccaggctgcgggccaaccagagctgggaagattcgaacaccgacctcgtcccggcccctgcagtccggatactcacgccagaagtgcggctgggatccggcggccacctgcacctgcgtatctctcgggccgcccttcccgagggg

SEQ ID NO: 138892 - DNA, 1955 bp, Homo sapiens
  Payload ID: 7211
  Gene Symbol: GDF2
  Gene Name: growth differentiation factor 2
  Uniprot ID: Q9UK05
  ENST ID: ENST00000581492
  CDS Start-End: 180-1469
aagcacaagtggaggacaatccagcccggcagcgggtgagagtgggtgctggccaggacggttccttcagagcaaacagcagggagatgccggcccgctccttcccagctcctccccgtgcccgctaacacagcacggccgcctgcagtctcctctctgggtgattgcgcgggcctaagatgtgtcctggggcactgtgggtggccctgcccctgctgtccctgctggctggctccctacaggggaagccactgcagagctggggacgagggtctgctgggggaaacgcccacagcccactgggggtgcctggaggtgggctgcctgagcacaccttcaacctgaagatgtttctggagaacgtgaaggtggatttcctgcgcagccttaacctgagtggggtcccttcgcaggacaaaaccagggtggagccgccgcagtacatgattgacctgtacaacaggtacacgtccgataagtcgactacgccagcgtccaacattgtgcggagcttcagcatggaagatgccatctccataactgccacagaggacttccccttccagaagcacatcttgctcttcaacatctccattcctaggcatgagcagatcaccagagctgagctccgactctatgtctcctgtcaaaatcacgtggacccctctcatgacctgaaaggaagcgtggtcatttatgatgttctggatggaacagatgcctgggatagtgctacagagaccaagaccttcctggtgtcccaggacattcaggatgagggctgggagaccttggaagtgtccagcgccgtgaagcgctgggtccggtccgactccaccaagagcaaaaataagctggaagtgactgtggagagccacaggaagggctgcgacacgctggacatcagtgtccccccaggttccagaaacctgcccttctttgttgtcttctccaatgaccacagcagtgggaccaaggagaccaggctggagctgagggagatgatcagccatgaacaagagagcgtgctcaagaagctgtccaaggacggctccacagaggcaggtgagagcagtcacgaggaggacacggatggccacgtggctgcggggtcgactttagccaggcggaaaaggagcgccggggctggcagccactgtcaaaagacctccctgcgggtaaacttcgaggacatcggctgggacagctggatcattgcacccaaggagtatgaagcctacgagtgtaagggcggctgcttcttccccttggctgacgatgtgacgccgacgaaacacgctatcgtgcagaccctggtgcatctcaagttccccacaaaggtgggcaaggcctgctgtgtgcccaccaaactgagccccatctccgtcctctacaaggatgacatgggggtgcccaccctcaagtaccattacgagggcatgagcgtggcagagtgtgggtgcaggtagtatctgcctgcggggctggggaggcaggccaaaggggctccacatgagaggtcctgcatgcccctgggcacaacaaggactgattcaatctgcatgccagcctggaggaggaaagggagcctgctctccctccccacaccccacccaaagcatacaccgctgagctcaactgccagggaaggctaaggaaatggggatttgagcacaacaggaaagcctgggagggttgttgggatgcaaggaggtgatgaaaaggagacagggggaaaaataatccatagtcagcagaaaacaacagcagtgagccagaggagcacaggcgggcaggtcactgcagagactgatggaagttagagaggtggaggaggccagctcgctccaaaacccttggggagtagagggaaggagcaggccgcgtgtcacacccatcattgtatgttatttcccacaacccagttggaggggcatggcttccaatttagagac

SEQ ID NO: 138893 - DNA, 1239 bp, Homo sapiens
  Payload ID: 7212
  Gene Symbol: GDF3
  Gene Name: growth differentiation factor 3
  Uniprot ID: Q9NR23
  ENST ID: ENST00000329913
  CDS Start-End: 49-1143
cagtctggcagtggagctctccccggtctgacagccactccagaggccatgcttcgtttcttgccagatttggctttcagcttcctgttaattctggctttgggccaggcagtccaatttcaagaatatgtctttctccaatttctgggcttagataaggcgccttcaccccagaagttccaacctgtgccttatatcttgaagaaaattttccaggatcgcgaggcagcagcgaccactggggtctcccgagacttatgctacgtaaaggagctgggcgtccgcgggaatgtacttcgctttctcccagaccaaggtttctttctttacccaaagaaaatttcccaagcttcctcctgcctgcagaagctcctctactttaacctgtctgccatcaaagaaagggaacagttgacattggcccagctgggcctggacttggggcccaattcttactataacctgggaccagagctggaactggctctgttcctggttcaggagcctcatgtgtggggccagaccacccctaagccaggtaaaatgtttgtgttgcggtcagtcccatggccacaaggtgctgttcacttcaacctgctggatgtagctaaggattggaatgacaacccccggaaaaatttcgggttattcctggagatactggtcaaagaagatagagactcaggggtgaattttcagcctgaagacacctgtgccagactaagatgctcccttcatgcttccctgctggtggtgactctcaaccctgatcagtgccacccttctcggaaaaggagagcagccatccctgtccccaagctttcttgtaagaacctctgccaccgtcaccagctattcattaacttccgggacctgggttggcacaagtggatcattgcccccaaggggttcatggcaaattactgccatggagagtgtcccttctcactgaccatctctctcaacagctccaattatgctttcatgcaagccctgatgcatgccgttgacccagagatcccccaggctgtgtgtatccccaccaagctgtctcccatttccatgctctaccaggacaataatgacaatgtcattctacgacattatgaagacatggtagtcgatgaatgtgggtgtgggtaggatgtcagaaatgggaatagaaggagtgttcttagggtaaatcttttaataaaactacctatctggtttatgaccacttagatcgaaatgtcaata

SEQ ID NO: 138894 - DNA, 2383 bp, Homo sapiens
  Payload ID: 7213
  Gene Symbol: GDF5
  Gene Name: growth differentiation factor 5
  Uniprot ID: P43026
  ENST ID: ENST00000374369
  CDS Start-End: 316-1821
ttcaagccctcagtcagttgtgcaggagaaagggggcggtcggctttctcctttcaagaacgagttattttcagctgctgactggagacggtgcacgtctggatacgagagcatttccactatgggactggatacaaacacacacccggcagacttcaagagtctcagactgaggagaaagcctttccttctgctgctactgctgctgccgctgcttttgaaagtccactcctttcatggtttttcctgccaaaccagaggcaccttcgctgctgccgctgttctctttggtgtcattcagcggctggccagaggatgagactccccaaactcctcactttcttgctttggtacctggcttggctggacctggaattcatctgcactgtgttgggtgcccctgacttgggccagagaccccaggggaccaggccaggattggccaaagcagaggccaaggagaggccccccctggcccggaacgtcttcaggccagggggtcacagctatggtgggggggccaccaatgccaatgccagggcaaagggaggcaccgggcagacaggaggcctgacacagcccaagaaggatgaacccaaaaagctgccccccagaccgggcggccctgaacccaagccaggacaccctccccaaacaaggcaggctacagcccggactgtgaccccaaaaggacagcttcccggaggcaaggcacccccaaaagcaggatctgtccccagctccttcctgctgaagaaggccagggagcccgggcccccacgagagcccaaggagccgtttcgcccaccccccatcacaccccacgagtacatgctctcgctgtacaggacgctgtccgatgctgacagaaagggaggcaacagcagcgtgaagttggaggctggcctggccaacaccatcaccagctttattgacaaagggcaagatgaccgaggtcccgtggtcaggaagcagaggtacgtgtttgacattagtgccctggagaaggatgggctgctgggggccgagctgcggatcttgcggaagaagccctcggacacggccaagccagcggcccccggaggcgggcgggctgcccagctgaagctgtccagctgccccagcggccggcagccggccgccttgctggatgtgcgctccgtgccaggcctggacggatctggctgggaggtgttcgacatctggaagctcttccgaaactttaagaactcggcccagctgtgcctggagctggaggcctgggaacggggcagggccgtggacctccgtggcctgggcttcgaccgcgccgcccggcaggtccacgagaaagccctgttcctggtgtttggccgcaccaagaaacgggacctgttctttaatgagattaaggcccgctctggccaggacgataagaccgtgtatgagtacctgttcagccagcggcgaaaacggcgggccccactggccactcgccagggcaagcgacccagcaagaaccttaaggctcgctgcagtcggaaggcactgcatgtcaacttcaaggacatgggctgggacgactggatcatcgcaccccttgagtacgaggctttccactgcgaggggctgtgcgagttcccattgcgctcccacctggagcccacgaatcatgcagtcatccagaccctgatgaactccatggaccccgagtccacaccacccacctgctgtgtgcccacgcggctgagtcccatcagcatcctcttcattgactctgccaacaacgtggtgtataagcagtatgaggacatggtcgtggagtcgtgtggctgcaggtagcagcactggccctctgtcttcctgggtggcacatcccaagagccccttcctgcactcctggaatcacagaggggtcaggaagctgtggcaggagcatctacacagcttgggtgaaaggggattccaataagcttgctcgctctctgagtgtgacttgggctaaaggcccccttttatccacaagttcccctggctgaggattgctgcccgtctgctgatgtgaccagtggcaggcacaggtccagggagacagactctgaatgggactgagtcccaggaaacagtgctttccgatgagactcagcccaccatttctcctcacctgggccttctcagcctctggactctcctaagcacctctcaggagagccacaggtgccactgcctcctcaaatcacatttgtgcctggtgacttcctgtccctgggacagttgagaagctgactgggcaagagtgggagagaagaggagagggcttggatagagttgaggagtgtgaggctgttagactgttagatttaaatgtatattgatgagataaaaagcaaaactgtgcctaaaa

SEQ ID NO: 138895 - DNA, 2572 bp, Homo sapiens
  Payload ID: 7213
  Gene Symbol: GDF5
  Gene Name: growth differentiation factor 5
  Uniprot ID: P43026
  ENST ID: ENST00000374372
  CDS Start-End: 505-2010
cgctgccactggttagcgataatactggcagcgcgaccggtttctgagggttgttcaccttgctgctcagacgctccgagaagcttcaggcagcataacacttacagtagagacagggtttcaccatgttagccaggatggtcttgatctcctgacctcgtgatccacctgcctcggcctcccaaagtgctgggattacaggcgtgagccactgcgcctggccgcaatttacttcattgaatctccaacaagagtcctgtgagctgctgactggagacggtgcacgtctggatacgagagcatttccactatgggactggatacaaacacacacccggcagacttcaagagtctcagactgaggagaaagcctttccttctgctgctactgctgctgccgctgcttttgaaagtccactcctttcatggtttttcctgccaaaccagaggcaccttcgctgctgccgctgttctctttggtgtcattcagcggctggccagaggatgagactccccaaactcctcactttcttgctttggtacctggcttggctggacctggaattcatctgcactgtgttgggtgcccctgacttgggccagagaccccaggggaccaggccaggattggccaaagcagaggccaaggagaggccccccctggcccggaacgtcttcaggccagggggtcacagctatggtgggggggccaccaatgccaatgccagggcaaagggaggcaccgggcagacaggaggcctgacacagcccaagaaggatgaacccaaaaagctgccccccagaccgggcggccctgaacccaagccaggacaccctccccaaacaaggcaggctacagcccggactgtgaccccaaaaggacagcttcccggaggcaaggcacccccaaaagcaggatctgtccccagctccttcctgctgaagaaggccagggagcccgggcccccacgagagcccaaggagccgtttcgcccaccccccatcacaccccacgagtacatgctctcgctgtacaggacgctgtccgatgctgacagaaagggaggcaacagcagcgtgaagttggaggctggcctggccaacaccatcaccagctttattgacaaagggcaagatgaccgaggtcccgtggtcaggaagcagaggtacgtgtttgacattagtgccctggagaaggatgggctgctgggggccgagctgcggatcttgcggaagaagccctcggacacggccaagccagcggcccccggaggcgggcgggctgcccagctgaagctgtccagctgccccagcggccggcagccggccgccttgctggatgtgcgctccgtgccaggcctggacggatctggctgggaggtgttcgacatctggaagctcttccgaaactttaagaactcggcccagctgtgcctggagctggaggcctgggaacggggcagggccgtggacctccgtggcctgggcttcgaccgcgccgcccggcaggtccacgagaaagccctgttcctggtgtttggccgcaccaagaaacgggacctgttctttaatgagattaaggcccgctctggccaggacgataagaccgtgtatgagtacctgttcagccagcggcgaaaacggcgggccccactggccactcgccagggcaagcgacccagcaagaaccttaaggctcgctgcagtcggaaggcactgcatgtcaacttcaaggacatgggctgggacgactggatcatcgcaccccttgagtacgaggctttccactgcgaggggctgtgcgagttcccattgcgctcccacctggagcccacgaatcatgcagtcatccagaccctgatgaactccatggaccccgagtccacaccacccacctgctgtgtgcccacgcggctgagtcccatcagcatcctcttcattgactctgccaacaacgtggtgtataagcagtatgaggacatggtcgtggagtcgtgtggctgcaggtagcagcactggccctctgtcttcctgggtggcacatcccaagagccccttcctgcactcctggaatcacagaggggtcaggaagctgtggcaggagcatctacacagcttgggtgaaaggggattccaataagcttgctcgctctctgagtgtgacttgggctaaaggcccccttttatccacaagttcccctggctgaggattgctgcccgtctgctgatgtgaccagtggcaggcacaggtccagggagacagactctgaatgggactgagtcccaggaaacagtgctttccgatgagactcagcccaccatttctcctcacctgggccttctcagcctctggactctcctaagcacctctcaggagagccacaggtgccactgcctcctcaaatcacatttgtgcctggtgacttcctgtccctgggacagttgagaagctgactgggcaagagtgggagagaagaggagagggcttggatagagttgaggagtgtgaggctgttagactgttagatttaaatgtatattgatgagataaaaagcaaaactgtgcctaaaa

SEQ ID NO: 138896 - DNA, 1734 bp, Homo sapiens
  Payload ID: 7214
  Gene Symbol: GDF5OS
  Gene Name: growth differentiation factor 5 opposite strand
  Uniprot ID: Q5U4N7
  ENST ID: ENST00000374375
  CDS Start-End: 443-1195
agggatctattttggagacaacaaacttgactaaggaatctcaagaagaaaatataattctgctgccaggccccaatggagcaaatagagctcgggacccaggggcctttggaaggaacaggaatgcggttagaggagtgcaggaaggggctcttgggatgtgccacccaggaagacagagggccagtgctgctacctgcagccacacgactccacgaccatgtcctcatactgcttatacaccacgttgttggcagagtcaatgaagaggatgctgatgggactcagccgcgtgggcacacagcaggtgggtggtgtggactcggggtccatggagttcatcagggtctggatgactgcatgattcgtgggctccaggtgggagcgcaatgggaactcgcacagcccctcgcagtggaaagcctcgtactcaaggggtgcgatgatccagtcgtcccagcccatgtccttgaagttgacatgcagtgccttccgactgcagcgagccttaaggttcttgctgggtcgcttgccctggcgagtggccagtggggcccgccgttttcgccgctggctgaacaggtactcatacacggtcttatcgtcctggccagagcgggccttaatctcattaaagaacaggtcccgtttcttggtgcggccaaacaccaggaacagggctttctcgtggacctgccgggcggcgcggtcgaagcccaggccacggaggtccacggccctgccccgttcccaggcctccagctccaggcacagctgggccgagttcttaaagtttcggaagagcttccagatgtcgaacacctcccagccagatccgtccaggcctggcacggagcgcacatccagcaaggcggccggctgccggccgctggggcagctggacagcttcagctgggcagcccgcccgcctccgggggccgctggcttggccgtgtccgagggcttcttccgcaagatccgcagctcggcccccagcagcccatccttctccagggcactaatgtcaaacacgtacctctgcttcctgaccacgggacctcggtcatctagagagaacacccagaagtcattccctgcaacctcaccaagggagccagtcacttcgaggctgcgggggaaggccccagctctctcccagtccagagagctttctttcacctctgccccattctgacagaagccaagagccaaaccactgagagcctttttgaaaatgagagcatttcctacatagccgaccaagtaggggtgttcacctgaagatgtggctggggatgatttgcgtgattctggtgtttgtgtcatgatatacgtgttatcagagatttatcagctttgtaactgccttctacctatctctctcccagccatgagctaacgtgatgtctcatttgtgagataggtggagtgagcattaaaattactcctgttgactgggcacagtggctcacacctgcaatcccagcactttgggaggctgaggtgggtggattgcttgagctccggagttcgaaaccagcctgcacaacatggtgacactctgtctctacaaaaaatacaaaaattaaccaggcatggtggcgtgcacatgtagtcccagctactcaggaggctgaggtgggaggattgattgaccccagggaggtcaaggcttcagtgagccgtgaattcgctattgcactccggcctgggcaacagagaaagaccctggct

SEQ ID NO: 138897 - DNA, 3701 bp, Homo sapiens
  Payload ID: 7215
  Gene Symbol: GDF6
  Gene Name: growth differentiation factor 6
  Uniprot ID: Q6KF10
  ENST ID: ENST00000287020
  CDS Start-End: 101-1468
cccgaggagccgggccccggccgctgtccagccgctccgtgccccgcgcgtcctgcgccgccgccaccgcctcctggggagacgcagccacttgcccgccatggatactcccagggtcctgctctcggccgtcttcctcatcagttttctgtgggatttgcccggtttccagcaggcttccatctcatcctcctcgtcgtccgccgagctgggttccaccaagggcatgcgaagccgcaaggaaggcaagatgcagcgggcgccgcgcgacagtgacgcgggccgggagggccaggaaccacagccgcggcctcaggacgaaccccgggctcagcagccccgggcgcaggagccgccaggcaggggtccgcgcgtggtgccccacgagtacatgctgtcaatctacaggacttactccatcgctgagaagctgggcatcaatgccagctttttccagtcttccaagtcggctaatacgatcaccagctttgtagacaggggactagacgatctctcgcacactcctctccggagacagaagtatttgtttgatgtgtccatgctctcagacaaagaagagctggtgggcgcggagctgcggctctttcgccaggcgccctcagcgccctgggggccaccagccgggccgctccacgtgcagctcttcccttgcctttcgcccctactgctggacgcgcggaccctggacccgcagggggcgccgccggccggctgggaagtcttcgacgtgtggcagggcctgcgccaccagccctggaagcagctgtgcttggagctgcgggccgcatggggcgagctggacgccggggaggccgaggcgcgcgcgcggggaccccagcaaccgccgcccccggacctgcggagtctgggcttcggccggagggtgcggcctccccaggagcgggccctgctggtggtattcaccagatcccagcgcaagaacctgttcgcagagatgcgcgagcagctgggctcggccgaggctgcgggcccgggcgcgggcgccgaggggtcgtggccgccgccgtcgggcgccccggatgccaggccttggctgccctcgcccggccgccggcggcggcgcacggccttcgccagtcgccatggcaagcggcacggcaagaagtccaggctacgctgcagcaagaagcccctgcacgtgaacttcaaggagctgggctgggacgactggattatcgcgcccctggagtacgaggcctatcactgcgagggtgtatgcgacttcccgctgcgctcgcacctggagcccaccaaccacgccatcatccagacgctgatgaactccatggaccccggctccaccccgcccagctgctgcgtgcccaccaaattgactcccatcagcattctatacatcgacgcgggcaataatgtggtctacaagcagtacgaggacatggtggtggagtcgtgcggctgcaggtagcggtgcctttcccgccgccttggcccggaaccaaggtgggccaaggtccgccttgcaggggaggcctggctgcagagaggcggaggaggaagctggcgctgggggaggctgagggtgagggaacagcctggatgtgagagccggtgggagagaagggagcgcagccttcccagtaacttctacctgccagcccagagggaaatatggattttcacaccttgcctggccaccctggaaaaacaagccaaggaggatttcttttgttctgttttctctctctctctctctctctctctctctctctctctctctctctctattactgtggctttggatttccttatgtgtcttacaggctttgatagaaggggaggggaggagagatgcatacccgtttctcaactgctccatggattgaaaaaataacagtttaaaaagggaaacaatgtgggaggaagaatcaccgttgacgcatcttgatttggttggtttttacatgtgtaaagaaggtggggtctctggccatgtcatagcccatgtcttgtgccctcccacacagaaagtgttagatagggaaattggcaaaaagaatagttaagtcaggaatggtcctgcctatagaagagctttgagagaggtgggcccacgggtgcccctctcacccatttgtgtactctgtgagtttaccagctctgccctggcctctttcggtaccaggaactggcaaccttcatctcactcctgagggcccaggtctctgccttcattgttgctttttctggtgggggcaaggggagctggtatggatggaatgacaagaattagtccaaatggaaccccttgaaggataatgagaaaccacaaggcctgcctctgactggggctgacacggaggtgcattagcccaggctggaggtagcccacccaaatgccctttctgattctaattgatttctttcaacagaatttgccaaaattcagacatgcacttctaaggggaaggtgattttccagttcaaaaaaatgggcaggagtggggaacaaaacaattaacgtaagagctacaaaggagggaaaaggaaccaagaagtagaaggagtcccatcaggagggaagatggtgggcctcagggaggatggggatcaagggacaggccaggagccaggagtggggaagggagggatgaaaggggacacaagtccctgtctctgaagtttctttaaaatctgagttccctcccctctctttgacattcctgaaagattaccagccagcaatagcccagggctcccccaaaagaattggttcagattgtaattatcagttaggcaatgtttttaaaacttagtaatgagaaactgtgaaaagagccaagtgttacattgagcttggggtgggagatggggaacaggcagtgaggaaggagacaggggtggaattcgtcttctgggaggaagctggagagagcacagtgaaattgaaatacccattcccagatagtcaaaaacatgaactttcccccagcctgcaccagtattgttttcaaacattgcccatgagtaggccctttgaagagttagcttcctcctcatctttgactataaaattgtttaatcaatggaatttgtaccagccttttaaaaagttttagtttttcctaagtgattttgctctcttccaatctaaacctgttgcttgtttggttcagagaactacaaactgtcaaagaaagggtggggatgataagaaatgctaatataaaaatgctaagtgaaaaaaagacttggccaggagaaataatttaaaatgcacatttgctttggatgcactgttgttctgttaaggctgtatatatttgtttatttaaggtgactgaaagtgcaaagaggaaatggacagcatgcaattcatcctaatgtacaaaacgttatatgcactcaaatgttataatttctaatatttttaaagtttatattcgagttgtacaaagttaagcattaatcagatatttcattttttcataatgttaccattttcttaaatattattacaaaattttaagtctgtctaatggagagttttttttaaactgtctacctcatataatacaagtatttacaacgctaaagttaccagaggtcaatgaataatcaaaacattttttacagtacacctttcctggatgatatgcaatcgaatgctatattattaaacgcatttttctccttaataa

SEQ ID NO: 138898 - DNA, 973 bp, Homo sapiens
  Payload ID: 7215
  Gene Symbol: GDF6
  Gene Name: growth differentiation factor 6
  ENST ID: ENST00000620978
  CDS Start-End: 28-843
ctggggagacgcagccacttgcccgccatggatactcccagggtcctgctctcggccgtcttcctcatcagttttctgtgggatttgcccggtttccagcaggcttccatctcatcctcctcgtcgtccgccgagctgggttccaccaagggcatgcgaagccgcaaggaaggcaagatgcagcgggcgccgcgcgacagtgacgcgggccgggagggccaggaaccacagccgcggcctcaggacgaaccccgggctcagcagccccgggcgcaggagccgccaggcaggggtccgcgcgtggtgccccacgagtacatgctgtcaatctacaggacttactccatcgctgagaagctgggcatcaatgccagctttttccagtcttccaagtcggctaatacgatcaccagctttgtagacaggggactagacgatctctcgcacactcctctccggagacagaagtatttgtttgatgtgtccatgctctcagacaaagaagagctggtgggcgcggagctgcggctctttcgccaggcgccctcagcgccctgggggccaccagccgggccgctccacgtgcagctcttcccttgcctttcgcccctactgctggacgcgcggaccctggacccgcagggggcgccgccggccggctgggaagtcttcgacgtgtggcagggcctgcgccaccagccctggaagcagctgtgcttggagctgcgggccgcccccggacctgcggagtctgggcttcggccggagggtgcggcctccccaggagcgggccctgctggtggtattcaccagatcccagctgctgcgtgcccaccaaattgactcccatcagcattctatacatcgacgcgggcaataatgtggtctacaagcagtacgaggacatggtggtggagtcgtgcggctgcaggtagcggtgcctttcccgccgccttggcccggaaccaaggtg

SEQ ID NO: 138899 - DNA, 1179 bp, Homo sapiens
  Payload ID: 7215
  Gene Symbol: GDF6
  Gene Name: growth differentiation factor 6
  ENST ID: ENST00000621429
  CDS Start-End: 25-1086
gggagacgcagccacttgcccgccatggatactcccagggtcctgctctcggccgtcttcctcatcagttttctgtgggatttgcccggtttccagcaggcttccatctcatcctcctcgtcgtccgccgagctgggttccaccaagggcatgcgaagccgcaaggaaggcaagatgcagcgggcgccgcgcgacagtgacgcgggccgggagggccaggaaccacagccgcggcctcaggacgaaccccgggctcagcagccccgggcgcaggagccgccaggcaggggtccgcgcgtggtgccccacgagtacatgctgtcaatctacaggacttactccatcgctgagaagctgggcatcaatgccagctttttccagtcttccaagtcggctaatacgatcaccagctttgtagacaggggactagacgatctctcgcacactcctctccggagacagaagtatttgtttgatgtgtccatgctctcagacaaagaagagctggtgggcgcggagctgcggctctttcgccaggcgccctcagcgccctgggggccaccagccgggccgctccacgtgcagctcttcccttgcctttcgcccctactgctggacgcgcggaccctggacccgcagggggcgccgccggccggctgggaagtcttcgacgtgtggcagggcctgcgccaccagccctggaagcagctgtgcttggagctgcgggccgcatggggcgagctggacgccggggaggccgaggcgcgcgcgcggggaccccagcaaccgccgcccccggacctgcggagtctgggcttcggccggagggtgcggcctccccaggagcgggccctgctggtggtattcaccagatcccagcgcaagaacctgttcgcagctggagtacgaggcctatcactgcgagggtgtatgcgacttcccgctgcgctcgcacctggagcccaccaaccacgccatcatccagacgctgatgaactccatggaccccggctccaccccgcccagctgctgcgtgcccaccaaattgactcccatcagcattctatacatcgacgcgggcaataatgtggtctacaagcagtacgaggacatggtggtggagtcgtgcggctgcaggtagcggtgcctttcccgccgccttggcccggaaccaaggtg

SEQ ID NO: 138900 - DNA, 9749 bp, Homo sapiens
  Payload ID: 7216
  Gene Symbol: GDF7
  Gene Name: growth differentiation factor 7
  Uniprot ID: Q7Z4P5
  ENST ID: ENST00000272224
  CDS Start-End: 577-1929
ctttgaggccgccgggagcatcctgtggcctctctctgcgcggccacccggccgcggcgcgaagcggtctggagggcgagcccttccgcggccccaactctgccgccccgttcccggcattgggaaccagggcagggagggggcgggtgtttctctgcgggggagtggggaggaagctgggcgggtgcgcgcggtgccccgagcctggaaccacggagggcgcgttggtcttgggcggatggagggggtgtcgcactgccgcggggaggcgtgtcgggaggctggggccagtggcagtcgcttggcgagggtgggggcgtagcgctgcggtgggaggaggcggctccggccctggtctccactctaggccggggtggggggcgcatagcggccgccggagctttcagcagggggcgctgctccgggcgttgggcgggggtggggtgggccaggagggggggccgcgggctggccgcgcacacttcccccattattaaacactatgttcaaaaggcgccgggggacttcccggagccacggagcccgcgccgcccgcccgcccggcccacggagcccatggacctgagcgccgccgccgcgctgtgcctttggctgctgagcgcctgccgcccccgcgacgggctggaagcggccgccgtgctgcgagcggcgggggctgggccggtccggagcccagggggcggcggcggcggcggcggcggcgggcggactcttgcccaggctgcgggcgccgcggctgtcccggccgccgcggttccccgggcccgcgccgcgcgccgcgccgcgggctccggcttcaggaacggctcggtggtgccgcaccacttcatgatgtcgctttaccggagcctggccgggagggctccggccggggcagccgctgtctccgcctcgggccatggtcgcgcggacacgatcaccggcttcacagaccaggcgacccaagacgaatcggcagccgaaacaggccagagcttcctgttcgacgtgtccagccttaacgacgcagacgaggtggtgggtgccgagctgcgcgtgctgcgccggggatctccagagtcgggcccaggcagctggacttctccgccgttgctgctgctgtccacgtgcccgggcgccgcccgagcgccacgcctgctgtactcgcgggcagctgagcccctagtcggtcagcgctgggaggcgttcgacgtggcggacgccatgaggcgccaccgtcgtgaaccgcgccccccccgcgcgttctgcctcttgctgcgcgcagtggcaggcccggtgccgagcccgttggcactgcggcggctgggcttcggctggccgggcggagggggctctgcggcagaggagcgcgcggtgctagtcgtctcctcccgcacgcagaggaaagagagcttattccgggagatccgcgcccaggcccgcgcgctcggggccgctctggcctcagagccgctgcccgacccaggaaccggcaccgcgtcgccaagggcagtcattggcggccgcagacggaggaggacggcgttggccgggacgcggacagcgcagggcagcggcgggggcgcgggccggggccacgggcgcaggggccggagccgctgcagccgcaagccgttgcacgtggacttcaaggagctcggctgggacgactggatcatcgcgccgctggactacgaggcgtaccactgcgagggcctttgcgacttccctttgcgttcgcacctcgagcccaccaaccatgccatcattcagacgctgctcaactccatggcaccagacgcggcgccggcctcctgctgtgtgccagcgcgcctcagccccatcagcatcctctacatcgacgccgccaacaacgttgtctacaagcaatacgaggacatggtggtggaggcctgcggctgcaggtagcgcgagggccggggagggggcagccacgcggccgaggatccccagctgatgagcagcagcgggccaccctgtcaccgagcgtgggtgcatgtccgatgtgacccagcaccctctcagaggagggagagcacacgttcacactcacacacactcgtgcagtcacgcacacatttaccggggacagcatgtgaaagccttgggaagagatgacctgccggtaccgaatgtcaaagccctgtgtattttgcaaacagataaccatggcgcccactgcccccatttagggagaggaaggtgtttgtgctgatgttgcagttagaggcacgaaaatcaggtagcaacaacgggttaggaaattcgaagttccagaatgggagaaccaaaggggtactcgagcatgctttatctcacccccttttgtttctggcccgatgtggggcatcgcttccctggggggctgagcgccgcgtggtgcactccgtgacccactgcaaggctgtaatgcccttcccgagggtttgtgttgcatggggccgtttaccctggaactgctgcaaaaagcatctttctttttttaacttttaaaatttaacgtgcccctgcttcatttttgaaagggaagttttgtctgaaagtagctgttgtggagcttcccagatttctgcaaaggtcggtaccgccacccccccccccccccccgccttttttttttttttttttaatcaattccaataggaaatgttatggaaagtggaaaggatatttttcttttaaacggctgagtctgatctaacaggatattggggtgggataggatctgccaggttcggaagctccccagttggtcagggggaggtgggagccatgcctcgggtggctcaggaggaagttagtgcaatggcccggaatggggaaggtggggctgggggaggggagctactgcttttcctagagacctgccaggaggttttcctaagaagccagggaagaggctctcagggcttgaaaggcaaggaggtgtcctggggcccactccagccgaggactccggcttgccggccaggtaggcggaagctcccggggccgactcgggcttgtgctagttatcaagtaagtcggcctccgctttttacctgctttcgctgtgttgttgctgtagttgttggcagtgtgatagtaacgggaagtgaagccactcaaaaatgcttttgtcagacttcaactcacaacccagacctttagagcagggggaaggtctgccccttcccctcatcggctccctggcttggctgctgtgcccttggaagggcagggccttggtgtgggggagcagaggtggaatatcccccagttcccttatttggccccaaagggtcttattgatgggaggattttctaggcatgtaaaagtgagttcgaacattcagacttcactgtttgatttgatttgtttatgcctgggaatcctttgtggctttttgtcaataggctgggagagggaacctagttggactccagctgtccggggtgggggcttcttagaacagccccgcagccctctcggtgcatctgtgtgatgttgtgtaggactttccccttcagagtcctggggagcattatttccaccctgtgttggatgcaggacaattcatacacattttgattctcagtgattacactcttgagagagagaagacagacttacgatttagatacagctaatttacttaggggccctacctgaatcggttttcatcctgtaaaattctcccaaaagaaaaaaaaatacacgtgtaaattactcttaaaattaagattccccccttcctcctattatgtgaatttatattctgtggctgtatgagtagctataaataaccagaacatgaacagtctcttcaggttaaaaattttaaaaatatccaaaagtggctgctctggtacaattccatcttattttagtgactgggcaaagatggtccctaaatttgtggattttgccagagatgcctcactctcgtttttaaaatgaagcttgtcataatgaagaattatatattaaaaaaagcactgaagtgttgaaagttgtagtattagaaggtttagaaaggaagttaatgacaaagtgcagttaaatgttattttgaggaaggtctggggtatttaatatctttggataaaagcaaacattttgatacttttttagtgactagtaaaaacaattttttgggcagaaatgtcttgatttagcctggcctttttatagtagggaaaaaaactgtcaatttcccctctttccttctgatgacctccttctaacgagatgtgttgtgagtggtgtgggaagtaggtaccttcctgcatcttgagttcaggtggcacccggtgggaggggtgttgtccttggacagtgactgttccttccatggccccataccctcagtgtgctctttgtttactggataaaaggaatgcttcccagatttcctctggagcaggtgaagcccccaggggccactctgcccagccctctggcatctcagtccattcactaggtgaatgcagaggatccatttcacttgtaaaaatgacaacaaagggccaacacatgtggggcagacggctttttgctgctaagatgtggtttaactagcattgccaaggtgtggagaaaagcgttctgccagcacagttggtagtagcaccctgagctctctgtcttctaggtagcgggggacaggcctgggtgactggcatgaacccagcttctctgttgcaacccccagctggaatctccagtcaccatggatgggagaactgacaggcagggagaaagcatgtcaagactgtgaggaaaggctgtcccctcaaccccaacctgaggtcaccaaagtctccctcctaaagtaaacagaattttccattttgtagggagaattgtgcactactagttgacatcacttgaaccaggatttcctgctagtgagtaggatttggcatccctacttagggagctcgggacaggccagctggggcccaacgggggctggtgctgggtctgtcaaacacaatgatagcctggtcactgctgcttgaaaccagggctttcgtattaaggaggatcacccacactggcaggcgggcatttccactgattcccaaacacacttgccttgttgaattctgactttccaaacagccgcactgggtcttccagagaaggtggcaggctttgctgtgttagcttggggaagccaggcttgagctgtgctcagtcattgtatccatgctccccttcaccataccctcctggcaacgatatgaggtgtggattgtgtgatagaagaatccagactccacgaagccaaggacagtcacttctccctggcagctctcatggtgtcggcaggagtgggcgcctcaccttgggtactgaagagagtaccgataatcccgtggatggaacaggagggagtgtaattcaatccctacacattgtatatgctgttggcaatttcatttaaactcacagcagaaaacaaccaggatttgtagactgattttcttcttagagcagggagaaaaattacgttctttccaagagcagctcgtgcacagataaggtcagacttttcctgtgcttgaatctggtctccaggaaatccagtggcaggaagagagtgtcctgaggctgcctctgggggcacagaatcactgggcctcgctgattctcatgagaacctgtcatctcagtgagacaggcctcccactggccctcagtgggccataggccaagaggtctgagtcagatcgcgcagtgagctggagggagcgaggctctgaaagcagcagtctagcagagggagtttgggcctgcgcttacccctcagaaagtgtctggattgggaagggaagagaggaagctgccgagcgaacccagcagccaaactttgggtgagtggaaagtaactagatccctctggtggatggtatatttgagctgcaccagagtcagagcccactgtgggcttccgagtgcccagaggcagctgctcccacagcacggactgcgcccgccaggggaggccgctcaggggccagggcaccacaaggcgtctcctgagagacgtctgaggcaagttatgggcagtcacctccctgctggagcttcatcttctgccctgtaaaatgatgccctttccagttccaaggttctaggattttaccttgcctcaaaacccactcagatagcttgaaggcagagcaaatgtgatggctcctggagaaggtcctctcccaatcccagtcccagagcctcatcttaccggtttcgcagctcttgcctgtgcatgtgcatgtgtgtgcgtgtgtccattttactcctatccttaataggtgcctcatggatgtgctttgaattcccctgggctgaggtaggtgtggggagggcccgcaccttgagggtggggttcagctccccagagccaggagctggctgagggcactgcccatccagctgcagttcctcctgtgctcagtggggtgggcggagccacactcaagctgagactgtctgagagacctagtgctgggaagggctctacctgctgctggggcctctgcaggcagaagggtaaaggcaaggctgtgcctggttggtcacccaaacgggggcctgggactgtcccagaagccctggatgaggcaggcaggactgtcccagaatggactccttgggtcctcaccccctcctcaccaccatgcccatgtctggctctgaggtccccttgcagcttcccaggggagtgaccctggggtagcatcagaagagcttgtctctctcttcctttttgtggtctggagaagttaacataaagaagcaccagaagggaggacccaaaaagatgtttatttctaagttttcagacagcttggcatcttgtacctggaacctcctgaccatgtaggctgcagcacagctgtcttcctccctctgtgctgttctggactttaatctgtgtgcacagcttagtgcgtcacaaatagtaactgagtgaggctgttgtgaaagaagcctgtttttttcaggagggccaccgtcctagcctgaggagacacctggtggacacagactgcagggagagggctgaaagttggcctagtgaatcagaggggtgactgagggcctagaagttgccgcgtgagctctgatcatcattaggggtgctgtctgcccatgacctgcaggtacccaccttaaccagagcttggcttgtggcctgcaacttggcgacaggcctttggctgggcaaagtttgggctggtgcttcatggcggcaggaccaattacagcagagcaacccaggatgggtggtcattgaaaaatgggtgtgaagtcactgaaaaatcagactgagtttcaagttatgctcacagttgctgaaaaagcaaaaatatgcccttagagcagcagagcagcgtgcgatggtccacttcctcctgcctctgcagagcttgcaggcctcttctagcatctgtgcatggtgcgcatgtgtctgtgacaacagaaagggtgggtttctctcacacgtttccctgacagtggcaagggggctgcagcggtcacagaaacttccggagagaggtgtttctgtgcagtcaggtgaatttgttggcaggacagcttggtgtgatgatacaagaagtacagtttcactctttttttgtcagatgaacttccttctgctagtttagaaatgcttcactccagagagggccacctgatagaagctgtattacagaaacttttaatctcttttctatgtcagtaaggggatgctgaaataaactgtctagaaaaacaagaagcttctgtcacacccaggccactttcggcagagtggtccagagcggccagggcacggccagctgctttgcatctgcattcccgtttcattaccttttgtgttgtgggccaacaggagtgctacgtagtgggggctggagatttgtccaggcaggaggtgggcaagtggctgtcttctctgcagaatacctgcactgctccatctgaccagcagtggcaacagccacaaccagttctgcatctagctcctgcccagacctttggctgccagaatctagaaccatggctgaccaaagcgagacttccgagtaaggttcgttaacaggcatcctgctgaattagaaggaaacaggaacgaatccaaagcaaacggggctaaacttccctcgaggacatttcctgagctgcaacatgggaagcgacagcaccgaagctggtgagctggtgcaactgcacacaccttttctctggtttttagtactcacaggtcatcctggggagaccgctcatgggctatgggcagcccatgcctggattttttggtgaatgagtctgaaaagcagtgaccaggtgtgttgagggcctccccttgcctgcacctttttatctctgagtgactgagggctgccaaggccagacaacgcacatgtgtcctggatcctcccctggcctggggcagcagcagcagcagcagctgggcttggggtgagtaggctggcttgaggaaggggctgcccacaagcagggctcatttcctgggtcagggcctgtcagactcaaagtcagctcttcagcattctgtttagaaaatgatgatgcagttcagtgagaaagaaagctcaggataaaatatgttttctggaggggaaatactcaagtgttctaagccaggaacagagactctcaagagaggaattctctggcattctctgccttggataaatcatggattaaacatgagcatccttagaataattttatttttgtatttcactttacactgtaatgcaaacagcttttatgttttctttgacgaagaatcataattgagtcactttaggtcttttagctggaagcatttcaccctaaatgaaaagttaatgcattttttacaaggattaacatgctaactacaacttgccctttcagcagatgacaataagggattctgaaaagtttggactgtctttttctttttgtatacaaataaagcagcagatcctttctctgtgaaggttgttgcagagctcccgtaccagcttataaaatgcggctgtttaagcaggacttgggtgggcagcagaattctgcacatgacgagtggctgcagcttagaaagcaaatttcatctgattccagtactgtgattttaaggaaacggtaaaactcaaagtgccagtaatgccatcaaggctcagtaacatgccatttcctcagcagctaaagacaaaaagaattattttggtgaggggatagaaatcctttcgctttgcagtgacacccactttttcttagcttggcttgggagtaaggagattggagtgtggggggacattagaaactcatttaaggcaaactgaaatctccttcatcagcagtcttcctgctggtgtagccacagcagaactccgaggcttgcaggctgggctgtctccttgctgcctggcttgggtgtttatttgggcaatgcaagctgacattgtgaggtgttgccgatgcccaggccagctagcagggagccctcccagggctggtagaaacctatgtgtatatatattctcaaatttaaatagattgtacatagtgaaatgtaaatgacatgtaaaacagcaatctctatttttcttaactattatatagcagtatatatttgttgaacatgcttgtatactcttcattaaccattttaatattttgtacagataagttgattaaatattttattcataaaacc

SEQ ID NO: 138901 - DNA, 1796 bp, Homo sapiens
  Payload ID: 7217
  Gene Symbol: GDF9
  Gene Name: growth differentiation factor 9
  ENST ID: ENST00000296875
  CDS Start-End: 291-1391
ggaacaaaaaggtgacgaggaaggggcctgccgacctccggggcagcgctggccaggagcttggggcctgcgagtcttcccagctgtagacagagcgcctctgagccccgaggccgggccgccccacagcagaggagcacgagcctggtctcagctccaaggcaagaacagaaatacagcatatagatgagagagacagagctggcctccttcccgcgcttttcaaagttctatctgttgggcgaggtgggtcacctaggctgcagccagactccagagctttgcactacatgaagaagctctataagacatatgctaccaaggaagggattcctaaatccaatagaagtcacctctacaacactgttcggctcttcaccccctgtacccggcacaagcaggctcctggagaccaggtaacaggaatccttccatcagtggaactgctatttaacctggatcgcattactaccgttgaacacttactcaagtcagtcttgctgtacaatatcaacaactcagtttctttttcctctgctgtcaaatgtgtgtgcaatctaatgataaaggagccaaagtcttctagcaggactctcggcagagctccatactcatttacctttaactcacagtttgaatttggaaagaaacacaaatggattcagattgatgtgaccagcctccttcaacctttagtggcctccaacaagagaagtattcacatgtctataaattttacttgcatgaaagaccagctggagcatccttcagcacagaatggtttgtttaacatgactctggtgtccccctcactgatcttatatttgaatgacacaagtgctcaggcttatcacagctggtattcccttcactataaaaggaggccttcccagggtcctgaccaggagagaagtctgtctgcctatcctgtgggagaagaggctgctgaggatgggagatcttcccatcaccgtcaccgcagaggtcaggaaactgtcagttctgaattgaagaagcccttgggcccagcttccttcaatctgagtgaatacttcagacaatttcttcttccccaaaatgagtgtgagctccatgactttagacttagctttagtcagctgaagtgggacaactggattgtggctccgcacaggtacaaccctcgatactgtaaaggggactgtccaagggcagttggacatcggtatggctctccagttcacaccatggtacagaacatcatctatgagaagctggactcctcagtgccaagaccgtcatgtgtacctgccaaatacagccccttgagtgttttgaccattgagcccgatggctcaattgcctataaagagtacgaagatatgatagctacaaagtgcacctgtcgttaacaaatggtcctcttaaaaccttgagcctatttggcaaagtaactactgtgtgcctatgtgtgccttcaagagaaagcttcatatattaagtctctaaatgtagcatatgttatataaagaggagcctgtgtaggttagtaccttctatggcatctatcaggataaagggataacatcaattgttgctacagagcctttttttatttccaaatttaaatgaaatataattattgtggagaactttacatttttttccttgagtgattttttttcttttcataggagtcttattcttgatagggaaaaaaccttaattagcatcaatcctggatggacttgcagctataaataggcaattcagattgctgtagtcttaatagaagaataaatttctgtcaatggcat

SEQ ID NO: 138902 - DNA, 2640 bp, Homo sapiens
  Payload ID: 7217
  Gene Symbol: GDF9
  Gene Name: growth differentiation factor 9
  Uniprot ID: O60383
  ENST ID: ENST00000378673
  CDS Start-End: 868-2232
tttccggcaaggttggaagccgctcttggaggtcgtgagcatctgcaaacatcccaaaacctttcaaccaaaatatgtatagatgagtgtgcagaccaaagtaaggacatcagtatgttacatttaaaaataagtcaaggttaaaggcggtgtcctcttttaagaacatcgcaaatacaattccagtactccaagtacgtattctgtacccagccacctgggaggactgagagacctaatggttttctgctttctggaacttctatgccaattgtgactttctcacccaaatttgtaaattcgcaaattaacatgcagcgaataattacaattgtaaacacctggaagtggaaaaggccgtgaggataaattgagaggaagagtaaacctaataccataagttgcataccagcagatctgagtatcgtcatgaataattggttagcttttccacatgccttagaagtttcagcaagcacctagcgaacatcttaatccaaatttctcaaaaaatgagagattttatttaagatcattcctcaatttatcttagactttcagctacatagttagtccggtagtgtaacagtaacgggttttacgtaaatgccaggggaaaagagaggaaagctaaataaccaagtaaatctgtatctaattaacaaattggctaaataaggtgttatcagctgcttgatatagagctgataaaatcttcagctaggcatacttgaggcctgattacagaagtgaccgtagtccacccacacacctgaaatttatttaagagaccaagctaggctcttcctggcctttaggaagaggactggcatggagaaatatgttcctcactagttctcccaagccatggcacgtcccaacaaattcctcctttggttttgctgctttgcctggctgtgttttcctattagccttggttctcaggcttctgggggagaagctcagattgctgctagtgctgagttggaatctggggctatgccttggtccttgctgcagcatatagatgagagagacagagctggcctccttcccgcgcttttcaaagttctatctgttgggcgaggtgggtcacctaggctgcagccagactccagagctttgcactacatgaagaagctctataagacatatgctaccaaggaagggattcctaaatccaatagaagtcacctctacaacactgttcggctcttcaccccctgtacccggcacaagcaggctcctggagaccaggtaacaggaatccttccatcagtggaactgctatttaacctggatcgcattactaccgttgaacacttactcaagtcagtcttgctgtacaatatcaacaactcagtttctttttcctctgctgtcaaatgtgtgtgcaatctaatgataaaggagccaaagtcttctagcaggactctcggcagagctccatactcatttacctttaactcacagtttgaatttggaaagaaacacaaatggattcagattgatgtgaccagcctccttcaacctttagtggcctccaacaagagaagtattcacatgtctataaattttacttgcatgaaagaccagctggagcatccttcagcacagaatggtttgtttaacatgactctggtgtccccctcactgatcttatatttgaatgacacaagtgctcaggcttatcacagctggtattcccttcactataaaaggaggccttcccagggtcctgaccaggagagaagtctgtctgcctatcctgtgggagaagaggctgctgaggatgggagatcttcccatcaccgtcaccgcagaggtcaggaaactgtcagttctgaattgaagaagcccttgggcccagcttccttcaatctgagtgaatacttcagacaatttcttcttccccaaaatgagtgtgagctccatgactttagacttagctttagtcagctgaagtgggacaactggattgtggctccgcacaggtacaaccctcgatactgtaaaggggactgtccaagggcagttggacatcggtatggctctccagttcacaccatggtacagaacatcatctatgagaagctggactcctcagtgccaagaccgtcatgtgtacctgccaaatacagccccttgagtgttttgaccattgagcccgatggctcaattgcctataaagagtacgaagatatgatagctacaaagtgcacctgtcgttaacaaatggtcctcttaaaaccttgagcctatttggcaaagtaactactgtgtgcctatgtgtgccttcaagagaaagcttcatatattaagtctctaaatgtagcatatgttatataaagaggagcctgtgtaggttagtaccttctatggcatctatcaggataaagggataacatcaattgttgctacagagcctttttttatttccaaatttaaatgaaatataattattgtggagaactttacatttttttccttgagtgattttttttcttttcataggagtcttattcttgatagggaaaaaaccttaattagcatcaatcctggatggacttgcagctataaataggcaattcagattgctgtagtcttaatagaagaataaatttctgtcaatggcataaa

SEQ ID NO: 138903 - DNA, 1939 bp, Homo sapiens
  Payload ID: 7217
  Gene Symbol: GDF9
  Gene Name: growth differentiation factor 9
  ENST ID: ENST00000621295
  CDS Start-End: 434-1534
cattgtggcggcggccctgcaggaccgagggtggacaggcgcttggctcgctttcgcgaagcgccgcagtccccgcgggggtccatccccaaccccagactcctgcccctgcactccttatcctttcccagcccagcggggcgcccctagcctcccagggtccacgaacactgcacaaccagaccccactcacgcacagggctcagctcgccctccacagtcaccgatccggttgactcgttcgtcatttccggcaaggttggaagccgctcttggaggtcgtgagcctggtctcagctccaaggcaagaacagaaatacagcatatagatgagagagacagagctggcctccttcccgcgcttttcaaagttctatctgttgggcgaggtgggtcacctaggctgcagccagactccagagctttgcactacatgaagaagctctataagacatatgctaccaaggaagggattcctaaatccaatagaagtcacctctacaacactgttcggctcttcaccccctgtacccggcacaagcaggctcctggagaccaggtaacaggaatccttccatcagtggaactgctatttaacctggatcgcattactaccgttgaacacttactcaagtcagtcttgctgtacaatatcaacaactcagtttctttttcctctgctgtcaaatgtgtgtgcaatctaatgataaaggagccaaagtcttctagcaggactctcggcagagctccatactcatttacctttaactcacagtttgaatttggaaagaaacacaaatggattcagattgatgtgaccagcctccttcaacctttagtggcctccaacaagagaagtattcacatgtctataaattttacttgcatgaaagaccagctggagcatccttcagcacagaatggtttgtttaacatgactctggtgtccccctcactgatcttatatttgaatgacacaagtgctcaggcttatcacagctggtattcccttcactataaaaggaggccttcccagggtcctgaccaggagagaagtctgtctgcctatcctgtgggagaagaggctgctgaggatgggagatcttcccatcaccgtcaccgcagaggtcaggaaactgtcagttctgaattgaagaagcccttgggcccagcttccttcaatctgagtgaatacttcagacaatttcttcttccccaaaatgagtgtgagctccatgactttagacttagctttagtcagctgaagtgggacaactggattgtggctccgcacaggtacaaccctcgatactgtaaaggggactgtccaagggcagttggacatcggtatggctctccagttcacaccatggtacagaacatcatctatgagaagctggactcctcagtgccaagaccgtcatgtgtacctgccaaatacagccccttgagtgttttgaccattgagcccgatggctcaattgcctataaagagtacgaagatatgatagctacaaagtgcacctgtcgttaacaaatggtcctcttaaaaccttgagcctatttggcaaagtaactactgtgtgcctatgtgtgccttcaagagaaagcttcatatattaagtctctaaatgtagcatatgttatataaagaggagcctgtgtaggttagtaccttctatggcatctatcaggataaagggataacatcaattgttgctacagagcctttttttatttccaaatttaaatgaaatataattattgtggagaactttacatttttttccttgagtgattttttttcttttcataggagtcttattcttgatagggaaaaaaccttaattagcatcaatcctggatggacttgcagctataaataggcaattcagattgctgtagtcttaatagaagaataaatttctgtcaatggcat

SEQ ID NO: 138904 - DNA, 1823 bp, Homo sapiens
  Payload ID: 7217
  Gene Symbol: GDF9
  Gene Name: growth differentiation factor 9
  ENST ID: ENST00000624492
  CDS Start-End: 318-1418
cattgtggcggcggccctgcaggaccgagggtggacaggcgcttggctcgctttcgcgaagcgccgcagtccccgcgggggtccatccccaaccccagactcctgcccctgcactccttatcctttcccagcccagcggggcgcccctagcctcccagggtccacgaacactgcacaaccagaccccactcacgcacagggctcagctcgccctccacagtcaccgatccggttgactcgttcgtcatttccggcaaggttggaagccgctcttggaggtcgtgaggctgcagccagactccagagctttgcactacatgaagaagctctataagacatatgctaccaaggaagggattcctaaatccaatagaagtcacctctacaacactgttcggctcttcaccccctgtacccggcacaagcaggctcctggagaccaggtaacaggaatccttccatcagtggaactgctatttaacctggatcgcattactaccgttgaacacttactcaagtcagtcttgctgtacaatatcaacaactcagtttctttttcctctgctgtcaaatgtgtgtgcaatctaatgataaaggagccaaagtcttctagcaggactctcggcagagctccatactcatttacctttaactcacagtttgaatttggaaagaaacacaaatggattcagattgatgtgaccagcctccttcaacctttagtggcctccaacaagagaagtattcacatgtctataaattttacttgcatgaaagaccagctggagcatccttcagcacagaatggtttgtttaacatgactctggtgtccccctcactgatcttatatttgaatgacacaagtgctcaggcttatcacagctggtattcccttcactataaaaggaggccttcccagggtcctgaccaggagagaagtctgtctgcctatcctgtgggagaagaggctgctgaggatgggagatcttcccatcaccgtcaccgcagaggtcaggaaactgtcagttctgaattgaagaagcccttgggcccagcttccttcaatctgagtgaatacttcagacaatttcttcttccccaaaatgagtgtgagctccatgactttagacttagctttagtcagctgaagtgggacaactggattgtggctccgcacaggtacaaccctcgatactgtaaaggggactgtccaagggcagttggacatcggtatggctctccagttcacaccatggtacagaacatcatctatgagaagctggactcctcagtgccaagaccgtcatgtgtacctgccaaatacagccccttgagtgttttgaccattgagcccgatggctcaattgcctataaagagtacgaagatatgatagctacaaagtgcacctgtcgttaacaaatggtcctcttaaaaccttgagcctatttggcaaagtaactactgtgtgcctatgtgtgccttcaagagaaagcttcatatattaagtctctaaatgtagcatatgttatataaagaggagcctgtgtaggttagtaccttctatggcatctatcaggataaagggataacatcaattgttgctacagagcctttttttatttccaaatttaaatgaaatataattattgtggagaactttacatttttttccttgagtgattttttttcttttcataggagtcttattcttgatagggaaaaaaccttaattagcatcaatcctggatggacttgcagctataaataggcaattcagattgctgtagtcttaatagaagaataaatttctgtcaatggcat

SEQ ID NO: 138905 - DNA, 1799 bp, Homo sapiens
  Payload ID: 7217
  Gene Symbol: GDF9
  Gene Name: growth differentiation factor 9
  ENST ID: ENST00000624495
  CDS Start-End: 294-1394
attttcctactgtctctaagggatgacgcctttgtcccagaaagaagtgggctgactgggtgacccgtactgcacaaactggcttcgtatcttgcactatgagtgtaggctgactcttccagcatagtctccttcggggtggcgctgaatatcccctcatttcagcttttcatggtgctcctttgcctcatttttttaaaccataatgtctagcctggtctcagctccaaggcaagaacagaaatacaggtgggtcacctaggctgcagccagactccagagctttgcactacatgaagaagctctataagacatatgctaccaaggaagggattcctaaatccaatagaagtcacctctacaacactgttcggctcttcaccccctgtacccggcacaagcaggctcctggagaccaggtaacaggaatccttccatcagtggaactgctatttaacctggatcgcattactaccgttgaacacttactcaagtcagtcttgctgtacaatatcaacaactcagtttctttttcctctgctgtcaaatgtgtgtgcaatctaatgataaaggagccaaagtcttctagcaggactctcggcagagctccatactcatttacctttaactcacagtttgaatttggaaagaaacacaaatggattcagattgatgtgaccagcctccttcaacctttagtggcctccaacaagagaagtattcacatgtctataaattttacttgcatgaaagaccagctggagcatccttcagcacagaatggtttgtttaacatgactctggtgtccccctcactgatcttatatttgaatgacacaagtgctcaggcttatcacagctggtattcccttcactataaaaggaggccttcccagggtcctgaccaggagagaagtctgtctgcctatcctgtgggagaagaggctgctgaggatgggagatcttcccatcaccgtcaccgcagaggtcaggaaactgtcagttctgaattgaagaagcccttgggcccagcttccttcaatctgagtgaatacttcagacaatttcttcttccccaaaatgagtgtgagctccatgactttagacttagctttagtcagctgaagtgggacaactggattgtggctccgcacaggtacaaccctcgatactgtaaaggggactgtccaagggcagttggacatcggtatggctctccagttcacaccatggtacagaacatcatctatgagaagctggactcctcagtgccaagaccgtcatgtgtacctgccaaatacagccccttgagtgttttgaccattgagcccgatggctcaattgcctataaagagtacgaagatatgatagctacaaagtgcacctgtcgttaacaaatggtcctcttaaaaccttgagcctatttggcaaagtaactactgtgtgcctatgtgtgccttcaagagaaagcttcatatattaagtctctaaatgtagcatatgttatataaagaggagcctgtgtaggttagtaccttctatggcatctatcaggataaagggataacatcaattgttgctacagagcctttttttatttccaaatttaaatgaaatataattattgtggagaactttacatttttttccttgagtgattttttttcttttcataggagtcttattcttgatagggaaaaaaccttaattagcatcaatcctggatggacttgcagctataaataggcaattcagattgctgtagtcttaatagaagaataaatttctgtcaatggcat

SEQ ID NO: 138906 - DNA, 2784 bp, Homo sapiens
  Payload ID: 7218
  Gene Symbol: GFI1
  Gene Name: growth factor independent 1 transcription repressor
  Uniprot ID: Q99684
  ENST ID: ENST00000294702
  CDS Start-End: 251-1519
gagggtgcgcccaccggtcccgccgggcgcccgcgggacgcgccgccagggccctctccgccgggggctcggcgctcgcccacctcttccaaatttaaccattacctaaatccgaagggaaatgagcaaacctctcggattgggtgtcaaggtctcctccgggctggggctgagcaagccctcggagtgaccgtgggtgacagcggctccagggactcttggggcgcagtggggaaagtgccggaccaccatgccgcgctcatttctcgtcaaaagcaagaaggctcacagctaccaccagccgcgctccccaggaccagactattccctccgtttagagaatgtaccggcgcctagccgagcagacagcacttcaaatgcaggcggggcgaaggcggagccccgggaccgtttgtcccccgaatcgcagctgaccgaagccccagacagagcctccgcatccccagacagctgcgaaggcagcgtctgcgaacggagctcggagtttgaggacttctggaggcccccgtcaccctccgcgtctccagcctcggagaagtcaatgtgcccatcgctggacgaagcccagcccttccccctgcctttcaaaccgtactcatggagcggcctggcgggttctgacctgcggcacctggtgcagagctaccgaccgtgtggggccctggagcgtggcgctggcctgggcctcttctgcgaacccgccccggagcctggccacccggccgcgctgtacggcccgaagcgggctgccggcggcgcgggggccggggcgccagggagctgcagcgcaggggccggtgccaccgctggccctggcctagggctctacggcgacttcgggtctgcggcagccgggctgtatgagaggcccacggcagcggcgggcttgctgtaccccgagcgtggccacgggctgcacgcagacaagggcgctggcgtcaaggtggagtcggagctgctgtgcacccgcctgctgctgggcggcggctcctacaagtgcatcaagtgcagcaaggtgttctccacgccgcacgggctcgaggtgcacgtgcgcaggtcccacagcggtaccagaccctttgcctgcgagatgtgcggcaagaccttcgggcacgcggtgagcctggagcagcacaaagccgtgcactcgcaggaacggagctttgactgtaagatctgtgggaagagcttcaagaggtcatccacactgtccacacacctgcttatccactcagacactcggccctacccctgtcagtactgtggcaagaggttccaccagaagtcagacatgaagaaacacactttcatccacactggtgagaagcctcacaagtgccaggtgtgcggcaaggcattcagccagagctccaacctcatcacccacagccgcaaacacacaggcttcaagcccttcggctgcgacctctgtgggaagggtttccagaggaaggtggacctccgaaggcaccgggagacgcagcatgggctcaaatgagcaccctggctggctgcaagcagcagctacacaacactacagagggcagcctccctgcttgccaccactctgctccctgcttgcctccactcccttctgactttccagaccccaggtccagtctgcagatcctaccaggttgctcctccttcgccttacctcctggagctgccagaagaaatgaggtaccttttcaaagtgcagccgagagtgagaaccaagtgactctctaggcttcggacacaaataggctcctctacacctgaagacaaaggcaaagtcaaatggggaccagaataaatcttagaccccacagtccttcccatttccagccctaatctacagacaggaatgcccttcaggtttcttccctcccccctcttgacctaccccagatatttgtgtggaagaggaggaatcaccatttacaaggtggacaaatgctaatatttttatctagaaagaagagtgagtgttaacttttatttttttccttctggggggtctgttgactcctttcttttgggtgctgcctataaatcttggaggaatcatttctcctcctcaaaaactgattcagaaactgacttggggaaggaatttaatactttgaagtcatgagatgcaccatcgaggctacccccaagaagaagcagaagagaagttggtaatgagaggggattagaggtcctcccttcagtagggctgtgaaaacctcatcactggaggtaaaagcacaagcaatgcctgtggacaagatgtcattcattcactcagcaaatgttcatggatcaccggctaccaaggtaccaggcaccatgctaggtattggggaagagagactgaagtcacaacccctgactgctcctcaaaagctaacggttgcacctccaagtggctgggtctgttcttactcttggagggaattctgagaagacagcacagaattgtaaaccttcccttttgacccttttggattttatcaggtgtaaacaaaaagctgaacagttacttcaaagatatgtgtgtatattcagttttttattgttaagctgatattttaaagatttctgagctagcaggcatgtgggaaggaaggctctgtcttcaactctttgaccctccatgtgtaccatagaggggggaaaggtggtattttcactttgatgaggttggtaaatgtttttagatcttctggtaagcattatgtttgttaatacatatttattagagtgatgttttaagttaataaagtattaagagta

SEQ ID NO: 138907 - DNA, 2855 bp, Homo sapiens
  Payload ID: 7218
  Gene Symbol: GFI1
  Gene Name: growth factor independent 1 transcription repressor
  Uniprot ID: Q99684
  ENST ID: ENST00000370332
  CDS Start-End: 320-1588
agctgagttggggtaacccacccgatgggaactacagctctccagggagtttgattgccggagcgagcttcgctaggaaaggggaggagctggggggcgtgggcagggaggaggaaaggggcctgagacagggccccgggacaggttttaccgctgagctgtgtcagtggcggcggcggcaacgacggcgggttcgcgccacctgtccaagtgccacctggtctcctccgggctggggctgagcaagccctcggagtgaccgtgggtgacagcggctccagggactcttggggcgcagtggggaaagtgccggaccaccatgccgcgctcatttctcgtcaaaagcaagaaggctcacagctaccaccagccgcgctccccaggaccagactattccctccgtttagagaatgtaccggcgcctagccgagcagacagcacttcaaatgcaggcggggcgaaggcggagccccgggaccgtttgtcccccgaatcgcagctgaccgaagccccagacagagcctccgcatccccagacagctgcgaaggcagcgtctgcgaacggagctcggagtttgaggacttctggaggcccccgtcaccctccgcgtctccagcctcggagaagtcaatgtgcccatcgctggacgaagcccagcccttccccctgcctttcaaaccgtactcatggagcggcctggcgggttctgacctgcggcacctggtgcagagctaccgaccgtgtggggccctggagcgtggcgctggcctgggcctcttctgcgaacccgccccggagcctggccacccggccgcgctgtacggcccgaagcgggctgccggcggcgcgggggccggggcgccagggagctgcagcgcaggggccggtgccaccgctggccctggcctagggctctacggcgacttcgggtctgcggcagccgggctgtatgagaggcccacggcagcggcgggcttgctgtaccccgagcgtggccacgggctgcacgcagacaagggcgctggcgtcaaggtggagtcggagctgctgtgcacccgcctgctgctgggcggcggctcctacaagtgcatcaagtgcagcaaggtgttctccacgccgcacgggctcgaggtgcacgtgcgcaggtcccacagcggtaccagaccctttgcctgcgagatgtgcggcaagaccttcgggcacgcggtgagcctggagcagcacaaagccgtgcactcgcaggaacggagctttgactgtaagatctgtgggaagagcttcaagaggtcatccacactgtccacacacctgcttatccactcagacactcggccctacccctgtcagtactgtggcaagaggttccaccagaagtcagacatgaagaaacacactttcatccacactggtgagaagcctcacaagtgccaggtgtgcggcaaggcattcagccagagctccaacctcatcacccacagccgcaaacacacaggcttcaagcccttcggctgcgacctctgtgggaagggtttccagaggaaggtggacctccgaaggcaccgggagacgcagcatgggctcaaatgagcaccctggctggctgcaagcagcagctacacaacactacagagggcagcctccctgcttgccaccactctgctccctgcttgcctccactcccttctgactttccagaccccaggtccagtctgcagatcctaccaggttgctcctccttcgccttacctcctggagctgccagaagaaatgaggtaccttttcaaagtgcagccgagagtgagaaccaagtgactctctaggcttcggacacaaataggctcctctacacctgaagacaaaggcaaagtcaaatggggaccagaataaatcttagaccccacagtccttcccatttccagccctaatctacagacaggaatgcccttcaggtttcttccctcccccctcttgacctaccccagatatttgtgtggaagaggaggaatcaccatttacaaggtggacaaatgctaatatttttatctagaaagaagagtgagtgttaacttttatttttttccttctggggggtctgttgactcctttcttttgggtgctgcctataaatcttggaggaatcatttctcctcctcaaaaactgattcagaaactgacttggggaaggaatttaatactttgaagtcatgagatgcaccatcgaggctacccccaagaagaagcagaagagaagttggtaatgagaggggattagaggtcctcccttcagtagggctgtgaaaacctcatcactggaggtaaaagcacaagcaatgcctgtggacaagatgtcattcattcactcagcaaatgttcatggatcaccggctaccaaggtaccaggcaccatgctaggtattggggaagagagactgaagtcacaacccctgactgctcctcaaaagctaacggttgcacctccaagtggctgggtctgttcttactcttggagggaattctgagaagacagcacagaattgtaaaccttcccttttgacccttttggattttatcaggtgtaaacaaaaagctgaacagttacttcaaagatatgtgtgtatattcagttttttattgttaagctgatattttaaagatttctgagctagcaggcatgtgggaaggaaggctctgtcttcaactctttgaccctccatgtgtaccatagaggggggaaaggtggtattttcactttgatgaggttggtaaatgtttttagatcttctggtaagcattatgtttgttaatacatatttattagagtgatgttttaagttaataaagtattaagagtatt

SEQ ID NO: 138908 - DNA, 2693 bp, Homo sapiens
  Payload ID: 7218
  Gene Symbol: GFI1
  Gene Name: growth factor independent 1 transcription repressor
  Uniprot ID: Q99684
  ENST ID: ENST00000427103
  CDS Start-End: 158-1426
aaagcaagattccgtttgaaaactctcctagcgcggtgcccgcgccgtgactccgcaggtctcctccgggctggggctgagcaagccctcggagtgaccgtgggtgacagcggctccagggactcttggggcgcagtggggaaagtgccggaccaccatgccgcgctcatttctcgtcaaaagcaagaaggctcacagctaccaccagccgcgctccccaggaccagactattccctccgtttagagaatgtaccggcgcctagccgagcagacagcacttcaaatgcaggcggggcgaaggcggagccccgggaccgtttgtcccccgaatcgcagctgaccgaagccccagacagagcctccgcatccccagacagctgcgaaggcagcgtctgcgaacggagctcggagtttgaggacttctggaggcccccgtcaccctccgcgtctccagcctcggagaagtcaatgtgcccatcgctggacgaagcccagcccttccccctgcctttcaaaccgtactcatggagcggcctggcgggttctgacctgcggcacctggtgcagagctaccgaccgtgtggggccctggagcgtggcgctggcctgggcctcttctgcgaacccgccccggagcctggccacccggccgcgctgtacggcccgaagcgggctgccggcggcgcgggggccggggcgccagggagctgcagcgcaggggccggtgccaccgctggccctggcctagggctctacggcgacttcgggtctgcggcagccgggctgtatgagaggcccacggcagcggcgggcttgctgtaccccgagcgtggccacgggctgcacgcagacaagggcgctggcgtcaaggtggagtcggagctgctgtgcacccgcctgctgctgggcggcggctcctacaagtgcatcaagtgcagcaaggtgttctccacgccgcacgggctcgaggtgcacgtgcgcaggtcccacagcggtaccagaccctttgcctgcgagatgtgcggcaagaccttcgggcacgcggtgagcctggagcagcacaaagccgtgcactcgcaggaacggagctttgactgtaagatctgtgggaagagcttcaagaggtcatccacactgtccacacacctgcttatccactcagacactcggccctacccctgtcagtactgtggcaagaggttccaccagaagtcagacatgaagaaacacactttcatccacactggtgagaagcctcacaagtgccaggtgtgcggcaaggcattcagccagagctccaacctcatcacccacagccgcaaacacacaggcttcaagcccttcggctgcgacctctgtgggaagggtttccagaggaaggtggacctccgaaggcaccgggagacgcagcatgggctcaaatgagcaccctggctggctgcaagcagcagctacacaacactacagagggcagcctccctgcttgccaccactctgctccctgcttgcctccactcccttctgactttccagaccccaggtccagtctgcagatcctaccaggttgctcctccttcgccttacctcctggagctgccagaagaaatgaggtaccttttcaaagtgcagccgagagtgagaaccaagtgactctctaggcttcggacacaaataggctcctctacacctgaagacaaaggcaaagtcaaatggggaccagaataaatcttagaccccacagtccttcccatttccagccctaatctacagacaggaatgcccttcaggtttcttccctcccccctcttgacctaccccagatatttgtgtggaagaggaggaatcaccatttacaaggtggacaaatgctaatatttttatctagaaagaagagtgagtgttaacttttatttttttccttctggggggtctgttgactcctttcttttgggtgctgcctataaatcttggaggaatcatttctcctcctcaaaaactgattcagaaactgacttggggaaggaatttaatactttgaagtcatgagatgcaccatcgaggctacccccaagaagaagcagaagagaagttggtaatgagaggggattagaggtcctcccttcagtagggctgtgaaaacctcatcactggaggtaaaagcacaagcaatgcctgtggacaagatgtcattcattcactcagcaaatgttcatggatcaccggctaccaaggtaccaggcaccatgctaggtattggggaagagagactgaagtcacaacccctgactgctcctcaaaagctaacggttgcacctccaagtggctgggtctgttcttactcttggagggaattctgagaagacagcacagaattgtaaaccttcccttttgacccttttggattttatcaggtgtaaacaaaaagctgaacagttacttcaaagatatgtgtgtatattcagttttttattgttaagctgatattttaaagatttctgagctagcaggcatgtgggaaggaaggctctgtcttcaactctttgaccctccatgtgtaccatagaggggggaaaggtggtattttcactttgatgaggttggtaaatgtttttagatcttctggtaagcattatgtttgttaatacatatttattagagtgatgttttaagttaataaagtattaagagtatt

SEQ ID NO: 138909 - DNA, 2449 bp, Homo sapiens
  Payload ID: 7219
  Gene Symbol: GFI1B
  Gene Name: growth factor independent 1B transcription repressor
  Uniprot ID: Q5VTD9
  ENST ID: ENST00000339463
  CDS Start-End: 820-1812
tgcgaggctgagtatgatgggctccatccagcacgaacacaaagccctgtgagaggaggcagagtgagatgaagtcgaactgtgggatatgaaaggcattttgaaggagtaggcatcaggctggtttttgttcgaggaaagctactcaggagcttgggaggattgcttgagaccaggagttcaagaccagcctgggctacagagcaagaccccatctttttgaaacttcctgcaactcgcatctggaaaagtgctgttatttgaaagggtgccgacattgtgaaaaacacggagtattgatctctgaagctgagatttttgtcctaaagaatactcaagatgtgtccctggctgggcacagcagctcgtgcctgtaatcccagcactttgggaggctgaggcaggaggatcgcttgaggccaggagttcaagaccagcctattgtgaatagtaccactataaatagagaaagcgtgccgctccaagtgtcgagggttagaaatgagaattcgaagtcttgtgtcctggaaagttttgataagcaaatacggctgagctcccgcgctctcttcattggctgcttgttcaccgccagattttgacacaaataatcagattgaaaatcagggaggggaacagaagaggaaaaacacacagagagacagagcaaaaaggagaagtatctatttgtgcaaagagtcacacagttgacagagtggaggccagtcccgagagaggctttgcagttcccacctcgggaagctccggcagaacccaggcgagggacagctccggacaggtgtggggtgcacactgaaaatgccacgctccttcctggtgaagagcaagaaggctcacacctaccaccagccccgtgtgcaggaagatgaaccgctctggcctcctgcccttaccccggtgcccagagaccaggctccaagcaacagccctgtccttagcactctattcccaaaccagtgcctggactggaccaacctcaaacgagagccggagctggagcaggaccagaacttggccaggatggccccggcaccagagggccccattgtgctgtcccgaccccaggatggggactctccactgtccgactcacccccattctacaagcctagcttctcctgggacaccttggccacaacctatggccacagctaccggcaggccccctccaccatgcagtcagccttcctggagcactccgtcagcctgtacggcagtcctcttgtgcccagcactgagcccgccttggacttcagcctccgctactccccaggcatggatgcgtaccactgtgtgaagtgcaacaaggtcttctccacccctcacgggctcgaagtgcatgtgcgacgctcccatagtgggacccggcccttcgcctgtgacatctgcggcaaaaccttcggccacgctgtgagcctggagcagcacacgcacgtccactcccaggagcgcagcttcgagtgccgcatgtgcggcaaggccttcaagcgctcgtccacgctgtccacccacctgctcatccactcagacacgcggccctacccctgccagttctgcggcaagcgtttccaccagaagtccgacatgaagaagcacacctacatccacacaggtgagaagccgcacaagtgccaggtgtgcggaaaggccttcagccagagctccaacctcatcacccacagccgcaagcacacaggcttcaagcccttcagctgtgagctgtgcaccaaaggcttccagcgcaaggtggacctgcggcggcaccgcgagagccagcacaatctcaagtgaggctgcgccggctcccagctcctggccagcctgccctgcggtcctgtcacctggaggccagcctcacatgcccaaatctccagtctcctggaggtgggactggacaggagtctaccagcttgttttgagactcatgaaattgctgtgtgaccttgggcaagtcacttaccctgtctggatcaacatttctcctgctgccaagtgtgggagcctggctgggtctttctcagcagaagttgtttccaggtgtgctcaagtgccttcctctagcagagcacagaaagctagaatacccccagggagacagggatgccaagagtagaccagagctgggacccacagacagaacctccacctgcctgctgcccactgagctgggacctggtcaccttggattttagccggcctctttctggctataacaggcagagtcggagctgcctcccaccccagtcagaagcctggcaccccctctgcttcggccagatgtgctggctgactccgacttccgaccagcactcagctggcctctggggattctagctccacaaccaggccgtgaggctggagaaactggcagttattgctgtcaaaagcctgttctctcaactgctgtcaataaaattaaagatacaga

SEQ ID NO: 138910 - DNA, 1797 bp, Homo sapiens
  Payload ID: 7219
  Gene Symbol: GFI1B
  Gene Name: growth factor independent 1B transcription repressor
  Uniprot ID: Q5VTD9
  ENST ID: ENST00000372122
  CDS Start-End: 168-1160
cacagagagacagagcaaaaaggagaagtatctatttgtgcaaagagtcacacagttgacagagtggaggccagtcccgagagaggctttgcagttcccacctcgggaagctccggcagaacccaggcgagggacagctccggacaggtgtggggtgcacactgaaaatgccacgctccttcctggtgaagagcaagaaggctcacacctaccaccagccccgtgtgcaggaagatgaaccgctctggcctcctgcccttaccccggtgcccagagaccaggctccaagcaacagccctgtccttagcactctattcccaaaccagtgcctggactggaccaacctcaaacgagagccggagctggagcaggaccagaacttggccaggatggccccggcaccagagggccccattgtgctgtcccgaccccaggatggggactctccactgtccgactcacccccattctacaagcctagcttctcctgggacaccttggccacaacctatggccacagctaccggcaggccccctccaccatgcagtcagccttcctggagcactccgtcagcctgtacggcagtcctcttgtgcccagcactgagcccgccttggacttcagcctccgctactccccaggcatggatgcgtaccactgtgtgaagtgcaacaaggtcttctccacccctcacgggctcgaagtgcatgtgcgacgctcccatagtgggacccggcccttcgcctgtgacatctgcggcaaaaccttcggccacgctgtgagcctggagcagcacacgcacgtccactcccaggagcgcagcttcgagtgccgcatgtgcggcaaggccttcaagcgctcgtccacgctgtccacccacctgctcatccactcagacacgcggccctacccctgccagttctgcggcaagcgtttccaccagaagtccgacatgaagaagcacacctacatccacacaggtgagaagccgcacaagtgccaggtgtgcggaaaggccttcagccagagctccaacctcatcacccacagccgcaagcacacaggcttcaagcccttcagctgtgagctgtgcaccaaaggcttccagcgcaaggtggacctgcggcggcaccgcgagagccagcacaatctcaagtgaggctgcgccggctcccagctcctggccagcctgccctgcggtcctgtcacctggaggccagcctcacatgcccaaatctccagtctcctggaggtgggactggacaggagtctaccagcttgttttgagactcatgaaattgctgtgtgaccttgggcaagtcacttaccctgtctggatcaacatttctcctgctgccaagtgtgggagcctggctgggtctttctcagcagaagttgtttccaggtgtgctcaagtgccttcctctagcagagcacagaaagctagaatacccccagggagacagggatgccaagagtagaccagagctgggacccacagacagaacctccacctgcctgctgcccactgagctgggacctggtcaccttggattttagccggcctctttctggctataacaggcagagtcggagctgcctcccaccccagtcagaagcctggcaccccctctgcttcggccagatgtgctggctgactccgacttccgaccagcactcagctggcctctggggattctagctccacaaccaggccgtgaggctggagaaactggcagttattgctgtcaaaagcctgttctctcaactgctgtcaataaaattaaagatacaga

SEQ ID NO: 138911 - DNA, 1514 bp, Homo sapiens
  Payload ID: 7219
  Gene Symbol: GFI1B
  Gene Name: growth factor independent 1B transcription repressor
  Uniprot ID: Q5VTD9
  ENST ID: ENST00000372123
  CDS Start-End: 23-877
aggtgtggggtgcacactgaaaatgccacgctccttcctggtgaagagcaagaaggctcacacctaccaccagccccgtgtgcaggaagatgaaccgctctggcctcctgcccttaccccggtgcccagagaccaggctccaagcaacagccctgtccttagcactctattcccaaaccagtgcctggactggaccaacctcaaacgagagccggagctggagcaggaccagaacttggccaggatggccccggcaccagagggccccattgtgctgtcccgaccccaggatggggactctccactgtccgactcacccccattctacaagcctagcttctcctgggacaccttggccacaacctatggccacagctaccggcaggccccctccaccatgcagtcagccttcctggagcactccgtcagcctgtacggcagtcctcttgtgcccagcactgagcccgccttggacttcagcctccgctactccccaggcatggatgcgtaccactgtgtgaagtgcaacaaggagcgcagcttcgagtgccgcatgtgcggcaaggccttcaagcgctcgtccacgctgtccacccacctgctcatccactcagacacgcggccctacccctgccagttctgcggcaagcgtttccaccagaagtccgacatgaagaagcacacctacatccacacaggtgagaagccgcacaagtgccaggtgtgcggaaaggccttcagccagagctccaacctcatcacccacagccgcaagcacacaggcttcaagcccttcagctgtgagctgtgcaccaaaggcttccagcgcaaggtggacctgcggcggcaccgcgagagccagcacaatctcaagtgaggctgcgccggctcccagctcctggccagcctgccctgcggtcctgtcacctggaggccagcctcacatgcccaaatctccagtctcctggaggtgggactggacaggagtctaccagcttgttttgagactcatgaaattgctgtgtgaccttgggcaagtcacttaccctgtctggatcaacatttctcctgctgccaagtgtgggagcctggctgggtctttctcagcagaagttgtttccaggtgtgctcaagtgccttcctctagcagagcacagaaagctagaatacccccagggagacagggatgccaagagtagaccagagctgggacccacagacagaacctccacctgcctgctgcccactgagctgggacctggtcaccttggattttagccggcctctttctggctataacaggcagagtcggagctgcctcccaccccagtcagaagcctggcaccccctctgcttcggccagatgtgctggctgactccgacttccgaccagcactcagctggcctctggggattctagctccacaaccaggccgtgaggctggagaaactggcagttattgctgtcaaaagcctgttctctcaactgctgtcaataaaattaaagatacaga

SEQ ID NO: 138912 - DNA, 5032 bp, Homo sapiens
  Payload ID: 7220
  Gene Symbol: GRB10
  Gene Name: growth factor receptor-bound protein 10
  Uniprot ID: Q13322
  ENST ID: ENST00000335866
  CDS Start-End: 533-2143
ggggaggtcgggaggaggcagagagggaagcgagctgcggccgggcgggctcggcgctcggagacccggtggagcccaaagtttccgcgcagcccctgggtggcggcagcgccggcggcgcggggcgcccgggacagtcttgagcgccggcctcgccccgcggggacccgcgcccgccgccggccacgccgagtgtcgcccgcagccacgcggaggcggcggggagccgcgcgcggcagctttggcgctgaccacaatgctgagcaggaagcagcagctgcaggcccagtgactggtagctcagtgaccagcagcccagtgaccggcagccaggtcctcacctgggtcctctcagtgaagccagggtggccgccccagcagacagtgctacagagccaactcctgacaggacaaggtggagcagacacctcgcagtcaacaagacccggcaggaccaggactccccgcacagtctgaccgacttgcgaatcaccaggaggatgatgtggacctggaagccctggtgaacgatatgaatgcatccctggagagcctgtactcggcctgcagcatgcagtcagacacggtgcccctcctgcagaatggccagcatgcccgcagccagcctcgggcttcaggccctcctcggtccatccagccacaggtgtccccgaggcagagggtgcagcgctcccagcctgtgcacatcctcgctgtcaggcgccttcaggaggaagaccagcagtttagaacctcatctctgccggccatccccaatccttttcctgaactctgtggccctgggagcccccctgtgctcacgccgggttctttacctccgagccaggccgccgcaaagcaggatgttaaagtctttagtgaagatgggacaagcaaagtggtggagattctagcagacatgacagccagagacctgtgccaattgctggtttacaaaagtcactgtgtggatgacaacagctggacactagtggagcaccacccgcacctaggattagagaggtgcttggaagaccatgagctggtggtccaggtggagagtaccatggccagtgagagtaaatttctattcaggaagaattacgcaaaatacgagttctttaaaaatcccatgaatttcttcccagaacagatggttacttggtgccagcagtcaaatggcagtcaaacccagcttttgcagaattttctgaactccagtagttgtcctgaaattcaagggtttttgcatgtgaaagagctgggaaagaaatcatggaaaaagctgtatgtgtgtttgcggagatctggcctttattgctccaccaagggaacttcaaaggaacccagacacctgcagctgctggccgacctggaggacagcaacatcttctccctgatcgctggcaggaagcagtacaacgcccctacagaccacgggctctgcataaagccaaacaaagtcaggaatgaaactaaagagctgaggttgctctgtgcagaggacgagcaaaccaggacgtgctggatgacagcgttcagactcctcaagtatggaatgctcctttaccagaattaccgaatccctcagcagaggaaggccttgctgtccccgttctcgacgccagtgcgcagtgtctccgagaactccctcgtggcaatggatttttctgggcaaacaggacgcgtgatagagaatccggcagaggcccagagcgcagccctggaggagggccacgcctggaggaagcgaagcacacggatgaacatcctaggtagccaaagtcccctccacccttctaccctaagtacagtgattcacaggacacagcactggtttcacgggaggatctccagggaggaatcccacaggatcattaaacagcaagggctcgtggatgggctttttctcctccgtgacagccagagtaatccaaaggcatttgtactcacactgtgtcatcaccagaaaattaaaaatttccagatcttaccttgcgaggacgacgggcagacgttcttcagcctagatgacgggaacaccaaattctctgacctgatccagctggttgacttttaccagctgaacaaaggagtcctgccttgcaaactcaagcaccactgcatccgagtggccttatgaccgcagatgtcctctcggctgaagactggaggaagtgaacactggagtgaagaagcggtctgtgcgttggtgaagaacacacatcgattctgcacctggggacccagagcgagatgggtttgttcggtgccagccgaccaagattgactagtttgttggacttaaacgacgatttgctgctgtgaacccagcagggtcgcctccctctgcatcggccaaattggggagggcatggaagatccagcggaaagttgaaaataaactggaatgatcatcttggcttgggccgcttaggaacaagaaccggagagaagtgattggaaatgaactcttgccctggaataatcttgacaattaaaactgatatgtttactttttttgtattgatcacttttttgcactccttctttgttttcaatattgtattcagcctattgtaggagggggatgtggcgtttcaactcatataatacagaaagagttttgaatgggcagatttcaaactgaatatgggtccccaaatgttcccagagggtcctccacaccctctgccgactaccacggtgtggattcagctcccaaatgacaaacccagcccttcccagtatacttgaaaagctttcttgttaaaataaaaggtgtcactgtggtaggcatttggcatattttgtggactcagtcaagcaaccacagtctgttaatcatttctctatgctcagatgtcagatcctcttgttattagtgtgtcttgttctgcacagtgcaggagactttattcctttggaaaattcactgttccacaaacagcaggctgaatggcctcgcctctagattgacgtgggccagcctccttgagacacacctggcacccgtcatcggccagcggtggatgctgcataatccacctgggtacttcagccttgcgtttccacagccttcagcctgttctagaacgatcactgccttacccctgctgctgcagtggtgtgagtcgtttcacggctgatgtccctcgggggattaaaggatctaaagagaaaatggcacctggttgtcttcgtgctgtgtctcatgggtttccatagtgataaagacaaggaaacgctgcaggggccacaggcacaggctgatatttaaagatctttgcttgcagccctccgtcctgctgaaaacccccataagccagtgaacacagagcagctagaggctcctcctctgctggcttagggtcagaagtacctcacagtggttgtggacatggaagagttttgtcaacacaacactttgtccccgctccgggagatgagtcagatggtggcttgagttgtcacttggtcccctccgcccctcgggtggccccctttgccacgtccccttagcttagtgatcaggtgtgagagtggccatttccttacctttgatccctgtaaagcagaaaggactcctttgacaggcgacaaactactgtggtgagcagaatgatttcctttttcaagacaacacctgcctggcttctattaatgtgtgctggccatgatattgccccaaatccgccccactgaagtgttccctaaggaacagcatttctctgctcctcagtcaacccccgtagcctagagcagtgtcacaagcttcagtaaggccagtcagctggaagtcagtctaccgtatagtaacactgtatgtcagtctacagaccacactctagttgttttccatgaaaggtatacaaatgaagaattttctagcaaaacatgtttttaaccatcagtgctcaattgcattttcttcctttcgcagccagtcagtctttcaaactattgacagtaagataattctcacgttcacacctggtggcaggcttcactgtagggacggacattgcagttacaccacgattccttcctcttcactggctcgaggtaaacccttttcaaggaaaaacaactctaggatttcttttttctgtgtacgtagaccagtcccatcagtgtataatctctctctcacacgcctctctccaatagacagcttgtatttgcagtatttcatatttataaatatgcgtttatttaaaaggagaacaaaagcttgactctgattcacagttttgtatgtagctggtttgacgtagtcttttgtattttccctgccgaagtgaattgttggagaatgtaaaccgcctccacgtggcggcagacttcctaaggccccagctcgctggcctcgcgctgggcggctgggaattccacctgagaacaagtcccgcaaaccggggacggaaggacatttgacttttatttttgtatttaattgacatgaatgtaaaggggacagctcagggttgttttggagcctgttgactttgtatctctgcctgtgattttcttttctaaatgaaactccatgtagcaaccaggacgaagttgagaaggaaaacgccaaatgctttggttattagagtttaataggtaagctctgttacactaggtgttagagttccagaatgttcttttgtttgctaaaccttgaagaaacatgtgcctcagcctagatgttttgtcttctcttttctgcacttaatacctgacagtatgaccgatctctgcgcctttctgggggcgggcaagctggcggtagatttgtgatgtcacagtgcaaactgcagtgactgtaaattggcctggcgtgtataaacgttttcagggaatgcagaaggtattaatgaagagacaaaacctttattccatgtgctttgcttcattctgtacatagctctttggctcgtgaacctaattgtaaactttcaggtatttttgtacaaataagggactgatgttctgtttcttgtaattagaaataaacattaatacagtgttcttcattttc

SEQ ID NO: 138913 - DNA, 2050 bp, Homo sapiens
  Payload ID: 7220
  Gene Symbol: GRB10
  Gene Name: growth factor receptor-bound protein 10
  Uniprot ID: Q13322
  ENST ID: ENST00000357271
  CDS Start-End: 32-1678
aaatgtaatttgaagaaggcagaaggaacccatggctttagccggctgcccagattcctttttgcaccatccgtactaccaggacaaggtggagcagacacctcgcagtcaacaagacccggcaggaccaggactccccgcacagtctgaccgacttgcgaatcaccaggaggatgatgtggacctggaagccctggtgaacgatatgaatgcatccctggagagcctgtactcggcctgcagcatgcagtcagacacggtgcccctcctgcagaatggccagcatgcccgcagccagcctcgggcttcaggccctcctcggtccatccagccacaggtgtccccgaggcagagggtgcagcgctcccagcctgtgcacatcctcgctgtcaggcgccttcaggaggaagaccagcagtttagaacctcatctctgccggccatccccaatccttttcctgaactctgtggccctgggagcccccctgtgctcacgccgggttctttacctccgagccaggccgccgcaaagcaggatgttaaagtctttagtgaagatgggacaagcaaagtggtggagattctagcagacatgacagccagagacctgtgccaattgctggtttacaaaagtcactgtgtggatgacaacagctggacactagtggagcaccacccgcacctaggattagagaggtgcttggaagaccatgagctggtggtccaggtggagagtaccatggccagtgagagtaaatttctattcaggaagaattacgcaaaatacgagttctttaaaaatcccatgaatttcttcccagaacagatggttacttggtgccagcagtcaaatggcagtcaaacccagcttttgcaggaacccagacacctgcagctgctggccgacctggaggacagcaacatcttctccctgatcgctggcaggaagcagtacaacgcccctacagaccacgggctctgcataaagccaaacaaagtcaggaatgaaactaaagagctgaggttgctctgtgcagaggacgagcaaaccaggacgtgctggatgacagcgttcagactcctcaagtatggaatgctcctttaccagaattaccgaatccctcagcagaggaaggccttgctgtccccgttctcgacgccagtgcgcagtgtctccgagaactccctcgtggcaatggatttttctgggcaaacaggacgcgtgatagagaatccggcagaggcccagagcgcagccctggaggagggccacgcctggaggaagcgaagcacacggatgaacatcctaggtagccaaagtcccctccacccttctaccctaagtacagtgattcacaggacacagcactggtttcacgggaggatctccagggaggaatcccacaggatcattaaacagcaagggctcgtggatgggctttttctcctccgtgacagccagagtaatccaaaggcatttgtactcacactgtgtcatcaccagaaaattaaaaatttccagatcttaccttgcgaggacgacgggcagacgttcttcagcctagatgacgggaacaccaaattctctgacctgatccagctggttgacttttaccagctgaacaaaggagtcctgccttgcaaactcaagcaccactgcatccgagtggccttatgaccgcagatgtcctctcggctgaagactggaggaagtgaacactggagtgaagaagcggtctgtgcgttggtgaagaacacacatcgattctgcacctggggacccagagcgagatgggtttgttcggtgccagccgaccaagattgactagtttgttggacttaaacgacgatttgctgctgtgaacccagcagggtcgcctccctctgcatcggccaaattggggagggcatggaagatccagcggaaagttgaaaataaactggaatgatcatcttggcttgggccgcttaggaacaagaaccggagagaagtgattggaaatgaactcttgccctggaataatcttgacaattaaaactgatatgttta

SEQ ID NO: 138914 - DNA, 4785 bp, Homo sapiens
  Payload ID: 7220
  Gene Symbol: GRB10
  Gene Name: growth factor receptor-bound protein 10
  Uniprot ID: Q13322
  ENST ID: ENST00000398810
  CDS Start-End: 286-1896
cgcaactttgcctcccagggaacaaacatcctccttctaagtggtagatgtgggtgagctgaccctgctggagtctgtcccctgggctaccctctgcttccccccattgtgagtggtccgtgaagcacagcgttgaccagacctaaacctgtttgctcccaggacaaggtggagcagacacctcgcagtcaacaagacccggcaggaccaggactccccgcacagtctgaccgacttgcgaatcaccaggaggatgatgtggacctggaagccctggtgaacgatatgaatgcatccctggagagcctgtactcggcctgcagcatgcagtcagacacggtgcccctcctgcagaatggccagcatgcccgcagccagcctcgggcttcaggccctcctcggtccatccagccacaggtgtccccgaggcagagggtgcagcgctcccagcctgtgcacatcctcgctgtcaggcgccttcaggaggaagaccagcagtttagaacctcatctctgccggccatccccaatccttttcctgaactctgtggccctgggagcccccctgtgctcacgccgggttctttacctccgagccaggccgccgcaaagcaggatgttaaagtctttagtgaagatgggacaagcaaagtggtggagattctagcagacatgacagccagagacctgtgccaattgctggtttacaaaagtcactgtgtggatgacaacagctggacactagtggagcaccacccgcacctaggattagagaggtgcttggaagaccatgagctggtggtccaggtggagagtaccatggccagtgagagtaaatttctattcaggaagaattacgcaaaatacgagttctttaaaaatcccatgaatttcttcccagaacagatggttacttggtgccagcagtcaaatggcagtcaaacccagcttttgcagaattttctgaactccagtagttgtcctgaaattcaagggtttttgcatgtgaaagagctgggaaagaaatcatggaaaaagctgtatgtgtgtttgcggagatctggcctttattgctccaccaagggaacttcaaaggaacccagacacctgcagctgctggccgacctggaggacagcaacatcttctccctgatcgctggcaggaagcagtacaacgcccctacagaccacgggctctgcataaagccaaacaaagtcaggaatgaaactaaagagctgaggttgctctgtgcagaggacgagcaaaccaggacgtgctggatgacagcgttcagactcctcaagtatggaatgctcctttaccagaattaccgaatccctcagcagaggaaggccttgctgtccccgttctcgacgccagtgcgcagtgtctccgagaactccctcgtggcaatggatttttctgggcaaacaggacgcgtgatagagaatccggcagaggcccagagcgcagccctggaggagggccacgcctggaggaagcgaagcacacggatgaacatcctaggtagccaaagtcccctccacccttctaccctaagtacagtgattcacaggacacagcactggtttcacgggaggatctccagggaggaatcccacaggatcattaaacagcaagggctcgtggatgggctttttctcctccgtgacagccagagtaatccaaaggcatttgtactcacactgtgtcatcaccagaaaattaaaaatttccagatcttaccttgcgaggacgacgggcagacgttcttcagcctagatgacgggaacaccaaattctctgacctgatccagctggttgacttttaccagctgaacaaaggagtcctgccttgcaaactcaagcaccactgcatccgagtggccttatgaccgcagatgtcctctcggctgaagactggaggaagtgaacactggagtgaagaagcggtctgtgcgttggtgaagaacacacatcgattctgcacctggggacccagagcgagatgggtttgttcggtgccagccgaccaagattgactagtttgttggacttaaacgacgatttgctgctgtgaacccagcagggtcgcctccctctgcatcggccaaattggggagggcatggaagatccagcggaaagttgaaaataaactggaatgatcatcttggcttgggccgcttaggaacaagaaccggagagaagtgattggaaatgaactcttgccctggaataatcttgacaattaaaactgatatgtttactttttttgtattgatcacttttttgcactccttctttgttttcaatattgtattcagcctattgtaggagggggatgtggcgtttcaactcatataatacagaaagagttttgaatgggcagatttcaaactgaatatgggtccccaaatgttcccagagggtcctccacaccctctgccgactaccacggtgtggattcagctcccaaatgacaaacccagcccttcccagtatacttgaaaagctttcttgttaaaataaaaggtgtcactgtggtaggcatttggcatattttgtggactcagtcaagcaaccacagtctgttaatcatttctctatgctcagatgtcagatcctcttgttattagtgtgtcttgttctgcacagtgcaggagactttattcctttggaaaattcactgttccacaaacagcaggctgaatggcctcgcctctagattgacgtgggccagcctccttgagacacacctggcacccgtcatcggccagcggtggatgctgcataatccacctgggtacttcagccttgcgtttccacagccttcagcctgttctagaacgatcactgccttacccctgctgctgcagtggtgtgagtcgtttcacggctgatgtccctcgggggattaaaggatctaaagagaaaatggcacctggttgtcttcgtgctgtgtctcatgggtttccatagtgataaagacaaggaaacgctgcaggggccacaggcacaggctgatatttaaagatctttgcttgcagccctccgtcctgctgaaaacccccataagccagtgaacacagagcagctagaggctcctcctctgctggcttagggtcagaagtacctcacagtggttgtggacatggaagagttttgtcaacacaacactttgtccccgctccgggagatgagtcagatggtggcttgagttgtcacttggtcccctccgcccctcgggtggccccctttgccacgtccccttagcttagtgatcaggtgtgagagtggccatttccttacctttgatccctgtaaagcagaaaggactcctttgacaggcgacaaactactgtggtgagcagaatgatttcctttttcaagacaacacctgcctggcttctattaatgtgtgctggccatgatattgccccaaatccgccccactgaagtgttccctaaggaacagcatttctctgctcctcagtcaacccccgtagcctagagcagtgtcacaagcttcagtaaggccagtcagctggaagtcagtctaccgtatagtaacactgtatgtcagtctacagaccacactctagttgttttccatgaaaggtatacaaatgaagaattttctagcaaaacatgtttttaaccatcagtgctcaattgcattttcttcctttcgcagccagtcagtctttcaaactattgacagtaagataattctcacgttcacacctggtggcaggcttcactgtagggacggacattgcagttacaccacgattccttcctcttcactggctcgaggtaaacccttttcaaggaaaaacaactctaggatttcttttttctgtgtacgtagaccagtcccatcagtgtataatctctctctcacacgcctctctccaatagacagcttgtatttgcagtatttcatatttataaatatgcgtttatttaaaaggagaacaaaagcttgactctgattcacagttttgtatgtagctggtttgacgtagtcttttgtattttccctgccgaagtgaattgttggagaatgtaaaccgcctccacgtggcggcagacttcctaaggccccagctcgctggcctcgcgctgggcggctgggaattccacctgagaacaagtcccgcaaaccggggacggaaggacatttgacttttatttttgtatttaattgacatgaatgtaaaggggacagctcagggttgttttggagcctgttgactttgtatctctgcctgtgattttcttttctaaatgaaactccatgtagcaaccaggacgaagttgagaaggaaaacgccaaatgctttggttattagagtttaataggtaagctctgttacactaggtgttagagttccagaatgttcttttgtttgctaaaccttgaagaaacatgtgcctcagcctagatgttttgtcttctcttttctgcacttaatacctgacagtatgaccgatctctgcgcctttctgggggcgggcaagctggcggtagatttgtgatgtcacagtgcaaactgcagtgactgtaaattggcctggcgtgtataaacgttttcagggaatgcagaaggtattaatgaagagacaaaacctttattccatgtgctttgcttcattctgtacatagctctttggctcgtgaacctaattgtaaactttcaggtatttttgtacaaataagggactgatgttctgtttcttgtaattagaaataaacattaatacagtgttcttcattttc

SEQ ID NO: 138915 - DNA, 4705 bp, Homo sapiens
  Payload ID: 7220
  Gene Symbol: GRB10
  Gene Name: growth factor receptor-bound protein 10
  Uniprot ID: Q13322
  ENST ID: ENST00000398812
  CDS Start-End: 32-1816
aaatgtaatttgaagaaggcagaaggaacccatggctttagccggctgcccagattcctttttgcaccatccgtactaccaggacaaggtggagcagacacctcgcagtcaacaagacccggcaggaccaggactccccgcacagtctgaccgacttgcgaatcaccaggaggatgatgtggacctggaagccctggtgaacgatatgaatgcatccctggagagcctgtactcggcctgcagcatgcagtcagacacggtgcccctcctgcagaatggccagcatgcccgcagccagcctcgggcttcaggccctcctcggtccatccagccacaggtgtccccgaggcagagggtgcagcgctcccagcctgtgcacatcctcgctgtcaggcgccttcaggaggaagaccagcagtttagaacctcatctctgccggccatccccaatccttttcctgaactctgtggccctgggagcccccctgtgctcacgccgggttctttacctccgagccaggccgccgcaaagcaggatgttaaagtctttagtgaagatgggacaagcaaagtggtggagattctagcagacatgacagccagagacctgtgccaattgctggtttacaaaagtcactgtgtggatgacaacagctggacactagtggagcaccacccgcacctaggattagagaggtgcttggaagaccatgagctggtggtccaggtggagagtaccatggccagtgagagtaaatttctattcaggaagaattacgcaaaatacgagttctttaaaaatcccatgaatttcttcccagaacagatggttacttggtgccagcagtcaaatggcagtcaaacccagcttttgcagaattttctgaactccagtagttgtcctgaaattcaagggtttttgcatgtgaaagagctgggaaagaaatcatggaaaaagctgtatgtgtgtttgcggagatctggcctttattgctccaccaagggaacttcaaaggaacccagacacctgcagctgctggccgacctggaggacagcaacatcttctccctgatcgctggcaggaagcagtacaacgcccctacagaccacgggctctgcataaagccaaacaaagtcaggaatgaaactaaagagctgaggttgctctgtgcagaggacgagcaaaccaggacgtgctggatgacagcgttcagactcctcaagtatggaatgctcctttaccagaattaccgaatccctcagcagaggaaggccttgctgtccccgttctcgacgccagtgcgcagtgtctccgagaactccctcgtggcaatggatttttctgggcaaacaggacgcgtgatagagaatccggcagaggcccagagcgcagccctggaggagggccacgcctggaggaagcgaagcacacggatgaacatcctaggtagccaaagtcccctccacccttctaccctaagtacagtgattcacaggacacagcactggtttcacgggaggatctccagggaggaatcccacaggatcattaaacagcaagggctcgtggatgggctttttctcctccgtgacagccagagtaatccaaaggcatttgtactcacactgtgtcatcaccagaaaattaaaaatttccagatcttaccttgcgaggacgacgggcagacgttcttcagcctagatgacgggaacaccaaattctctgacctgatccagctggttgacttttaccagctgaacaaaggagtcctgccttgcaaactcaagcaccactgcatccgagtggccttatgaccgcagatgtcctctcggctgaagactggaggaagtgaacactggagtgaagaagcggtctgtgcgttggtgaagaacacacatcgattctgcacctggggacccagagcgagatgggtttgttcggtgccagccgaccaagattgactagtttgttggacttaaacgacgatttgctgctgtgaacccagcagggtcgcctccctctgcatcggccaaattggggagggcatggaagatccagcggaaagttgaaaataaactggaatgatcatcttggcttgggccgcttaggaacaagaaccggagagaagtgattggaaatgaactcttgccctggaataatcttgacaattaaaactgatatgtttactttttttgtattgatcacttttttgcactccttctttgttttcaatattgtattcagcctattgtaggagggggatgtggcgtttcaactcatataatacagaaagagttttgaatgggcagatttcaaactgaatatgggtccccaaatgttcccagagggtcctccacaccctctgccgactaccacggtgtggattcagctcccaaatgacaaacccagcccttcccagtatacttgaaaagctttcttgttaaaataaaaggtgtcactgtggtaggcatttggcatattttgtggactcagtcaagcaaccacagtctgttaatcatttctctatgctcagatgtcagatcctcttgttattagtgtgtcttgttctgcacagtgcaggagactttattcctttggaaaattcactgttccacaaacagcaggctgaatggcctcgcctctagattgacgtgggccagcctccttgagacacacctggcacccgtcatcggccagcggtggatgctgcataatccacctgggtacttcagccttgcgtttccacagccttcagcctgttctagaacgatcactgccttacccctgctgctgcagtggtgtgagtcgtttcacggctgatgtccctcgggggattaaaggatctaaagagaaaatggcacctggttgtcttcgtgctgtgtctcatgggtttccatagtgataaagacaaggaaacgctgcaggggccacaggcacaggctgatatttaaagatctttgcttgcagccctccgtcctgctgaaaacccccataagccagtgaacacagagcagctagaggctcctcctctgctggcttagggtcagaagtacctcacagtggttgtggacatggaagagttttgtcaacacaacactttgtccccgctccgggagatgagtcagatggtggcttgagttgtcacttggtcccctccgcccctcgggtggccccctttgccacgtccccttagcttagtgatcaggtgtgagagtggccatttccttacctttgatccctgtaaagcagaaaggactcctttgacaggcgacaaactactgtggtgagcagaatgatttcctttttcaagacaacacctgcctggcttctattaatgtgtgctggccatgatattgccccaaatccgccccactgaagtgttccctaaggaacagcatttctctgctcctcagtcaacccccgtagcctagagcagtgtcacaagcttcagtaaggccagtcagctggaagtcagtctaccgtatagtaacactgtatgtcagtctacagaccacactctagttgttttccatgaaaggtatacaaatgaagaattttctagcaaaacatgtttttaaccatcagtgctcaattgcattttcttcctttcgcagccagtcagtctttcaaactattgacagtaagataattctcacgttcacacctggtggcaggcttcactgtagggacggacattgcagttacaccacgattccttcctcttcactggctcgaggtaaacccttttcaaggaaaaacaactctaggatttcttttttctgtgtacgtagaccagtcccatcagtgtataatctctctctcacacgcctctctccaatagacagcttgtatttgcagtatttcatatttataaatatgcgtttatttaaaaggagaacaaaagcttgactctgattcacagttttgtatgtagctggtttgacgtagtcttttgtattttccctgccgaagtgaattgttggagaatgtaaaccgcctccacgtggcggcagacttcctaaggccccagctcgctggcctcgcgctgggcggctgggaattccacctgagaacaagtcccgcaaaccggggacggaaggacatttgacttttatttttgtatttaattgacatgaatgtaaaggggacagctcagggttgttttggagcctgttgactttgtatctctgcctgtgattttcttttctaaatgaaactccatgtagcaaccaggacgaagttgagaaggaaaacgccaaatgctttggttattagagtttaataggtaagctctgttacactaggtgttagagttccagaatgttcttttgtttgctaaaccttgaagaaacatgtgcctcagcctagatgttttgtcttctcttttctgcacttaatacctgacagtatgaccgatctctgcgcctttctgggggcgggcaagctggcggtagatttgtgatgtcacagtgcaaactgcagtgactgtaaattggcctggcgtgtataaacgttttcagggaatgcagaaggtattaatgaagagacaaaacctttattccatgtgctttgcttcattctgtacatagctctttggctcgtgaacctaattgtaaactttcaggtatttttgtacaaataagggactgatgttctgtttcttgtaattagaaataaacattaatacagtgttcttcattttc

SEQ ID NO: 138916 - DNA, 2279 bp, Homo sapiens
  Payload ID: 7220
  Gene Symbol: GRB10
  Gene Name: growth factor receptor-bound protein 10
  Uniprot ID: Q13322
  ENST ID: ENST00000407526
  CDS Start-End: 297-1907
cagctttggcgctgaccacaatgctgagcaggaagcagcagctgcaggcccagtgactggtagctcagtgaccagcagcccagtgaccggcagccaggtcctcacctgggtcctctcagtgaagccagggtggccgccccagcagacagtgctacagagccaactcctgacaggacaaggtggagcagacacctcgcagtcaacaagacccggcaggaccaggactccccgcacagtctgaccgacttgcgaatcaccaggaggatgatgtggacctggaagccctggtgaacgatatgaatgcatccctggagagcctgtactcggcctgcagcatgcagtcagacacggtgcccctcctgcagaatggccagcatgcccgcagccagcctcgggcttcaggccctcctcggtccatccagccacaggtgtccccgaggcagagggtgcagcgctcccagcctgtgcacatcctcgctgtcaggcgccttcaggaggaagaccagcagtttagaacctcatctctgccggccatccccaatccttttcctgaactctgtggccctgggagcccccctgtgctcacgccgggttctttacctccgagccaggccgccgcaaagcaggatgttaaagtctttagtgaagatgggacaagcaaagtggtggagattctagcagacatgacagccagagacctgtgccaattgctggtttacaaaagtcactgtgtggatgacaacagctggacactagtggagcaccacccgcacctaggattagagaggtgcttggaagaccatgagctggtggtccaggtggagagtaccatggccagtgagagtaaatttctattcaggaagaattacgcaaaatacgagttctttaaaaatcccatgaatttcttcccagaacagatggttacttggtgccagcagtcaaatggcagtcaaacccagcttttgcagaattttctgaactccagtagttgtcctgaaattcaagggtttttgcatgtgaaagagctgggaaagaaatcatggaaaaagctgtatgtgtgtttgcggagatctggcctttattgctccaccaagggaacttcaaaggaacccagacacctgcagctgctggccgacctggaggacagcaacatcttctccctgatcgctggcaggaagcagtacaacgcccctacagaccacgggctctgcataaagccaaacaaagtcaggaatgaaactaaagagctgaggttgctctgtgcagaggacgagcaaaccaggacgtgctggatgacagcgttcagactcctcaagtatggaatgctcctttaccagaattaccgaatccctcagcagaggaaggccttgctgtccccgttctcgacgccagtgcgcagtgtctccgagaactccctcgtggcaatggatttttctgggcaaacaggacgcgtgatagagaatccggcagaggcccagagcgcagccctggaggagggccacgcctggaggaagcgaagcacacggatgaacatcctaggtagccaaagtcccctccacccttctaccctaagtacagtgattcacaggacacagcactggtttcacgggaggatctccagggaggaatcccacaggatcattaaacagcaagggctcgtggatgggctttttctcctccgtgacagccagagtaatccaaaggcatttgtactcacactgtgtcatcaccagaaaattaaaaatttccagatcttaccttgcgaggacgacgggcagacgttcttcagcctagatgacgggaacaccaaattctctgacctgatccagctggttgacttttaccagctgaacaaaggagtcctgccttgcaaactcaagcaccactgcatccgagtggccttatgaccgcagatgtcctctcggctgaagactggaggaagtgaacactggagtgaagaagcggtctgtgcgttggtgaagaacacacatcgattctgcacctggggacccagagcgagatgggtttgttcggtgccagccgaccaagattgactagtttgttggacttaaacgacgatttgctgctgtgaacccagcagggtcgcctccctctgcatcggccaaattggggagggcatggaagatccagcggaaagttgaaaataaactggaatgatcatcttggcttgggccgcttaggaacaagaaccggagagaagtgattggaaatgaactcttgccctggaataatcttgacaattaaaactgatatgttta

SEQ ID NO: 138917 - DNA, 4760 bp, Homo sapiens
  Payload ID: 7220
  Gene Symbol: GRB10
  Gene Name: growth factor receptor-bound protein 10
  Uniprot ID: Q13322
  ENST ID: ENST00000402578
  CDS Start-End: 266-1876
accgactctgtgaattgggtaccttcatgatacccattttataaatgagaaaactgaggtttttactatatgctggtcatcatgctgaggactttacttggattttctctcctgccaatgctacgcggtggggaccttcatgttctcccctttgcagatgagattatcaaagcagaaaaagaccatctctcctactgagtaacagaggaaaccagggcttgcagatattgaggatgatgtggacctggaagccctggtgaacgatatgaatgcatccctggagagcctgtactcggcctgcagcatgcagtcagacacggtgcccctcctgcagaatggccagcatgcccgcagccagcctcgggcttcaggccctcctcggtccatccagccacaggtgtccccgaggcagagggtgcagcgctcccagcctgtgcacatcctcgctgtcaggcgccttcaggaggaagaccagcagtttagaacctcatctctgccggccatccccaatccttttcctgaactctgtggccctgggagcccccctgtgctcacgccgggttctttacctccgagccaggccgccgcaaagcaggatgttaaagtctttagtgaagatgggacaagcaaagtggtggagattctagcagacatgacagccagagacctgtgccaattgctggtttacaaaagtcactgtgtggatgacaacagctggacactagtggagcaccacccgcacctaggattagagaggtgcttggaagaccatgagctggtggtccaggtggagagtaccatggccagtgagagtaaatttctattcaggaagaattacgcaaaatacgagttctttaaaaatcccatgaatttcttcccagaacagatggttacttggtgccagcagtcaaatggcagtcaaacccagcttttgcagaattttctgaactccagtagttgtcctgaaattcaagggtttttgcatgtgaaagagctgggaaagaaatcatggaaaaagctgtatgtgtgtttgcggagatctggcctttattgctccaccaagggaacttcaaaggaacccagacacctgcagctgctggccgacctggaggacagcaacatcttctccctgatcgctggcaggaagcagtacaacgcccctacagaccacgggctctgcataaagccaaacaaagtcaggaatgaaactaaagagctgaggttgctctgtgcagaggacgagcaaaccaggacgtgctggatgacagcgttcagactcctcaagtatggaatgctcctttaccagaattaccgaatccctcagcagaggaaggccttgctgtccccgttctcgacgccagtgcgcagtgtctccgagaactccctcgtggcaatggatttttctgggcaaacaggacgcgtgatagagaatccggcagaggcccagagcgcagccctggaggagggccacgcctggaggaagcgaagcacacggatgaacatcctaggtagccaaagtcccctccacccttctaccctaagtacagtgattcacaggacacagcactggtttcacgggaggatctccagggaggaatcccacaggatcattaaacagcaagggctcgtggatgggctttttctcctccgtgacagccagagtaatccaaaggcatttgtactcacactgtgtcatcaccagaaaattaaaaatttccagatcttaccttgcgaggacgacgggcagacgttcttcagcctagatgacgggaacaccaaattctctgacctgatccagctggttgacttttaccagctgaacaaaggagtcctgccttgcaaactcaagcaccactgcatccgagtggccttatgaccgcagatgtcctctcggctgaagactggaggaagtgaacactggagtgaagaagcggtctgtgcgttggtgaagaacacacatcgattctgcacctggggacccagagcgagatgggtttgttcggtgccagccgaccaagattgactagtttgttggacttaaacgacgatttgctgctgtgaacccagcagggtcgcctccctctgcatcggccaaattggggagggcatggaagatccagcggaaagttgaaaataaactggaatgatcatcttggcttgggccgcttaggaacaagaaccggagagaagtgattggaaatgaactcttgccctggaataatcttgacaattaaaactgatatgtttactttttttgtattgatcacttttttgcactccttctttgttttcaatattgtattcagcctattgtaggagggggatgtggcgtttcaactcatataatacagaaagagttttgaatgggcagatttcaaactgaatatgggtccccaaatgttcccagagggtcctccacaccctctgccgactaccacggtgtggattcagctcccaaatgacaaacccagcccttcccagtatacttgaaaagctttcttgttaaaataaaaggtgtcactgtggtaggcatttggcatattttgtggactcagtcaagcaaccacagtctgttaatcatttctctatgctcagatgtcagatcctcttgttattagtgtgtcttgttctgcacagtgcaggagactttattcctttggaaaattcactgttccacaaacagcaggctgaatggcctcgcctctagattgacgtgggccagcctccttgagacacacctggcacccgtcatcggccagcggtggatgctgcataatccacctgggtacttcagccttgcgtttccacagccttcagcctgttctagaacgatcactgccttacccctgctgctgcagtggtgtgagtcgtttcacggctgatgtccctcgggggattaaaggatctaaagagaaaatggcacctggttgtcttcgtgctgtgtctcatgggtttccatagtgataaagacaaggaaacgctgcaggggccacaggcacaggctgatatttaaagatctttgcttgcagccctccgtcctgctgaaaacccccataagccagtgaacacagagcagctagaggctcctcctctgctggcttagggtcagaagtacctcacagtggttgtggacatggaagagttttgtcaacacaacactttgtccccgctccgggagatgagtcagatggtggcttgagttgtcacttggtcccctccgcccctcgggtggccccctttgccacgtccccttagcttagtgatcaggtgtgagagtggccatttccttacctttgatccctgtaaagcagaaaggactcctttgacaggcgacaaactactgtggtgagcagaatgatttcctttttcaagacaacacctgcctggcttctattaatgtgtgctggccatgatattgccccaaatccgccccactgaagtgttccctaaggaacagcatttctctgctcctcagtcaacccccgtagcctagagcagtgtcacaagcttcagtaaggccagtcagctggaagtcagtctaccgtatagtaacactgtatgtcagtctacagaccacactctagttgttttccatgaaaggtatacaaatgaagaattttctagcaaaacatgtttttaaccatcagtgctcaattgcattttcttcctttcgcagccagtcagtctttcaaactattgacagtaagataattctcacgttcacacctggtggcaggcttcactgtagggacggacattgcagttacaccacgattccttcctcttcactggctcgaggtaaacccttttcaaggaaaaacaactctaggatttcttttttctgtgtacgtagaccagtcccatcagtgtataatctctctctcacacgcctctctccaatagacagcttgtatttgcagtatttcatatttataaatatgcgtttatttaaaaggagaacaaaagcttgactctgattcacagttttgtatgtagctggtttgacgtagtcttttgtattttccctgccgaagtgaattgttggagaatgtaaaccgcctccacgtggcggcagacttcctaaggccccagctcgctggcctcgcgctgggcggctgggaattccacctgagaacaagtcccgcaaaccggggacggaaggacatttgacttttatttttgtatttaattgacatgaatgtaaaggggacagctcagggttgttttggagcctgttgactttgtatctctgcctgtgattttcttttctaaatgaaactccatgtagcaaccaggacgaagttgagaaggaaaacgccaaatgctttggttattagagtttaataggtaagctctgttacactaggtgttagagttccagaatgttcttttgtttgctaaaccttgaagaaacatgtgcctcagcctagatgttttgtcttctcttttctgcacttaatacctgacagtatgaccgatctctgcgcctttctgggggcgggcaagctggcggtagatttgtgatgtcacagtgcaaactgcagtgactgtaaattggcctggcgtgtataaacgttttcagggaatgcagaaggtattaatgaagagacaaaacctttattccatgtgctttgcttcattctgtacatagctctttggctcgtgaacctaattgtaaactttcaggtatttttgtacaaataagggactgatgttctgtttcttgtaattagaaataaacattaatacagtgttcttca

SEQ ID NO: 138918 - DNA, 2700 bp, Homo sapiens
  Payload ID: 7220
  Gene Symbol: GRB10
  Gene Name: growth factor receptor-bound protein 10
  Uniprot ID: Q13322
  ENST ID: ENST00000406641
  CDS Start-End: 486-2096
ctttccagctttggcgctgaccacaatgctgagcaggaagcagcagctgcaggcccagtgactggtagctcagtgaccagcagcccagtgaccggcagccaggtcctcacctgggtcctctcagtgaagccagggtggccgccccagcagacagtgctacagagccaactcctgacagatattctggaggaaggtgtgaacgcaactttgcctcccagggaacaaacatcctccttctaagtggtagatgtgggtgagctgaccctgctggagtctgtcccctgggctaccctctgcttccccccattgtgagtggtccgtgaagcacagcgttgaccagacctaaacctgtttgctcccaggacaaggtggagcagacacctcgcagtcaacaagacccggcaggaccaggactccccgcacagtctgaccgacttgcgaatcaccaggaggatgatgtggacctggaagccctggtgaacgatatgaatgcatccctggagagcctgtactcggcctgcagcatgcagtcagacacggtgcccctcctgcagaatggccagcatgcccgcagccagcctcgggcttcaggccctcctcggtccatccagccacaggtgtccccgaggcagagggtgcagcgctcccagcctgtgcacatcctcgctgtcaggcgccttcaggaggaagaccagcagtttagaacctcatctctgccggccatccccaatccttttcctgaactctgtggccctgggagcccccctgtgctcacgccgggttctttacctccgagccaggccgccgcaaagcaggatgttaaagtctttagtgaagatgggacaagcaaagtggtggagattctagcagacatgacagccagagacctgtgccaattgctggtttacaaaagtcactgtgtggatgacaacagctggacactagtggagcaccacccgcacctaggattagagaggtgcttggaagaccatgagctggtggtccaggtggagagtaccatggccagtgagagtaaatttctattcaggaagaattacgcaaaatacgagttctttaaaaatcccatgaatttcttcccagaacagatggttacttggtgccagcagtcaaatggcagtcaaacccagcttttgcagaattttctgaactccagtagttgtcctgaaattcaagggtttttgcatgtgaaagagctgggaaagaaatcatggaaaaagctgtatgtgtgtttgcggagatctggcctttattgctccaccaagggaacttcaaaggaacccagacacctgcagctgctggccgacctggaggacagcaacatcttctccctgatcgctggcaggaagcagtacaacgcccctacagaccacgggctctgcataaagccaaacaaagtcaggaatgaaactaaagagctgaggttgctctgtgcagaggacgagcaaaccaggacgtgctggatgacagcgttcagactcctcaagtatggaatgctcctttaccagaattaccgaatccctcagcagaggaaggccttgctgtccccgttctcgacgccagtgcgcagtgtctccgagaactccctcgtggcaatggatttttctgggcaaacaggacgcgtgatagagaatccggcagaggcccagagcgcagccctggaggagggccacgcctggaggaagcgaagcacacggatgaacatcctaggtagccaaagtcccctccacccttctaccctaagtacagtgattcacaggacacagcactggtttcacgggaggatctccagggaggaatcccacaggatcattaaacagcaagggctcgtggatgggctttttctcctccgtgacagccagagtaatccaaaggcatttgtactcacactgtgtcatcaccagaaaattaaaaatttccagatcttaccttgcgaggacgacgggcagacgttcttcagcctagatgacgggaacaccaaattctctgacctgatccagctggttgacttttaccagctgaacaaaggagtcctgccttgcaaactcaagcaccactgcatccgagtggccttatgaccgcagatgtcctctcggctgaagactggaggaagtgaacactggagtgaagaagcggtctgtgcgttggtgaagaacacacatcgattctgcacctggggacccagagcgagatgggtttgttcggtgccagccgaccaagattgactagtttgttggacttaaacgacgatttgctgctgtgaacccagcagggtcgcctccctctgcatcggccaaattggggagggcatggaagatccagcggaaagttgaaaataaactggaatgatcatcttggcttgggccgcttaggaacaagaaccggagagaagtgattggaaatgaactcttgccctggaataatcttgacaattaaaactgatatgtttactttttttgtattgatcacttttttgcactccttctttgttttcaatattgtattcagcctattgtaggagggggatgtggcgtttcaactcatataatacagaaagagttttgaatgggcagatttcaaactgaatatgggtccccaaatgttcccagagggtcctccacaccctctgccgactaccacggtgtggattcagctcccaaatgacaaacccagcccttccca

SEQ ID NO: 138919 - DNA, 5432 bp, Homo sapiens
  Payload ID: 7220
  Gene Symbol: GRB10
  Gene Name: growth factor receptor-bound protein 10
  Uniprot ID: Q13322
  ENST ID: ENST00000403097
  CDS Start-End: 782-2548
ggcagccgggcgccccgcggggctctccgcgctgcgttcccgacccctggggggaggtgtggagtccaagcggtgcattcttgaaccatcttgtcagacgccggcggctcgcgggctgtggcgggggctgcggtcaaggccgcgctcctgggggccgccgcctgggagggtgggcgcccaggcgtccctgcagccccgggtgctccgactgcgcggcggggccgcggcgcgcgcgcccgggcgtccgggcgtccgggacagtggtgccagacactcccaaatcccgagccggcccagcctcgtacggaggaccttttttttggttctgttggtgacccgttagccgccgctggggcctaacaccaagttgagggctcgcggattagccgcccgccagccgtggaaatgtgataagagcggtaccgtttgcagaaggaaatttctgatgcaactcttcgcctttgctgattgcctctccaaacgcctgcctgacgactgccttggagcatgtgcgttatggaaattaggctttggcgctgaccacaatgctgagcaggaagcagcagctgcaggcccagtgactggtagctcagtgaccagcagcccagtgaccggcagccaggtcctcacctgggtcctctcagtgaagccagggtggccgccccagcagacagtgctacagagccaactcctgacaggttctgaaaatattgtgcacagggcaggctgaggacacagccacgtgatacccactgtagagagagggagagagagacctcctatgcaagctgccggccctctgttccgtagtaaggacaaggtggagcagacacctcgcagtcaacaagacccggcaggaccaggactccccgcacagtctgaccgacttgcgaatcaccaggaggatgatgtggacctggaagccctggtgaacgatatgaatgcatccctggagagcctgtactcggcctgcagcatgcagtcagacacggtgcccctcctgcagaatggccagcatgcccgcagccagcctcgggcttcaggccctcctcggtccatccagccacaggtgtccccgaggcagagggtgcagcgctcccagcctgtgcacatcctcgctgtcaggcgccttcaggaggaagaccagcagtttagaacctcatctctgccggccatccccaatccttttcctgaactctgtggccctgggagcccccctgtgctcacgccgggttctttacctccgagccaggccgccgcaaagcaggatgttaaagtctttagtgaagatgggacaagcaaagtggtggagattctagcagacatgacagccagagacctgtgccaattgctggtttacaaaagtcactgtgtggatgacaacagctggacactagtggagcaccacccgcacctaggattagagaggtgcttggaagaccatgagctggtggtccaggtggagagtaccatggccagtgagagtaaatttctattcaggaagaattacgcaaaatacgagttctttaaaaatcccatgaatttcttcccagaacagatggttacttggtgccagcagtcaaatggcagtcaaacccagcttttgcagaattttctgaactccagtagttgtcctgaaattcaagggtttttgcatgtgaaagagctgggaaagaaatcatggaaaaagctgtatgtgtgtttgcggagatctggcctttattgctccaccaagggaacttcaaaggaacccagacacctgcagctgctggccgacctggaggacagcaacatcttctccctgatcgctggcaggaagcagtacaacgcccctacagaccacgggctctgcataaagccaaacaaagtcaggaatgaaactaaagagctgaggttgctctgtgcagaggacgagcaaaccaggacgtgctggatgacagcgttcagactcctcaagtatggaatgctcctttaccagaattaccgaatccctcagcagaggaaggccttgctgtccccgttctcgacgccagtgcgcagtgtctccgagaactccctcgtggcaatggatttttctgggcaaacaggacgcgtgatagagaatccggcagaggcccagagcgcagccctggaggagggccacgcctggaggaagcgaagcacacggatgaacatcctaggtagccaaagtcccctccacccttctaccctaagtacagtgattcacaggacacagcactggtttcacgggaggatctccagggaggaatcccacaggatcattaaacagcaagggctcgtggatgggctttttctcctccgtgacagccagagtaatccaaaggcatttgtactcacactgtgtcatcaccagaaaattaaaaatttccagatcttaccttgcgaggacgacgggcagacgttcttcagcctagatgacgggaacaccaaattctctgacctgatccagctggttgacttttaccagctgaacaaaggagtcctgccttgcaaactcaagcaccactgcatccgagtggccttatgaccgcagatgtcctctcggctgaagactggaggaagtgaacactggagtgaagaagcggtctgtgcgttggtgaagaacacacatcgattctgcacctggggacccagagcgagatgggtttgttcggtgccagccgaccaagattgactagtttgttggacttaaacgacgatttgctgctgtgaacccagcagggtcgcctccctctgcatcggccaaattggggagggcatggaagatccagcggaaagttgaaaataaactggaatgatcatcttggcttgggccgcttaggaacaagaaccggagagaagtgattggaaatgaactcttgccctggaataatcttgacaattaaaactgatatgtttactttttttgtattgatcacttttttgcactccttctttgttttcaatattgtattcagcctattgtaggagggggatgtggcgtttcaactcatataatacagaaagagttttgaatgggcagatttcaaactgaatatgggtccccaaatgttcccagagggtcctccacaccctctgccgactaccacggtgtggattcagctcccaaatgacaaacccagcccttcccagtatacttgaaaagctttcttgttaaaataaaaggtgtcactgtggtaggcatttggcatattttgtggactcagtcaagcaaccacagtctgttaatcatttctctatgctcagatgtcagatcctcttgttattagtgtgtcttgttctgcacagtgcaggagactttattcctttggaaaattcactgttccacaaacagcaggctgaatggcctcgcctctagattgacgtgggccagcctccttgagacacacctggcacccgtcatcggccagcggtggatgctgcataatccacctgggtacttcagccttgcgtttccacagccttcagcctgttctagaacgatcactgccttacccctgctgctgcagtggtgtgagtcgtttcacggctgatgtccctcgggggattaaaggatctaaagagaaaatggcacctggttgtcttcgtgctgtgtctcatgggtttccatagtgataaagacaaggaaacgctgcaggggccacaggcacaggctgatatttaaagatctttgcttgcagccctccgtcctgctgaaaacccccataagccagtgaacacagagcagctagaggctcctcctctgctggcttagggtcagaagtacctcacagtggttgtggacatggaagagttttgtcaacacaacactttgtccccgctccgggagatgagtcagatggtggcttgagttgtcacttggtcccctccgcccctcgggtggccccctttgccacgtccccttagcttagtgatcaggtgtgagagtggccatttccttacctttgatccctgtaaagcagaaaggactcctttgacaggcgacaaactactgtggtgagcagaatgatttcctttttcaagacaacacctgcctggcttctattaatgtgtgctggccatgatattgccccaaatccgccccactgaagtgttccctaaggaacagcatttctctgctcctcagtcaacccccgtagcctagagcagtgtcacaagcttcagtaaggccagtcagctggaagtcagtctaccgtatagtaacactgtatgtcagtctacagaccacactctagttgttttccatgaaaggtatacaaatgaagaattttctagcaaaacatgtttttaaccatcagtgctcaattgcattttcttcctttcgcagccagtcagtctttcaaactattgacagtaagataattctcacgttcacacctggtggcaggcttcactgtagggacggacattgcagttacaccacgattccttcctcttcactggctcgaggtaaacccttttcaaggaaaaacaactctaggatttcttttttctgtgtacgtagaccagtcccatcagtgtataatctctctctcacacgcctctctccaatagacagcttgtatttgcagtatttcatatttataaatatgcgtttatttaaaaggagaacaaaagcttgactctgattcacagttttgtatgtagctggtttgacgtagtcttttgtattttccctgccgaagtgaattgttggagaatgtaaaccgcctccacgtggcggcagacttcctaaggccccagctcgctggcctcgcgctgggcggctgggaattccacctgagaacaagtcccgcaaaccggggacggaaggacatttgacttttatttttgtatttaattgacatgaatgtaaaggggacagctcagggttgttttggagcctgttgactttgtatctctgcctgtgattttcttttctaaatgaaactccatgtagcaaccaggacgaagttgagaaggaaaacgccaaatgctttggttattagagtttaataggtaagctctgttacactaggtgttagagttccagaatgttcttttgtttgctaaaccttgaagaaacatgtgcctcagcctagatgttttgtcttctcttttctgcacttaatacctgacagtatgaccgatctctgcgcctttctgggggcgggcaagctggcggtagatttgtgatgtcacagtgcaaactgcagtgactgtaaattggcctggcgtgtataaacgttttcagggaatgcagaaggtattaatgaagagacaaaacctttattccatgtgctttgcttcattctgtacatagctctttggctcgtgaacctaattgtaaactttcaggtatttttgtacaaataagggactgatgttctgtttcttgtaattagaaataaacattaatacagtgttcttca

SEQ ID NO: 138920 - DNA, 2289 bp, Homo sapiens
  Payload ID: 7220
  Gene Symbol: GRB10
  Gene Name: growth factor receptor-bound protein 10
  Uniprot ID: Q13322
  ENST ID: ENST00000402497
  CDS Start-End: 337-1947
gaagcgagctgcggccgggcgggctcggcgctcggagacccggtggagcccaaagtttccgcgcagcccctgggtggcggcagcgccggcggcgcggggcgcccgggacagtcttgagcgccggcctcgccccgcggggacccgcgcccgccgccggccacgccgagtgtcgcccgcagccacgcggaggcggcggggagccgcgcgcggcaggacaaggtggagcagacacctcgcagtcaacaagacccggcaggaccaggactccccgcacagtctgaccgacttgcgaatcaccaggaggatgatgtggacctggaagccctggtgaacgatatgaatgcatccctggagagcctgtactcggcctgcagcatgcagtcagacacggtgcccctcctgcagaatggccagcatgcccgcagccagcctcgggcttcaggccctcctcggtccatccagccacaggtgtccccgaggcagagggtgcagcgctcccagcctgtgcacatcctcgctgtcaggcgccttcaggaggaagaccagcagtttagaacctcatctctgccggccatccccaatccttttcctgaactctgtggccctgggagcccccctgtgctcacgccgggttctttacctccgagccaggccgccgcaaagcaggatgttaaagtctttagtgaagatgggacaagcaaagtggtggagattctagcagacatgacagccagagacctgtgccaattgctggtttacaaaagtcactgtgtggatgacaacagctggacactagtggagcaccacccgcacctaggattagagaggtgcttggaagaccatgagctggtggtccaggtggagagtaccatggccagtgagagtaaatttctattcaggaagaattacgcaaaatacgagttctttaaaaatcccatgaatttcttcccagaacagatggttacttggtgccagcagtcaaatggcagtcaaacccagcttttgcagaattttctgaactccagtagttgtcctgaaattcaagggtttttgcatgtgaaagagctgggaaagaaatcatggaaaaagctgtatgtgtgtttgcggagatctggcctttattgctccaccaagggaacttcaaaggaacccagacacctgcagctgctggccgacctggaggacagcaacatcttctccctgatcgctggcaggaagcagtacaacgcccctacagaccacgggctctgcataaagccaaacaaagtcaggaatgaaactaaagagctgaggttgctctgtgcagaggacgagcaaaccaggacgtgctggatgacagcgttcagactcctcaagtatggaatgctcctttaccagaattaccgaatccctcagcagaggaaggccttgctgtccccgttctcgacgccagtgcgcagtgtctccgagaactccctcgtggcaatggatttttctgggcaaacaggacgcgtgatagagaatccggcagaggcccagagcgcagccctggaggagggccacgcctggaggaagcgaagcacacggatgaacatcctaggtagccaaagtcccctccacccttctaccctaagtacagtgattcacaggacacagcactggtttcacgggaggatctccagggaggaatcccacaggatcattaaacagcaagggctcgtggatgggctttttctcctccgtgacagccagagtaatccaaaggcatttgtactcacactgtgtcatcaccagaaaattaaaaatttccagatcttaccttgcgaggacgacgggcagacgttcttcagcctagatgacgggaacaccaaattctctgacctgatccagctggttgacttttaccagctgaacaaaggagtcctgccttgcaaactcaagcaccactgcatccgagtggccttatgaccgcagatgtcctctcggctgaagactggaggaagtgaacactggagtgaagaagcggtctgtgcgttggtgaagaacacacatcgattctgcacctggggacccagagcgagatgggtttgttcggtgccagccgaccaagattgactagtttgttggacttaaacgacgatttgctgctgtgaacccagcagggtcgcctccctctgcatcggccaaattggggagggcatggaagatccagcggaaagttgaaaataaactggaatgatcatcttggcttgggccgcttaggaacaagaaccggagagaagtgattggaaatgaactcttgccctggaa

SEQ ID NO: 138921 - DNA, 2627 bp, Homo sapiens
  Payload ID: 7220
  Gene Symbol: GRB10
  Gene Name: growth factor receptor-bound protein 10
  Uniprot ID: Q13322
  ENST ID: ENST00000401949
  CDS Start-End: 471-2255
cagcccggcccggctccgagcgctgtccatgcggagcgctgtccacgcgccgggcactgcgggggccgggccccgaagccctacccgggccggcggcgcacacgcagcgaccccgtgcggccagtgctgccgcccgctctccagacttgggaggctgcattctgataattctcaggaggaagaatgtataggagagaccagggtttttaaggtgtgacctctgaaccacctacatcagagctgactgcctctcgctttggcgctgaccacaatgctgagcaggaagcagcagctgcaggcccagtgactggtagctcagtgaccagcagcccagtgaccggcagccaggtcctcacctgggtcctctcagtgaagccagggtggccgccccagcagacagtgctacagagccaactcctgacaggtgctgcagcgcagtaaatgtaatttgaagaaggcagaaggaacccatggctttagccggctgcccagattcctttttgcaccatccgtactaccaggacaaggtggagcagacacctcgcagtcaacaagacccggcaggaccaggactccccgcacagtctgaccgacttgcgaatcaccaggaggatgatgtggacctggaagccctggtgaacgatatgaatgcatccctggagagcctgtactcggcctgcagcatgcagtcagacacggtgcccctcctgcagaatggccagcatgcccgcagccagcctcgggcttcaggccctcctcggtccatccagccacaggtgtccccgaggcagagggtgcagcgctcccagcctgtgcacatcctcgctgtcaggcgccttcaggaggaagaccagcagtttagaacctcatctctgccggccatccccaatccttttcctgaactctgtggccctgggagcccccctgtgctcacgccgggttctttacctccgagccaggccgccgcaaagcaggatgttaaagtctttagtgaagatgggacaagcaaagtggtggagattctagcagacatgacagccagagacctgtgccaattgctggtttacaaaagtcactgtgtggatgacaacagctggacactagtggagcaccacccgcacctaggattagagaggtgcttggaagaccatgagctggtggtccaggtggagagtaccatggccagtgagagtaaatttctattcaggaagaattacgcaaaatacgagttctttaaaaatcccatgaatttcttcccagaacagatggttacttggtgccagcagtcaaatggcagtcaaacccagcttttgcagaattttctgaactccagtagttgtcctgaaattcaagggtttttgcatgtgaaagagctgggaaagaaatcatggaaaaagctgtatgtgtgtttgcggagatctggcctttattgctccaccaagggaacttcaaaggaacccagacacctgcagctgctggccgacctggaggacagcaacatcttctccctgatcgctggcaggaagcagtacaacgcccctacagaccacgggctctgcataaagccaaacaaagtcaggaatgaaactaaagagctgaggttgctctgtgcagaggacgagcaaaccaggacgtgctggatgacagcgttcagactcctcaagtatggaatgctcctttaccagaattaccgaatccctcagcagaggaaggccttgctgtccccgttctcgacgccagtgcgcagtgtctccgagaactccctcgtggcaatggatttttctgggcaaacaggacgcgtgatagagaatccggcagaggcccagagcgcagccctggaggagggccacgcctggaggaagcgaagcacacggatgaacatcctaggtagccaaagtcccctccacccttctaccctaagtacagtgattcacaggacacagcactggtttcacgggaggatctccagggaggaatcccacaggatcattaaacagcaagggctcgtggatgggctttttctcctccgtgacagccagagtaatccaaaggcatttgtactcacactgtgtcatcaccagaaaattaaaaatttccagatcttaccttgcgaggacgacgggcagacgttcttcagcctagatgacgggaacaccaaattctctgacctgatccagctggttgacttttaccagctgaacaaaggagtcctgccttgcaaactcaagcaccactgcatccgagtggccttatgaccgcagatgtcctctcggctgaagactggaggaagtgaacactggagtgaagaagcggtctgtgcgttggtgaagaacacacatcgattctgcacctggggacccagagcgagatgggtttgttcggtgccagccgaccaagattgactagtttgttggacttaaacgacgatttgctgctgtgaacccagcagggtcgcctccctctgcatcggccaaattggggagggcatggaagatccagcggaaagttgaaaataaactggaatgatcatcttggcttgggccgcttaggaacaagaaccggagagaagtgattggaaatgaactcttgccctggaataatcttgacaattaaaactgatatgttta

SEQ ID NO: 138922 - DNA, 484 bp, Homo sapiens
  Payload ID: 7220
  Gene Symbol: GRB10
  Gene Name: growth factor receptor-bound protein 10
  ENST ID: ENST00000428711
  CDS Start-End: 1-327
ctagcagacatgacagccagagacctgtgccaattgctggtttacaaaagtcactgtgtggatgacaacagctggacactagtggagcaccacccgcacctaggattagagaggtgcttggaagaccatgagctggtggtccaggtggagagtaccatggccagtgagagtaaatttctattcaggaagaattacgcaaaatacgagttctttaaaaatcccatgaatttcttcccagaacagatggttacttggtgccagcagtcaaatggcagtcaaacccagcttttgcaggtactgggccacaatagatctctgctgaaatagactttctgaatagaaatcctcttggaactgaatggcagcattgtaaaaaacctaaagagatcgcatctttcaccatttataaccttggctcttaagccggaggggtggttggggggagggtttagagtaaccagaaattaaaagtttccttggaaaa

SEQ ID NO: 138923 - DNA, 733 bp, Homo sapiens
  Payload ID: 7220
  Gene Symbol: GRB10
  Gene Name: growth factor receptor-bound protein 10
  ENST ID: ENST00000439044
  CDS Start-End: 390-733
cgagctgcggccgggcgggctcggcgctcggagacccggtggagcccaaagtttccgcgcagcccctgggtggcggcagcgccggcggcgcggggcgcccgggacagtcttgagcgccggcctcgccccgcggggacccgcgcccgccgccggccacgccgagtgtcgcccgcagccacgcggaggcggcggggagccgcgcgcggcaggtgctgcagcgcagtaaatgtaatttgaagaaggcagaaggaacccatggctttagccggctgcccagattcctttttgcaccatccgtactaccaggttctgaaaatattgtgcacagggcaggctgaggacacagccacgtgatacccactgtagagagagggagagagagacctcctatgcaagctgccggccctctgttccgtagtaaggacaaggtggagcagacacctcgcagtcaacaagacccggcaggaccaggactccccgcacagtctgaccgacttgcgaatcaccaggaggatgatgtggacctggaagccctggtgaacgatatgaatgcatccctggagagcctgtactcggcctgcagcatgcagtcagacacggtgcccctcctgcagaatggccagcatgcccgcagccagcctcgggcttcaggccctcctcggtccatccagccacaggtgtccccgaggcagagggtgcagcgctcccagcctgtgcacatcctcgctgtcag

SEQ ID NO: 138924 - DNA, 2382 bp, Homo sapiens
  Payload ID: 7221
  Gene Symbol: GRB14
  Gene Name: growth factor receptor-bound protein 14
  Uniprot ID: Q14449
  ENST ID: ENST00000263915
  CDS Start-End: 540-2162
atgagggtcagggctgcgcggacccctatcccgcctgcggtcctcccggcaagcccagcgggagcgcccgctcggctgggtccccgcctccagcggcgccggggccgcccagaccctgggctcagcctcgcgccccggtgcccacctgaggaggcagcggtcccggcctcgcgtcccggatgggacggcgcgggagcaatgccagtggccccgagcgccccgggccacgcgcggggccggccagccgctctcgcgccctccccgccccctccgcgccttgcctcgccgcccgcggcccccacccaccggccgctcctcccctctccccaccctcctcctccgccccctcccctcccccgccgcctcgcagatagctcggccgcgcgtctcagccgccggggccccgagcgcaggcggcgaggccaccacacctgcagagcgctcgggctgcctagccggcacctcgcctcccgccgcgcaaaccccttctccccacgcgccgagtctcccatgacgcccgagccccccggccggcgacaatgaccacttccctgcaagatgggcagagcgccgcgagcagggcggctgcccgggattcgccgctggccgcccaggtgtgtggcgctgcccaggggaggggcgacgcccacgacctggcgccggccccctggctgcacgcgcgagcgctcctgccccttccggacgggacccgcggctgtgctgcagacaggagaaaaaagaaagatcttgatgttccggaaatgccatctattccaaacccttttcctgagctatgctgttctccatttacatctgtgttgtcagcagacctatttcccaaagcaaattcaaggaaaaaacaggtgattaaagtatacagtgaagatgaaaccagcagggctttagatgtacccagtgacataacggctcgagatgtttgtcagctgttgatcctgaagaatcattacattgatgaccacagctggaccctttttgagcacctgcctcacataggtgtagaaagaacaatagaagaccacgaactggtgattgaagtgctatccaactgggggatagaagaagaaaacaaactatactttagaaaaaattatgccaaatatgagttctttaaaaacccaatgtatttttttccagagcatatggtatcttttgcaactgaaaccaatggtgaaatatcccccacacagattttgcagatgtttctgagttcaagcacatatcctgaaattcatggtttcttacatgcgaaagaacagggaaagaagtcttggaaaaaaatttacttttttctaagaagatctggtttatatttttctactaaaggaacatcaaaggaaccgcggcatttgcagtttttcagcgaatttggcaatagtgatatttatgtgtcactggcaggcaaaaaaaaacatggagcaccgactaactatggattctgctttaagcctaacaaagcgggagggccccgagacctgaaaatgctctgtgcagaagaagagcagagtaggacgtgctgggtgaccgcgattagattgcttaagtatggcatgcagctgtaccagaattatatgcatccatatcaaggtagaagtggctgcagttcacagagcatatcacctatgagaagtatatcagagaattccctggtagcaatggacttctcaggccagaaaagcagagttatagaaaatcccactgaagccctttcagttgcggttgaagaaggactcgcttggaggaaaaaaggatgtttacgcctgggcactcacggtagccccactgcctcttcacagagctctgccacaaacatggctatccaccggtcccagccatggtttcaccacaaaatttctagagatgaggctcagcgattgattattcagcaaggacttgtggatggagttttcttggtacgggatagtcagagtaaccccaaaactttcgtactgtcaatgagtcatggacaaaaaataaagcactttcaaattataccagtagaagatgacggtgaaatgttccacacactggatgatggccacacaagatttacagatctaatacagctggtggagttctatcaactcaataagggcgttcttccttgcaagttgaaacattattgtgctaggattgctctctagacaagccagaagtgacttattaaactattgaaggaaaaggactcaagaaaaataataaaagaccataaataagggcgaaaacattaccatgtgaaaagaatgtatttcacctgcaagttacaaaaaaatagtttgtgcattgcaaataagcaaagacttggattgactttacattcatcatttaaaattcattagttaaaattaaaccttaggaaaaaaa

SEQ ID NO: 138925 - DNA, 587 bp, Homo sapiens
  Payload ID: 7221
  Gene Symbol: GRB14
  Gene Name: growth factor receptor-bound protein 14
  ENST ID: ENST00000424693
  CDS Start-End: 122-587
cttttctatatactttatataatatgagccttgtcacagagtggtacatgttcgccttagcacactttttattcctgacagcaattatattttacattctgttttatgtaaattacatcctatgttctcttactgtaggagaaaaaagaaagatcttgatgttccggaaatgccatctattccaaacccttttcctgagctatgctgttctccatttacatctgtgttgtcagcagacctatttcccaaagcaaattcaaggaaaaaacaggtgattaaagtatacagtgaagatgaaaccagcagggctttagatgtacccagtgacataacggctcgagatgtttgtcagctgttgatcctgaagaatcattacattgatgaccacagctggaccctttttgagcacctgcctcacataggtgtagaaagaacaatagaagaccacgaactggtgattgaagtgctatccaactgggggatagaagaagaaaacaaactatactttagaaaaaattatgccaaatatgagttctttaaaaacccaatgtatttttttccagagcatatggtatcttttgcaactg

SEQ ID NO: 138926 - DNA, 1435 bp, Homo sapiens
  Payload ID: 7221
  Gene Symbol: GRB14
  Gene Name: growth factor receptor-bound protein 14
  ENST ID: ENST00000446413
  CDS Start-End: 189-1435
atagctcggccgcgcgtctcagccgccggggccccgagcgcaggcggcgaggccaccacacctgcagagcgctcgggctgcctagccggcacctcgcctcccgccgcgcaaaccccttctccccacgcgccgagtctcccatgacgcccgagccccccggccggcgacaatgaccacttccctgcaagatgggcagagcgccgcgagcagggcggctgcccgggattcgccgctggccgcccaggagaaaaaagaaagatcttgatgttccggaaatgccatctattccaaacccttttcctgagctatgctgttctccatttacatctgtgttgtcagcagacctatttcccaaagcaaattcaaggaaaaaacaggtgattaaagtatacagtgaagatgaaaccagcagggctttagatgtacccagtgacataacggctcgagatgtttgtcagctgttgatcctgaagaatcattacattgatgaccacagctggaccctttttgagcacctgcctcacataggtgtagaaagaacaatagaagaccacgaactggtgattgaagtgctatccaactgggggatagaagaagaaaacaaactatactttagaaaaaattatgccaaatatgagttctttaaaaacccaatgtatttttttccagagcatatggtatcttttgcaactgaaaccaatggtgaaatatcccccacacagattttgcagatgtttctgagttcaagcacatatcctgaaattcatggtttcttacatgcgaaagaacagggaaagaagtcttggaaaaaaatttacttttttctaagaagatctggtttatatttttctactaaaggaacatcaaaggaaccgcggcatttgcagtttttcagcgaatttggcaatagtgatatttatgtgtcactggcaggcaaaaaaaaacatggagcaccgactaactatggattctgctttaagcctaacaaagcgggagggccccgagacctgaaaatgctctgtgcagaagaagagcagagtaggacgtgctgggtgaccgcgattagattgcttaagtatggcatgcagctgtaccagaattatatgcatccatatcaaggtagaagtggctgcagttcacagagcatatcacctatgagaagtatatcagagaattccctggtagcaatggacttctcaggccagaaaagcagagttatagaaaatcccactgaagccctttcagttgcggttgaagaaggactcgcttggaggaaaaaaggatgtttacgcctgggcactcacggtagccccactgcctcttcacagagctctgccacaaacatggctatccaccggtcccagccatggtttcaccacaaaatttctagagatgaggctcagcgattgattattcagcaaggacttgtggatgg

SEQ ID NO: 138927 - DNA, 3181 bp, Homo sapiens
  Payload ID: 7222
  Gene Symbol: GRB2
  Gene Name: growth factor receptor-bound protein 2
  Uniprot ID: P62993
  ENST ID: ENST00000316615
  CDS Start-End: 359-889
aagttctcgcgggacaccgacggggagcggaagccaggaggtattgctgcttcggcgaccgggcggcggcagcggcggcggcggctgtggcagagtctgtgcctgtggcggtgacggcggcgggagcaagcgctgccctcgcagagcagccttggggtcgccggccgctcgcagcgttgtggaggggcgggccggacgctgagcggagcagctgcgccacgggtggcattgtgtgtcccagagtgccggagcgagtcccagaagagaggcgaggctaagcccagagcgctgggttgcttcagcagggaagactcccttccccctgcttcaggctgctgagcactgagcagcgctcagaatggaagccatcgccaaatatgacttcaaagctactgcagacgacgagctgagcttcaaaaggggggacatcctcaaggttttgaacgaagaatgtgatcagaactggtacaaggcagagcttaatggaaaagacggcttcattcccaagaactacatagaaatgaaaccacatccgtttggaaacgatgtgcagcacttcaaggtgctccgagatggagccgggaagtacttcctctgggtggtgaagttcaattctttgaatgagctggtggattatcacagatctacatctgtctccagaaaccagcagatattcctgcgggacatagaacaggtgccacagcagccgacatacgtccaggccctctttgactttgatccccaggaggatggagagctgggcttccgccggggagattttatccatgtcatggataactcagaccccaactggtggaaaggagcttgccacgggcagaccggcatgtttccccgcaattatgtcacccccgtgaaccggaacgtctaagagtcaagaagcaattatttaaagaaagtgaaaaatgtaaaacacatacaaaagaattaaacccacaagctgcctctgacagcagcctgtgagggagtgcagaacacctggccgggtcaccctgtgaccctctcactttggttggaactttagggggtgggagggggcgttggatttaaaaatgccaaaacttacctataaattaagaagagtttttattacaaattttcactgctgctcctctttcccctcctttgtcttttttttcatccttttttctcttctgtccatcagtgcatgacgtttaaggccacgtatagtcctagctgacgccaataataaaaaacaagaaaccaagtgggctggtattctctctatgcaaaatgtctgttttagttggaatgactgaaagaagaacagctgttcctgtgttcttcgtatatacacacaaaaaggagcgggcagggccgctcgatgcctttgctgtttagcttcctccagaggaggggacttgtaggaatctgccttccagcccagacccccagtgtattttgtccaagttcacagtagagtagggtagaaggaaagcatgtctctgcttccatggcttcctgagaaagcccacctgggctgggcgcggtggctcacgcctgtaatcccagcactttgggaggccaaggtgggcggatcacaaggtcaggagttcgagaccaacctagccaacatggtgaaaccccgtctctactaaaaataagaaattagccgggtgtggcacgcacctgtagtcccagctacttgggagcctgaggcaggagaatcgcttgaacctgggaagtggaggttgagtgagccgggaccgtgccattgtactccagcctgggtgacagagcgagattccgtctcaaaaaaaaaaaaaaaaagcccacctgaaagcctgtctctttccactttgttggcccttccagtgggattatcgagcatgttgttttttcatagtgcctttttccttatttcaagggttgcttctgagtggtgttttttttttttttttaatttgttttgttttaaaataagttaaaggcagtccagagcttttcagccaatttgtctcctactctgtgtaaatatttttccctccgggcaggggagccagggtagagcaaaggagacaaagcaggagtggaaggtgaggcgttctcctgcttgtactaagccaggaggctttaagctccagctttaagggttgtgagccccttgggggttcagggaactgcttgcccagggtgcagtgtgagtgtgatgggccaccggggcaagagggaaggtgaccgcccagctctcccacatcccactggatctggcttacaggggggtcggaagcctgtcctcaccgtctcgggggttgtggcccccgccccctccctatatgcacccctggaaccagcaagtcccagacaaggagagcggaggaggaagtcatgggaacgcagcctccagttgtagcaggtttcactattcctatgctggggtacacagtgagagtactcacttttcacttgtcttgctcttagattgggccatggctttcatcctgtgtcccctgacctgtccaggtgagtgtgagggcagcactgggaagctggagtgctgcttgtgcctcccttcccagtgggctgtgttgactgctgctccccacccctaccgatggtcccaggaagcagggagagttggggaaggcaagattggaaagacaggaagaccaaggcctcggcagaactctctgtcttctctccacttctggtcccctgtggtgatgtgcctgtaatctttttctccacccaaaccccttcccacgacaaaaacaagactgcctccctctcttccgggagctggtgacagccttgggcctttcagtcccaaagcggccgatgggagtctccctccgactccagatatgaacagggcccaggcctggagcgtttgctgtgccaggaggcggcagctcttctgggcagagcctgtccccgccttccctcactcttcctcatcctgcttctcttttcctcgcagatgataaaaggaatctggcattctacacctggaccatttgattgttttattttggaattggtgtatatcatgaagccttgctgaactaagttttgtgtgtatatatttaaaaaaaaaatcagtgtttaaataaagacctatgtacttaatcctttaactctgcggatagcatttggtaggtagtgattaactgtgaataataaatacacaatgaattcttca

SEQ ID NO: 138928 - DNA, 3248 bp, Homo sapiens
  Payload ID: 7222
  Gene Symbol: GRB2
  Gene Name: growth factor receptor-bound protein 2
  Uniprot ID: P62993
  ENST ID: ENST00000316804
  CDS Start-End: 303-956
gaccgggcggcggcagcggcggcggcggctgtggcagagtctgtgcctgtggcggtgacggcggcgggagcaagcgctgccctcgcagagcagccttggggtcgccggccgctcgcagcgttgtggaggggcgggccggacgctgagcggagcagctgcgccacgggtggcattgtgtgtcccagagtgccggagcgagtcccagaagagaggcgaggctaagcccagagcgctgggttgcttcagcagggaagactcccttccccctgcttcaggctgctgagcactgagcagcgctcagaatggaagccatcgccaaatatgacttcaaagctactgcagacgacgagctgagcttcaaaaggggggacatcctcaaggttttgaacgaagaatgtgatcagaactggtacaaggcagagcttaatggaaaagacggcttcattcccaagaactacatagaaatgaaaccacatccgtggttttttggcaaaatccccagagccaaggcagaagaaatgcttagcaaacagcggcacgatggggcctttcttatccgagagagtgagagcgctcctggggacttctccctctctgtcaagtttggaaacgatgtgcagcacttcaaggtgctccgagatggagccgggaagtacttcctctgggtggtgaagttcaattctttgaatgagctggtggattatcacagatctacatctgtctccagaaaccagcagatattcctgcgggacatagaacaggtgccacagcagccgacatacgtccaggccctctttgactttgatccccaggaggatggagagctgggcttccgccggggagattttatccatgtcatggataactcagaccccaactggtggaaaggagcttgccacgggcagaccggcatgtttccccgcaattatgtcacccccgtgaaccggaacgtctaagagtcaagaagcaattatttaaagaaagtgaaaaatgtaaaacacatacaaaagaattaaacccacaagctgcctctgacagcagcctgtgagggagtgcagaacacctggccgggtcaccctgtgaccctctcactttggttggaactttagggggtgggagggggcgttggatttaaaaatgccaaaacttacctataaattaagaagagtttttattacaaattttcactgctgctcctctttcccctcctttgtcttttttttcatccttttttctcttctgtccatcagtgcatgacgtttaaggccacgtatagtcctagctgacgccaataataaaaaacaagaaaccaagtgggctggtattctctctatgcaaaatgtctgttttagttggaatgactgaaagaagaacagctgttcctgtgttcttcgtatatacacacaaaaaggagcgggcagggccgctcgatgcctttgctgtttagcttcctccagaggaggggacttgtaggaatctgccttccagcccagacccccagtgtattttgtccaagttcacagtagagtagggtagaaggaaagcatgtctctgcttccatggcttcctgagaaagcccacctgggctgggcgcggtggctcacgcctgtaatcccagcactttgggaggccaaggtgggcggatcacaaggtcaggagttcgagaccaacctagccaacatggtgaaaccccgtctctactaaaaataagaaattagccgggtgtggcacgcacctgtagtcccagctacttgggagcctgaggcaggagaatcgcttgaacctgggaagtggaggttgagtgagccgggaccgtgccattgtactccagcctgggtgacagagcgagattccgtctcaaaaaaaaaaaaaaaaagcccacctgaaagcctgtctctttccactttgttggcccttccagtgggattatcgagcatgttgttttttcatagtgcctttttccttatttcaagggttgcttctgagtggtgttttttttttttttttaatttgttttgttttaaaataagttaaaggcagtccagagcttttcagccaatttgtctcctactctgtgtaaatatttttccctccgggcaggggagccagggtagagcaaaggagacaaagcaggagtggaaggtgaggcgttctcctgcttgtactaagccaggaggctttaagctccagctttaagggttgtgagccccttgggggttcagggaactgcttgcccagggtgcagtgtgagtgtgatgggccaccggggcaagagggaaggtgaccgcccagctctcccacatcccactggatctggcttacaggggggtcggaagcctgtcctcaccgtctcgggggttgtggcccccgccccctccctatatgcacccctggaaccagcaagtcccagacaaggagagcggaggaggaagtcatgggaacgcagcctccagttgtagcaggtttcactattcctatgctggggtacacagtgagagtactcacttttcacttgtcttgctcttagattgggccatggctttcatcctgtgtcccctgacctgtccaggtgagtgtgagggcagcactgggaagctggagtgctgcttgtgcctcccttcccagtgggctgtgttgactgctgctccccacccctaccgatggtcccaggaagcagggagagttggggaaggcaagattggaaagacaggaagaccaaggcctcggcagaactctctgtcttctctccacttctggtcccctgtggtgatgtgcctgtaatctttttctccacccaaaccccttcccacgacaaaaacaagactgcctccctctcttccgggagctggtgacagccttgggcctttcagtcccaaagcggccgatgggagtctccctccgactccagatatgaacagggcccaggcctggagcgtttgctgtgccaggaggcggcagctcttctgggcagagcctgtccccgccttccctcactcttcctcatcctgcttctcttttcctcgcagatgataaaaggaatctggcattctacacctggaccatttgattgttttattttggaattggtgtatatcatgaagccttgctgaactaagttttgtgtgtatatatttaaaaaaaaaatcagtgtttaaataaagacctatgtacttaatcctttaactctgcggatagcatttggtaggtagtgattaactgtgaataataaatacacaatgaattcttca

SEQ ID NO: 138929 - DNA, 3729 bp, Homo sapiens
  Payload ID: 7222
  Gene Symbol: GRB2
  Gene Name: growth factor receptor-bound protein 2
  Uniprot ID: P62993
  ENST ID: ENST00000392562
  CDS Start-End: 784-1437
gagtacgggaggctgcgctcggcgcctctctcgtgccttttcctcttggctctacagcgggagtgggccccgggggaaccgggaccggccccggggttcgcgtcggggcggcgaggcttgggacgtggagcgcaatccccggggctccggactctacgtttccccttttggggcgcttccttcctggggaccgtcctcctccggctcttggctctgggcagtccgggggaagaggtcggggttctctggcgaggtcccctgccttcatcgggagggtttgcacggaaggggcccgggaagcccaggcgggccgaacgccgaccgagtcagtctacccgagcctggcggcgggggactggtgtgggctgcagctgtggtgattgatgtgccttcgacctgcacggcaaccacgtcaccatctcctggcgtctttgggcttaattttgtgcgggaatccactttggggtggaacgtttgctgctggagccgggggagatacctttattctgacacttaaaaaaaaaaactatttgaaaaatatttgtcaagaaaaattcagcagtagcaggttggactgcaccgaggaaggattgcggcgagagcgggcgctggtaattttcatttgcagcgcgccctctctatgattggtggcattgtgtgtcccagagtgccggagcgagtcccagaagagaggcgaggctaagcccagagcgctgggttgcttcagcagggaagactcccttccccctgcttcaggctgctgagcactgagcagcgctcagaatggaagccatcgccaaatatgacttcaaagctactgcagacgacgagctgagcttcaaaaggggggacatcctcaaggttttgaacgaagaatgtgatcagaactggtacaaggcagagcttaatggaaaagacggcttcattcccaagaactacatagaaatgaaaccacatccgtggttttttggcaaaatccccagagccaaggcagaagaaatgcttagcaaacagcggcacgatggggcctttcttatccgagagagtgagagcgctcctggggacttctccctctctgtcaagtttggaaacgatgtgcagcacttcaaggtgctccgagatggagccgggaagtacttcctctgggtggtgaagttcaattctttgaatgagctggtggattatcacagatctacatctgtctccagaaaccagcagatattcctgcgggacatagaacaggtgccacagcagccgacatacgtccaggccctctttgactttgatccccaggaggatggagagctgggcttccgccggggagattttatccatgtcatggataactcagaccccaactggtggaaaggagcttgccacgggcagaccggcatgtttccccgcaattatgtcacccccgtgaaccggaacgtctaagagtcaagaagcaattatttaaagaaagtgaaaaatgtaaaacacatacaaaagaattaaacccacaagctgcctctgacagcagcctgtgagggagtgcagaacacctggccgggtcaccctgtgaccctctcactttggttggaactttagggggtgggagggggcgttggatttaaaaatgccaaaacttacctataaattaagaagagtttttattacaaattttcactgctgctcctctttcccctcctttgtcttttttttcatccttttttctcttctgtccatcagtgcatgacgtttaaggccacgtatagtcctagctgacgccaataataaaaaacaagaaaccaagtgggctggtattctctctatgcaaaatgtctgttttagttggaatgactgaaagaagaacagctgttcctgtgttcttcgtatatacacacaaaaaggagcgggcagggccgctcgatgcctttgctgtttagcttcctccagaggaggggacttgtaggaatctgccttccagcccagacccccagtgtattttgtccaagttcacagtagagtagggtagaaggaaagcatgtctctgcttccatggcttcctgagaaagcccacctgggctgggcgcggtggctcacgcctgtaatcccagcactttgggaggccaaggtgggcggatcacaaggtcaggagttcgagaccaacctagccaacatggtgaaaccccgtctctactaaaaataagaaattagccgggtgtggcacgcacctgtagtcccagctacttgggagcctgaggcaggagaatcgcttgaacctgggaagtggaggttgagtgagccgggaccgtgccattgtactccagcctgggtgacagagcgagattccgtctcaaaaaaaaaaaaaaaaagcccacctgaaagcctgtctctttccactttgttggcccttccagtgggattatcgagcatgttgttttttcatagtgcctttttccttatttcaagggttgcttctgagtggtgttttttttttttttttaatttgttttgttttaaaataagttaaaggcagtccagagcttttcagccaatttgtctcctactctgtgtaaatatttttccctccgggcaggggagccagggtagagcaaaggagacaaagcaggagtggaaggtgaggcgttctcctgcttgtactaagccaggaggctttaagctccagctttaagggttgtgagccccttgggggttcagggaactgcttgcccagggtgcagtgtgagtgtgatgggccaccggggcaagagggaaggtgaccgcccagctctcccacatcccactggatctggcttacaggggggtcggaagcctgtcctcaccgtctcgggggttgtggcccccgccccctccctatatgcacccctggaaccagcaagtcccagacaaggagagcggaggaggaagtcatgggaacgcagcctccagttgtagcaggtttcactattcctatgctggggtacacagtgagagtactcacttttcacttgtcttgctcttagattgggccatggctttcatcctgtgtcccctgacctgtccaggtgagtgtgagggcagcactgggaagctggagtgctgcttgtgcctcccttcccagtgggctgtgttgactgctgctccccacccctaccgatggtcccaggaagcagggagagttggggaaggcaagattggaaagacaggaagaccaaggcctcggcagaactctctgtcttctctccacttctggtcccctgtggtgatgtgcctgtaatctttttctccacccaaaccccttcccacgacaaaaacaagactgcctccctctcttccgggagctggtgacagccttgggcctttcagtcccaaagcggccgatgggagtctccctccgactccagatatgaacagggcccaggcctggagcgtttgctgtgccaggaggcggcagctcttctgggcagagcctgtccccgccttccctcactcttcctcatcctgcttctcttttcctcgcagatgataaaaggaatctggcattctacacctggaccatttgattgttttattttggaattggtgtatatcatgaagccttgctgaactaagttttgtgtgtatatatttaaaaaaaaaatcagtgtttaaataaagacctatgtacttaatcctttaactctgcggatagcatttggtaggtagtgattaactgtgaataataaatacacaatgaattcttca

SEQ ID NO: 138930 - DNA, 2851 bp, Homo sapiens
  Payload ID: 7222
  Gene Symbol: GRB2
  Gene Name: growth factor receptor-bound protein 2
  Uniprot ID: P62993
  ENST ID: ENST00000392563
  CDS Start-End: 29-559
ggctgctgagcactgagcagcgctcagaatggaagccatcgccaaatatgacttcaaagctactgcagacgacgagctgagcttcaaaaggggggacatcctcaaggttttgaacgaagaatgtgatcagaactggtacaaggcagagcttaatggaaaagacggcttcattcccaagaactacatagaaatgaaaccacatccgtttggaaacgatgtgcagcacttcaaggtgctccgagatggagccgggaagtacttcctctgggtggtgaagttcaattctttgaatgagctggtggattatcacagatctacatctgtctccagaaaccagcagatattcctgcgggacatagaacaggtgccacagcagccgacatacgtccaggccctctttgactttgatccccaggaggatggagagctgggcttccgccggggagattttatccatgtcatggataactcagaccccaactggtggaaaggagcttgccacgggcagaccggcatgtttccccgcaattatgtcacccccgtgaaccggaacgtctaagagtcaagaagcaattatttaaagaaagtgaaaaatgtaaaacacatacaaaagaattaaacccacaagctgcctctgacagcagcctgtgagggagtgcagaacacctggccgggtcaccctgtgaccctctcactttggttggaactttagggggtgggagggggcgttggatttaaaaatgccaaaacttacctataaattaagaagagtttttattacaaattttcactgctgctcctctttcccctcctttgtcttttttttcatccttttttctcttctgtccatcagtgcatgacgtttaaggccacgtatagtcctagctgacgccaataataaaaaacaagaaaccaagtgggctggtattctctctatgcaaaatgtctgttttagttggaatgactgaaagaagaacagctgttcctgtgttcttcgtatatacacacaaaaaggagcgggcagggccgctcgatgcctttgctgtttagcttcctccagaggaggggacttgtaggaatctgccttccagcccagacccccagtgtattttgtccaagttcacagtagagtagggtagaaggaaagcatgtctctgcttccatggcttcctgagaaagcccacctgggctgggcgcggtggctcacgcctgtaatcccagcactttgggaggccaaggtgggcggatcacaaggtcaggagttcgagaccaacctagccaacatggtgaaaccccgtctctactaaaaataagaaattagccgggtgtggcacgcacctgtagtcccagctacttgggagcctgaggcaggagaatcgcttgaacctgggaagtggaggttgagtgagccgggaccgtgccattgtactccagcctgggtgacagagcgagattccgtctcaaaaaaaaaaaaaaaaagcccacctgaaagcctgtctctttccactttgttggcccttccagtgggattatcgagcatgttgttttttcatagtgcctttttccttatttcaagggttgcttctgagtggtgttttttttttttttttaatttgttttgttttaaaataagttaaaggcagtccagagcttttcagccaatttgtctcctactctgtgtaaatatttttccctccgggcaggggagccagggtagagcaaaggagacaaagcaggagtggaaggtgaggcgttctcctgcttgtactaagccaggaggctttaagctccagctttaagggttgtgagccccttgggggttcagggaactgcttgcccagggtgcagtgtgagtgtgatgggccaccggggcaagagggaaggtgaccgcccagctctcccacatcccactggatctggcttacaggggggtcggaagcctgtcctcaccgtctcgggggttgtggcccccgccccctccctatatgcacccctggaaccagcaagtcccagacaaggagagcggaggaggaagtcatgggaacgcagcctccagttgtagcaggtttcactattcctatgctggggtacacagtgagagtactcacttttcacttgtcttgctcttagattgggccatggctttcatcctgtgtcccctgacctgtccaggtgagtgtgagggcagcactgggaagctggagtgctgcttgtgcctcccttcccagtgggctgtgttgactgctgctccccacccctaccgatggtcccaggaagcagggagagttggggaaggcaagattggaaagacaggaagaccaaggcctcggcagaactctctgtcttctctccacttctggtcccctgtggtgatgtgcctgtaatctttttctccacccaaaccccttcccacgacaaaaacaagactgcctccctctcttccgggagctggtgacagccttgggcctttcagtcccaaagcggccgatgggagtctccctccgactccagatatgaacagggcccaggcctggagcgtttgctgtgccaggaggcggcagctcttctgggcagagcctgtccccgccttccctcactcttcctcatcctgcttctcttttcctcgcagatgataaaaggaatctggcattctacacctggaccatttgattgttttattttggaattggtgtatatcatgaagccttgctgaactaagttttgtgtgtatatatttaaaaaaaaaatcagtgtttaaataaagacctatgtacttaatcctttaactctgcggatagcatttggtaggtagtgattaactgtgaataataaatacacaatgaattcttca

SEQ ID NO: 138931 - DNA, 3182 bp, Homo sapiens
  Payload ID: 7222
  Gene Symbol: GRB2
  Gene Name: growth factor receptor-bound protein 2
  Uniprot ID: P62993
  ENST ID: ENST00000392564
  CDS Start-End: 237-890
gagccagggggcgtgggggctgggacagcaggccgattggcagggcggggttgccttcaatcctggccactgctcttaatcgtccctctcctgcttcagggtggcattgtgtgtcccagagtgccggagcgagtcccagaagagaggcgaggctaagcccagagcgctgggttgcttcagcagggaagactcccttccccctgcttcaggctgctgagcactgagcagcgctcagaatggaagccatcgccaaatatgacttcaaagctactgcagacgacgagctgagcttcaaaaggggggacatcctcaaggttttgaacgaagaatgtgatcagaactggtacaaggcagagcttaatggaaaagacggcttcattcccaagaactacatagaaatgaaaccacatccgtggttttttggcaaaatccccagagccaaggcagaagaaatgcttagcaaacagcggcacgatggggcctttcttatccgagagagtgagagcgctcctggggacttctccctctctgtcaagtttggaaacgatgtgcagcacttcaaggtgctccgagatggagccgggaagtacttcctctgggtggtgaagttcaattctttgaatgagctggtggattatcacagatctacatctgtctccagaaaccagcagatattcctgcgggacatagaacaggtgccacagcagccgacatacgtccaggccctctttgactttgatccccaggaggatggagagctgggcttccgccggggagattttatccatgtcatggataactcagaccccaactggtggaaaggagcttgccacgggcagaccggcatgtttccccgcaattatgtcacccccgtgaaccggaacgtctaagagtcaagaagcaattatttaaagaaagtgaaaaatgtaaaacacatacaaaagaattaaacccacaagctgcctctgacagcagcctgtgagggagtgcagaacacctggccgggtcaccctgtgaccctctcactttggttggaactttagggggtgggagggggcgttggatttaaaaatgccaaaacttacctataaattaagaagagtttttattacaaattttcactgctgctcctctttcccctcctttgtcttttttttcatccttttttctcttctgtccatcagtgcatgacgtttaaggccacgtatagtcctagctgacgccaataataaaaaacaagaaaccaagtgggctggtattctctctatgcaaaatgtctgttttagttggaatgactgaaagaagaacagctgttcctgtgttcttcgtatatacacacaaaaaggagcgggcagggccgctcgatgcctttgctgtttagcttcctccagaggaggggacttgtaggaatctgccttccagcccagacccccagtgtattttgtccaagttcacagtagagtagggtagaaggaaagcatgtctctgcttccatggcttcctgagaaagcccacctgggctgggcgcggtggctcacgcctgtaatcccagcactttgggaggccaaggtgggcggatcacaaggtcaggagttcgagaccaacctagccaacatggtgaaaccccgtctctactaaaaataagaaattagccgggtgtggcacgcacctgtagtcccagctacttgggagcctgaggcaggagaatcgcttgaacctgggaagtggaggttgagtgagccgggaccgtgccattgtactccagcctgggtgacagagcgagattccgtctcaaaaaaaaaaaaaaaaagcccacctgaaagcctgtctctttccactttgttggcccttccagtgggattatcgagcatgttgttttttcatagtgcctttttccttatttcaagggttgcttctgagtggtgttttttttttttttttaatttgttttgttttaaaataagttaaaggcagtccagagcttttcagccaatttgtctcctactctgtgtaaatatttttccctccgggcaggggagccagggtagagcaaaggagacaaagcaggagtggaaggtgaggcgttctcctgcttgtactaagccaggaggctttaagctccagctttaagggttgtgagccccttgggggttcagggaactgcttgcccagggtgcagtgtgagtgtgatgggccaccggggcaagagggaaggtgaccgcccagctctcccacatcccactggatctggcttacaggggggtcggaagcctgtcctcaccgtctcgggggttgtggcccccgccccctccctatatgcacccctggaaccagcaagtcccagacaaggagagcggaggaggaagtcatgggaacgcagcctccagttgtagcaggtttcactattcctatgctggggtacacagtgagagtactcacttttcacttgtcttgctcttagattgggccatggctttcatcctgtgtcccctgacctgtccaggtgagtgtgagggcagcactgggaagctggagtgctgcttgtgcctcccttcccagtgggctgtgttgactgctgctccccacccctaccgatggtcccaggaagcagggagagttggggaaggcaagattggaaagacaggaagaccaaggcctcggcagaactctctgtcttctctccacttctggtcccctgtggtgatgtgcctgtaatctttttctccacccaaaccccttcccacgacaaaaacaagactgcctccctctcttccgggagctggtgacagccttgggcctttcagtcccaaagcggccgatgggagtctccctccgactccagatatgaacagggcccaggcctggagcgtttgctgtgccaggaggcggcagctcttctgggcagagcctgtccccgccttccctcactcttcctcatcctgcttctcttttcctcgcagatgataaaaggaatctggcattctacacctggaccatttgattgttttattttggaattggtgtatatcatgaagccttgctgaactaagttttgtgtgtatatatttaaaaaaaaaatcagtgtttaaataaagacctatgtacttaatcctttaactctgcggatagcatttggtaggtagtgattaactgtgaataataaatacacaatgaattcttca

SEQ ID NO: 138932 - DNA, 584 bp, Homo sapiens
  Payload ID: 7222
  Gene Symbol: GRB2
  Gene Name: growth factor receptor-bound protein 2
  ENST ID: ENST00000582582
  CDS Start-End: 253-584
agtgcacacccagcgggaaggaagaggaagtgtgttcaggaatagctcaggcagctgtgccattggccggcaggcctgtcagtcgcctgggggccgaggctgaaaagaggaagaaggtggcattgtgtgtcccagagtgccggagcgagtcccagaagagaggcgaggctaagcccagagcgctgggttgcttcagcagggaagactcccttccccctgcttcaggctgctgagcactgagcagcgctcagaatggaagccatcgccaaatatgacttcaaagctactgcagacgacgagctgagcttcaaaaggggggacatcctcaaggttttgaacgaagaatgtgatcagaactggtacaaggcagagcttaatggaaaagacggcttcattcccaagaactacatagaaatgaaaccacatccgtggttttttggcaaaatccccagagccaaggcagaagaaatgcttagcaaacagcggcacgatggggcctttcttatccgagagagtgagagcgctcctggggacttctccctctctgtcaagtttggaaacgatgtgcagcacttcaaggtgct

SEQ ID NO: 138933 - DNA, 359 bp, Homo sapiens
  Payload ID: 7222
  Gene Symbol: GRB2
  Gene Name: growth factor receptor-bound protein 2
  ENST ID: ENST00000581959
  CDS Start-End: 1-128
tcaattctttgaatgagctggtggattatcacagatctacatctgtctccagaaaccagcagatattcctgcgggacatagaacaggtgccacagattgggccatggctttcatcctgtgtcccctgacctgtccagatgataaaaggaatctggcattctacacctggaccatttgattgttttattttggaattggtgtatatcatgaagccttgctgaactaagttttgtgtgtatatatttaaaaaaaaaatcagtgtttaaataaagacctatgtacttaatcctttaactctgcggatagcatttggtaggtagtgattaactgtgaataataaatacacaatgaattcttca

SEQ ID NO: 138934 - DNA, 687 bp, Homo sapiens
  Payload ID: 7222
  Gene Symbol: GRB2
  Gene Name: growth factor receptor-bound protein 2
  ENST ID: ENST00000578961
  CDS Start-End: 176-646
cctggccactgctcttaatcgtccctctcctgcttcagggtggcattgtgtgtcccagagtgccggagcgagtcccagaagagaggcgaggctaagcccagagcgctgggttgcttcagcagggaagactcccttccccctgcttcaggctgctgagcactgagcagcgctcagaatggaagccatcgccaaatatgacttcaaagctactgcagacgacgagctgagcttcaaaaggggggacatcctcaaggttttgaacgaagaatgtgatcagaactggtacaaggcagagcttaatggaaaagacggcttcattcccaagaactacatagaaatgaaaccacatccgtggttttttggcaaaatccccagagccaaggcagaagaaatgcttagcaaacagcggcacgatggggcctttcttatccgagagagtgagagcgctcctggggacttctccctctctgtcaacagccgacatacgtccaggccctctttgactttgatccccaggaggatggagagctgggcttccgccggggagattttatccatgtcatggataactcagaccccaactggtggaaaggagcttgccacgggcagaccggcatgtttccccgcaattatgtcacccccgtgaaccggaacgtctaagagtcaagaagcaattatttaaagaaa

SEQ ID NO: 138935 - DNA, 2243 bp, Homo sapiens
  Payload ID: 7223
  Gene Symbol: GRB7
  Gene Name: growth factor receptor-bound protein 7
  Uniprot ID: Q14451
  ENST ID: ENST00000309156
  CDS Start-End: 258-1856
aagataattttagtttccttgggcctggaatctggacacacagggctcccccccgcctctgacttctctgtccgaagtcgggacaccctcctaccacctgtagagaagcgggagtggatctgaaataaaatccaggaatctgggggttcctagacggagccagacttcggaacgggtgtcctgctactcctgctggggctcctccaggacaagggcacacaactggttccgttaagcccctctcttgctcagacgccatggagctggatctgtctccacctcatcttagcagctctccggaagacctttgcccagcccctgggacccctcctgggactccccggccccctgatacccctctgcctgaggaggtaaagaggtcccagcctctcctcatcccaaccaccggcaggaaacttcgagaggaggagaggcgtgccacctccctcccctctatccccaaccccttccctgagctctgcagtcctccctcacagagcccaattctcgggggcccctccagtgcaagggggctgctcccccgcgatgccagccgcccccatgtagtaaaggtgtacagtgaggatggggcctgcaggtctgtggaggtggcagcaggtgccacagctcgccacgtgtgtgaaatgctggtgcagcgagctcacgccttgagcgacgagacctgggggctggtggagtgccacccccacctagcactggagcggggtttggaggaccacgagtccgtggtggaagtgcaggctgcctggcccgtgggcggagatagccgcttcgtcttccggaaaaacttcgccaagtacgaactgttcaagagctccccacactccctgttcccagaaaaaatggtctccagctgtctcgatgcacacactggtatatcccatgaagacctcatccagaacttcctgaatgctggcagctttcctgagatccagggctttctgcagctgcggggttcaggacggaagctttggaaacgctttttctgcttcttgcgccgatctggcctctattactccaccaagggcacctctaaggatccgaggcacctgcagtacgtggcagatgtgaacgagtccaacgtgtacgtggtgacgcagggccgcaagctctacgggatgcccactgacttcggtttctgtgtcaagcccaacaagcttcgaaatggccacaaggggcttcggatcttctgcagtgaagatgagcagagccgcacctgctggctggctgccttccgcctcttcaagtacggggtgcagctgtacaagaattaccagcaggcacagtctcgccatctgcatccatcttgtttgggctccccacccttgagaagtgcctcagataataccctggtggccatggacttctctggccatgctgggcgtgtcattgagaacccccgggaggctctgagtgtggccctggaggaggcccaggcctggaggaagaagacaaaccaccgcctcagcctgcccatgccagcctccggcacgagcctcagtgcagccatccaccgcacccaactctggttccacgggcgcatttcccgtgaggagagccagcggcttattggacagcagggcttggtagacggcctgttcctggtccgggagagtcagcggaacccccagggctttgtcctctctttgtgccacctgcagaaagtgaagcattatctcatcctgccgagcgaggaggagggccgcctgtacttcagcatggatgatggccagacccgcttcactgacctgctgcagctcgtggagttccaccagctgaaccgcggcatcctgccgtgcttgctgcgccattgctgcacgcgggtggccctctgaccaggccgtggactggctcatgcctcagcccgccttcaggctgcccgccgcccctccacccatccagtggactctggggcgcggccacaggggacgggatgaggagcgggagggttccgccactccagttttctcctctgcttctttgcctccctcagatagaaaacagcccccactccagtccactcctgacccctctcctcaagggaaggccttgggtggccccctctccttctcctagctctggaggtgctgctctagggcagggaattatgggagaagtgggggcagcccaggcggtttcacgccccacactttgtacagaccgagaggccagttgatctgctctgttttatactagtgacaataaagattattttttgatac

SEQ ID NO: 138936 - DNA, 1667 bp, Homo sapiens
  Payload ID: 7223
  Gene Symbol: GRB7
  Gene Name: growth factor receptor-bound protein 7
  Uniprot ID: Q14451
  ENST ID: ENST00000394204
  CDS Start-End: 51-1394
gacaagggcacacaactggttccgttaagcccctctcttgctcagacgccatggagctggatctgtctccacctcatcttagcagctctccggaagacctttgcccagcccctgggacccctcctgggactccccggccccctgatacccctctgcctgaggaggtaaagaggtcccagcctctcctcatcccaaccaccggcaggaaacttcgagaggaggagaggcgtgccacctccctcccctctatccccaaccccttccctgagctctgcagtcctccctcacagagcccaattctcgggggcccctccagtgcaagggggctgctcccccgcgatgccagccgcccccatgtagtaaaggtgtacagtgaggatggggcctgcaggtctgtggaggtggcagcaggtgccacagctcgccacgtgtgtgaaatgctggtgcagcgagctcacgccttgagcgacgagacctgggggctggtggagtgccacccccacctagcactggagcggggtttggaggaccacgagtccgtggtggaagtgcaggctgcctggcccgtgggcggagatagccgcttcgtcttccggaaaaacttcgccaagtacgaactgttcaagagctccccacactccctgttcccagaaaaaatggtctccagctgtctcgatgcacacactggtatatcccatgaagacctcatccagaacttcctgaatgctggcagctttcctgagatccagggctttctgcagctgcggggttcaggacggaagctttggaaacgctttttctgcttcttgcgccgatctggcctctattactccaccaagggcacctctaaggatccgaggcacctgcagtacgtggcagatgtgaacgagtccaacgtgtacgtggtgacgcagggccgcaagctctacgggatgcccactgacttcggtttctgtgtcaagcccaacaagcttcgaaatggccacaaggggcttcggatcttctgcagtgaagatgagcagagccgcacctgctggctggctgccttccgcctcttcaagtacggggtgcagctgtacaagaattaccagcaggcacagtctcgccatctgcatccatcttgtttgggctccccacccttgagaagtgcctcagataataccctggtggccatggacttctctggccatgctgggcgtgtcattgagaacccccgggaggctctgagtgtggccctggaggaggcccaggcctggaggaagaagacaaaccaccgcctcagcctgcccatgccagcctccggcacgagcctcagtgcagcctgttcctggtccgggagagtcagcggaacccccagggctttgtcctctctttgtgccacctgcagaaagtgaagcattatctcatcctgccgagcgaggaggagggccgcctgtacttcagcatggatgatggccagacccgcttcactgacctgctgcagctcgtggagttccaccagctgaaccgcggcatcctgccgtgcttgctgcgccattgctgcacgcgggtggccctctgaccaggccgtggactggctcatgcctcagcccgccttcaggctgcccgccgcccctccacccatccagtggactctggggcgcggccacaggggacgggatgaggag

SEQ ID NO: 138937 - DNA, 1955 bp, Homo sapiens
  Payload ID: 7223
  Gene Symbol: GRB7
  Gene Name: growth factor receptor-bound protein 7
  Uniprot ID: Q14451
  ENST ID: ENST00000394209
  CDS Start-End: 266-1864
aggcaaaccccagccttggactggccctctctgatctctgaggccaggctctaatgtgatttgaatctacttctaaccccttccaagcactgccctcccgaattctctgctcctctccccaccccactgttggtctgtgatttcgaggcaggcgtggccccctgcagcctggaatgaagtcactggggctgtttggagaccggggctgtttggaggacaagggcacacaactggttccgttaagcccctctcttgctcagacgccatggagctggatctgtctccacctcatcttagcagctctccggaagacctttgcccagcccctgggacccctcctgggactccccggccccctgatacccctctgcctgaggaggtaaagaggtcccagcctctcctcatcccaaccaccggcaggaaacttcgagaggaggagaggcgtgccacctccctcccctctatccccaaccccttccctgagctctgcagtcctccctcacagagcccaattctcgggggcccctccagtgcaagggggctgctcccccgcgatgccagccgcccccatgtagtaaaggtgtacagtgaggatggggcctgcaggtctgtggaggtggcagcaggtgccacagctcgccacgtgtgtgaaatgctggtgcagcgagctcacgccttgagcgacgagacctgggggctggtggagtgccacccccacctagcactggagcggggtttggaggaccacgagtccgtggtggaagtgcaggctgcctggcccgtgggcggagatagccgcttcgtcttccggaaaaacttcgccaagtacgaactgttcaagagctccccacactccctgttcccagaaaaaatggtctccagctgtctcgatgcacacactggtatatcccatgaagacctcatccagaacttcctgaatgctggcagctttcctgagatccagggctttctgcagctgcggggttcaggacggaagctttggaaacgctttttctgcttcttgcgccgatctggcctctattactccaccaagggcacctctaaggatccgaggcacctgcagtacgtggcagatgtgaacgagtccaacgtgtacgtggtgacgcagggccgcaagctctacgggatgcccactgacttcggtttctgtgtcaagcccaacaagcttcgaaatggccacaaggggcttcggatcttctgcagtgaagatgagcagagccgcacctgctggctggctgccttccgcctcttcaagtacggggtgcagctgtacaagaattaccagcaggcacagtctcgccatctgcatccatcttgtttgggctccccacccttgagaagtgcctcagataataccctggtggccatggacttctctggccatgctgggcgtgtcattgagaacccccgggaggctctgagtgtggccctggaggaggcccaggcctggaggaagaagacaaaccaccgcctcagcctgcccatgccagcctccggcacgagcctcagtgcagccatccaccgcacccaactctggttccacgggcgcatttcccgtgaggagagccagcggcttattggacagcagggcttggtagacggcctgttcctggtccgggagagtcagcggaacccccagggctttgtcctctctttgtgccacctgcagaaagtgaagcattatctcatcctgccgagcgaggaggagggccgcctgtacttcagcatggatgatggccagacccgcttcactgacctgctgcagctcgtggagttccaccagctgaaccgcggcatcctgccgtgcttgctgcgccattgctgcacgcgggtggccctctgaccaggccgtggactggctcatgcctcagcccgccttcaggctgcccgccgcccctccacccatccagtggactctggggcgcggccacagg

SEQ ID NO: 138938 - DNA, 2093 bp, Homo sapiens
  Payload ID: 7223
  Gene Symbol: GRB7
  Gene Name: growth factor receptor-bound protein 7
  Uniprot ID: Q14451
  ENST ID: ENST00000394211
  CDS Start-End: 107-1705
cgtctccctccctgaagacgtggtcccagccgggtgtcctgacgctcggggttcaggacaagggcacacaactggttccgttaagcccctctcttgctcagacgccatggagctggatctgtctccacctcatcttagcagctctccggaagacctttgcccagcccctgggacccctcctgggactccccggccccctgatacccctctgcctgaggaggtaaagaggtcccagcctctcctcatcccaaccaccggcaggaaacttcgagaggaggagaggcgtgccacctccctcccctctatccccaaccccttccctgagctctgcagtcctccctcacagagcccaattctcgggggcccctccagtgcaagggggctgctcccccgcgatgccagccgcccccatgtagtaaaggtgtacagtgaggatggggcctgcaggtctgtggaggtggcagcaggtgccacagctcgccacgtgtgtgaaatgctggtgcagcgagctcacgccttgagcgacgagacctgggggctggtggagtgccacccccacctagcactggagcggggtttggaggaccacgagtccgtggtggaagtgcaggctgcctggcccgtgggcggagatagccgcttcgtcttccggaaaaacttcgccaagtacgaactgttcaagagctccccacactccctgttcccagaaaaaatggtctccagctgtctcgatgcacacactggtatatcccatgaagacctcatccagaacttcctgaatgctggcagctttcctgagatccagggctttctgcagctgcggggttcaggacggaagctttggaaacgctttttctgcttcttgcgccgatctggcctctattactccaccaagggcacctctaaggatccgaggcacctgcagtacgtggcagatgtgaacgagtccaacgtgtacgtggtgacgcagggccgcaagctctacgggatgcccactgacttcggtttctgtgtcaagcccaacaagcttcgaaatggccacaaggggcttcggatcttctgcagtgaagatgagcagagccgcacctgctggctggctgccttccgcctcttcaagtacggggtgcagctgtacaagaattaccagcaggcacagtctcgccatctgcatccatcttgtttgggctccccacccttgagaagtgcctcagataataccctggtggccatggacttctctggccatgctgggcgtgtcattgagaacccccgggaggctctgagtgtggccctggaggaggcccaggcctggaggaagaagacaaaccaccgcctcagcctgcccatgccagcctccggcacgagcctcagtgcagccatccaccgcacccaactctggttccacgggcgcatttcccgtgaggagagccagcggcttattggacagcagggcttggtagacggcctgttcctggtccgggagagtcagcggaacccccagggctttgtcctctctttgtgccacctgcagaaagtgaagcattatctcatcctgccgagcgaggaggagggccgcctgtacttcagcatggatgatggccagacccgcttcactgacctgctgcagctcgtggagttccaccagctgaaccgcggcatcctgccgtgcttgctgcgccattgctgcacgcgggtggccctctgaccaggccgtggactggctcatgcctcagcccgccttcaggctgcccgccgcccctccacccatccagtggactctggggcgcggccacaggggacgggatgaggagcgggagggttccgccactccagttttctcctctgcttctttgcctccctcagatagaaaacagcccccactccagtccactcctgacccctctcctcaagggaaggccttgggtggccccctctccttctcctagctctggaggtgctgctctagggcagggaattatgggagaagtgggggcagcccaggcggtttcacgccccacactttgtacagaccgagaggccagttgatctgctctgttttatactagtgacaataaagattattttttgataca

SEQ ID NO: 138939 - DNA, 2197 bp, Homo sapiens
  Payload ID: 7223
  Gene Symbol: GRB7
  Gene Name: growth factor receptor-bound protein 7
  Uniprot ID: Q14451
  ENST ID: ENST00000445327
  CDS Start-End: 136-1803
tgcgggctgcggggagatgtggggagggccccctccactttggagggcagtgaaggagagggatcctctaaattgtcgaggcttcatctctccagattgtatgcccttctcagcaacaccgcctccggccctccgatgggaaagtggaggccgggacaagggcacacaactggttccgttaagcccctctcttgctcagacgccatggagctggatctgtctccacctcatcttagcagctctccggaagacctttgcccagcccctgggacccctcctgggactccccggccccctgatacccctctgcctgaggaggtaaagaggtcccagcctctcctcatcccaaccaccggcaggaaacttcgagaggaggagaggcgtgccacctccctcccctctatccccaaccccttccctgagctctgcagtcctccctcacagagcccaattctcgggggcccctccagtgcaagggggctgctcccccgcgatgccagccgcccccatgtagtaaaggtgtacagtgaggatggggcctgcaggtctgtggaggtggcagcaggtgccacagctcgccacgtgtgtgaaatgctggtgcagcgagctcacgccttgagcgacgagacctgggggctggtggagtgccacccccacctagcactggagcggggtttggaggaccacgagtccgtggtggaagtgcaggctgcctggcccgtgggcggagatagccgcttcgtcttccggaaaaacttcgccaagtacgaactgttcaagagctccccacactccctgttcccagaaaaaatggtctccagctgtctcgatgcacacactggtatatcccatgaagacctcatccagaacttcctgaatgctggcagctttcctgagatccagggctttctgcagctgcggggttcaggacggaagctttggaaacgctttttctgcttcttgcgccgatctggcctctattactccaccaagggcacctctaaggatccgaggcacctgcagtacgtggcagatgtgaacgagtccaacgtgtacgtggtgacgcagggccgcaagctctacgggatgcccactgacttcggtttctgtgtcaagcccaacaagcttcgaaatggccacaaggggcttcggatcttctgcagtgaagatgagcagagccgcacctgctggctggctgccttccgcctcttcaagtacggggtgcagctgtacaagaattaccagcaggcacagtctcgccatctgcatccatcttgtttgggctccccacccttgagaagtgcctcagataataccctggtggccatggacttctctggccatgctgggcgtgtcattgagaacccccgggaggctctgagtgtggccctggaggaggcccaggcctggaggaagaagacaaaccaccgcctcagcctgcccatgccagcctccggcacgagcctcagtgcagccatccaccgcacccaactctggttccacgggcgcatttcccgtgaggagagccagcggcttattggacagcagggcttggtagacggcctgttcctggtccgggagagtcagcggaacccccagggctttgtcctctctttgtgccacctgcagaaagtgaagcattatctcatcctgccgagcgaggaggagggccgcctgtacttcagcatggatgatggccagacccgcttcactgacctgctgcagctcgtggagttccaccagctgaaccgcggcatcctgccgtgcttgctgcgccattgctgcacgcgggtggccctctgaccaggccgtggactggctcatgcctcagcccgccttcaggctgcccgccgcccctccacccatccagtggactctggggcgcggccacaggggacgggatgaggagcgggagggttccgccactccagttttctcctctgcttctttgcctccctcagatagaaaacagcccccactccagtccactcctgacccctctcctcaagggaaggccttgggtggccccctctccttctcctagctctggaggtgctgctctagggcagggaattatgggagaagtgggggcagcccaggcggtttcacgccccacactttgtacagaccgagaggccagttgatctgctctgttttatactagtgacaataaagattattttttgatacacctatg

SEQ ID NO: 138940 - DNA, 560 bp, Homo sapiens
  Payload ID: 7223
  Gene Symbol: GRB7
  Gene Name: growth factor receptor-bound protein 7
  ENST ID: ENST00000583813
  CDS Start-End: 223-381
acacacagggctcccccccgcctctgacttctctgtccgaagtcgggacaccctcctaccacctgtagagaagcgggagtggatctgaaataaaatccaggaatctgggggttcctagacggagccagacttcggaacgggtgtcctgctactcctgctggggctcctccaggacaagggcacacaactggttccgttaagcccctctcttgctcagacgccatggagctggatctgtctccacctcatcttagcagctctccggaagacctttgcccagcccctgggacccctcctgggactccccggccccctgatacccctctgcctgaggaggtctgtggaggtggcagcaggtgccacagctcgccacgtgtgtgaaatgctggtgcagcgagctcacgccttgagcgacgagacctgggggctggtggagtgccacccccacctagcactggagcggggtttggaggaccacgagtccgtggtggaagtgcaggctgcctggcccgtgggcggagatagccgcttcgtcttccggaaaaacttcgccaagtacg

SEQ ID NO: 138941 - DNA, 612 bp, Homo sapiens
  Payload ID: 7223
  Gene Symbol: GRB7
  Gene Name: growth factor receptor-bound protein 7
  ENST ID: ENST00000577695
  CDS Start-End: 258-612
aagataattttagtttccttgggcctggaatctggacacacagggctcccccccgcctctgacttctctgtccgaagtcgggacaccctcctaccacctgtagagaagcgggagtggatctgaaataaaatccaggaatctgggggttcctagacggagccagacttcggaacgggtgtcctgctactcctgctggggctcctccaggacaagggcacacaactggttccgttaagcccctctcttgctcagacgccatggagctggatctgtctccacctcatcttagcagctctccggaagacctttgcccagcccctgggacccctcctgggactccccggccccctgatacccctctgcctgaggaggtaaagaggtcccagcctctcctcatcccaaccaccggcaggaaacttcgagaggaggagaggcgtgccacctccctcccctctatccccaaccccttccctgagctctgcagtcctccctcacagagcccaattctcgggggcccctccagtgcaagggggctgctcccccgcgatgccagccgcccccattcgtgtgcaattcctggggcgcaggtagtaaaggtgtacagtgaggatg

SEQ ID NO: 138942 - DNA, 2345 bp, Homo sapiens
  Payload ID: 7224
  Gene Symbol: GFER
  Gene Name: growth factor, augmenter of liver regeneration
  Uniprot ID: P55789
  ENST ID: ENST00000248114
  CDS Start-End: 7-624
ggcaacatggcggcgcccggcgagcggggccgcttccacggcgggaacctcttcttcctgccggggggcgcgcgctccgagatgatggacgacctggcgaccgacgcgcggggccggggcgcggggcggagagacgcggccgcctcggcctcgacgccagcccaggcgccgacctccgattctcctgtcgccgaggacgcctcccggaggcggccgtgccgggcctgcgtcgacttcaagacgtggatgcggacgcagcagaagcgggacaccaagtttagggaggactgcccgccggatcgcgaggaactgggccgccacagctgggctgtcctccacaccctggccgcctactaccccgacctgcccaccccagaacagcagcaagacatggcccagttcatacatttattttctaagttttacccctgtgaggagtgtgctgaagacctaagaaaaaggctgtgcaggaaccacccagacacccgcacccgggcatgcttcacacagtggctgtgccacctgcacaatgaagtgaaccgcaagctgggcaagcctgacttcgactgctcaaaagtggatgagcgctggcgcgacggctggaaggatggctcctgtgactagagggtggtcagccagagctcatgggacagctagccaggcatggttggataggggcagggcactcattaaagtgcatcacagccagagcctgttgtgtctcagttgggtggtccccaggacactgcctgtggggacctgccctgcccctcttaggtttggagcagaagtggaggtgcccacagcaggtacccactggccccctcctcagtggagaccccaaggagctgcagctgaactgcaggggagggaaggaggagcagcctgggctgccccttgacattcaggatgtagcttcctgcccaccgcataccctggcgcctcactcctcacacgggaagacagcgggcctggctgggcatccctgtgcctgtccctggcggccaggccattgccttcccactatgcagccagggatgcccctgccccccatggctctgtgctgctcactttagggggctcaattctccactctgctcagtccctacagggaaagctcaggtcgggtctttctgagggtccaccagccatcctaccctctccctgcctggcacatgcctgccagcgttgtgtcatgcctgtccacaggggattcgtggggctcacttcatcagagtttgaagcccaaatgaaacgctgaagtgactgagaacctggcttcagtatattttctgctggggcttaataaagcagtagacagggcttgttccatccctctgtgctcagctgcatttcctgctggggtcctggttcctcaggagagagagaccacagggtgagagtgagccaggaacagcaaggacgttgattggttggggcaggggggccagagtagctgatgtaggagtactgggaggccagacggcacgaggtctccaaggccccagcaaagccatggcttctacccctagttcccctgacaggaagttcttggcgggtttggagccaggggatggcatggagtgatgtggctttgaagggtcctctggctgctgagctgggatgaggcaggtaagggtggaacaggaggggtggggaggaagccggggcagtcaccgagtgaccaccaagaggaagacccaccccacggcggggacagatgcggggtacgttaaagggagagccagagaactcatggggtgaggatggagtccgaggagactgctgggagccgccgtgtgggtcagagatggagaaggctgagtgcagcaaggtggggggtgactgggacccagcctttgggcctccccagccagagcagcccagcaacagtgtgtcctgtggtcataaaactccagggacctctatcctccaggagtctcagcctttccctgggcgcaggcccaccttggcatggccgcctcaggcctccatggagggagctgctatgtccccaccagattggccccgtgcggctgctggcttctgtagaggctgcccagaggggccaggtggcacaaataagagaggggagatggggggcagccaggagaggaggtgtcccttcctcgcccagacacagcgcgcttctctctggcctttcccgaggcctgtgagtgcctcaggaagcagctgggccctctgggaaggctgtgttcagcttaggaacataccgcctgtatctgctgtccctcccctgcccccctgccccccccaccgccttccctttttccctgtcttccttaaagtttcactcctgaataaaacttcactttgccttagaa

SEQ ID NO: 138943 - DNA, 483 bp, Homo sapiens
  Payload ID: 7224
  Gene Symbol: GFER
  Gene Name: growth factor, augmenter of liver regeneration
  ENST ID: ENST00000567719
  CDS Start-End: 4-396
agaatgaactcactctcggtcggcctgcttccgcagcgggacaccaagtttagggaggactgcccgccggatcgcgaggaactgggccgccacagctgggctgtcctccacaccctggccgcctactaccccgacctgcccaccccagaacagcagcaagacatggcccagttcatacatttattttctaagttttacccctgtgaggagtgtgctgaagacctaagaaaaaggctgtgcaggaaccacccagacacccgcacccgggcatgcttcacacagtggctgtgccacctgcacaatgaagtgaaccgcaagctgggcaagcctgacttcgactgctcaaaagtggatgagcgctggcgcgacggctggaaggatggctcctgtgactagagggtggtcagccagagctcatgggacagctagccaggcatggttggataggggcagggcactcattaaagtgcatcacagccagag

SEQ ID NO: 138944 - DNA, 482 bp, Homo sapiens
  Payload ID: 7224
  Gene Symbol: GFER
  Gene Name: growth factor, augmenter of liver regeneration
  ENST ID: ENST00000561710
  CDS Start-End: 1-420
aacctcttcttcctgccggggggcgcgcgctccgagatgatggacgacctggcgaccgacgcgcggggccggggcgcggggcggagagacgcggccgcctcggcctcgacgccagcccaggcgccgacctccgattctcctgtcgccgaggacgcctcccggaggcggccgtgccgggcctgcgtcgacttcaagacgtggatgcggacgcagcagaagcgggacaccaagtttagggaggactgcccgccggatcgcgaggaactgggccgccacagctgggctgtcctccacaccctggccgcctactaccccgacctgcccaccccagaacagcagcaagacatggcccagttcatacatttattttctaagttttacccctgtgaggagtgtgctgaagacctaagaaaaaggtaagatgtgtttgcacgcagcagagctttgcactggagcctgggcctggggctcctggctgacgt

SEQ ID NO: 138945 - DNA, 517 bp, Homo sapiens
  Payload ID: 7224
  Gene Symbol: GFER
  Gene Name: growth factor, augmenter of liver regeneration
  ENST ID: ENST00000569451
  CDS Start-End: 13-342
tgcgcgggcaacatggcggcgcccggcgagcggggccgcttccacggcgggaacctcttcttcctgccggggggcgcgcgctccgagatgatggacgacctggcgaccgacgcgcggggccggggcgcggggcggagagacgcggccgcctcggcctcgacgccagcccaggcgccgacctccgattctcctgtcgccgaggacgcctcccggaggcggccgtgccgggcctgcgtcgacttcaagacgtggatgcggacgcagcagaaggctgtgcaggaaccacccagacacccgcacccgggcatgcttcacacagtggctgtgccacctgcacaatgaagtgaaccgcaagctgggcaagcctgacttcgactgctcaaaagtggatgagcgctggcgcgacggctggaaggatggctcctgtgactagagggtggtcagccagagctcatgggacagctagccaggcatggttggataggggcagggcactcattaaagtgcatcacagcca

SEQ ID NO: 138946 - DNA, 803 bp, Homo sapiens
  Payload ID: 7225
  Gene Symbol: GH1
  Gene Name: growth hormone 1
  Uniprot ID: P01241
  ENST ID: ENST00000323322
  CDS Start-End: 44-697
ccccgaaccactcagggtcctgtggacagctcacctagctgcaatggctacaggctcccggacgtccctgctcctggcttttggcctgctctgcctgccctggcttcaagagggcagtgccttcccaaccattcccttatccaggctttttgacaacgctatgctccgcgcccatcgtctgcaccagctggcctttgacacctaccaggagtttgaagaagcctatatcccaaaggaacagaagtattcattcctgcagaacccccagacctccctctgtttctcagagtctattccgacaccctccaacagggaggaaacacaacagaaatccaacctagagctgctccgcatctccctgctgctcatccagtcgtggctggagcccgtgcagttcctcaggagtgtcttcgccaacagcctggtgtacggcgcctctgacagcaacgtctatgacctcctaaaggacctagaggaaggcatccaaacgctgatggggaggctggaagatggcagcccccggactgggcagatcttcaagcagacctacagcaagttcgacacaaactcacacaacgatgacgcactactcaagaactacgggctgctctactgcttcaggaaggacatggacaaggtcgagacattcctgcgcatcgtgcagtgccgctctgtggagggcagctgtggcttctagctgcccgggtggcatccctgtgacccctccccagtgcctctcctggccctggaagttgccactccagtgcccaccagccttgtcctaataaaattaagttgcatca

SEQ ID NO: 138947 - DNA, 537 bp, Homo sapiens
  Payload ID: 7225
  Gene Symbol: GH1
  Gene Name: growth hormone 1
  ENST ID: ENST00000342364
  CDS Start-End: 63-431
aggatcccaaggcccaactccccgaaccactcagggtcctgtggacagctcacctagctgcaatggctacaggctcccggacgtccctgctcctggcttttggcctgctctgcctgccctggcttcaagagggcagtgccttcccaaccattcccttatccaggctttttgacaacgctatgctccgcgcccatcgtctgcaccagctggcctttgacacctaccaggagtttaggctggaagatggcagcccccggactgggcagatcttcaagcagacctacagcaagttcgacacaaactcacacaacgatgacgcactactcaagaactacgggctgctctactgcttcaggaaggacatggacaaggtcgagacattcctgcgcatcgtgcagtgccgctctgtggagggcagctgtggcttctagctgcccgggtggcatccctgtgacccctccccagtgcctctcctggccctggaagttgccactccagtgcccaccagccttgtcctaataaaattaagttgcatca

SEQ ID NO: 138948 - DNA, 685 bp, Homo sapiens
  Payload ID: 7225
  Gene Symbol: GH1
  Gene Name: growth hormone 1
  Uniprot ID: P01241
  ENST ID: ENST00000351388
  CDS Start-End: 43-576
cccgaaccactcagggtcctgtggacagctcacctagctgcaatggctacaggctcccggacgtccctgctcctggcttttggcctgctctgcctgccctggcttcaagagggcagtgccttcccaaccattcccttatccaggctttttgacaacgctatgctccgcgcccatcgtctgcaccagctggcctttgacacctaccaggagtttaacctagagctgctccgcatctccctgctgctcatccagtcgtggctggagcccgtgcagttcctcaggagtgtcttcgccaacagcctggtgtacggcgcctctgacagcaacgtctatgacctcctaaaggacctagaggaaggcatccaaacgctgatggggaggctggaagatggcagcccccggactgggcagatcttcaagcagacctacagcaagttcgacacaaactcacacaacgatgacgcactactcaagaactacgggctgctctactgcttcaggaaggacatggacaaggtcgagacattcctgcgcatcgtgcagtgccgctctgtggagggcagctgtggcttctagctgcccgggtggcatccctgtgacccctccccagtgcctctcctggccctggaagttgccactccagtgcccaccagccttgtcctaataaaattaagttgcatcattt

SEQ ID NO: 138949 - DNA, 756 bp, Homo sapiens
  Payload ID: 7225
  Gene Symbol: GH1
  Gene Name: growth hormone 1
  Uniprot ID: P01241
  ENST ID: ENST00000458650
  CDS Start-End: 42-650
ccgaaccactcagggtcctgtggacagctcacctagctgcaatggctacaggctcccggacgtccctgctcctggcttttggcctgctctgcctgccctggcttcaagagggcagtgccttcccaaccattcccttatccaggctttttgacaacgctatgctccgcgcccatcgtctgcaccagctggcctttgacacctaccaggagtttaacccccagacctccctctgtttctcagagtctattccgacaccctccaacagggaggaaacacaacagaaatccaacctagagctgctccgcatctccctgctgctcatccagtcgtggctggagcccgtgcagttcctcaggagtgtcttcgccaacagcctggtgtacggcgcctctgacagcaacgtctatgacctcctaaaggacctagaggaaggcatccaaacgctgatggggaggctggaagatggcagcccccggactgggcagatcttcaagcagacctacagcaagttcgacacaaactcacacaacgatgacgcactactcaagaactacgggctgctctactgcttcaggaaggacatggacaaggtcgagacattcctgcgcatcgtgcagtgccgctctgtggagggcagctgtggcttctagctgcccgggtggcatccctgtgacccctccccagtgcctctcctggccctggaagttgccactccagtgcccaccagccttgtcctaataaaattaagttgcatca

SEQ ID NO: 138950 - DNA, 376 bp, Homo sapiens
  Payload ID: 7225
  Gene Symbol: GH1
  Gene Name: growth hormone 1
  ENST ID: ENST00000617086
  CDS Start-End: 63-155
aggatcccaaggcccaactccccgaaccactcagggtcctgtggacagctcacctagctgcaatggctacagaggctggaagatggcagcccccggactgggcagatcttcaagcagacctacagcaagttcgacacaaactcacacaacgatgacgcactactcaagaactacgggctgctctactgcttcaggaaggacatggacaaggtcgagacattcctgcgcatcgtgcagtgccgctctgtggagggcagctgtggcttctagctgcccgggtggcatccctgtgacccctccccagtgcctctcctggccctggaagttgccactccagtgcccaccagccttgtcctaataaaattaagttgcatca

SEQ ID NO: 138951 - DNA, 1138 bp, Homo sapiens
  Payload ID: 7226
  Gene Symbol: GH2
  Gene Name: growth hormone 2
  Uniprot ID: P01242
  ENST ID: ENST00000332800
  CDS Start-End: 135-905
gagaaacaggtgaggagaagcagcgagagagaaggggccaggtataaaaagggcccacaagagaccagctcaaggatcccaaggcccaactccccgaaccactcagggtcctgtggacagctcacctagcggcaatggctgcaggctcccggacgtccctgctcctggcttttggcctgctctgcctgtcctggcttcaagagggcagtgccttcccaaccattcccttatccaggctttttgacaacgctatgctccgcgcccgtcgcctgtaccagctggcatatgacacctatcaggagtttgaagaagcctatatcctgaaggagcagaagtattcattcctgcagaacccccagacctccctctgcttctcagagtctattccaacaccttccaacagggtgaaaacgcagcagaaatctaacctagagctgctccgcatctccctgctgctcatccagtcatggctggagcccgtgcagctcctcaggagcgtcttcgccaacagcctggtgtatggcgcctcggacagcaacgtctatcgccacctgaaggacctagaggaaggcatccaaacgctgatgtgggtgagggtggcaccagggatccccaatcctggggccccactggcttccagggactggggagagaaacactgctgccctctttttagcagtcaggcgctgacccaagagaactcaccgtattcttcatttcccctcgtgaatcctccaggcctttctctacaacctggaggggagggaggaaaatggatgaatgagagagggagggaacagtgcccaagcgcttggcctctccttctcttccttcactttgcagaggctggaagatggcagcccccggactgggcagatcttcaatcagtcctacagcaagtttgacacaaaatcgcacaacgatgacgcactgctcaagaactacgggctgctctactgcttcaggaaggacatggacaaggtcgagacattcctgcgcatcgtgcagtgccgctctgtggagggcagctgtggcttctagctgcccgggtggcatccctgtgacccctccccagtgcctctcctggtcgtggaaggtgctactccagtgcccaccagccttgtcctaataaaattaa

SEQ ID NO: 138952 - DNA, 794 bp, Homo sapiens
  Payload ID: 7226
  Gene Symbol: GH2
  Gene Name: growth hormone 2
  Uniprot ID: P01242
  ENST ID: ENST00000456543
  CDS Start-End: 42-779
ccgaaccactcagggtcctgtggacagctcacctagcggcaatggctgcaggctcccggacgtccctgctcctggcttttggcctgctctgcctgtcctggcttcaagagggcagtgccttcccaaccattcccttatccaggctttttgacaacgctatgctccgcgcccgtcgcctgtaccagctggcatatgacacctatcaggagtttgaagaagcctatatcctgaaggagcagaagtattcattcctgcagaacccccagacctccctctgcttctcagagtctattccaacaccttccaacagggtgaaaacgcagcagaaatctaacctagagctgctccgcatctccctgctgctcatccagtcatggctggagcccgtgcagctcctcaggagcgtcttcgccaacagcctggtgtatggcgcctcggacagcaacgtctatcgccacctgaaggacctagaggaaggcatccaaacgctgataggctggaagatggcagcccccggactgggcagatcttcaatcagtcctacagcaagtttgacacaaaatcgcacaacgatgacgcactgctcaagaactacgggctgctctactgcttcaggaaggacatggacaaggtcgagacattcctgcgcatcgtgcagtgccgctctgtggagggcagctgtggcttctagctgcccgggtggcatccctgtgacccctccccagtgcctctcctggtcgtggaaggtgctactccagtgcccaccagccttgtcctaataaaattaagttgca

SEQ ID NO: 138953 - DNA, 819 bp, Homo sapiens
  Payload ID: 7226
  Gene Symbol: GH2
  Gene Name: growth hormone 2
  Uniprot ID: P01242
  ENST ID: ENST00000423893
  CDS Start-End: 63-716
aggatcccaaggcccaactccccgaaccactcagggtcctgtggacagctcacctagcggcaatggctgcaggctcccggacgtccctgctcctggcttttggcctgctctgcctgtcctggcttcaagagggcagtgccttcccaaccattcccttatccaggctttttgacaacgctatgctccgcgcccgtcgcctgtaccagctggcatatgacacctatcaggagtttgaagaagcctatatcctgaaggagcagaagtattcattcctgcagaacccccagacctccctctgcttctcagagtctattccaacaccttccaacagggtgaaaacgcagcagaaatctaacctagagctgctccgcatctccctgctgctcatccagtcatggctggagcccgtgcagctcctcaggagcgtcttcgccaacagcctggtgtatggcgcctcggacagcaacgtctatcgccacctgaaggacctagaggaaggcatccaaacgctgatgtggaggctggaagatggcagcccccggactgggcagatcttcaatcagtcctacagcaagtttgacacaaaatcgcacaacgatgacgcactgctcaagaactacgggctgctctactgcttcaggaaggacatggacaaggtcgagacattcctgcgcatcgtgcagtgccgctctgtggagggcagctgtggcttctagctgcccgggtggcatccctgtgacccctccccagtgcctctcctggtcgtggaaggtgctactccagtgcccaccagccttgtcctaataaaattaagttgca

SEQ ID NO: 138954 - DNA, 753 bp, Homo sapiens
  Payload ID: 7226
  Gene Symbol: GH2
  Gene Name: growth hormone 2
  Uniprot ID: P01242
  ENST ID: ENST00000449787
  CDS Start-End: 42-650
ccgaaccactcagggtcctgtggacagctcacctagcggcaatggctgcaggctcccggacgtccctgctcctggcttttggcctgctctgcctgtcctggcttcaagagggcagtgccttcccaaccattcccttatccaggctttttgacaacgctatgctccgcgcccgtcgcctgtaccagctggcatatgacacctatcaggagtttaacccccagacctccctctgcttctcagagtctattccaacaccttccaacagggtgaaaacgcagcagaaatctaacctagagctgctccgcatctccctgctgctcatccagtcatggctggagcccgtgcagctcctcaggagcgtcttcgccaacagcctggtgtatggcgcctcggacagcaacgtctatcgccacctgaaggacctagaggaaggcatccaaacgctgatgtggaggctggaagatggcagcccccggactgggcagatcttcaatcagtcctacagcaagtttgacacaaaatcgcacaacgatgacgcactgctcaagaactacgggctgctctactgcttcaggaaggacatggacaaggtcgagacattcctgcgcatcgtgcagtgccgctctgtggagggcagctgtggcttctagctgcccgggtggcatccctgtgacccctccccagtgcctctcctggtcgtggaaggtgctactccagtgcccaccagccttgtcctaataaaattaagttgca

SEQ ID NO: 138955 - DNA, 702 bp, Homo sapiens
  Payload ID: 7226
  Gene Symbol: GH2
  Gene Name: growth hormone 2
  ENST ID: ENST00000622506
  CDS Start-End: 63-596
aggatcccaaggcccaactccccgaaccactcagggtcctgtggacagctcacctagcggcaatggctgcaggctcccggacgtccctgctcctggcttttggcctgctctgcctgtcctggcttcaagagggcagtgccttcccaaccattcccttatccaggctttttgacaacgctatgctccgcgcccgtcgcctgtaccagctggcatatgacacctatcaggagtttaacctagagctgctccgcatctccctgctgctcatccagtcatggctggagcccgtgcagctcctcaggagcgtcttcgccaacagcctggtgtatggcgcctcggacagcaacgtctatcgccacctgaaggacctagaggaaggcatccaaacgctgatgtggaggctggaagatggcagcccccggactgggcagatcttcaatcagtcctacagcaagtttgacacaaaatcgcacaacgatgacgcactgctcaagaactacgggctgctctactgcttcaggaaggacatggacaaggtcgagacattcctgcgcatcgtgcagtgccgctctgtggagggcagctgtggcttctagctgcccgggtggcatccctgtgacccctccccagtgcctctcctggtcgtggaaggtgctactccagtgcccaccagccttgtcctaataaaattaagttgcatca

SEQ ID NO: 138956 - DNA, 2128 bp, Homo sapiens
  Payload ID: 7227
  Gene Symbol: GHITM
  Gene Name: growth hormone inducible transmembrane protein
  Uniprot ID: Q9H3K2
  ENST ID: ENST00000372134
  CDS Start-End: 194-1231
ttttccgacagaggcctgcccgtgattggctgctcgtactatttacgtcctttcgatgttgcgtcatgcagtgcgccggaggaactgtgctctttgaggccgacgctaggggcccggaagggaaactgcgaggcgaaggtgaccggggaccgagcatttcagatctgctcggtagacctggtgcaccaccaccatgttggctgcaaggctggtgtgtctccggacactaccttctagggttttccacccagctttcaccaaggcctcccctgttgtgaagaattccatcacgaagaatcaatggctgttaacacctagcagggaatatgccaccaaaacaagaattgggatccggcgtgggagaactggccaagaactcaaagaggcagcattggaaccatcgatggaaaaaatatttaaaattgatcagatgggaagatggtttgttgctggaggggctgctgttggtcttggagcattgtgctactatggcttgggactgtctaatgagattggagctattgaaaaggctgtaatttggcctcagtatgtcaaggatagaattcattccacctatatgtacttagcagggagtattggtttaacagctttgtctgccatagcaatcagcagaacgcctgttctcatgaacttcatgatgagaggctcttgggtgacaattggtgtgacctttgcagccatggttggagctggaatgctggtacgatcaataccatatgaccagagcccaggcccaaagcatcttgcttggttgctacattctggtgtgatgggtgcagtggtggctcctctgacaatattagggggtcctcttctcatcagagctgcatggtacacagctggcattgtgggaggcctctccactgtggccatgtgtgcgcccagtgaaaagtttctgaacatgggtgcacccctgggagtgggcctgggtctcgtctttgtgtcctcattgggatctatgtttcttccacctaccaccgtggctggtgccactctttactcagtggcaatgtacggtggattagttcttttcagcatgttccttctgtatgatacccagaaagtaatcaagcgtgcagaagtatcaccaatgtatggagttcaaaaatatgatcccattaactcgatgctgagtatctacatggatacattaaatatatttatgcgagttgcaactatgctggcaactggaggcaacagaaagaaatgaagtgactcagcttctggcttctctgctacatcaaatatcttgtttaatggggcagatatgcattaaatagtttgtacaagcagctttcgttgaagtttagaagataagaaacatgtcatcatatttaaatgttccggtaatgtgatgcctcaggtctgcctttttttctggagaataaatgcagtaatcctctcccaaataagcacacacattttcaattctcatgtttgagtgattttaaaatgttttggtgaatgtgaaaactaaagtttgtgtcatgagaatgtaagtcttttttctactttaaaatttagtaggttcactgagtaactaaaatttagcaaacctgtgtttgcatatttttttggagtgcagaatattgtaattaatgtcataagtgatttggagctttggtaaagggaccagagagaaggagtcacctgcagtcttttgtttttttaaatacttagaacttagcacttgtgttattgattagtgaggagccagtaagaaacatctgggtatttggaaacaagtggtcattgttacattcatctgctgaacttaacaaaactgttcatcctgaaacaggcacaggtgatgcattctcctgctgttgcttctcagtgctctctttccaatatagatgtggtcatgtttgacttgtacagaatgttaatcatacagagaatccttgatggaattatatatgtgtgttttacttttgaatgttacaaaaggaaataactttaaaactattctcaagagaaaatattcaaagcatgaaatatgttgctttttccagaatacaaacagtatactcatgattgctaagtgtttttttatttttgcatatttattgaactgtctaattgaatacagcttgctcttgtcacc

SEQ ID NO: 138957 - DNA, 2375 bp, Homo sapiens
  Payload ID: 7227
  Gene Symbol: GHITM
  Gene Name: growth hormone inducible transmembrane protein
  ENST ID: ENST00000618907
  CDS Start-End: 132-1091
gtcatgcagtgcgccggaggaactgtgctctttgaggccgacgctaggggcccggaagggaaactgcgaggcgaaggtgaccggggaccgagcatttcagatctgctcggtagacctggtgcaccaccaccatgttggctgcaaggctggtgtgtctccggacactaccttctagggttttccacccagctttcaccaaggcctcccctgttgtgaagaattccatcacgaagaatcaatggctgttaacacctagcagggaatatgccaccaaaacaagaattgggatccggcgtgggagaactggccaagaactcaaagaggcagcattggaaccatcgatggaaaaaatatttaaaattgatcagatgggaagatggtttgttgctggaggggctgctgttggtcttggagcattgtgctactatggcttgggactgtctaatgagattggagctattgaaaaggctgtaatttggcctcagtatgtcaaggatagaattcattccacctatatgtacttagcagggagtattggtttaacagctttgtctgccatagcaatcagcagaacgcctgttctcatgaacttcatgatgagaggctcttgggtgacaattggtgtgacctttgcagccatggttggagctggaatgctggtacgatcaataccatatgaccagagcccaggcccaaagcatcttgcttggttgctacattctggtgtgatgggtgcagtggtggctcctctgacaatattagggggtcctcttctcatcagagctgcatggtacacagctggcattgtgggaggcctctccactgtggccatgtgtgcgcccagtgaaaagtttctgaacatgggtgcacccctgggagtgggcctgggtctcgtctttgtgtcctcattgggatctatgtttcttccacctaccaccgtggctggtgccactctttactcagtggcaatgtacggtggattagttcttttcagcatgttccttctgtatgatacccagaaagtatcaagcgtgcagaagtatcaccaatgtatggagttcaaaaatatgatcccattaactcgatgctgagtatctacatggatacattaaatatatttatgcgagttgcaactatgctggcaactggaggcaacagaaagaaatgaagtgactcagcttctggcttctctgctacatcaaatatcttgtttaatggggcagatatgcattaaatagtttgtacaagcagctttcgttgaagtttagaagataagaaacatgtcatcatatttaaatgttccggtaatgtgatgcctcaggtctgcctttttttctggagaataaatgcagtaatcctctcccaaataagcacacacattttcaattctcatgtttgagtgattttaaaatgttttggtgaatgtgaaaactaaagtttgtgtcatgagaatgtaagtcttttttctactttaaaatttagtaggttcactgagtaactaaaatttagcaaacctgtgtttgcatatttttttggagtgcagaatattgtaattaatgtcataagtgatttggagctttggtaaagggaccagagagaaggagtcacctgcagtcttttgtttttttaaatacttagaacttagcacttgtgttattgattagtgaggagccagtaagaaacatctgggtatttggaaacaagtggtcattgttacattcatctgctgaacttaacaaaactgttcatcctgaaacaggcacaggtgatgcattctcctgctgttgcttctcagtgctctctttccaatatagatgtggtcatgtttgacttgtacagaatgttaatcatacagagaatccttgatggaattatatatgtgtgttttacttttgaatgttacaaaaggaaataactttaaaactattctcaagagaaaatattcaaagcatgaaatatgttgctttttccagaatacaaacagtatactcatgattgctaagtgtttttttatttttgcatatttattgaactgtctaattgaatacagcttgctcttgtcacctcttcaagctttcaagcctttatagaaaagcttctttgtggcttacactggaaattatgaaagcagtttttctcctaagacttttggtttctcgcattgcctctcagactaagcactaaaaagcaaagcaaaacagaactagttctgtcttaatgaaatatatcaacccaaaagtgtaatgaggaaaatgcttcattagtttcccctagcagacttttacttctcttacactgctacaccattactttcttgagacatttgtaagttctttgatacagaagagttatatttagaagtctttaatgaaggg

SEQ ID NO: 138958 - DNA, 4560 bp, Homo sapiens
  Payload ID: 7228
  Gene Symbol: GHR
  Gene Name: growth hormone receptor
  Uniprot ID: P10912
  ENST ID: ENST00000230882
  CDS Start-End: 191-2107
gcggcggcggcggcagcggcagcagcagctgctacagtggcggtggcggcggcggctgctgctgagcccgggcggcggcggggaccccgggctggggccacgcgggccggaggccccggcaccattggccccagcgcagacgcgaacccgcgctctctgatcagaggcgaagctcggaggtcctacaggtatggatctctggcagctgctgttgaccttggcactggcaggatcaagtgatgctttttctggaagtgaggccacagcagctatccttagcagagcaccctggagtctgcaaagtgttaatccaggcctaaagacaaattcttctaaggagcctaaattcaccaagtgccgttcacctgagcgagagactttttcatgccactggacagatgaggttcatcatggtacaaagaacctaggacccatacagctgttctataccagaaggaacactcaagaatggactcaagaatggaaagaatgccctgattatgtttctgctggggaaaacagctgttactttaattcatcgtttacctccatctggataccttattgtatcaagctaactagcaatggtggtacagtggatgaaaagtgtttctctgttgatgaaatagtgcaaccagatccacccattgccctcaactggactttactgaacgtcagtttaactgggattcatgcagatatccaagtgagatgggaagcaccacgcaatgcagatattcagaaaggatggatggttctggagtatgaacttcaatacaaagaagtaaatgaaactaaatggaaaatgatggaccctatattgacaacatcagttccagtgtactcattgaaagtggataaggaatatgaagtgcgtgtgagatccaaacaacgaaactctggaaattatggcgagttcagtgaggtgctctatgtaacacttcctcagatgagccaatttacatgtgaagaagatttctactttccatggctcttaattattatctttggaatatttgggctaacagtgatgctatttgtattcttattttctaaacagcaaaggattaaaatgctgattctgcccccagttccagttccaaagattaaaggaatcgatccagatctcctcaaggaaggaaaattagaggaggtgaacacaatcttagccattcatgatagctataaacccgaattccacagtgatgactcttgggttgaatttattgagctagatattgatgagccagatgaaaagactgaggaatcagacacagacagacttctaagcagtgaccatgagaaatcacatagtaacctaggggtgaaggatggcgactctggacgtaccagctgttgtgaacctgacattctggagactgatttcaatgccaatgacatacatgagggtacctcagaggttgctcagccacagaggttaaaaggggaagcagatctcttatgccttgaccagaagaatcaaaataactcaccttatcatgatgcttgccctgctactcagcagcccagtgttatccaagcagagaaaaacaaaccacaaccacttcctactgaaggagctgagtcaactcaccaagctgcccatattcagctaagcaatccaagttcactgtcaaacatcgacttttatgcccaggtgagcgacattacaccagcaggtagtgtggtcctttccccgggccaaaagaataaggcagggatgtcccaatgtgacatgcacccggaaatggtctcactctgccaagaaaacttccttatggacaatgcctacttctgtgaggcagatgccaaaaagtgcatccctgtggctcctcacatcaaggttgaatcacacatacagccaagcttaaaccaagaggacatttacatcaccacagaaagccttaccactgctgctgggaggcctgggacaggagaacatgttccaggttctgagatgcctgtcccagactatacctccattcatatagtacagtccccacagggcctcatactcaatgcgactgccttgcccttgcctgacaaagagtttctctcatcatgtggctatgtgagcacagaccaactgaacaaaatcatgccttagcctttctttggtttcccaagagctacgtatttaatagcaaagaattgactggggcaataacgtttaagccaaaacaatgtttaaaccttttttgggggagtgacaggatggggtatggattctaaaatgccttttcccaaaatgttgaaatatgatgttaaaaaaataagaagaatgcttaatcagatagatattcctattgtgcaatgtaaatattttaaagaattgtgtcagactgtttagtagcagtgattgtcttaatattgtgggtgttaatttttgatactaagcattgaatggctatgtttttaatgtatagtaaatcacgctttttgaaaaagcgaaaaaatcaggtggcttttgcggttcaggaaaattgaatgcaaaccatagcacaggctaattttttgttgtttcttaaataagaaacttttttatttaaaaaactaaaaactagaggtgagaaatttaaactataagcaagaaggcaaaaatagtttggatatgtaaaacatttattttgacataaagttgataaagattttttaataatttagacttcaagcatggctattttatattacactacacactgtgtactgcagttggtatgacccctctaaggagtgtagcaactacagtctaaagctggtttaatgttttggccaatgcacctaaagaaaaacaaactcgttttttacaaagcccttttatacctccccagactccttcaacaattctaaaatgattgtagtaatctgcattattggaatataattgttttatctgaatttttaaacaagtatttgttaatttagaaaactttaaagcgtttgcacagatcaacttaccaggcaccaaaagaagtaaaagcaaaaaagaaaacctttcttcaccaaatcttggttgatgccaaaaaaaaatacatgctaagagaagtagaaatcatagctggttcacactgaccaagatacttaagtgctgcaattgcacgcggagtgagttttttagtgcgtgcagatggtgagagataagatctatagcctctgcagcggaatctgttcacacccaacttggttttgctacataattatccaggaagggaataaggtacaagaagcattttgtaagttgaagcaaatcgaatgaaattaactgggtaatgaaacaaagagttcaagaaataagtttttgtttcacagcctataaccagacacatactcatttttcatgataatgaacagaacatagacagaagaaacaaggttttcagtccccacagataactgaaaattatttaaaccgctaaaagaaactttctttctcactaaatcttttataggatttatttaaaatagcaaaagaagaagtttcatcattttttacttcctctctgagtggactggcctcaaagcaagcattcagaagaaaaagaagcaacctcagtaatttagaaatcattttgcaatcccttaatatcctaaacatcattcatttttgttgttgttgttgttgttgagacagagtctcgctctgtcgccaggctagagtgcggtggcgcgatcttgactcactgcaatctccacctcccacaggttcaggcgattcccgtgcctcagcctcctgagtagctgggactacaggcacgcaccaccatgccaggctaatttttttgtattttagcagagacggggtttcaccatgttggccaggatggtctcgatctcctgacctcgtgatccacccgactcggcctcccaaagtgctgggattacaggtgtaagccaccgtgcccagccctaaacatcattcttgagagcattgggatatctcctgaaaaggtttatgaaaaagaagaatctcatctcagtgaagaatacttctcattttttaaaaaagcttaaaactttgaagttagctttaacttaaatagtatttcccatttatcgcagaccttttttaggaagcaagcttaatggctgataattttaaattctctctcttgcaggaaggactatgaaaagctagaattgagtgtttaaagttcaacatgttatttgtaatagatgtttgatagattttctgctactttgctgctatggttttctccaagagctacataatttagtttcatataaagtatcatcagtgtagaacctaattcaattcaaagctgtgtgtttggaagactatcttactatttcacaacagcctgacaacatttctatagccaaaaatagctaaatacctcaatcagtctcagaatgtcattttggtactttggtggccacataagccattattcactagtatgactagttgtgtctggcagtttatatttaactctctttatgtctgtggattttttccttcaaagtttaataaatttattttcttggattcctgatagtgtgcttctgttatcaaacaccaacataaaaatgatctaaacc

SEQ ID NO: 138959 - DNA, 4316 bp, Homo sapiens
  Payload ID: 7228
  Gene Symbol: GHR
  Gene Name: growth hormone receptor
  Uniprot ID: P10912
  ENST ID: ENST00000357703
  CDS Start-End: 12-1862
gtcctacaggtatggatctctggcagctgctgttgaccttggcactggcaggatcaagtgatgctttttctggaagtgaggattcttctaaggagcctaaattcaccaagtgccgttcacctgagcgagagactttttcatgccactggacagatgaggttcatcatggtacaaagaacctaggacccatacagctgttctataccagaaggaacactcaagaatggactcaagaatggaaagaatgccctgattatgtttctgctggggaaaacagctgttactttaattcatcgtttacctccatctggataccttattgtatcaagctaactagcaatggtggtacagtggatgaaaagtgtttctctgttgatgaaatagtgcaaccagatccacccattgccctcaactggactttactgaacgtcagtttaactgggattcatgcagatatccaagtgagatgggaagcaccacgcaatgcagatattcagaaaggatggatggttctggagtatgaacttcaatacaaagaagtaaatgaaactaaatggaaaatgatggaccctatattgacaacatcagttccagtgtactcattgaaagtggataaggaatatgaagtgcgtgtgagatccaaacaacgaaactctggaaattatggcgagttcagtgaggtgctctatgtaacacttcctcagatgagccaatttacatgtgaagaagatttctactttccatggctcttaattattatctttggaatatttgggctaacagtgatgctatttgtattcttattttctaaacagcaaaggattaaaatgctgattctgcccccagttccagttccaaagattaaaggaatcgatccagatctcctcaaggaaggaaaattagaggaggtgaacacaatcttagccattcatgatagctataaacccgaattccacagtgatgactcttgggttgaatttattgagctagatattgatgagccagatgaaaagactgaggaatcagacacagacagacttctaagcagtgaccatgagaaatcacatagtaacctaggggtgaaggatggcgactctggacgtaccagctgttgtgaacctgacattctggagactgatttcaatgccaatgacatacatgagggtacctcagaggttgctcagccacagaggttaaaaggggaagcagatctcttatgccttgaccagaagaatcaaaataactcaccttatcatgatgcttgccctgctactcagcagcccagtgttatccaagcagagaaaaacaaaccacaaccacttcctactgaaggagctgagtcaactcaccaagctgcccatattcagctaagcaatccaagttcactgtcaaacatcgacttttatgcccaggtgagcgacattacaccagcaggtagtgtggtcctttccccgggccaaaagaataaggcagggatgtcccaatgtgacatgcacccggaaatggtctcactctgccaagaaaacttccttatggacaatgcctacttctgtgaggcagatgccaaaaagtgcatccctgtggctcctcacatcaaggttgaatcacacatacagccaagcttaaaccaagaggacatttacatcaccacagaaagccttaccactgctgctgggaggcctgggacaggagaacatgttccaggttctgagatgcctgtcccagactatacctccattcatatagtacagtccccacagggcctcatactcaatgcgactgccttgcccttgcctgacaaagagtttctctcatcatgtggctatgtgagcacagaccaactgaacaaaatcatgccttagcctttctttggtttcccaagagctacgtatttaatagcaaagaattgactggggcaataacgtttaagccaaaacaatgtttaaaccttttttgggggagtgacaggatggggtatggattctaaaatgccttttcccaaaatgttgaaatatgatgttaaaaaaataagaagaatgcttaatcagatagatattcctattgtgcaatgtaaatattttaaagaattgtgtcagactgtttagtagcagtgattgtcttaatattgtgggtgttaatttttgatactaagcattgaatggctatgtttttaatgtatagtaaatcacgctttttgaaaaagcgaaaaaatcaggtggcttttgcggttcaggaaaattgaatgcaaaccatagcacaggctaattttttgttgtttcttaaataagaaacttttttatttaaaaaactaaaaactagaggtgagaaatttaaactataagcaagaaggcaaaaatagtttggatatgtaaaacatttattttgacataaagttgataaagattttttaataatttagacttcaagcatggctattttatattacactacacactgtgtactgcagttggtatgacccctctaaggagtgtagcaactacagtctaaagctggtttaatgttttggccaatgcacctaaagaaaaacaaactcgttttttacaaagcccttttatacctccccagactccttcaacaattctaaaatgattgtagtaatctgcattattggaatataattgttttatctgaatttttaaacaagtatttgttaatttagaaaactttaaagcgtttgcacagatcaacttaccaggcaccaaaagaagtaaaagcaaaaaagaaaacctttcttcaccaaatcttggttgatgccaaaaaaaaatacatgctaagagaagtagaaatcatagctggttcacactgaccaagatacttaagtgctgcaattgcacgcggagtgagttttttagtgcgtgcagatggtgagagataagatctatagcctctgcagcggaatctgttcacacccaacttggttttgctacataattatccaggaagggaataaggtacaagaagcattttgtaagttgaagcaaatcgaatgaaattaactgggtaatgaaacaaagagttcaagaaataagtttttgtttcacagcctataaccagacacatactcatttttcatgataatgaacagaacatagacagaagaaacaaggttttcagtccccacagataactgaaaattatttaaaccgctaaaagaaactttctttctcactaaatcttttataggatttatttaaaatagcaaaagaagaagtttcatcattttttacttcctctctgagtggactggcctcaaagcaagcattcagaagaaaaagaagcaacctcagtaatttagaaatcattttgcaatcccttaatatcctaaacatcattcatttttgttgttgttgttgttgttgagacagagtctcgctctgtcgccaggctagagtgcggtggcgcgatcttgactcactgcaatctccacctcccacaggttcaggcgattcccgtgcctcagcctcctgagtagctgggactacaggcacgcaccaccatgccaggctaatttttttgtattttagcagagacggggtttcaccatgttggccaggatggtctcgatctcctgacctcgtgatccacccgactcggcctcccaaagtgctgggattacaggtgtaagccaccgtgcccagccctaaacatcattcttgagagcattgggatatctcctgaaaaggtttatgaaaaagaagaatctcatctcagtgaagaatacttctcattttttaaaaaagcttaaaactttgaagttagctttaacttaaatagtatttcccatttatcgcagaccttttttaggaagcaagcttaatggctgataattttaaattctctctcttgcaggaaggactatgaaaagctagaattgagtgtttaaagttcaacatgttatttgtaatagatgtttgatagattttctgctactttgctgctatggttttctccaagagctacataatttagtttcatataaagtatcatcagtgtagaacctaattcaattcaaagctgtgtgtttggaagactatcttactatttcacaacagcctgacaacatttctatagccaaaaatagctaaatacctcaatcagtctcagaatgtcattttggtactttggtggccacataagccattattcactagtatgactagttgtgtctggcagtttatatttaactctctttatgtctgtggattttttccttcaaagtttaataaatttattttcttggattcctgatagtgtgcttctgttatcaaacaccaacataaaaatgatctaaacca

SEQ ID NO: 138960 - DNA, 2173 bp, Homo sapiens
  Payload ID: 7228
  Gene Symbol: GHR
  Gene Name: growth hormone receptor
  ENST ID: ENST00000511135
  CDS Start-End: 20-277
gattgcaggtcctacaggtatggatctctggcagctgctgttgaccttggcactggcaggatcaagtgatgctttttctggaagtgaggccacagcagctatccttagcagagcaccctggagtctgcaaagtgttaatccaggcctaaagacaagaacactcaagaatggactcaagaatggaaagaatgccctgattatgtttctgctggggaaaacagctgttactttaattcatcgtttacctccatctggataccttattgtatcaagctaactagcaatggtggtacagtggatgaaaagtgtttctctgttgatgaaatagtgcaaccagatccacccattgccctcaactggactttactgaacgtcagtttaactgggattcatgcagatatccaagtgagatgggaagcaccacgcaatgcagatattcagaaaggatggatggttctggagtatgaacttcaatacaaagaagtaaatgaaactaaatggaaaatgatggaccctatattgacaacatcagttccagtgtactcattgaaagtggataaggaatatgaagtgcgtgtgagatccaaacaacgaaactctggaaattatggcgagttcagtgaggtgctctatgtaacacttcctcagatgagccaatttacatgtgaagaagatttctactttccatggctcttaattattatctttggaatatttgggctaacagtgatgctatttgtattcttattttctaaacagcaaaggattaaaatgctgattctgcccccagttccagttccaaagattaaaggaatcgatccagatctcctcaaggaaggaaaattagaggaggtgaacacaatcttagccattcatgatagctataaacccgaattccacagtgatgactcttgggttgaatttattgagctagatattgatgagccagatgaaaagactgaggaatcagacacagacagacttctaagcagtgaccatgagaaatcacatagtaacctaggggtgaaggatggcgactctggacgtaccagctgttgtgaacctgacattctggagactgatttcaatgccaatgacatacatgagggtacctcagaggttgctcagccacagaggttaaaaggggaagcagatctcttatgccttgaccagaagaatcaaaataactcaccttatcatgatgcttgccctgctactcagcagcccagtgttatccaagcagagaaaaacaaaccacaaccacttcctactgaaggagctgagtcaactcaccaagctgcccatattcagctaagcaatccaagttcactgtcaaacatcgacttttatgcccaggtgagcgacattacaccagcaggtagtgtggtcctttccccgggccaaaagaataaggcagggatgtcccaatgtgacatgcacccggaaatggtctcactctgccaagaaaacttccttatggacaatgcctacttctgtgaggcagatgccaaaaagtgcatccctgtggctcctcacatcaaggttgaatcacacatacagccaagcttaaaccaagaggacatttacatcaccacagaaagccttaccactgctgctgggaggcctgggacaggagaacatgttccaggttctgagatgcctgtcccagactatacctccattcatatagtacagtccccacagggcctcatactcaatgcgactgccttgcccttgcctgacaaagagtttctctcatcatgtggctatgtgagcacagaccaactgaacaaaatcatgccttagcctttctttggtttcccaagagctacgtatttaatagcaaagaattgactggggcaataacgtttaagccaaaacaatgtttaaaccttttttgggggagtgacaggatggggtatggattctaaaatgccttttcccaaaatgttgaaatatgatgttaaaaaaataagaagaatgcttaatcagatagatattcctattgtgcaatgtaaatattttaaagaattgtgtcagactgtttagtagcagtgattgtcttaatattgtgggtgttaatttttgatactaagcattgaatggctatgtttttaatgtatagtaaatcacgctttttgaaaaagcgaaaaaatcaggtggcttttgcggt

SEQ ID NO: 138961 - DNA, 566 bp, Homo sapiens
  Payload ID: 7228
  Gene Symbol: GHR
  Gene Name: growth hormone receptor
  ENST ID: ENST00000513671
  CDS Start-End: 93-281
tttgtgcgggccgcagccgcacgttggcaccgatggaactggggtcagtagagtgacagccaccagtccgcatgaactggggtcctacaggtatggatctctggcagctgctgttgaccttggcactggcaggatcaagtgatgctttttctggaagtgaggccacagcagctatccttagcagagcaccctggagtctgcaaagtgttaatccaggcctaaagacaagatggggtccatgctcacatatcaagaaaatggagtcttacatgcaagcctaatgcagagtagagaagctcaccaacttgaaggaagcatgaatgaaattacaaggaaatctagcttagaaaaattaaccctgtagcttggtttttccactctttgctcttggcaaaaggatcttacgggaaaactggagcttagagaacttatgtaacattactagcaagttgcacagctgggattcaaactgaaatccagctagcttcaaagactgtgttctttctgctgctgcatactacccctacctaccaaggctctgagattagaaagcaggatgggtgtgt

SEQ ID NO: 138962 - DNA, 4419 bp, Homo sapiens
  Payload ID: 7228
  Gene Symbol: GHR
  Gene Name: growth hormone receptor
  Uniprot ID: P10912
  ENST ID: ENST00000537449
  CDS Start-End: 49-1965
caatgatattagctatgacagcacgtatgagcctggggtcctacaggtatggatctctggcagctgctgttgaccttggcactggcaggatcaagtgatgctttttctggaagtgaggccacagcagctatccttagcagagcaccctggagtctgcaaagtgttaatccaggcctaaagacaaattcttctaaggagcctaaattcaccaagtgccgttcacctgagcgagagactttttcatgccactggacagatgaggttcatcatggtacaaagaacctaggacccatacagctgttctataccagaaggaacactcaagaatggactcaagaatggaaagaatgccctgattatgtttctgctggggaaaacagctgttactttaattcatcgtttacctccatctggataccttattgtatcaagctaactagcaatggtggtacagtggatgaaaagtgtttctctgttgatgaaatagtgcaaccagatccacccattgccctcaactggactttactgaacgtcagtttaactgggattcatgcagatatccaagtgagatgggaagcaccacgcaatgcagatattcagaaaggatggatggttctggagtatgaacttcaatacaaagaagtaaatgaaactaaatggaaaatgatggaccctatattgacaacatcagttccagtgtactcattgaaagtggataaggaatatgaagtgcgtgtgagatccaaacaacgaaactctggaaattatggcgagttcagtgaggtgctctatgtaacacttcctcagatgagccaatttacatgtgaagaagatttctactttccatggctcttaattattatctttggaatatttgggctaacagtgatgctatttgtattcttattttctaaacagcaaaggattaaaatgctgattctgcccccagttccagttccaaagattaaaggaatcgatccagatctcctcaaggaaggaaaattagaggaggtgaacacaatcttagccattcatgatagctataaacccgaattccacagtgatgactcttgggttgaatttattgagctagatattgatgagccagatgaaaagactgaggaatcagacacagacagacttctaagcagtgaccatgagaaatcacatagtaacctaggggtgaaggatggcgactctggacgtaccagctgttgtgaacctgacattctggagactgatttcaatgccaatgacatacatgagggtacctcagaggttgctcagccacagaggttaaaaggggaagcagatctcttatgccttgaccagaagaatcaaaataactcaccttatcatgatgcttgccctgctactcagcagcccagtgttatccaagcagagaaaaacaaaccacaaccacttcctactgaaggagctgagtcaactcaccaagctgcccatattcagctaagcaatccaagttcactgtcaaacatcgacttttatgcccaggtgagcgacattacaccagcaggtagtgtggtcctttccccgggccaaaagaataaggcagggatgtcccaatgtgacatgcacccggaaatggtctcactctgccaagaaaacttccttatggacaatgcctacttctgtgaggcagatgccaaaaagtgcatccctgtggctcctcacatcaaggttgaatcacacatacagccaagcttaaaccaagaggacatttacatcaccacagaaagccttaccactgctgctgggaggcctgggacaggagaacatgttccaggttctgagatgcctgtcccagactatacctccattcatatagtacagtccccacagggcctcatactcaatgcgactgccttgcccttgcctgacaaagagtttctctcatcatgtggctatgtgagcacagaccaactgaacaaaatcatgccttagcctttctttggtttcccaagagctacgtatttaatagcaaagaattgactggggcaataacgtttaagccaaaacaatgtttaaaccttttttgggggagtgacaggatggggtatggattctaaaatgccttttcccaaaatgttgaaatatgatgttaaaaaaataagaagaatgcttaatcagatagatattcctattgtgcaatgtaaatattttaaagaattgtgtcagactgtttagtagcagtgattgtcttaatattgtgggtgttaatttttgatactaagcattgaatggctatgtttttaatgtatagtaaatcacgctttttgaaaaagcgaaaaaatcaggtggcttttgcggttcaggaaaattgaatgcaaaccatagcacaggctaattttttgttgtttcttaaataagaaacttttttatttaaaaaactaaaaactagaggtgagaaatttaaactataagcaagaaggcaaaaatagtttggatatgtaaaacatttattttgacataaagttgataaagattttttaataatttagacttcaagcatggctattttatattacactacacactgtgtactgcagttggtatgacccctctaaggagtgtagcaactacagtctaaagctggtttaatgttttggccaatgcacctaaagaaaaacaaactcgttttttacaaagcccttttatacctccccagactccttcaacaattctaaaatgattgtagtaatctgcattattggaatataattgttttatctgaatttttaaacaagtatttgttaatttagaaaactttaaagcgtttgcacagatcaacttaccaggcaccaaaagaagtaaaagcaaaaaagaaaacctttcttcaccaaatcttggttgatgccaaaaaaaaatacatgctaagagaagtagaaatcatagctggttcacactgaccaagatacttaagtgctgcaattgcacgcggagtgagttttttagtgcgtgcagatggtgagagataagatctatagcctctgcagcggaatctgttcacacccaacttggttttgctacataattatccaggaagggaataaggtacaagaagcattttgtaagttgaagcaaatcgaatgaaattaactgggtaatgaaacaaagagttcaagaaataagtttttgtttcacagcctataaccagacacatactcatttttcatgataatgaacagaacatagacagaagaaacaaggttttcagtccccacagataactgaaaattatttaaaccgctaaaagaaactttctttctcactaaatcttttataggatttatttaaaatagcaaaagaagaagtttcatcattttttacttcctctctgagtggactggcctcaaagcaagcattcagaagaaaaagaagcaacctcagtaatttagaaatcattttgcaatcccttaatatcctaaacatcattcatttttgttgttgttgttgttgttgagacagagtctcgctctgtcgccaggctagagtgcggtggcgcgatcttgactcactgcaatctccacctcccacaggttcaggcgattcccgtgcctcagcctcctgagtagctgggactacaggcacgcaccaccatgccaggctaatttttttgtattttagcagagacggggtttcaccatgttggccaggatggtctcgatctcctgacctcgtgatccacccgactcggcctcccaaagtgctgggattacaggtgtaagccaccgtgcccagccctaaacatcattcttgagagcattgggatatctcctgaaaaggtttatgaaaaagaagaatctcatctcagtgaagaatacttctcattttttaaaaaagcttaaaactttgaagttagctttaacttaaatagtatttcccatttatcgcagaccttttttaggaagcaagcttaatggctgataattttaaattctctctcttgcaggaaggactatgaaaagctagaattgagtgtttaaagttcaacatgttatttgtaatagatgtttgatagattttctgctactttgctgctatggttttctccaagagctacataatttagtttcatataaagtatcatcagtgtagaacctaattcaattcaaagctgtgtgtttggaagactatcttactatttcacaacagcctgacaacatttctatagccaaaaatagctaaatacctcaatcagtctcagaatgtcattttggtactttggtggccacataagccattattcactagtatgactagttgtgtctggcagtttatatttaactctctttatgtctgtggattttttccttcaaagtttaataaatttattttcttggattcctgatagtgtgcttctgttatcaaacaccaacataaaaatgatctaaacca

SEQ ID NO: 138963 - DNA, 4814 bp, Homo sapiens
  Payload ID: 7228
  Gene Symbol: GHR
  Gene Name: growth hormone receptor
  Uniprot ID: P10912
  ENST ID: ENST00000615111
  CDS Start-End: 444-2360
ggagagactggggaggtcgagctgtgcgcgtggacacagcgcgcagagcgcgcggtcttttgcgcgtttgtgcgggccgcagccgcacgttggcaccgatggaactggggtcagtagagtgacagccaccagtccgcatgaactgggttaaaatgagcaacttctttaaccagaactgaccttgaagacaaatggctaaaataaaacatttgctgaattcactgggcgcatcttacaagtaatttttggattctgcattgactacctacaagtgccttctgggtgcaagtccacaggcaagatttgttctgcaaatcttccatgaccaaggtcacctctttggattggcagacccagggagtccatattgggaagataaattcacacttcaccccttgttgagatctccagccttgctcctctgataaccaggtcctacaggtatggatctctggcagctgctgttgaccttggcactggcaggatcaagtgatgctttttctggaagtgaggccacagcagctatccttagcagagcaccctggagtctgcaaagtgttaatccaggcctaaagacaaattcttctaaggagcctaaattcaccaagtgccgttcacctgagcgagagactttttcatgccactggacagatgaggttcatcatggtacaaagaacctaggacccatacagctgttctataccagaaggaacactcaagaatggactcaagaatggaaagaatgccctgattatgtttctgctggggaaaacagctgttactttaattcatcgtttacctccatctggataccttattgtatcaagctaactagcaatggtggtacagtggatgaaaagtgtttctctgttgatgaaatagtgcaaccagatccacccattgccctcaactggactttactgaacgtcagtttaactgggattcatgcagatatccaagtgagatgggaagcaccacgcaatgcagatattcagaaaggatggatggttctggagtatgaacttcaatacaaagaagtaaatgaaactaaatggaaaatgatggaccctatattgacaacatcagttccagtgtactcattgaaagtggataaggaatatgaagtgcgtgtgagatccaaacaacgaaactctggaaattatggcgagttcagtgaggtgctctatgtaacacttcctcagatgagccaatttacatgtgaagaagatttctactttccatggctcttaattattatctttggaatatttgggctaacagtgatgctatttgtattcttattttctaaacagcaaaggattaaaatgctgattctgcccccagttccagttccaaagattaaaggaatcgatccagatctcctcaaggaaggaaaattagaggaggtgaacacaatcttagccattcatgatagctataaacccgaattccacagtgatgactcttgggttgaatttattgagctagatattgatgagccagatgaaaagactgaggaatcagacacagacagacttctaagcagtgaccatgagaaatcacatagtaacctaggggtgaaggatggcgactctggacgtaccagctgttgtgaacctgacattctggagactgatttcaatgccaatgacatacatgagggtacctcagaggttgctcagccacagaggttaaaaggggaagcagatctcttatgccttgaccagaagaatcaaaataactcaccttatcatgatgcttgccctgctactcagcagcccagtgttatccaagcagagaaaaacaaaccacaaccacttcctactgaaggagctgagtcaactcaccaagctgcccatattcagctaagcaatccaagttcactgtcaaacatcgacttttatgcccaggtgagcgacattacaccagcaggtagtgtggtcctttccccgggccaaaagaataaggcagggatgtcccaatgtgacatgcacccggaaatggtctcactctgccaagaaaacttccttatggacaatgcctacttctgtgaggcagatgccaaaaagtgcatccctgtggctcctcacatcaaggttgaatcacacatacagccaagcttaaaccaagaggacatttacatcaccacagaaagccttaccactgctgctgggaggcctgggacaggagaacatgttccaggttctgagatgcctgtcccagactatacctccattcatatagtacagtccccacagggcctcatactcaatgcgactgccttgcccttgcctgacaaagagtttctctcatcatgtggctatgtgagcacagaccaactgaacaaaatcatgccttagcctttctttggtttcccaagagctacgtatttaatagcaaagaattgactggggcaataacgtttaagccaaaacaatgtttaaaccttttttgggggagtgacaggatggggtatggattctaaaatgccttttcccaaaatgttgaaatatgatgttaaaaaaataagaagaatgcttaatcagatagatattcctattgtgcaatgtaaatattttaaagaattgtgtcagactgtttagtagcagtgattgtcttaatattgtgggtgttaatttttgatactaagcattgaatggctatgtttttaatgtatagtaaatcacgctttttgaaaaagcgaaaaaatcaggtggcttttgcggttcaggaaaattgaatgcaaaccatagcacaggctaattttttgttgtttcttaaataagaaacttttttatttaaaaaactaaaaactagaggtgagaaatttaaactataagcaagaaggcaaaaatagtttggatatgtaaaacatttattttgacataaagttgataaagattttttaataatttagacttcaagcatggctattttatattacactacacactgtgtactgcagttggtatgacccctctaaggagtgtagcaactacagtctaaagctggtttaatgttttggccaatgcacctaaagaaaaacaaactcgttttttacaaagcccttttatacctccccagactccttcaacaattctaaaatgattgtagtaatctgcattattggaatataattgttttatctgaatttttaaacaagtatttgttaatttagaaaactttaaagcgtttgcacagatcaacttaccaggcaccaaaagaagtaaaagcaaaaaagaaaacctttcttcaccaaatcttggttgatgccaaaaaaaaatacatgctaagagaagtagaaatcatagctggttcacactgaccaagatacttaagtgctgcaattgcacgcggagtgagttttttagtgcgtgcagatggtgagagataagatctatagcctctgcagcggaatctgttcacacccaacttggttttgctacataattatccaggaagggaataaggtacaagaagcattttgtaagttgaagcaaatcgaatgaaattaactgggtaatgaaacaaagagttcaagaaataagtttttgtttcacagcctataaccagacacatactcatttttcatgataatgaacagaacatagacagaagaaacaaggttttcagtccccacagataactgaaaattatttaaaccgctaaaagaaactttctttctcactaaatcttttataggatttatttaaaatagcaaaagaagaagtttcatcattttttacttcctctctgagtggactggcctcaaagcaagcattcagaagaaaaagaagcaacctcagtaatttagaaatcattttgcaatcccttaatatcctaaacatcattcatttttgttgttgttgttgttgttgagacagagtctcgctctgtcgccaggctagagtgcggtggcgcgatcttgactcactgcaatctccacctcccacaggttcaggcgattcccgtgcctcagcctcctgagtagctgggactacaggcacgcaccaccatgccaggctaatttttttgtattttagcagagacggggtttcaccatgttggccaggatggtctcgatctcctgacctcgtgatccacccgactcggcctcccaaagtgctgggattacaggtgtaagccaccgtgcccagccctaaacatcattcttgagagcattgggatatctcctgaaaaggtttatgaaaaagaagaatctcatctcagtgaagaatacttctcattttttaaaaaagcttaaaactttgaagttagctttaacttaaatagtatttcccatttatcgcagaccttttttaggaagcaagcttaatggctgataattttaaattctctctcttgcaggaaggactatgaaaagctagaattgagtgtttaaagttcaacatgttatttgtaatagatgtttgatagattttctgctactttgctgctatggttttctccaagagctacataatttagtttcatataaagtatcatcagtgtagaacctaattcaattcaaagctgtgtgtttggaagactatcttactatttcacaacagcctgacaacatttctatagccaaaaatagctaaatacctcaatcagtctcagaatgtcattttggtactttggtggccacataagccattattcactagtatgactagttgtgtctggcagtttatatttaactctctttatgtctgtggattttttccttcaaagtttaataaatttattttcttggattcctgatagtgtgcttctgttatcaaacaccaacataaaaatgatctaaacca

SEQ ID NO: 138964 - DNA, 4699 bp, Homo sapiens
  Payload ID: 7228
  Gene Symbol: GHR
  Gene Name: growth hormone receptor
  Uniprot ID: P10912
  ENST ID: ENST00000612382
  CDS Start-End: 329-2245
agatatgtgtgtgtgtgcatgagagagagagattgagaatgactgatttgggagggattttgtgaaggtttatatatcaaagcagaaagaccaagaatttagagattaatacatgccaagtggtaaccaagaaacttctgtgggatcccacctccaacccctccctctctgtcagattttaaccaaatcagtgtgatgtgatctgcttgcatatatgagtgaaagaaaaaggaaatttaaaaagttcttgatataaagcctggaggaaacaatacgaaaatccagcctctatttcagcaatatctgccggactattggtcctacaggtatggatctctggcagctgctgttgaccttggcactggcaggatcaagtgatgctttttctggaagtgaggccacagcagctatccttagcagagcaccctggagtctgcaaagtgttaatccaggcctaaagacaaattcttctaaggagcctaaattcaccaagtgccgttcacctgagcgagagactttttcatgccactggacagatgaggttcatcatggtacaaagaacctaggacccatacagctgttctataccagaaggaacactcaagaatggactcaagaatggaaagaatgccctgattatgtttctgctggggaaaacagctgttactttaattcatcgtttacctccatctggataccttattgtatcaagctaactagcaatggtggtacagtggatgaaaagtgtttctctgttgatgaaatagtgcaaccagatccacccattgccctcaactggactttactgaacgtcagtttaactgggattcatgcagatatccaagtgagatgggaagcaccacgcaatgcagatattcagaaaggatggatggttctggagtatgaacttcaatacaaagaagtaaatgaaactaaatggaaaatgatggaccctatattgacaacatcagttccagtgtactcattgaaagtggataaggaatatgaagtgcgtgtgagatccaaacaacgaaactctggaaattatggcgagttcagtgaggtgctctatgtaacacttcctcagatgagccaatttacatgtgaagaagatttctactttccatggctcttaattattatctttggaatatttgggctaacagtgatgctatttgtattcttattttctaaacagcaaaggattaaaatgctgattctgcccccagttccagttccaaagattaaaggaatcgatccagatctcctcaaggaaggaaaattagaggaggtgaacacaatcttagccattcatgatagctataaacccgaattccacagtgatgactcttgggttgaatttattgagctagatattgatgagccagatgaaaagactgaggaatcagacacagacagacttctaagcagtgaccatgagaaatcacatagtaacctaggggtgaaggatggcgactctggacgtaccagctgttgtgaacctgacattctggagactgatttcaatgccaatgacatacatgagggtacctcagaggttgctcagccacagaggttaaaaggggaagcagatctcttatgccttgaccagaagaatcaaaataactcaccttatcatgatgcttgccctgctactcagcagcccagtgttatccaagcagagaaaaacaaaccacaaccacttcctactgaaggagctgagtcaactcaccaagctgcccatattcagctaagcaatccaagttcactgtcaaacatcgacttttatgcccaggtgagcgacattacaccagcaggtagtgtggtcctttccccgggccaaaagaataaggcagggatgtcccaatgtgacatgcacccggaaatggtctcactctgccaagaaaacttccttatggacaatgcctacttctgtgaggcagatgccaaaaagtgcatccctgtggctcctcacatcaaggttgaatcacacatacagccaagcttaaaccaagaggacatttacatcaccacagaaagccttaccactgctgctgggaggcctgggacaggagaacatgttccaggttctgagatgcctgtcccagactatacctccattcatatagtacagtccccacagggcctcatactcaatgcgactgccttgcccttgcctgacaaagagtttctctcatcatgtggctatgtgagcacagaccaactgaacaaaatcatgccttagcctttctttggtttcccaagagctacgtatttaatagcaaagaattgactggggcaataacgtttaagccaaaacaatgtttaaaccttttttgggggagtgacaggatggggtatggattctaaaatgccttttcccaaaatgttgaaatatgatgttaaaaaaataagaagaatgcttaatcagatagatattcctattgtgcaatgtaaatattttaaagaattgtgtcagactgtttagtagcagtgattgtcttaatattgtgggtgttaatttttgatactaagcattgaatggctatgtttttaatgtatagtaaatcacgctttttgaaaaagcgaaaaaatcaggtggcttttgcggttcaggaaaattgaatgcaaaccatagcacaggctaattttttgttgtttcttaaataagaaacttttttatttaaaaaactaaaaactagaggtgagaaatttaaactataagcaagaaggcaaaaatagtttggatatgtaaaacatttattttgacataaagttgataaagattttttaataatttagacttcaagcatggctattttatattacactacacactgtgtactgcagttggtatgacccctctaaggagtgtagcaactacagtctaaagctggtttaatgttttggccaatgcacctaaagaaaaacaaactcgttttttacaaagcccttttatacctccccagactccttcaacaattctaaaatgattgtagtaatctgcattattggaatataattgttttatctgaatttttaaacaagtatttgttaatttagaaaactttaaagcgtttgcacagatcaacttaccaggcaccaaaagaagtaaaagcaaaaaagaaaacctttcttcaccaaatcttggttgatgccaaaaaaaaatacatgctaagagaagtagaaatcatagctggttcacactgaccaagatacttaagtgctgcaattgcacgcggagtgagttttttagtgcgtgcagatggtgagagataagatctatagcctctgcagcggaatctgttcacacccaacttggttttgctacataattatccaggaagggaataaggtacaagaagcattttgtaagttgaagcaaatcgaatgaaattaactgggtaatgaaacaaagagttcaagaaataagtttttgtttcacagcctataaccagacacatactcatttttcatgataatgaacagaacatagacagaagaaacaaggttttcagtccccacagataactgaaaattatttaaaccgctaaaagaaactttctttctcactaaatcttttataggatttatttaaaatagcaaaagaagaagtttcatcattttttacttcctctctgagtggactggcctcaaagcaagcattcagaagaaaaagaagcaacctcagtaatttagaaatcattttgcaatcccttaatatcctaaacatcattcatttttgttgttgttgttgttgttgagacagagtctcgctctgtcgccaggctagagtgcggtggcgcgatcttgactcactgcaatctccacctcccacaggttcaggcgattcccgtgcctcagcctcctgagtagctgggactacaggcacgcaccaccatgccaggctaatttttttgtattttagcagagacggggtttcaccatgttggccaggatggtctcgatctcctgacctcgtgatccacccgactcggcctcccaaagtgctgggattacaggtgtaagccaccgtgcccagccctaaacatcattcttgagagcattgggatatctcctgaaaaggtttatgaaaaagaagaatctcatctcagtgaagaatacttctcattttttaaaaaagcttaaaactttgaagttagctttaacttaaatagtatttcccatttatcgcagaccttttttaggaagcaagcttaatggctgataattttaaattctctctcttgcaggaaggactatgaaaagctagaattgagtgtttaaagttcaacatgttatttgtaatagatgtttgatagattttctgctactttgctgctatggttttctccaagagctacataatttagtttcatataaagtatcatcagtgtagaacctaattcaattcaaagctgtgtgtttggaagactatcttactatttcacaacagcctgacaacatttctatagccaaaaatagctaaatacctcaatcagtctcagaatgtcattttggtactttggtggccacataagccattattcactagtatgactagttgtgtctggcagtttatatttaactctctttatgtctgtggattttttccttcaaagtttaataaatttattttcttggattcctgatagtgtgcttctgttatcaaacaccaacataaaaatgatctaaacca

SEQ ID NO: 138965 - DNA, 4524 bp, Homo sapiens
  Payload ID: 7228
  Gene Symbol: GHR
  Gene Name: growth hormone receptor
  Uniprot ID: P10912
  ENST ID: ENST00000612626
  CDS Start-End: 154-2070
ggggaatgagtagcaaagatggattaagtgagaagagtataggaggcagcagggccagaggtgtgaatagcccagaaccttctgagaagattcctttgtggacggaagaaaggggaggtttgtggaaatggtggaagataaggtcctacaggtatggatctctggcagctgctgttgaccttggcactggcaggatcaagtgatgctttttctggaagtgaggccacagcagctatccttagcagagcaccctggagtctgcaaagtgttaatccaggcctaaagacaaattcttctaaggagcctaaattcaccaagtgccgttcacctgagcgagagactttttcatgccactggacagatgaggttcatcatggtacaaagaacctaggacccatacagctgttctataccagaaggaacactcaagaatggactcaagaatggaaagaatgccctgattatgtttctgctggggaaaacagctgttactttaattcatcgtttacctccatctggataccttattgtatcaagctaactagcaatggtggtacagtggatgaaaagtgtttctctgttgatgaaatagtgcaaccagatccacccattgccctcaactggactttactgaacgtcagtttaactgggattcatgcagatatccaagtgagatgggaagcaccacgcaatgcagatattcagaaaggatggatggttctggagtatgaacttcaatacaaagaagtaaatgaaactaaatggaaaatgatggaccctatattgacaacatcagttccagtgtactcattgaaagtggataaggaatatgaagtgcgtgtgagatccaaacaacgaaactctggaaattatggcgagttcagtgaggtgctctatgtaacacttcctcagatgagccaatttacatgtgaagaagatttctactttccatggctcttaattattatctttggaatatttgggctaacagtgatgctatttgtattcttattttctaaacagcaaaggattaaaatgctgattctgcccccagttccagttccaaagattaaaggaatcgatccagatctcctcaaggaaggaaaattagaggaggtgaacacaatcttagccattcatgatagctataaacccgaattccacagtgatgactcttgggttgaatttattgagctagatattgatgagccagatgaaaagactgaggaatcagacacagacagacttctaagcagtgaccatgagaaatcacatagtaacctaggggtgaaggatggcgactctggacgtaccagctgttgtgaacctgacattctggagactgatttcaatgccaatgacatacatgagggtacctcagaggttgctcagccacagaggttaaaaggggaagcagatctcttatgccttgaccagaagaatcaaaataactcaccttatcatgatgcttgccctgctactcagcagcccagtgttatccaagcagagaaaaacaaaccacaaccacttcctactgaaggagctgagtcaactcaccaagctgcccatattcagctaagcaatccaagttcactgtcaaacatcgacttttatgcccaggtgagcgacattacaccagcaggtagtgtggtcctttccccgggccaaaagaataaggcagggatgtcccaatgtgacatgcacccggaaatggtctcactctgccaagaaaacttccttatggacaatgcctacttctgtgaggcagatgccaaaaagtgcatccctgtggctcctcacatcaaggttgaatcacacatacagccaagcttaaaccaagaggacatttacatcaccacagaaagccttaccactgctgctgggaggcctgggacaggagaacatgttccaggttctgagatgcctgtcccagactatacctccattcatatagtacagtccccacagggcctcatactcaatgcgactgccttgcccttgcctgacaaagagtttctctcatcatgtggctatgtgagcacagaccaactgaacaaaatcatgccttagcctttctttggtttcccaagagctacgtatttaatagcaaagaattgactggggcaataacgtttaagccaaaacaatgtttaaaccttttttgggggagtgacaggatggggtatggattctaaaatgccttttcccaaaatgttgaaatatgatgttaaaaaaataagaagaatgcttaatcagatagatattcctattgtgcaatgtaaatattttaaagaattgtgtcagactgtttagtagcagtgattgtcttaatattgtgggtgttaatttttgatactaagcattgaatggctatgtttttaatgtatagtaaatcacgctttttgaaaaagcgaaaaaatcaggtggcttttgcggttcaggaaaattgaatgcaaaccatagcacaggctaattttttgttgtttcttaaataagaaacttttttatttaaaaaactaaaaactagaggtgagaaatttaaactataagcaagaaggcaaaaatagtttggatatgtaaaacatttattttgacataaagttgataaagattttttaataatttagacttcaagcatggctattttatattacactacacactgtgtactgcagttggtatgacccctctaaggagtgtagcaactacagtctaaagctggtttaatgttttggccaatgcacctaaagaaaaacaaactcgttttttacaaagcccttttatacctccccagactccttcaacaattctaaaatgattgtagtaatctgcattattggaatataattgttttatctgaatttttaaacaagtatttgttaatttagaaaactttaaagcgtttgcacagatcaacttaccaggcaccaaaagaagtaaaagcaaaaaagaaaacctttcttcaccaaatcttggttgatgccaaaaaaaaatacatgctaagagaagtagaaatcatagctggttcacactgaccaagatacttaagtgctgcaattgcacgcggagtgagttttttagtgcgtgcagatggtgagagataagatctatagcctctgcagcggaatctgttcacacccaacttggttttgctacataattatccaggaagggaataaggtacaagaagcattttgtaagttgaagcaaatcgaatgaaattaactgggtaatgaaacaaagagttcaagaaataagtttttgtttcacagcctataaccagacacatactcatttttcatgataatgaacagaacatagacagaagaaacaaggttttcagtccccacagataactgaaaattatttaaaccgctaaaagaaactttctttctcactaaatcttttataggatttatttaaaatagcaaaagaagaagtttcatcattttttacttcctctctgagtggactggcctcaaagcaagcattcagaagaaaaagaagcaacctcagtaatttagaaatcattttgcaatcccttaatatcctaaacatcattcatttttgttgttgttgttgttgttgagacagagtctcgctctgtcgccaggctagagtgcggtggcgcgatcttgactcactgcaatctccacctcccacaggttcaggcgattcccgtgcctcagcctcctgagtagctgggactacaggcacgcaccaccatgccaggctaatttttttgtattttagcagagacggggtttcaccatgttggccaggatggtctcgatctcctgacctcgtgatccacccgactcggcctcccaaagtgctgggattacaggtgtaagccaccgtgcccagccctaaacatcattcttgagagcattgggatatctcctgaaaaggtttatgaaaaagaagaatctcatctcagtgaagaatacttctcattttttaaaaaagcttaaaactttgaagttagctttaacttaaatagtatttcccatttatcgcagaccttttttaggaagcaagcttaatggctgataattttaaattctctctcttgcaggaaggactatgaaaagctagaattgagtgtttaaagttcaacatgttatttgtaatagatgtttgatagattttctgctactttgctgctatggttttctccaagagctacataatttagtttcatataaagtatcatcagtgtagaacctaattcaattcaaagctgtgtgtttggaagactatcttactatttcacaacagcctgacaacatttctatagccaaaaatagctaaatacctcaatcagtctcagaatgtcattttggtactttggtggccacataagccattattcactagtatgactagttgtgtctggcagtttatatttaactctctttatgtctgtggattttttccttcaaagtttaataaatttattttcttggattcctgatagtgtgcttctgttatcaaacaccaacataaaaatgatctaaacca

SEQ ID NO: 138966 - DNA, 4491 bp, Homo sapiens
  Payload ID: 7228
  Gene Symbol: GHR
  Gene Name: growth hormone receptor
  Uniprot ID: P10912
  ENST ID: ENST00000618088
  CDS Start-End: 121-2037
cctcttctcagctgatttggctgcctccattgtaataggcctcatgagactccagcctaggcctggccttcagttcagcaggcagagcccagagatgtactgggcaaaggtcctacaggtatggatctctggcagctgctgttgaccttggcactggcaggatcaagtgatgctttttctggaagtgaggccacagcagctatccttagcagagcaccctggagtctgcaaagtgttaatccaggcctaaagacaaattcttctaaggagcctaaattcaccaagtgccgttcacctgagcgagagactttttcatgccactggacagatgaggttcatcatggtacaaagaacctaggacccatacagctgttctataccagaaggaacactcaagaatggactcaagaatggaaagaatgccctgattatgtttctgctggggaaaacagctgttactttaattcatcgtttacctccatctggataccttattgtatcaagctaactagcaatggtggtacagtggatgaaaagtgtttctctgttgatgaaatagtgcaaccagatccacccattgccctcaactggactttactgaacgtcagtttaactgggattcatgcagatatccaagtgagatgggaagcaccacgcaatgcagatattcagaaaggatggatggttctggagtatgaacttcaatacaaagaagtaaatgaaactaaatggaaaatgatggaccctatattgacaacatcagttccagtgtactcattgaaagtggataaggaatatgaagtgcgtgtgagatccaaacaacgaaactctggaaattatggcgagttcagtgaggtgctctatgtaacacttcctcagatgagccaatttacatgtgaagaagatttctactttccatggctcttaattattatctttggaatatttgggctaacagtgatgctatttgtattcttattttctaaacagcaaaggattaaaatgctgattctgcccccagttccagttccaaagattaaaggaatcgatccagatctcctcaaggaaggaaaattagaggaggtgaacacaatcttagccattcatgatagctataaacccgaattccacagtgatgactcttgggttgaatttattgagctagatattgatgagccagatgaaaagactgaggaatcagacacagacagacttctaagcagtgaccatgagaaatcacatagtaacctaggggtgaaggatggcgactctggacgtaccagctgttgtgaacctgacattctggagactgatttcaatgccaatgacatacatgagggtacctcagaggttgctcagccacagaggttaaaaggggaagcagatctcttatgccttgaccagaagaatcaaaataactcaccttatcatgatgcttgccctgctactcagcagcccagtgttatccaagcagagaaaaacaaaccacaaccacttcctactgaaggagctgagtcaactcaccaagctgcccatattcagctaagcaatccaagttcactgtcaaacatcgacttttatgcccaggtgagcgacattacaccagcaggtagtgtggtcctttccccgggccaaaagaataaggcagggatgtcccaatgtgacatgcacccggaaatggtctcactctgccaagaaaacttccttatggacaatgcctacttctgtgaggcagatgccaaaaagtgcatccctgtggctcctcacatcaaggttgaatcacacatacagccaagcttaaaccaagaggacatttacatcaccacagaaagccttaccactgctgctgggaggcctgggacaggagaacatgttccaggttctgagatgcctgtcccagactatacctccattcatatagtacagtccccacagggcctcatactcaatgcgactgccttgcccttgcctgacaaagagtttctctcatcatgtggctatgtgagcacagaccaactgaacaaaatcatgccttagcctttctttggtttcccaagagctacgtatttaatagcaaagaattgactggggcaataacgtttaagccaaaacaatgtttaaaccttttttgggggagtgacaggatggggtatggattctaaaatgccttttcccaaaatgttgaaatatgatgttaaaaaaataagaagaatgcttaatcagatagatattcctattgtgcaatgtaaatattttaaagaattgtgtcagactgtttagtagcagtgattgtcttaatattgtgggtgttaatttttgatactaagcattgaatggctatgtttttaatgtatagtaaatcacgctttttgaaaaagcgaaaaaatcaggtggcttttgcggttcaggaaaattgaatgcaaaccatagcacaggctaattttttgttgtttcttaaataagaaacttttttatttaaaaaactaaaaactagaggtgagaaatttaaactataagcaagaaggcaaaaatagtttggatatgtaaaacatttattttgacataaagttgataaagattttttaataatttagacttcaagcatggctattttatattacactacacactgtgtactgcagttggtatgacccctctaaggagtgtagcaactacagtctaaagctggtttaatgttttggccaatgcacctaaagaaaaacaaactcgttttttacaaagcccttttatacctccccagactccttcaacaattctaaaatgattgtagtaatctgcattattggaatataattgttttatctgaatttttaaacaagtatttgttaatttagaaaactttaaagcgtttgcacagatcaacttaccaggcaccaaaagaagtaaaagcaaaaaagaaaacctttcttcaccaaatcttggttgatgccaaaaaaaaatacatgctaagagaagtagaaatcatagctggttcacactgaccaagatacttaagtgctgcaattgcacgcggagtgagttttttagtgcgtgcagatggtgagagataagatctatagcctctgcagcggaatctgttcacacccaacttggttttgctacataattatccaggaagggaataaggtacaagaagcattttgtaagttgaagcaaatcgaatgaaattaactgggtaatgaaacaaagagttcaagaaataagtttttgtttcacagcctataaccagacacatactcatttttcatgataatgaacagaacatagacagaagaaacaaggttttcagtccccacagataactgaaaattatttaaaccgctaaaagaaactttctttctcactaaatcttttataggatttatttaaaatagcaaaagaagaagtttcatcattttttacttcctctctgagtggactggcctcaaagcaagcattcagaagaaaaagaagcaacctcagtaatttagaaatcattttgcaatcccttaatatcctaaacatcattcatttttgttgttgttgttgttgttgagacagagtctcgctctgtcgccaggctagagtgcggtggcgcgatcttgactcactgcaatctccacctcccacaggttcaggcgattcccgtgcctcagcctcctgagtagctgggactacaggcacgcaccaccatgccaggctaatttttttgtattttagcagagacggggtttcaccatgttggccaggatggtctcgatctcctgacctcgtgatccacccgactcggcctcccaaagtgctgggattacaggtgtaagccaccgtgcccagccctaaacatcattcttgagagcattgggatatctcctgaaaaggtttatgaaaaagaagaatctcatctcagtgaagaatacttctcattttttaaaaaagcttaaaactttgaagttagctttaacttaaatagtatttcccatttatcgcagaccttttttaggaagcaagcttaatggctgataattttaaattctctctcttgcaggaaggactatgaaaagctagaattgagtgtttaaagttcaacatgttatttgtaatagatgtttgatagattttctgctactttgctgctatggttttctccaagagctacataatttagtttcatataaagtatcatcagtgtagaacctaattcaattcaaagctgtgtgtttggaagactatcttactatttcacaacagcctgacaacatttctatagccaaaaatagctaaatacctcaatcagtctcagaatgtcattttggtactttggtggccacataagccattattcactagtatgactagttgtgtctggcagtttatatttaactctctttatgtctgtggattttttccttcaaagtttaataaatttattttcttggattcctgatagtgtgcttctgttatcaaacaccaacataaaaatgatctaaacca

SEQ ID NO: 138967 - DNA, 4529 bp, Homo sapiens
  Payload ID: 7228
  Gene Symbol: GHR
  Gene Name: growth hormone receptor
  ENST ID: ENST00000620156
  CDS Start-End: 138-2075
ggagagactggggaggtcgagctgtgcgcgtggacacagcgcgcagagcgcgcggtcttttgcgcgtttgtgcgggccgcagccgcacgttggcaccgatggaactggggtcagtagagtgacagccaccagtccgcatgaactggggtcctacaggtatggatctctggcagctgctgttgaccttggcactggcaggatcaagtgatgctttttctggaagtgaggccacagcagctatccttagcagagcaccctggagtctgcaaagtgttaatccaggcctaaagacaaattcttctaaggagcctaaattcaccaagtgccgttcacctgagcgagagactttttcatgccactggacagatgaggttcatcatggtacaaagaacctaggacccatacagctgttctataccagaaggaacactcaagaatggactcaagaatggaaagaatgccctgattatgtttctgctggggaaaacagctgttactttaattcatcgtttacctccatctggataccttattgtatcaagctaactagcaatggtggtacagtggatgaaaagtgtttctctgttgatgaaatagtgcaaccagatccacccattgccctcaactggactttactgaacgtcagtttaactgggattcatgcagatatccaagtgagatgggaagcaccacgcaatgcagatattcagaaaggatggatggttctggagtatgaacttcaatacaaagaagtaaatgaaactaaatggaaaatgatggaccctatattgacaacatcagttccagtgtactcattgaaagtggataaggaatatgaagtgcgtgtgagatccaaacaacgaaactctggaaattatggcgagttcagtgaggtgctctatgtaacacttcctcagatgagccaatttacatgtgaagaagatttctactttccatggctcttaattattatctttggaatatttgggctaacagtgatgctatttgtattcttattttctaaacagcaaaggattaaaatgctgattctgcccccagttccagttccaaagattaaaggaatcgatccagatctcctcaaggaaggaaaattagaggaggtgaacacaatcttagccattcatgatagctataaacccgaattccacagtgatgactcttgggttgaatttattgagctagatattgatgagccagatgaaaagactgaggaatcagacacagacagacttctaagcagtgaccatgagaaatcacatagtaacctaggggtgaaggatggcgactctggacgtaccagctgttgtgaacctgacattctggagactgatttcaatgccaatgacatacatgagggtacctcagaggttgctcagccacagaggttaaaaggggaagcagatctcttatgccttgaccagaagaatcaaaataactcaccttatcatgatgcttgccctgctactcagcagcccagtgttatccaagcagagaaaaacaaaccacaaccacttcctactgaaggagctgagtcaactcaccaagctgcccatattcagctaagcaatccaagttcactgtcaaacatcgacttttatgcccaggtgagcgacattacaccagcaggtagtgtggtcctttccccgggccaaaagaataaggcagggatgtcccaatgtgacatgcacccggaaatggtctcactctgccaagaaaacttccttatggacaatgcctacttctgtgaggcagatgccaaaaagtgcatccctgtggctcctcacatcaaggttgaatcacacatacagccaagcttaaaccaagaggacatttacatcaccacagaaagccttaccactgctgctgggaggcctgggacaggagaacatgttccaggttctgagatgcctgtcccagactatacctccattcatatagtacagtccccacagggcctcatactcaatgcgactgccttgcccttgcctgacaaagagtttctctcatcatgtggctatgtgagcacagaccaactgaacaaaatcatgccttagcctttctttggtttcccaagagctacgtatttaatagcaaagaattgactggggcaataacgtttaagccaaaacaatgtttaaaccttttttgggggagtgacaggatggggtatggattctaaaatgccttttcccaaaatgttgaaatatgatgttaaaaaaataagaagaatgcttaatcagatagatattcctattgtgcaatgtaaatattttaaagaattgtgtcagactgtttagtagcagtgattgtcttaatattgtgggtgttaatttttgatactaagcattgaatggctatgtttttaatgtatagtaaatcacgctttttgaaaaagcgaaaaaatcaggtggcttttgcggttcaggaaaattgaatgcaaaccatagcacaggctaattttttgttgtttcttaaataagaaacttttttatttaaaaaactaaaaactagaggtgagaaatttaaactataagcaagaaggcaaaaatagtttggatatgtaaaacatttattttgacataaagttgataaagattttttaataatttagacttcaagcatggctattttatattacactacacactgtgtactgcagttggtatgacccctctaaggagtgtagcaactacagtctaaagctggtttaatgttttggccaatgcacctaaagaaaaacaaactcgttttttacaaagcccttttatacctccccagactccttcaacaattctaaaatgattgtagtaatctgcattattggaatataattgttttatctgaatttttaaacaagtatttgttaatttagaaaactttaaagcgtttgcacagatcaacttaccaggcaccaaaagaagtaaaagcaaaaaagaaaacctttcttcaccaaatcttggttgatgccaaaaaaaaatacatgctaagagaagtagaaatcatagctggttcacactgaccaagatacttaagtgctgcaattgcacgcggagtgagttttttagtgcgtgcagatggtgagagataagatctatagcctctgcagcggaatctgttcacacccaacttggttttgctacataattatccaggaagggaataaggtacaagaagcattttgtaagttgaagcaaatcgaatgaaattaactgggtaatgaaacaaagagttcaagaaataagtttttgtttcacagcctataaccagacacatactcatttttcatgataatgaacagaacatagacagaagaaacaaggttttcagtccccacagataactgaaaattatttaaaccgctaaaagaaactttctttctcactaaatcttttataggatttatttaaaatagcaaaagaagaagtttcatcattttttacttcctctctgagtggactggcctcaaagcaagcattcagaagaaaaagaagcaacctcagtaatttagaaatcattttgcaatcccttaatatcctaaacatcattcatttttgttgttgttgttgttgttgagacagagtctcgctctgtcgccaggctagagtgcggtggcgcgatcttgactcactgcaatctccacctcccacaggttcaggcgattcccgtgcctcagcctcctgagtagctgggactacaggcacgcaccaccatgccaggctaatttttttgtattttagcagagacggggtttcaccatgttggccaggatggtctcgatctcctgacctcgtgatccacccgactcggcctcccaaagtgctgggattacaggtgtaagccaccgtgcccagccctaaacatcattcttgagagcattgggatatctcctgaaaaggtttatgaaaaagaagaatctcatctcagtgaagaatacttctcattttttaaaaaagcttaaaactttgaagttagctttaacttaaatagtatttcccatttatcgcagaccttttttaggaagcaagcttaatggctgataattttaaattctctctcttgcaggaaggactatgaaaagctagaattgagtgtttaaagttcaacatgttatttgtaatagatgtttgatagattttctgctactttgctgctatggttttctccaagagctacataatttagtttcatataaagtatcatcagtgtagaacctaattcaattcaaagctgtgtgtttggaagactatcttactatttcacaacagcctgacaacatttctatagccaaaaatagctaaatacctcaatcagtctcagaatgtcattttggtactttggtggccacataagccattattcactagtatgactagttgtgtctggcagtttatatttaactctctttatgtctgtggattttttccttcaaagtttaataaatttattttcttggattcctgatagtgtgcttctgttatcaaacaccaacataaaaatgatctaaacca

SEQ ID NO: 138968 - DNA, 4312 bp, Homo sapiens
  Payload ID: 7228
  Gene Symbol: GHR
  Gene Name: growth hormone receptor
  ENST ID: ENST00000622294
  CDS Start-End: 12-899
gtcctacaggtatggatctctggcagctgctgttgaccttggcactggcaggatcaagtgatgctttttctggaagtgaggccacagcagctatccttagcagagcaccctggagtctgcaaagtgttaatccaggcctaaagacaaattcttctaaggagcctaaattcaccaagtgccgttcacctgagcgagagactttttcatgccactggacagatgaggttcatcatggtacaaagaacctaggacccatacagctgttctataccagaaggaacactcaagaatggactcaagaatggaaagaatgccctgattatgtttctgctggggaaaacagctgttactttaattcatcgtttacctccatctggataccttattgtatcaagctaactagcaatggtggtacagtggatgaaaagtgtttctctgttgatgaaatagtgcaaccagatccacccattgccctcaactggactttactgaacgtcagtttaactgggattcatgcagatatccaagtgagatgggaagcaccacgcaatgcagatattcagaaaggatggatggttctggagtatgaacttcaatacaaagaagtaaatgaaactaaatggaaaatgatggaccctatattgacaacatcagttccagtgtactcattgaaagtggataaggaatatgaagtgcgtgtgagatccaaacaacgaaactctggaaattatggcgagttcagtgaggtgctctatgtaacacttcctcagatgagccaatttacatgtgaagaagatttctactttccatggctcttaattattatctttggaatatttgggctaacagtgatgctatttgtattcttattttctaaacagcaaaggaaggaaaattagaggaggtgaacacaatcttagccattcatgatagctataaacccgaattccacagtgatgactcttgggttgaatttattgagctagatattgatgagccagatgaaaagactgaggaatcagacacagacagacttctaagcagtgaccatgagaaatcacatagtaacctaggggtgaaggatggcgactctggacgtaccagctgttgtgaacctgacattctggagactgatttcaatgccaatgacatacatgagggtacctcagaggttgctcagccacagaggttaaaaggggaagcagatctcttatgccttgaccagaagaatcaaaataactcaccttatcatgatgcttgccctgctactcagcagcccagtgttatccaagcagagaaaaacaaaccacaaccacttcctactgaaggagctgagtcaactcaccaagctgcccatattcagctaagcaatccaagttcactgtcaaacatcgacttttatgcccaggtgagcgacattacaccagcaggtagtgtggtcctttccccgggccaaaagaataaggcagggatgtcccaatgtgacatgcacccggaaatggtctcactctgccaagaaaacttccttatggacaatgcctacttctgtgaggcagatgccaaaaagtgcatccctgtggctcctcacatcaaggttgaatcacacatacagccaagcttaaaccaagaggacatttacatcaccacagaaagccttaccactgctgctgggaggcctgggacaggagaacatgttccaggttctgagatgcctgtcccagactatacctccattcatatagtacagtccccacagggcctcatactcaatgcgactgccttgcccttgcctgacaaagagtttctctcatcatgtggctatgtgagcacagaccaactgaacaaaatcatgccttagcctttctttggtttcccaagagctacgtatttaatagcaaagaattgactggggcaataacgtttaagccaaaacaatgtttaaaccttttttgggggagtgacaggatggggtatggattctaaaatgccttttcccaaaatgttgaaatatgatgttaaaaaaataagaagaatgcttaatcagatagatattcctattgtgcaatgtaaatattttaaagaattgtgtcagactgtttagtagcagtgattgtcttaatattgtgggtgttaatttttgatactaagcattgaatggctatgtttttaatgtatagtaaatcacgctttttgaaaaagcgaaaaaatcaggtggcttttgcggttcaggaaaattgaatgcaaaccatagcacaggctaattttttgttgtttcttaaataagaaacttttttatttaaaaaactaaaaactagaggtgagaaatttaaactataagcaagaaggcaaaaatagtttggatatgtaaaacatttattttgacataaagttgataaagattttttaataatttagacttcaagcatggctattttatattacactacacactgtgtactgcagttggtatgacccctctaaggagtgtagcaactacagtctaaagctggtttaatgttttggccaatgcacctaaagaaaaacaaactcgttttttacaaagcccttttatacctccccagactccttcaacaattctaaaatgattgtagtaatctgcattattggaatataattgttttatctgaatttttaaacaagtatttgttaatttagaaaactttaaagcgtttgcacagatcaacttaccaggcaccaaaagaagtaaaagcaaaaaagaaaacctttcttcaccaaatcttggttgatgccaaaaaaaaatacatgctaagagaagtagaaatcatagctggttcacactgaccaagatacttaagtgctgcaattgcacgcggagtgagttttttagtgcgtgcagatggtgagagataagatctatagcctctgcagcggaatctgttcacacccaacttggttttgctacataattatccaggaagggaataaggtacaagaagcattttgtaagttgaagcaaatcgaatgaaattaactgggtaatgaaacaaagagttcaagaaataagtttttgtttcacagcctataaccagacacatactcatttttcatgataatgaacagaacatagacagaagaaacaaggttttcagtccccacagataactgaaaattatttaaaccgctaaaagaaactttctttctcactaaatcttttataggatttatttaaaatagcaaaagaagaagtttcatcattttttacttcctctctgagtggactggcctcaaagcaagcattcagaagaaaaagaagcaacctcagtaatttagaaatcattttgcaatcccttaatatcctaaacatcattcatttttgttgttgttgttgttgttgagacagagtctcgctctgtcgccaggctagagtgcggtggcgcgatcttgactcactgcaatctccacctcccacaggttcaggcgattcccgtgcctcagcctcctgagtagctgggactacaggcacgcaccaccatgccaggctaatttttttgtattttagcagagacggggtttcaccatgttggccaggatggtctcgatctcctgacctcgtgatccacccgactcggcctcccaaagtgctgggattacaggtgtaagccaccgtgcccagccctaaacatcattcttgagagcattgggatatctcctgaaaaggtttatgaaaaagaagaatctcatctcagtgaagaatacttctcattttttaaaaaagcttaaaactttgaagttagctttaacttaaatagtatttcccatttatcgcagaccttttttaggaagcaagcttaatggctgataattttaaattctctctcttgcaggaaggactatgaaaagctagaattgagtgtttaaagttcaacatgttatttgtaatagatgtttgatagattttctgctactttgctgctatggttttctccaagagctacataatttagtttcatataaagtatcatcagtgtagaacctaattcaattcaaagctgtgtgtttggaagactatcttactatttcacaacagcctgacaacatttctatagccaaaaatagctaaatacctcaatcagtctcagaatgtcattttggtactttggtggccacataagccattattcactagtatgactagttgtgtctggcagtttatatttaactctctttatgtctgtggattttttccttcaaagtttaataaatttattttcttggattcctgatagtgtgcttctgttatcaaacaccaacataaaaatgatctaaacca

SEQ ID NO: 138969 - DNA, 1294 bp, Homo sapiens
  Payload ID: 7229
  Gene Symbol: GRTP1
  Gene Name: growth hormone regulated TBC protein 1
  Uniprot ID: Q5TC63
  ENST ID: ENST00000326039
  CDS Start-End: 9-809
gcgtctggatggtgctgagtggggcccaggcgcagatggaccagaatcccggctactaccaccagcttctccagggagagagaaaccccaggctggaggacgccatcaggacagacctgaaccggaccttccccgacaacgtgaagttccggaagaccacggacccctgcttacagaggaccctgtacaatgtgctgctggcatatgggcaccataaccagggagtgggctactgccagggaatgaattttatagcaggatatctgattcttataacaaataatgaagaagaatctttttggctgttagatgctcttgttggaagaatactaccagattactacagcccggccatgctgggcctgaagaccgaccaggaggtcctcggggagctggtgcgggcgaagctgccggctgtgggggccctgatggagcgtctcggtgtgctgtggacgctgctggtgtcccgctggttcatctgcctgtttgtggacatcttgcccgtggagacagtgcttcggatctgggactgtttgtttaacgaaggctcgaagattatcttccgggtggccctgaccttaattaagcagcaccaggagttgattttggaagccaccagcgttccagacatttgcgataagtttaagcagataaccaaagggagtttcgtgatggagtgtcacacgtttatgcaggtgtgtggggctgcacgtggctcagtcccctcccagggggccccgcctcacctgcagcccgggggctgctctgaccacccggagggtgcacaggacgggcaccagtgggcatagggcacaggatgagcctccagctctgtcctgcatctgccccctgcgcctggcctccgagggctttcctgtctatggcggccctgtcttcttggccctggcactgcggacgctgctcctggtcctaatggctgtactcatctgctgtgtgtggtgccagaagtgtggcttcccgaggcccggcctccccactgggtcctggacctggcgcaggccgtatagactcaggtcctgatgagggcgttgtgggagctgtacctgacaggccttctgaggaagccaagacgccaggagaggctcaggcctgggagtcagtagtttcctaagagggagtggaggctcggggccactctgggtgcagcatggcaaacgtgggcggtatttcagcagctgggccttcatcaaagagaagaccatgttggccgggcgcggtggctcacgcctgcagtcccagcactttgggaggccaaggcgtgtggatcacctga

SEQ ID NO: 138970 - DNA, 1834 bp, Homo sapiens
  Payload ID: 7229
  Gene Symbol: GRTP1
  Gene Name: growth hormone regulated TBC protein 1
  Uniprot ID: Q5TC63
  ENST ID: ENST00000375430
  CDS Start-End: 98-1132
cgcgcccgcggtcccgccggaaggacttaagcgccccggagccgggaggcgaacttgggacccgctggcctcgctcggtgcgcgcctccctccccgcatgcagcccgccgagcgctcgcgggtccccaggatcgacccgtacggattcgagcggcctgaggacttcgacgacgccgcctacgagaagtttttctccagctacctggtcacgctcacccgcagggcgatcaaatggtcccggctgctgcagggcgggggcgtccccaggagccggacagtgaagcgctatgtccggaaaggggtcccgctggagcaccgtgcccgcgtctggatggtgctgagtggggcccaggcgcagatggaccagaatcccggctactaccaccagcttctccagggagagagaaaccccaggctggaggacgccatcaggacagacctgaaccggaccttccccgacaacgtgaagttccggaagaccacggacccctgcttacagaggaccctgtacaatgtgctgctggcatatgggcaccataaccagggagtgggctactgccagggaatgaattttatagcaggatatctgattcttataacaaataatgaagaagaatctttttggctgttagatgctcttgttggaagaatactaccagattactacagcccggccatgctgggcctgaagaccgaccaggaggtcctcggggagctggtgcgggcgaagctgccggctgtgggggccctgatggagcgtctcggtgtgctgtggacgctgctggtgtcccgctggttcatctgcctgtttgtggacatcttgcccgtggagacagtgcttcggatctgggactgtttgtttaacgaaggctcgaagattatcttccgggtggccctgaccttaattaagcagcaccaggagttgattttggaagccaccagcgttccagacatttgcgataagtttaagcagataaccaaagggagtttcgtgatggagtgtcacacgtttatgcaggtgtgtggggctgcacgtggctcagtcccctcccagggggccccgcctcacctgcagcccgggggctgctctgaccacccggagggtgcacaggacgggcaccagtgggcatagggcacaggatgagcctccagctctgtcctgcatctgccccctgcgcctggcctccgagggctttcctgtctatggcggccctgtcttcttggccctggcactgcggacgctgctcctggtcctaatggctgtactcatctgctgtgtgtggtgccagaagtgtggcttcccgaggcccggcctccccactgggtcctggacctggcgcaggccgtatagactcaggtcctgatgagggcgttgtgggagctgtacctgacaggccttctgaggaagccaagacgccaggagaggctcaggcctgggagtcagtagtttcctaagagggagtggaggctcggggccactctgggtgcagcatggcaaacgtgggcggtatttcagcagctgggccttcatcaaagagaagaccatgttggccgggcgcggtggctcacgcctgcagtcccagcactttgggaggccaaggcgtgtggatcacctgaggtcaggagttcaagaccagcctggccaacacggtgaaaccccgtctctactaaaaaatacaaaaattagccaggtgtggtggctcacgcttatgtagtcccagttactcgggaggctgaggcacgagaatcacttgaacctgggaggcggaggttgcagtgagccgagatcgcgccactgcactccagcctgggcaacagagtgagactctgtctc

SEQ ID NO: 138971 - DNA, 1384 bp, Homo sapiens
  Payload ID: 7229
  Gene Symbol: GRTP1
  Gene Name: growth hormone regulated TBC protein 1
  Uniprot ID: Q5TC63
  ENST ID: ENST00000375431
  CDS Start-End: 76-1086
ggacttaagcgccccggagccgggaggcgaacttgggacccgctggcctcgctcggtgcgcgcctccctccccgcatgcagcccgccgagcgctcgcgggtccccaggatcgacccgtacggattcgagcggcctgaggacttcgacgacgccgcctacgagaagtttttctccagctacctggtcacgctcacccgcagggcgatcaaatggtcccggctgctgcagggcgggggcgtccccaggagccggacagtgaagcgctatgtccggaaaggggtcccgctggagcaccgtgcccgcgtctggatggtgctgagtggggcccaggcgcagatggaccagaatcccggctactaccaccagcttctccagggagagagaaaccccaggctggaggacgccatcaggacagacctgaaccggaccttccccgacaacgtgaagttccggaagaccacggacccctgcttacagaggaccctgtacaatgtgctgctggcatatgggcaccataaccagggagtgggctactgccagggaatgaattttatagcaggatatctgattcttataacaaataatgaagaagaatctttttggctgttagatgctcttgttggaagaatactaccagattactacagcccggccatgctgggcctgaagaccgaccaggaggtcctcggggagctggtgcgggcgaagctgccggctgtgggggccctgatggagcgtctcggtgtgctgtggacgctgctggtgtcccgctggttcatctgcctgtttgtggacatcttgcccgtggagacagtgcttcggatctgggactgtttgtttaacgaaggctcgaagattatcttccgggtggccctgaccttaattaagcagcaccaggagttgattttggaagccaccagcgttccagacatttgcgataagtttaagcagataaccaaagggagtttcgtgatggagtgtcacacgtttatgcagaaaatattttcagaacctggaagcttatccatggccaccgtcgccaagctccgcgagagctgcagggcccggctgctggcacaggggtgagcgtgcctgtcccctgcgttgctcgtctctacactgacgatgcccctttccagagttgacactggaccaactttcactgctttcctttttagtgttgtaaatacttgacatcactacactttagttgtgaattttttaaaagagcagtttaaaatcaggtcattctaccagcttttgatgattagctatgaagtcatactttttaaagaaaacttatttttacctgagagatcaataatatataaaatgtgagtgtgggtttgtatctaataaagtatgccaacacctgtgtttgtga

SEQ ID NO: 138972 - DNA, 1073 bp, Homo sapiens
  Payload ID: 7229
  Gene Symbol: GRTP1
  Gene Name: growth hormone regulated TBC protein 1
  ENST ID: ENST00000620217
  CDS Start-End: 98-808
cgcgcccgcggtcccgccggaaggacttaagcgccccggagccgggaggcgaacttgggacccgctggcctcgctcggtgcgcgcctccctccccgcatgcagcccgccgagcgctcgcgggtccccaggatcgacccgtacggattcgagcggcctgaggacttcgacgacgccgcctacgagaagtttttctccagctacctggtcacgctcacccgcagggcgatcaaatggtcccggctgctgcagggcgggggcgtccccaggagccggacagtgaagcgctatgtccggaaaggggtcccgctggagcaccgtgcccgcgtctggatggtgctgagtggggcccaggcgcagatggaccagaatcccggctactaccaccagcttctccagggagagagaaaccccaggctggaggacgccatcaggacagacctgaaccggaccttccccgacaacgtgaagttccggaagaccacggacccctgcttacagaggaccctgtacaatgtgctgctggcatatgggcaccataaccagggagtgggctactgccagggaatgaattttatagcaggatatctgattcttataacaaataatgaagaagaatctttttggctgttagatgctcttgttggaagaatactaccagaaaatattttcagaacctggaagcttatccatggccaccgtcgccaagctccgcgagagctgcagggcccggctgctggcacaggggtgagcgtgcctgtcccctgcgttgctcgtctctacactgacgatgcccctttccagagttgacactggaccaactttcactgctttcctttttagtgttgtaaatacttgacatcactacactttagttgtgaattttttaaaagagcagtttaaaatcaggtcattctaccagcttttgatgattagctatgaagtcatactttttaaagaaaacttatttttacctgagagatcaataatatataaaatgtgagtgtgggtttgtatctaataaagtatgccaacacctgtgtttgtgatcagtttctcagctgactggaaatta

SEQ ID NO: 138973 - DNA, 461 bp, Homo sapiens
  Payload ID: 7230
  Gene Symbol: GHRH
  Gene Name: growth hormone releasing hormone
  Uniprot ID: P01286
  ENST ID: ENST00000237527
  CDS Start-End: 8-334
gtgaaggatgccactctgggtgttcttctttgtgatcctcaccctcagcaacagctcccactgctccccacctccccctttgaccctcaggatgcggcggtatgcagatgccatcttcaccaacagctaccggaaggtgctgggccagctgtccgcccgcaagctgctccaggacatcatgagcaggcagcagggagagagcaaccaagagcgaggagcaagggcacggcttggtcgtcaggtagacagcatgtgggcagaacaaaagcaaatggaattggagagcatcctggtggccctgctgcagaagcacagcaggaactcccagggatgaagattcctcctgtgacccgggctacctgtagccaaaatgcaactggatccagttaatcctctcatttctgacccactttttcctttgaaaatacaataaaattcccccataccggtgtgcatttaaa

SEQ ID NO: 138974 - DNA, 377 bp, Homo sapiens
  Payload ID: 7230
  Gene Symbol: GHRH
  Gene Name: growth hormone releasing hormone
  Uniprot ID: P01286
  ENST ID: ENST00000373611
  CDS Start-End: 1-324
atgccactctgggtgttcttctttgtgatcctcaccctcagcaacagctcccactgctccccacctccccctttgaccctcaggatgcggcggtatgcagatgccatcttcaccaacagctaccggaaggtgctgggccagctgtccgcccgcaagctgctccaggacatcatgagcaggcagcagggagagagcaaccaagagcgaggagcaagggcacggcttggtcgtcaggtagacagcatgtgggcagaacaaaagcaaatggaattggagagcatcctggtggccctgctgcagaagcacaggaactcccagggatgaagattcctcctgtgacccgggctacctgtagccaaaatgcaactggatccagt

SEQ ID NO: 138975 - DNA, 570 bp, Homo sapiens
  Payload ID: 7230
  Gene Symbol: GHRH
  Gene Name: growth hormone releasing hormone
  Uniprot ID: P01286
  ENST ID: ENST00000373614
  CDS Start-End: 113-439
tgggaacgccaggcggctgccagagcaaacacccagcccagggcccctggatttgagcagtgcctcggagcagagggatatctgccgcatcaggtgccaccccgggtgaaggatgccactctgggtgttcttctttgtgatcctcaccctcagcaacagctcccactgctccccacctccccctttgaccctcaggatgcggcggtatgcagatgccatcttcaccaacagctaccggaaggtgctgggccagctgtccgcccgcaagctgctccaggacatcatgagcaggcagcagggagagagcaaccaagagcgaggagcaagggcacggcttggtcgtcaggtagacagcatgtgggcagaacaaaagcaaatggaattggagagcatcctggtggccctgctgcagaagcacagcaggaactcccagggatgaagattcctcctgtgacccgggctacctgtagccaaaatgcaactggatccagttaatcctctcatttctgacccactttttcctttgaaaatacaataaaattcccccataccggtgtgcatttaaatgtt

SEQ ID NO: 138976 - DNA, 1602 bp, Homo sapiens
  Payload ID: 7231
  Gene Symbol: GHRHR
  Gene Name: growth hormone releasing hormone receptor
  Uniprot ID: Q02643
  ENST ID: ENST00000326139
  CDS Start-End: 47-1318
ccaaggcttactgaggctggtggagggagccactgctgggctcaccatggaccgccggatgtggggggcccacgtcttctgcgtgttgagcccgttaccgaccgtattgggccacatgcacccagaatgtgacttcatcacccagctgagagaggatgagagtgcctgtctacaagcagcagaggagatgcccaacaccaccctgggctgccctgcgacctgggatgggctgctgtgctggccaacggcaggctctggcgagtgggtcaccctcccctgcccggatttcttctctcacttcagctcagagtcaggggctgtgaaacgggattgtactatcactggctggtctgagccctttccaccttaccctgtggcctgccctgtgcctctggagctgctggctgaggaggaatcttacttctccacagtgaagattatctacaccgtgggccatagcatctctattgtagccctcttcgtggccatcaccatcctggttgctctcaggaggctccactgcccccggaactacgtccacacccagctgttcaccacttttatcctcaaggcgggagctgtgttcctgaaggatgctgcccttttccacagcgacgacactgaccactgcagcttctccactgttctatgcaaggtctctgtggccgcctcccatttcgccaccatgaccaacttcagctggctgttggcagaagccgtctacctgaactgcctcctggcctccacctcccccagctcaaggagagccttctggtggctggttctcgctggctgggggctgcccgtgctcttcactggcacgtgggtgagctgcaaactggccttcgaggacatcgcgtgctgggacctggacgacacctccccctactggtggatcatcaaagggcccattgtcctctcggtcggggtgaactttgggctttttctcaatattatccgcatcctggtgaggaaactggagccagctcagggcagcctccatacccagtctcagtattggcgtctctccaagtcgacacttttcctgatcccactctttggaattcactacatcatcttcaacttcctgccagacaatgctggcctgggcatccgcctccccctggagctgggactgggttccttccagggcttcattgttgccatcctctactgcttcctcaaccaagaggtgaggactgagatctcacggaagtggcatggccatgaccctgagcttctgccagcctggaggacccgtgctaagtggaccacgccttcccgctcggcggcaaaggtgctgacatctatgtgctaggctgcctcatcacgccactggagtccacacttgaatttgggcagctaccacgggtctgccatgctctggaggagcaagggggccacatccccaccccagctgttacccagcccggggcaggtgcagcccttcctccctgtctctgcatctgactctcttttgaggtccctgtatgtctacctctgacttctgtggtccctctgtgtctgctctcatccattcctcttactggggcctggggctctagcccaaggctcagaggagccaataaacctgtaaatgaa

SEQ ID NO: 138977 - DNA, 1241 bp, Homo sapiens
  Payload ID: 7231
  Gene Symbol: GHRHR
  Gene Name: growth hormone releasing hormone receptor
  ENST ID: ENST00000337750
  CDS Start-End: 259-465
tcacttccctggcctaggtgctgggacagtgagggcctcttttctccctactgcccttaggatgctggcagcccagctcaccactcctcacccctcaggggaataatcctctttgtgaagagatggcacctttgaagccagagaaggaaggccccatagtgtgtccctgggcaggctagacctgggccccaggcctctggagccaccctctctgttgctcagaggagctgtccatgcaaaccctgccagggtcacttgatggtccctggcacccccagccccctcctggggagagggaaggagttgtggctagagagtcttgcttgcctcccaggggctgtgaaacgggattgtactatcactggctggtctgagccctttccaccttaccctgtggcctgccctgtgcctctggagctgctggctgaggagggctgcccgtgctcttcactggcacgtgggtgagctgcaaactggccttcgaggacatcgcgtgctgggacctggacgacacctccccctactggtggatcatcaaagggcccattgtcctctcggtcggggtgaactttgggctttttctcaatattatccgcatcctggtgaggaaactggagccagctcagggcagcctccatacccagtctcagtattggcgtctctccaagtcgacacttttcctgatcccactctttggaattcactacatcatcttcaacttcctgccagacaatgctggcctgggcatccgcctccccctggagctgggactgggttccttccagggcttcattgttgccatcctctactgcttcctcaaccaagaggtgaggactgagatctcacggaagtggcatggccatgaccctgagcttctgccagcctggaggacccgtgctaagtggaccacgccttcccgctcggcggcaaaggtgctgacatctatgtgctaggctgcctcatcacgccactggagtccacacttgaatttgggcagctaccacgggtctgccatgctctggaggagcaagggggccacatccccaccccagctgttacccagcccggggcaggtgcagcccttcctccctgtctctgcatctgactctcttttgaggtccctgtatgtctacctctgacttctgtggtccctctgtgtctgctctcatccattcctcttactggggcctggggctctagcccaaggctcagaggagccaataaacctgtaaatgaataga

SEQ ID NO: 138978 - DNA, 1459 bp, Homo sapiens
  Payload ID: 7231
  Gene Symbol: GHRHR
  Gene Name: growth hormone releasing hormone receptor
  ENST ID: ENST00000396227
  CDS Start-End: 259-696
tcacttccctggcctaggtgctgggacagtgagggcctcttttctccctactgcccttaggatgctggcagcccagctcaccactcctcacccctcaggggaataatcctctttgtgaagagatggcacctttgaagccagagaaggaaggccccatagtgtgtccctgggcaggctagacctgggccccaggcctctggagccaccctctctgttgctcagaggagctgtccatgcaaaccctgccagggtcacttgatggtccctggcacccccagccccctcctggggagagggaaggagttgtggctagagagtcttgcttgcctcccaggggctgtgaaacgggattgtactatcactggctggtctgagccctttccaccttaccctgtggcctgccctgtgcctctggagctgctggctgaggaggaatcttacttctccacagtgaagattatctacaccgtgggccatagcatctctattgtagccctcttcgtggccatcaccatcctggttgctctcaggaggctccactgcccccggaactacgtccacacccagctgttcaccacttttatcctcaaggcgggagctgtgttcctgaaggatgctgcccttttccacagcgacgacactgaccactgcagcttctccactggctgcccgtgctcttcactggcacgtgggtgagctgcaaactggccttcgaggacatcgcgtgctgggacctggacgacacctccccctactggtggatcatcaaagggcccattgtcctctcggtcggggtgaactttgggctttttctcaatattatccgcatcctggtgaggaaactggagccagctcagggcagcctccatacccagtctcagtattggcgtctctccaagtcgacacttttcctgatcccactctttggaattcactacatcatcttcaacttcctgccagacaatgctggcctgggcatccgcctccccctggagctgggactgggttccttccagggcttcattgttgccatcctctactgcttcctcaaccaagaggtgaggactgagatctcacggaagtggcatggccatgaccctgagcttctgccagcctggaggacccgtgctaagtggaccacgccttcccgctcggcggcaaaggtgctgacatctatgtgctaggctgcctcatcacgccactggagtccacacttgaatttgggcagctaccacgggtctgccatgctctggaggagcaagggggccacatccccaccccagctgttacccagcccggggcaggtgcagcccttcctccctgtctctgcatctgactctcttttgaggtccctgtatgtctacctctgacttctgtggtccctctgtgtctgctctcatccattcctcttactggggcctggggctctagcccaaggctcagaggagccaataaacct

SEQ ID NO: 138979 - DNA, 1292 bp, Homo sapiens
  Payload ID: 7231
  Gene Symbol: GHRHR
  Gene Name: growth hormone releasing hormone receptor
  ENST ID: ENST00000409316
  CDS Start-End: 438-893
tcacttccctggcctaggtgctgggacagtgagggcctcttttctccctactgcccttaggatgctggcagcccagctcaccactcctcacccctcaggggaataatcctctttgtgaagagatggcacctttgaagccagagaaggaaggccccatagggctgtgaaacgggattgtactatcactggctggtctgagccctttccaccttaccctgtggcctgccctgtgcctctggagctgctggctgaggaggaatcttacttctccacagtgaagattatctacaccgtgggccatagcatctctattgtagccctcttcgtggccatcaccatcctggttgctctcaggaggctccactgcccccggaactacgtccacacccagctgttcaccacttttatcctcaaggcgggagctgtgttcctgaaggatgctgcccttttccacagcgacgacactgaccactgcagcttctccactggctgcccgtgctcttcactggcacgtgggtgagctgcaaactggccttcgaggacatcgcgtgctgggacctggacgacacctccccctactggtggatcatcaaagggcccattgtcctctcggtcggggtgaactttgggctttttctcaatattatccgcatcctggtgaggaaactggagccagctcagggcagcctccatacccagtctcagtattggcgtctctccaagtcgacacttttcctgatcccactctttggaattcactacatcatcttcaacttcctgccagacaatgctggcctgggcatccgcctccccctggagctgggactgggttccttccagggcttcattgttgccatcctctactgcttcctcaaccaagaggtgaggactgagatctcacggaagtggcatggccatgaccctgagcttctgccagcctggaggacccgtgctaagtggaccacgccttcccgctcggcggcaaaggtgctgacatctatgtgctaggctgcctcatcacgccactggagtccacacttgaatttgggcagctaccacgggtctgccatgctctggaggagcaagggggccacatccccaccccagctgttacccagcccggggcaggtgcagcccttcctccctgtctctgcatctgactctcttttgaggtccctgtatgtctacctctgacttctgtggtccctctgtgtctgctctcatccattcctcttactggggcctggggctctagcccaaggctcagaggagccaataaacctgtaaatgaa

SEQ ID NO: 138980 - DNA, 1613 bp, Homo sapiens
  Payload ID: 7231
  Gene Symbol: GHRHR
  Gene Name: growth hormone releasing hormone receptor
  ENST ID: ENST00000409904
  CDS Start-End: 259-1338
tcacttccctggcctaggtgctgggacagtgagggcctcttttctccctactgcccttaggatgctggcagcccagctcaccactcctcacccctcaggggaataatcctctttgtgaagagatggcacctttgaagccagagaaggaaggccccatagtgtgtccctgggcaggctagacctgggccccaggcctctggagccaccctctctgttgctcagaggagctgtccatgcaaaccctgccagggtcacttgatggtccctggcacccccagccccctcctggggagagggaaggagttgtggctagagagtcttgcttgcctcccaggggctgtgaaacgggattgtactatcactggctggtctgagccctttccaccttaccctgtggcctgccctgtgcctctggagctgctggctgaggaggaatcttacttctccacagtgaagattatctacaccgtgggccatagcatctctattgtagccctcttcgtggccatcaccatcctggttgctctcaggaggctccactgcccccggaactacgtccacacccagctgttcaccacttttatcctcaaggcgggagctgtgttcctgaaggatgctgcccttttccacagcgacgacactgaccactgcagcttctccactgttctatgcaaggtctctgtggccgcctcccatttcgccaccatgaccaacttcagctggctgttggcagaagccgtctacctgaactgcctcctggcctccacctcccccagctcaaggagagccttctggtggctggttctcgctggctgggggctgcccgtgctcttcactggcacgtgggtgagctgcaaactggccttcgaggacatcgcgtgctgggacctggacgacacctccccctactggtggatcatcaaagggcccattgtcctctcggtcggggtgaactttgggctttttctcaatattatccgcatcctggtgaggaaactggagccagctcagggcagcctccatacccagtctcagtattggcgtctctccaagtcgacacttttcctgatcccactctttggaattcactacatcatcttcaacttcctgccagacaatgctggcctgggcatccgcctccccctggagctgggactgggttccttccagggcttcattgttgccatcctctactgcttcctcaaccaagaggtgaggactgagatctcacggaagtggcatggccatgaccctgagcttctgccagcctggaggacccgtgctaagtggaccacgccttcccgctcggcggcaaaggtgctgacatctatgtgctaggctgcctcatcacgccactggagtccacacttgaatttgggcagctaccacgggtctgccatgctctggaggagcaagggggccacatccccaccccagctgttacccagcccggggcaggtgcagcccttcctccctgtctctgcatctgactctcttttgaggtccctgtatgtctacctctgacttctgtggtccctctgtgtctgctctcatccattcctcttactggggcctggggctctagcccaaggctcagaggagccaataaacct

SEQ ID NO: 138981 - DNA, 923 bp, Homo sapiens
  Payload ID: 7231
  Gene Symbol: GHRHR
  Gene Name: growth hormone releasing hormone receptor
  ENST ID: ENST00000611037
  CDS Start-End: 131-754
ccactgcccccggaactacgtccacacccagctgttcaccacttttatcctcaaggcgggagctgtgttcctgaaggatgctgcccttttccacagcgacgacactgaccactgcagcttctccactgtaatggccatgggtgaaggggctgggcaggtgggggagagaggaggttctatgcaaggtctctgtggccgcctcccatttcgccaccatgaccaacttcagctggctgttggcagaagccgtctacctgaactgcctcctggcctccacctcccccagctcaaggagagccttctggtggctggttctcgctggctgggggctgcccgtgctcttcactggcacgtgggtgagctgcaaactggccttcgaggacatcgcgtgctgggacctggacgacacctccccctactggtggatcatcaaagggcccattgtcctctcggtcggggtgaactttgggctttttctcaatattatccgcatcctggtgaggaaactggagccagctcagggcagcctccatacccagtctcagtattggcgtctctccaagtcgacacttttcctgatcccactctttggaattcactacatcatcttcaacttcctgccagacaatgctggcctgggcatccgcctccccctggagctgggactgggttccttccagggattcgcagactgggcctacgatgcagattcctgggcagatcctttgactgccagcctccccgcgggtcctgagaggagagtttcctaaagagaaggaagaaactcggacttccctcctgttatgttcgggctcctctgtgagaaagaggaggagagaggaaaatgaagggcccattctctgtccccagagagcccccaggaatgttgggaagatctgcaaggatgagcctgaacctagagg

SEQ ID NO: 138982 - DNA, 1172 bp, Homo sapiens
  Payload ID: 7232
  Gene Symbol: GHSR
  Gene Name: growth hormone secretagogue receptor
  Uniprot ID: Q92847
  ENST ID: ENST00000241256
  CDS Start-End: 44-1144
cagcgcagtcacgtcccagagcctgttcagctgagccggcagcatgtggaacgcgacgcccagcgaagagccggggttcaacctcacactggccgacctggactgggatgcttcccccggcaacgactcgctgggcgacgagctgctgcagctcttccccgcgccgctgctggcgggcgtcacagccacctgcgtggcactcttcgtggtgggcatcgctggcaacctgctcaccatgctggtggtgtcgcgcttccgcgagctgcgcaccaccaccaacctctacctgtccagcatggccttctccgatctgctcatcttcctctgcatgcccctggacctcgttcgcctctggcagtaccggccctggaacttcggcgacctcctctgcaaactcttccaattcgtcagtgagagctgcacctacgccacggtgctcaccatcacagcgctgagcgtcgagcgctacttcgccatctgcttcccactccgggccaaggtggtggtcaccaaggggcgggtgaagctggtcatcttcgtcatctgggccgtggccttctgcagcgccgggcccatcttcgtgctagtcggggtggagcacgagaacggcaccgacccttgggacaccaacgagtgccgccccaccgagtttgcggtgcgctctggactgctcacggtcatggtgtgggtgtccagcatcttcttcttccttcctgtcttctgtctcacggtcctctacagtctcatcggcaggaagctgtggcggaggaggcgcggcgatgctgtcgtgggtgcctcgctcagggaccagaaccacaagcaaaccgtgaaaatgctggctgtagtggtgtttgccttcatcctctgctggctccccttccacgtagggcgatatttattttccaaatcctttgagcctggctccttggagattgctcagatcagccagtactgcaacctcgtgtcctttgtcctcttctacctcagtgctgccatcaaccccattctgtacaacatcatgtccaagaagtaccgggtggcagtgttcagacttctgggattcgaacccttctcccagagaaagctctccactctgaaagatgaaagttctcgggcctggacagaatctagtattaatacatgacctagcacattgcgagtacagtcaccgc

SEQ ID NO: 138983 - DNA, 912 bp, Homo sapiens
  Payload ID: 7232
  Gene Symbol: GHSR
  Gene Name: growth hormone secretagogue receptor
  Uniprot ID: Q92847
  ENST ID: ENST00000427970
  CDS Start-End: 43-912
agcgcagtcacgtcccagagcctgttcagctgagccggcagcatgtggaacgcgacgcccagcgaagagccggggttcaacctcacactggccgacctggactgggatgcttcccccggcaacgactcgctgggcgacgagctgctgcagctcttccccgcgccgctgctggcgggcgtcacagccacctgcgtggcactcttcgtggtgggcatcgctggcaacctgctcaccatgctggtggtgtcgcgcttccgcgagctgcgcaccaccaccaacctctacctgtccagcatggccttctccgatctgctcatcttcctctgcatgcccctggacctcgttcgcctctggcagtaccggccctggaacttcggcgacctcctctgcaaactcttccaattcgtcagtgagagctgcacctacgccacggtgctcaccatcacagcgctgagcgtcgagcgctacttcgccatctgcttcccactccgggccaaggtggtggtcaccaaggggcgggtgaagctggtcatcttcgtcatctgggccgtggccttctgcagcgccgggcccatcttcgtgctagtcggggtggagcacgagaacggcaccgacccttgggacaccaacgagtgccgccccaccgagtttgcggtgcgctctggactgctcacggtcatggtgtgggtgtccagcatcttcttcttccttcctgtcttctgtctcacggtcctctacagtctcatcggcaggaagctgtggcggaggaggcgcggcgatgctgtcgtgggtgcctcgctcagggaccagaaccacaagcaaaccgtgaaaatgctgggtgggtctcagcgcgcgctcaggctttctctcgcgggtcctatcctctccctgtgccttctcccttctctctga

SEQ ID NO: 138984 - DNA, 8444 bp, Homo sapiens
  Payload ID: 7233
  Gene Symbol: GREB1
  Gene Name: growth regulation by estrogen in breast cancer 1
  Uniprot ID: Q4ZG55
  ENST ID: ENST00000234142
  CDS Start-End: 263-6112
gaggcagctcctagtgaaacagtctaagaggtgtcaggctctgctgagtgctaaattagagaaagctgttacttatataacttcctgtaattgcccggcagtagctgcagctgaggacagccaccctttcttcgtctctgctgagcgaaggctacacggcccttcctccttgcagctgtttcaccttctaccttgcgtggagccaggcttttgcaccgaatctgagatgccattttaaacagaagactccatcctcttgaagatgggaaattcttacgctggacagctgaagacgacacgctttgaagaggtcttgcacaattccatcgaggcatccctgcggtccaacaacctggtgcccaggcccatcttttcccagctgtacctggaagctgagcagcagcttgccgctctagaaggtggtagccgagtggacaatgaggaagaggaagaagagggagaaggagggctggaaacaaatggccccccaaaccctttccagctgcaccctctgcctgaaggatgctgtaccacagacgggttttgccaggccgggaaggacctgcgccttgtctccatttccaacgagcccatggatgtccctgcgggctttctcctcgtgggggtcaagtcccccagcctgccggaccatctcctggtgtgcgccgttgacaagaggttcttgccagatgacaatggccacaatgctcttcttggtttctctgggaattgtgttggctgtggaaagaaaggcttctgttacttcacggaattctccaatcatataaatctgaaactgaccactcaacccaagaagcagaaacacttgaagtattacctggtccgtaatgcacaagggactctaaccaaaggacctttaatctgttggaaaggctcagagtttagaagccggcagatccccgccagtacttgttccagttccctcttcccagccctggagagcacggctgccttccccagcgagcccgttcctgggacgaaccccagcatcctgatgggagctcagcaggcaggaccagcttctgatcacccctcactaaacgcagcaatgggtccggctgttttcaacggcaaagattccccgaagtgccaacaactggcaaagaataacctgttggccctgccgcgaccatcggctttaggtatcttgtcaaactccgggccccccaaaaaacgccacaaagggtggtctccagaatctccatcagctccagatggtggctgcccccaaggtggtgggaacagagctaagtatgagagcgcaggcatgtcctgcgtgccgcaggttggcttggtgggaccagcttcagtcacctttccagtggtggcctctggagaaccagtgtctgttcctgacaacttgctgaaaatatgcaaggccaagccagtgatatttaaaggccatgggaacttcccttacctctgtgggaacctgaatgacgtcgtggtcagccccctcttgtacacgtgctaccagaattcccagtctgtctcacgggcatacgagcagtacggcgcctctgccatccagcccatctccgaggagatgcagctcctgcttaccgtctactacctggtccagctggccgcggaccaggtgcccttgatggaggacctggagcagatcttcctgcgctcttggcgcgagtcgcacctgaccgagatccggcagtaccagcaggcgccgccgcagcccttcccgcccgcgcccagcgccgcggcacccgtgacctccgcgcagctgccctggctggccagcctggccgccagctcctgcaacgacagcgtgcacgtcatcgagtgtgcttactccctggccgagggcctctccgagatgttccggctgttggtcgagggcaagcttgccaagaccaactacgtggtcatcatctgcgcctgccgcagcgcggccatcgactcctgcatcgccgtcaccggaaaataccaagcccggattctttccgagagccttctcactcctgcggagtaccagaaggaagtcaattacgagctggttacggggaaggtagactcgctgggggccttctttagcaccctctgtccagagggtgacattgacattttgctggacaaatttcaccaggaaaatcaaggccatatttcttcctcactcgctgcctcttctgtcactaaagcagcatccctggatgtcagtgggacaccggtgtgcacaagttacaatctggagccacacagcatccggcccttccagctggcagtagcgcagaagctcctctcccatgtgtgttccattgcggattccagcacccaaaatctggacctgggatcctttgagaaggtggactttctcatttgcattcccccctcagaagtgacctaccagcagactctgctccatgtgtggcattcaggggttttgctggagcttggtctgaagaaagagcacatgacgaagcagagggtggaacagtatgttctgaagctagacacggaggcacagacaaaatttaaggcttttctgcaaaactccttccagaacccgcatacactttttgtcctaatccatgaccatgcgcactgggatcttgtgagtagcactgttcataacctctattctcaaagtgacccgtcggtgggattggtggaccgattgctcaactgcagggaggtgaaggaggcccccaacattgtgacacttcacgtgacctccttcccgtatgcactgcagacacagcacaccctcatcagcccctacaacgagatccactggcctgcctcctgcagtaatggagtggacttatatcatgaaaataagaagtacttcgggctgtcggagtttattgaatccaccctttcaggacacagcctccccttgctcagatacgatagctcctttgaggccatggtcactgcattaggaaaaaggttcccccgcctgcacagcgcggtgatcaggacctttgttctcgtgcagcactacgcggccgccctgatggccgtaagcggcctcccgcagatgaagaactacacgtcggtggagacgctggagatcacgcagaacctcctcaactccccgaagcagtgcccctgcggccacgggctcatggtcctgctgcgggtgccctgttcgcccctggcggtggtggcctatgagcggctggcccacgtgcgggcccggctggcgctggaggagcactttgagatcatcctgggcagtcccagctcaggcgtcaccgtggggaagcacttcgtaaagcagctcaggatgtggcagaaaattgaggatgtggagtggagaccccagacttacttggagctggagggtctgccttgcatcctgatcttcagtgggatggacccgcatggggagtccttgccgaggtctttgaggtactgtgacctgcgattgataaactcctcctgcttggtgagaacagccttggagcaggagctgggcctggctgcctactttgtgagcaacgaggttcccttggagaagggggctaggaacgaggccttggagagtgatgctgagaagctgagcagcacagacaacgaggatgaggagctggggacagaaggctctacctcggagaagagaagccccatgaaaagggagaggtcccgctcccacgactcagcatcctcatccctctcctccaaggcttccggttcagcgctcggtggcgagtcctcggctcagcccacagcactcccccagggagagcatgccaggtcgccccagccccgtggccccgcagaggagggcagagcccctggtgagaaacagaggccccgggcaagtcaggggccaccctcggccatcagcaggcacagtcccgggccgacgccccagcccgactgtagcctcaggaccggccagaggagcgtccaggtgtcggtcacctcgtcgtgctcccagctgtcctcctcctcgggctcatcctcctcatccgtggcgcccgctgccggcacgtgggtcctgcaggcctcccagtgctccttgaccaaggcctgccgccagccacccattgtcttcttgcccaagctcgtgtacgacatggttgtgtccactgacagcagtggcctgcccaaggccgcctccctcctgccctccccctcggtcatgtgggccagctctttccgccccctgctcagcaagaccatgacatccaccgagcagtccctctactaccggcagtggacggtgccccggcccagccacatggactacggcaaccgggccgagggccgcgtggacggcttccacccccgcaggctgctgctcagcggcccccctcagatcgggaagacaggtgcctacctgcagttcctcagtgtcctgtccaggatgcttgttcggctcacagaagtggatgtctatgacgaggaggagatcaatatcaacctcagagaagaatctgactggcattatctccagcttagcgacccctggccagacctggagctgttcaagaagttgccctttgactacatcattcacgacccgaagtatgaagatgccagcctgatttgttcgcactatcagggtataaagagtgaagacagagggatgtcccggaagccggaggacctttatgtgcggcgtcagacggcacggatgagactgtccaagtacgcagcgtacaacacttaccaccactgtgagcagtgccaccagtacatgggcttccacccccgctaccagctgtatgagtccaccctgcacgcctttgccttctcttactccatgctaggagaggagatccagctgcacttcatcatccccaagtccaaggagcaccactttgtcttcagccaacctggaggccagctggagagcatgcgactacccctcgtgacagacaagagccatgaatatataaaaagtccgacattcactccaaccaccggccgtcacgaacatgggctctttaatctgtaccacgcaatggacggtgccagccatttgcacgtgctggttgtcaaggaatacgagatggcaatttataagaaatattggcccaaccacatcatgctggtgctccccagtatcttcaacagtgctggagttggtgctgctcatttcctcatcaaggagctgtcctaccataacctggagctcgagcggaaccggcaggaggagctgggaatcaagccgcaggacatctggcctttcattgtgatctctgatgactcctgcgtgatgtggaacgtggtggatgtcaactctgctggggagagaagcagggagttctcctggtcggaaaggaacgtgtctttgaagcacatcatgcagcacatcgaggcggcccccgacatcatgcactacgccctgctgggcctgcggaagtggtccagcaagacccgggccagcgaggtgcaagagcccttctcccgctgccacgtgcacaacttcatcatcctgaacgtggacctgacccagaacgtgcagtacaaccagaaccggttcctgtgtgacgatgtagacttcaacctgcgggtgcacagcgccggcctcctgctctgccggttcaaccgcttcagcgtgatgaagaagcagatcgtggtgggcggccacaggtccttccacatcacatccaaggtgtctgataactctgccgcggtcgtgccggcccagtacatctgtgccccggacagcaagcacacgttcctcgcagcgcccgcccagctcctgctggagaagttcctgcagcaccacagccacctcttcttcccgctgtccctgaagaaccatgaccacccagtgctgtctgtcgactgttacctgaacctgggatctcagatttctgtttgctatgtgagctccaggccccactctttaaacatcagctgctcggacttgctgttcagtgggctgctgctgtacctctgtgactcttttgtgggagctagctttttgaaaaagtttcattttctgaaaggtgcgacgttgtgtgtcatctgtcaggaccggagctcactgcgccagacggtcgtccgcctggagctcgaggacgagtggcagttccggctgcgcgatgagttccagaccgccaatgccagggaagaccggccgctcttttttctgacgggacgacacatctgaggaagacagcggcgagttttctgaagagatgagtgctcagagccctcatgctgttgaggctaaagggaggcctggaacggtggggcgtttgactggaatggaccccagggactgtccaggtgcagcccctcctagtacacatgggcccccgaggccgtggtcctgggagccaggaagactccgcagtgggtgagaatgaaaacttgagactcccaagttctgggccagcccattgctctgggctgttttaaagcccatttcacgaggaacaaagatttacttcctgtcctgccattcgtgtgcttccatggacaaacctgatttttttctcttagttctaaagaatcttgggttattttgtagcggtgccagtatttcagtagatgggatttcagccaagtaggttcccctgtaacctcctacaaagcaatattccaaaggaacattttaactgtaaaggctggagacaagaaaaaataagtagatcgttttaataacaattatttaattgcctataagtttgctgtttcagaggctagcccaaaggcatcaaatttaataaagttaaacaaattgatttacttcagagcaaatatgatcctattaaaataatatagggtaaataccctacctcttagaaagggcaaaaatgcaaagaagctttctttaaaactaaaagggttttttggggggggagttggcggggaggaaataaggctaacagaggttgacctaaaattagccttacaaaggagaaaggaccacattgcttacttgaaacagacaatgaaaacaaccaaagtgatatataaaatagttgatgagaactagacttatgactgtagtttactagagtttagttttcagttgctgaagtagctcattttctcttactaatgtttggttcctcagggaagaatctcacttgactagagaggaggtgggaacagaagagagaaggaggcagggagatgtatttcttagggctcaccccttcacagactgacagaatggttttgttttgttttgttttgttttgttttgtttttgagatggactctagctctgtcacccaggctggagtgcagtggtgcgatctcggctcactgcaagctccgcctcccgggttctcaccattctcctgcctcagcctcccgagtagctgggactacaggcgcccaccaccacgcccggctaattttttgtattttttagtagagacggggtttcaccatgttagccaggatggtctcgatctcctgacctcgtgatccgcccgcctcggcctcccaaagtgctgggattacaggcgtgagccaccgtgcctgccccagaatggtttttaaagccacagttgagaggccacccattgcccggcgcctggacagtgatcatcttgttcatcttgttcagtcctttcttgtgtgattggaattattcatcccctttgaaagatgagaaggttgagatgcaaagagtctacctttccaagttctcactgctggaaagagctagaagcacagttcaaagttctggcttctggactctgcagtccaggtctcccttctcccacttgcctaccctcaatgccacactgtttttgaagtggcccataacttgaaggaaaagtttaaagacagttcaatttaatcatcagaatgcattcttttttttttcggagacggagtttcactcttgctgcccaggctggagtgcaatggtgcaatgacctcggctcactgcaacctctgcctcctgggttcaagtgattctccagcctcagcctcccgagtagctgggattatgggcgcccaccaccatgcccagctaatttttgtattttttttttttagtagagatggggtttcgccaggttggccaggctggtcttgtgaactcctggcctcaggtgatctgcccacctcatcctccaaaagtgctgggattacaggcatgagccactgcgcctggcctcagaatgcattcttacacatctatcctagacatttataagcactctaatggataacaatccaagaataaatgattgtaaaagatgatgccgaagagttgatgtcaatctttttttcctaagaaaaaaagtccgcgagtattaaatatttagatcaatgtttataaaatgattactttgtatatctcattattcctattttggaataaaaactgaccttctttaatcatatacttgtcttttgtaaatagcagcttttgtgtcattctccccactttattagttaatttaaattggaaaaaaccctcaaactaatattcttgtctgttccagtcttataaataaaacttataatgcatg

SEQ ID NO: 138985 - DNA, 2448 bp, Homo sapiens
  Payload ID: 7233
  Gene Symbol: GREB1
  Gene Name: growth regulation by estrogen in breast cancer 1
  Uniprot ID: Q4ZG55
  ENST ID: ENST00000263834
  CDS Start-End: 428-1657
gatactagctctgaaacttttcccctggctggcttggctgcctctccctgccgggcaggggccaggaagcctgggtgtcaggcagacccgagccaggctctgcacagcagggcattacgcgccccacgcatcctcttccatccccaggcacagatcaaaggcgcagcccaggaggcgggagcccctgcacactttccacctctgctgggcttagcctcttggctggttggtctgtggagtgcctgaagtgaccagctttttgtaagtagctgcagctgaggacagccaccctttcttcgtctctgctgagcgaaggctacacggcccttcctccttgcagctgtttcaccttctaccttgcgtggagccaggcttttgcaccgaatctgagatgccattttaaacagaagactccatcctcttgaagatgggaaattcttacgctggacagctgaagacgacacgctttgaagaggtcttgcacaattccatcgaggcatccctgcggtccaacaacctggtgcccaggcccatcttttcccagctgtacctggaagctgagcagcagcttgccgctctagaaggtggtagccgagtggacaatgaggaagaggaagaagagggagaaggagggctggaaacaaatggccccccaaaccctttccagctgcaccctctgcctgaaggatgctgtaccacagacgggttttgccaggccgggaaggacctgcgccttgtctccatttccaacgagcccatggatgtccctgcgggctttctcctcgtgggggtcaagtcccccagcctgccggaccatctcctggtgtgcgccgttgacaagaggttcttgccagatgacaatggccacaatgctcttcttggtttctctgggaattgtgttggctgtggaaagaaaggcttctgttacttcacggaattctccaatcatataaatctgaaactgaccactcaacccaagaagcagaaacacttgaagtattacctggtccgtaatgcacaagggactctaaccaaaggacctttaatctgttggaaaggctcagagtttagaagccggcagatccccgccagtacttgttccagttccctcttcccagccctggagagcacggctgccttccccagcgagcccgttcctgggacgaaccccagcatcctgatgggagctcagcaggcaggaccagcttctgatcacccctcactaaacgcagcaatgggtccggctgttttcaacggcaaagattccccgaagtgccaacaactggcaaagaataacctgttggccctgccgcgaccatcggctttaggtatcttgtcaaactccgggccccccaaaaaacgccacaaagggtggtctccagaatctccatcagctccagatggtggctgcccccaaggtggtgggaacagagctaagtatgagagcgcaggcatgtcctgcgtgccgcaggttggcttggtgggaccagcttcagtcacctttccagtggtggcctctggagaaccagtgtctgttcctgacaacttgctgaaaatatgcaaggccaagccagtgatatttaaagtatttgtaaatggtgctacccaaatggtagcccttggtccggcagaacctgcatcgccccggagcttatgagaggcgtgaattcatggacccatcctggaatcagaatcaggccccacttctgcatcagaagccctgggtggcaccagcaagtgtttggcaagcccttgagaagcagtgtctttgagaacgtgacctgtgccccaggcaccagctttactccccgagcccagcaggacatctgcatataacacacagccgaagtcagaaaatatatttttggtgactaaatggagtacctggagtacaagataacacacacacacacacacacacacacacacacacacacacacacacacgccacctttgggagctcagcagccccgagaggatttgatagcttcaccgcttcacctggttttacaaatgcggagactgaggtttagggcagttaagcttcttgcttagcatcatgtaggtaaagaatggtggaaagatatttgaacccgacctgggcaattccacctctgagggctgtcctcagaatgaatcttctgatgggctgggcacggtggctcacgcctgtaatcccagaactttgagaggccgaggcgggtagatcactttaggtcagaagttcaagatcagcctgggcaacatggtgaaaccttgtctctactaaaaatacaaaaattggccgggtgtggtggtgatgcgcacctgtcatcccagctactcgggaggctgaggtgggagaatcacttgaacttgggaggcagaggttgtggtgagccgagatcacgccactgcactccagcccggggacagagcaagacactgtctcaaaaaaaaaaaaagaa

SEQ ID NO: 138986 - DNA, 2347 bp, Homo sapiens
  Payload ID: 7233
  Gene Symbol: GREB1
  Gene Name: growth regulation by estrogen in breast cancer 1
  Uniprot ID: Q4ZG55
  ENST ID: ENST00000381483
  CDS Start-End: 252-1625
gaaagaatcaaagcgcacatcttgtactttgatgcccataggaagggctctcctctggcccctctggctttgtttggagcagaaaacaacaaactgcagctgaggacagccaccctttcttcgtctctgctgagcgaaggctacacggcccttcctccttgcagctgtttcaccttctaccttgcgtggagccaggcttttgcaccgaatctgagatgccattttaaacagaagactccatcctcttgaagatgggaaattcttacgctggacagctgaagacgacacgctttgaagaggtcttgcacaattccatcgaggcatccctgcggtccaacaacctggtgcccaggcccatcttttcccagctgtacctggaagctgagcagcagcttgccgctctagaaggtggtagccgagtggacaatgaggaagaggaagaagagggagaaggagggctggaaacaaatggccccccaaaccctttccagctgcaccctctgcctgaaggatgctgtaccacagacgggttttgccaggccgggaaggacctgcgccttgtctccatttccaacgagcccatggatgtccctgcgggctttctcctcgtgggggtcaagtcccccagcctgccggaccatctcctggtgtgcgccgttgacaagaggttcttgccagatgacaatggccacaatgctcttcttggtttctctgggaattgtgttggctgtggaaagaaaggcttctgttacttcacggaattctccaatcatataaatctgaaactgaccactcaacccaagaagcagaaacacttgaagtattacctggtccgtaatgcacaagggactctaaccaaaggacctttaatctgttggaaaggctcagagtttagaagccggcagatccccgccagtacttgttccagttccctcttcccagccctggagagcacggctgccttccccagcgagcccgttcctgggacgaaccccagcatcctgatgggagctcagcaggcaggaccagcttctgatcacccctcactaaacgcagcaatgggtccggctgttttcaacggcaaagattccccgaagtgccaacaactggcaaagaataacctgttggccctgccgcgaccatcggctttaggtatcttgtcaaactccgggccccccaaaaaacgccacaaagggtggtctccagaatctccatcagctccagatggtggctgcccccaaggtggtgggaacagagctaagtatgagagcgcaggcatgtcctgcgtgccgcaggttggcttggtgggaccagcttcagtcacctttccagtggtggcctctggagaaccagtgtctgttcctgacaacttgctgaaaatatgcaaggccaagccagtgatatttaaaggccatgggaacttcccttacctctgtgggaacctgaatgacgtcgtggtcagccccctcttgtacacgtgctaccagaattcccagtctgtctcacgggcatacgagcagtacggcgcctctgccatccagcccatctccgaggagatgcagctcctgcttaccgtctactacctggtccagctggcacatcaaatacgaaatccggacgtataaaccagacaattcataaaagagaaaataccagaaggaaacaaatattgaaaagtattcagtctcactcatcatcaaagacatgcaaatcacaaatcaagtcatctttttctgaattaataacccaaatgatggtacccagtggtgcttaggtgcggtaaaaccagcgcttgtccgatgcaccgttcgcgtggtaaactgacgcattcaggctcttgggaagcaatctgatgatatgtagtagctggttctgtaaatccacctttgagaatttaggcgaaggaagtaacgttctatatgtcaagatgtgcattgcagagggatttataaaggtgaatatttggaagaaataagagaatccacaatagagaccttgctaagtaaacggtggtgctcacgtatgatgggacattatggacacactaacagcactctttatgttggctgaaaatggcactgaaactgatgatagggtcatggttaaggaaagaatgcaagacccaaagtttatactgacaatcattgcagctatttgtaaggacagttttaatactaattccagcaatacatgtttttattccctgtcctggagtaggagaaagcctatattcccaggctgaatgttctacacatttaccactgtatatgcacatagggacagtgtaacctgtctataccaccgtagttccagtcctaactttctgaattctgtttaaagaccttct

SEQ ID NO: 138987 - DNA, 8484 bp, Homo sapiens
  Payload ID: 7233
  Gene Symbol: GREB1
  Gene Name: growth regulation by estrogen in breast cancer 1
  Uniprot ID: Q4ZG55
  ENST ID: ENST00000381486
  CDS Start-End: 301-6150
aaataaagttttttcaatggaaggcttgcagctcttgaggacctgccaaatggaagaaggacagagacctggagccctatggaaagttctgacaccatgtgtggaaggacatggcttttaacacgtgtggtgactggagtagctgcagctgaggacagccaccctttcttcgtctctgctgagcgaaggctacacggcccttcctccttgcagctgtttcaccttctaccttgcgtggagccaggcttttgcaccgaatctgagatgccattttaaacagaagactccatcctcttgaagatgggaaattcttacgctggacagctgaagacgacacgctttgaagaggtcttgcacaattccatcgaggcatccctgcggtccaacaacctggtgcccaggcccatcttttcccagctgtacctggaagctgagcagcagcttgccgctctagaaggtggtagccgagtggacaatgaggaagaggaagaagagggagaaggagggctggaaacaaatggccccccaaaccctttccagctgcaccctctgcctgaaggatgctgtaccacagacgggttttgccaggccgggaaggacctgcgccttgtctccatttccaacgagcccatggatgtccctgcgggctttctcctcgtgggggtcaagtcccccagcctgccggaccatctcctggtgtgcgccgttgacaagaggttcttgccagatgacaatggccacaatgctcttcttggtttctctgggaattgtgttggctgtggaaagaaaggcttctgttacttcacggaattctccaatcatataaatctgaaactgaccactcaacccaagaagcagaaacacttgaagtattacctggtccgtaatgcacaagggactctaaccaaaggacctttaatctgttggaaaggctcagagtttagaagccggcagatccccgccagtacttgttccagttccctcttcccagccctggagagcacggctgccttccccagcgagcccgttcctgggacgaaccccagcatcctgatgggagctcagcaggcaggaccagcttctgatcacccctcactaaacgcagcaatgggtccggctgttttcaacggcaaagattccccgaagtgccaacaactggcaaagaataacctgttggccctgccgcgaccatcggctttaggtatcttgtcaaactccgggccccccaaaaaacgccacaaagggtggtctccagaatctccatcagctccagatggtggctgcccccaaggtggtgggaacagagctaagtatgagagcgcaggcatgtcctgcgtgccgcaggttggcttggtgggaccagcttcagtcacctttccagtggtggcctctggagaaccagtgtctgttcctgacaacttgctgaaaatatgcaaggccaagccagtgatatttaaaggccatgggaacttcccttacctctgtgggaacctgaatgacgtcgtggtcagccccctcttgtacacgtgctaccagaattcccagtctgtctcacgggcatacgagcagtacggcgcctctgccatccagcccatctccgaggagatgcagctcctgcttaccgtctactacctggtccagctggccgcggaccaggtgcccttgatggaggacctggagcagatcttcctgcgctcttggcgcgagtcgcacctgaccgagatccggcagtaccagcaggcgccgccgcagcccttcccgcccgcgcccagcgccgcggcacccgtgacctccgcgcagctgccctggctggccagcctggccgccagctcctgcaacgacagcgtgcacgtcatcgagtgtgcttactccctggccgagggcctctccgagatgttccggctgttggtcgagggcaagcttgccaagaccaactacgtggtcatcatctgcgcctgccgcagcgcggccatcgactcctgcatcgccgtcaccggaaaataccaagcccggattctttccgagagccttctcactcctgcggagtaccagaaggaagtcaattacgagctggttacggggaaggtagactcgctgggggccttctttagcaccctctgtccagagggtgacattgacattttgctggacaaatttcaccaggaaaatcaaggccatatttcttcctcactcgctgcctcttctgtcactaaagcagcatccctggatgtcagtgggacaccggtgtgcacaagttacaatctggagccacacagcatccggcccttccagctggcagtagcgcagaagctcctctcccatgtgtgttccattgcggattccagcacccaaaatctggacctgggatcctttgagaaggtggactttctcatttgcattcccccctcagaagtgacctaccagcagactctgctccatgtgtggcattcaggggttttgctggagcttggtctgaagaaagagcacatgacgaagcagagggtggaacagtatgttctgaagctagacacggaggcacagacaaaatttaaggcttttctgcaaaactccttccagaacccgcatacactttttgtcctaatccatgaccatgcgcactgggatcttgtgagtagcactgttcataacctctattctcaaagtgacccgtcggtgggattggtggaccgattgctcaactgcagggaggtgaaggaggcccccaacattgtgacacttcacgtgacctccttcccgtatgcactgcagacacagcacaccctcatcagcccctacaacgagatccactggcctgcctcctgcagtaatggagtggacttatatcatgaaaataagaagtacttcgggctgtcggagtttattgaatccaccctttcaggacacagcctccccttgctcagatacgatagctcctttgaggccatggtcactgcattaggaaaaaggttcccccgcctgcacagcgcggtgatcaggacctttgttctcgtgcagcactacgcggccgccctgatggccgtaagcggcctcccgcagatgaagaactacacgtcggtggagacgctggagatcacgcagaacctcctcaactccccgaagcagtgcccctgcggccacgggctcatggtcctgctgcgggtgccctgttcgcccctggcggtggtggcctatgagcggctggcccacgtgcgggcccggctggcgctggaggagcactttgagatcatcctgggcagtcccagctcaggcgtcaccgtggggaagcacttcgtaaagcagctcaggatgtggcagaaaattgaggatgtggagtggagaccccagacttacttggagctggagggtctgccttgcatcctgatcttcagtgggatggacccgcatggggagtccttgccgaggtctttgaggtactgtgacctgcgattgataaactcctcctgcttggtgagaacagccttggagcaggagctgggcctggctgcctactttgtgagcaacgaggttcccttggagaagggggctaggaacgaggccttggagagtgatgctgagaagctgagcagcacagacaacgaggatgaggagctggggacagaaggctctacctcggagaagagaagccccatgaaaagggagaggtcccgctcccacgactcagcatcctcatccctctcctccaaggcttccggttcagcgctcggtggcgagtcctcggctcagcccacagcactcccccagggagagcatgccaggtcgccccagccccgtggccccgcagaggagggcagagcccctggtgagaaacagaggccccgggcaagtcaggggccaccctcggccatcagcaggcacagtcccgggccgacgccccagcccgactgtagcctcaggaccggccagaggagcgtccaggtgtcggtcacctcgtcgtgctcccagctgtcctcctcctcgggctcatcctcctcatccgtggcgcccgctgccggcacgtgggtcctgcaggcctcccagtgctccttgaccaaggcctgccgccagccacccattgtcttcttgcccaagctcgtgtacgacatggttgtgtccactgacagcagtggcctgcccaaggccgcctccctcctgccctccccctcggtcatgtgggccagctctttccgccccctgctcagcaagaccatgacatccaccgagcagtccctctactaccggcagtggacggtgccccggcccagccacatggactacggcaaccgggccgagggccgcgtggacggcttccacccccgcaggctgctgctcagcggcccccctcagatcgggaagacaggtgcctacctgcagttcctcagtgtcctgtccaggatgcttgttcggctcacagaagtggatgtctatgacgaggaggagatcaatatcaacctcagagaagaatctgactggcattatctccagcttagcgacccctggccagacctggagctgttcaagaagttgccctttgactacatcattcacgacccgaagtatgaagatgccagcctgatttgttcgcactatcagggtataaagagtgaagacagagggatgtcccggaagccggaggacctttatgtgcggcgtcagacggcacggatgagactgtccaagtacgcagcgtacaacacttaccaccactgtgagcagtgccaccagtacatgggcttccacccccgctaccagctgtatgagtccaccctgcacgcctttgccttctcttactccatgctaggagaggagatccagctgcacttcatcatccccaagtccaaggagcaccactttgtcttcagccaacctggaggccagctggagagcatgcgactacccctcgtgacagacaagagccatgaatatataaaaagtccgacattcactccaaccaccggccgtcacgaacatgggctctttaatctgtaccacgcaatggacggtgccagccatttgcacgtgctggttgtcaaggaatacgagatggcaatttataagaaatattggcccaaccacatcatgctggtgctccccagtatcttcaacagtgctggagttggtgctgctcatttcctcatcaaggagctgtcctaccataacctggagctcgagcggaaccggcaggaggagctgggaatcaagccgcaggacatctggcctttcattgtgatctctgatgactcctgcgtgatgtggaacgtggtggatgtcaactctgctggggagagaagcagggagttctcctggtcggaaaggaacgtgtctttgaagcacatcatgcagcacatcgaggcggcccccgacatcatgcactacgccctgctgggcctgcggaagtggtccagcaagacccgggccagcgaggtgcaagagcccttctcccgctgccacgtgcacaacttcatcatcctgaacgtggacctgacccagaacgtgcagtacaaccagaaccggttcctgtgtgacgatgtagacttcaacctgcgggtgcacagcgccggcctcctgctctgccggttcaaccgcttcagcgtgatgaagaagcagatcgtggtgggcggccacaggtccttccacatcacatccaaggtgtctgataactctgccgcggtcgtgccggcccagtacatctgtgccccggacagcaagcacacgttcctcgcagcgcccgcccagctcctgctggagaagttcctgcagcaccacagccacctcttcttcccgctgtccctgaagaaccatgaccacccagtgctgtctgtcgactgttacctgaacctgggatctcagatttctgtttgctatgtgagctccaggccccactctttaaacatcagctgctcggacttgctgttcagtgggctgctgctgtacctctgtgactcttttgtgggagctagctttttgaaaaagtttcattttctgaaaggtgcgacgttgtgtgtcatctgtcaggaccggagctcactgcgccagacggtcgtccgcctggagctcgaggacgagtggcagttccggctgcgcgatgagttccagaccgccaatgccagggaagaccggccgctcttttttctgacgggacgacacatctgaggaagacagcggcgagttttctgaagagatgagtgctcagagccctcatgctgttgaggctaaagggaggcctggaacggtggggcgtttgactggaatggaccccagggactgtccaggtgcagcccctcctagtacacatgggcccccgaggccgtggtcctgggagccaggaagactccgcagtgggtgagaatgaaaacttgagactcccaagttctgggccagcccattgctctgggctgttttaaagcccatttcacgaggaacaaagatttacttcctgtcctgccattcgtgtgcttccatggacaaacctgatttttttctcttagttctaaagaatcttgggttattttgtagcggtgccagtatttcagtagatgggatttcagccaagtaggttcccctgtaacctcctacaaagcaatattccaaaggaacattttaactgtaaaggctggagacaagaaaaaataagtagatcgttttaataacaattatttaattgcctataagtttgctgtttcagaggctagcccaaaggcatcaaatttaataaagttaaacaaattgatttacttcagagcaaatatgatcctattaaaataatatagggtaaataccctacctcttagaaagggcaaaaatgcaaagaagctttctttaaaactaaaagggttttttggggggggagttggcggggaggaaataaggctaacagaggttgacctaaaattagccttacaaaggagaaaggaccacattgcttacttgaaacagacaatgaaaacaaccaaagtgatatataaaatagttgatgagaactagacttatgactgtagtttactagagtttagttttcagttgctgaagtagctcattttctcttactaatgtttggttcctcagggaagaatctcacttgactagagaggaggtgggaacagaagagagaaggaggcagggagatgtatttcttagggctcaccccttcacagactgacagaatggttttgttttgttttgttttgttttgttttgtttttgagatggactctagctctgtcacccaggctggagtgcagtggtgcgatctcggctcactgcaagctccgcctcccgggttctcaccattctcctgcctcagcctcccgagtagctgggactacaggcgcccaccaccacgcccggctaattttttgtattttttagtagagacggggtttcaccatgttagccaggatggtctcgatctcctgacctcgtgatccgcccgcctcggcctcccaaagtgctgggattacaggcgtgagccaccgtgcctgccccagaatggtttttaaagccacagttgagaggccacccattgcccggcgcctggacagtgatcatcttgttcatcttgttcagtcctttcttgtgtgattggaattattcatcccctttgaaagatgagaaggttgagatgcaaagagtctacctttccaagttctcactgctggaaagagctagaagcacagttcaaagttctggcttctggactctgcagtccaggtctcccttctcccacttgcctaccctcaatgccacactgtttttgaagtggcccataacttgaaggaaaagtttaaagacagttcaatttaatcatcagaatgcattcttttttttttcggagacggagtttcactcttgctgcccaggctggagtgcaatggtgcaatgacctcggctcactgcaacctctgcctcctgggttcaagtgattctccagcctcagcctcccgagtagctgggattatgggcgcccaccaccatgcccagctaatttttgtattttttttttttagtagagatggggtttcgccaggttggccaggctggtcttgtgaactcctggcctcaggtgatctgcccacctcatcctccaaaagtgctgggattacaggcatgagccactgcgcctggcctcagaatgcattcttacacatctatcctagacatttataagcactctaatggataacaatccaagaataaatgattgtaaaagatgatgccgaagagttgatgtcaatctttttttcctaagaaaaaaagtccgcgagtattaaatatttagatcaatgtttataaaatgattactttgtatatctcattattcctattttggaataaaaactgaccttctttaatcatatacttgtcttttgtaaatagcagcttttgtgtcattctccccactttattagttaatttaaattggaaaaaaccctcaaactaatattcttgtctgttccagtcttataaataaaacttataatgcatgta

SEQ ID NO: 138988 - DNA, 1315 bp, Homo sapiens
  Payload ID: 7233
  Gene Symbol: GREB1
  Gene Name: growth regulation by estrogen in breast cancer 1
  ENST ID: ENST00000389825
  CDS Start-End: 312-1073
gacacggggcggctgagcagcagtgtgttcatggagaaagaatcaaagcgcacatcttgtactttgatgcccataggaagggctctcctctggcccctctggctttgtttggagcagaaaacaacaaagtgagttcaggtggtagccgagtggacaatgaggaagaggaagaagagggagaaggagggctggaaacaaatggccccccaaaccctttccagctgcaccctctgcctgaaggatgctgtaccacagacgggttttgccaggccgggaaggacctgcgccttgtctccatttccaacgagcccatggatgtccctgcgggctttctcctcgtgggggtcaagtcccccagcctgccggaccatctcctggtgtgcgccgttgacaagaggttcttgccagatgacaatggccacaatgctcttcttggtttctctgggaattgtgttggctgtggaaagaaaggcttctgttacttcacggaattctccaatcatataaatctgaaactgaccactcaacccaagaagcagaaacacttgaagtattacctggtccgtaatgcacaagggactctaaccaaaggacctttaatctgttggaaaggctcagagtttagaagccggcagatccccgccagtacttgttccagttccctcttcccagccctggagagcacggctgccttccccagcgagcccgttcctgggacgaaccccagcatcctgatgggagctcagcaggcaggaccagcttctgatcacccctcactaaacgcagcaatgggtccggctgttttcaacggcaaagattccccgaagtgccaacaactggcaaagaataacctgttggccctgccgcgaccatcggctttaggtagctctgcctgtcctggccgtcctggggatcctgctcttctttgggccaaggccagagggggcatgggagctgctgggctggggccgctgagcctcctggagtctgatgtggcttccatgagagtcaggccaggaccacaggtgcctcctgagtccgtgggtctgggcccaggccctggtgctctatgagtgacacttgggagttaccgtatgtgccaaggagcagtgagacacctgtggtaatggcgagtgacctgtcctatgggctgcacagctggaggatggtagaattttggagcaatagtgggcagtgtgttgttggggaagaacatgggcttctgaatcagaaaaatatgaattcaaaacctaccgctgtctcttgttagtcaggggaccttggccaagtctcaataaatgtttcttcatctgga

SEQ ID NO: 138989 - DNA, 5296 bp, Homo sapiens
  Payload ID: 7233
  Gene Symbol: GREB1
  Gene Name: growth regulation by estrogen in breast cancer 1
  Uniprot ID: Q4ZG55
  ENST ID: ENST00000396123
  CDS Start-End: 119-2962
gctgatagagatgtcttggacatgctctggctggctaatctccatgttctagccgactgaaaatacggtggccaagtggatggtgtgcttatttgcagtctaaagaaatttccttttgatgtggcagaaaattgaggatgtggagtggagaccccagacttacttggagctggagggtctgccttgcatcctgatcttcagtgggatggacccgcatggggagtccttgccgaggtctttgaggtactgtgacctgcgattgataaactcctcctgcttggtgagaacagccttggagcaggagctgggcctggctgcctactttgtgagcaacgaggttcccttggagaagggggctaggaacgaggccttggagagtgatgctgagaagctgagcagcacagacaacgaggatgaggagctggggacagaaggctctacctcggagaagagaagccccatgaaaagggagaggtcccgctcccacgactcagcatcctcatccctctcctccaaggcttccggttcagcgctcggtggcgagtcctcggctcagcccacagcactcccccagggagagcatgccaggtcgccccagccccgtggccccgcagaggagggcagagcccctggtgagaaacagaggccccgggcaagtcaggggccaccctcggccatcagcaggcacagtcccgggccgacgccccagcccgactgtagcctcaggaccggccagaggagcgtccaggtgtcggtcacctcgtcgtgctcccagctgtcctcctcctcgggctcatcctcctcatccgtggcgcccgctgccggcacgtgggtcctgcaggcctcccagtgctccttgaccaaggcctgccgccagccacccattgtcttcttgcccaagctcgtgtacgacatggttgtgtccactgacagcagtggcctgcccaaggccgcctccctcctgccctccccctcggtcatgtgggccagctctttccgccccctgctcagcaagaccatgacatccaccgagcagtccctctactaccggcagtggacggtgccccggcccagccacatggactacggcaaccgggccgagggccgcgtggacggcttccacccccgcaggctgctgctcagcggcccccctcagatcgggaagacaggtgcctacctgcagttcctcagtgtcctgtccaggatgcttgttcggctcacagaagtggatgtctatgacgaggaggagatcaatatcaacctcagagaagaatctgactggcattatctccagcttagcgacccctggccagacctggagctgttcaagaagttgccctttgactacatcattcacgacccgaagtatgaagatgccagcctgatttgttcgcactatcagggtataaagagtgaagacagagggatgtcccggaagccggaggacctttatgtgcggcgtcagacggcacggatgagactgtccaagtacgcagcgtacaacacttaccaccactgtgagcagtgccaccagtacatgggcttccacccccgctaccagctgtatgagtccaccctgcacgcctttgccttctcttactccatgctaggagaggagatccagctgcacttcatcatccccaagtccaaggagcaccactttgtcttcagccaacctggaggccagctggagagcatgcgactacccctcgtgacagacaagagccatgaatatataaaaagtccgacattcactccaaccaccggccgtcacgaacatgggctctttaatctgtaccacgcaatggacggtgccagccatttgcacgtgctggttgtcaaggaatacgagatggcaatttataagaaatattggcccaaccacatcatgctggtgctccccagtatcttcaacagtgctggagttggtgctgctcatttcctcatcaaggagctgtcctaccataacctggagctcgagcggaaccggcaggaggagctgggaatcaagccgcaggacatctggcctttcattgtgatctctgatgactcctgcgtgatgtggaacgtggtggatgtcaactctgctggggagagaagcagggagttctcctggtcggaaaggaacgtgtctttgaagcacatcatgcagcacatcgaggcggcccccgacatcatgcactacgccctgctgggcctgcggaagtggtccagcaagacccgggccagcgaggtgcaagagcccttctcccgctgccacgtgcacaacttcatcatcctgaacgtggacctgacccagaacgtgcagtacaaccagaaccggttcctgtgtgacgatgtagacttcaacctgcgggtgcacagcgccggcctcctgctctgccggttcaaccgcttcagcgtgatgaagaagcagatcgtggtgggcggccacaggtccttccacatcacatccaaggtgtctgataactctgccgcggtcgtgccggcccagtacatctgtgccccggacagcaagcacacgttcctcgcagcgcccgcccagctcctgctggagaagttcctgcagcaccacagccacctcttcttcccgctgtccctgaagaaccatgaccacccagtgctgtctgtcgactgttacctgaacctgggatctcagatttctgtttgctatgtgagctccaggccccactctttaaacatcagctgctcggacttgctgttcagtgggctgctgctgtacctctgtgactcttttgtgggagctagctttttgaaaaagtttcattttctgaaaggtgcgacgttgtgtgtcatctgtcaggaccggagctcactgcgccagacggtcgtccgcctggagctcgaggacgagtggcagttccggctgcgcgatgagttccagaccgccaatgccagggaagaccggccgctcttttttctgacgggacgacacatctgaggaagacagcggcgagttttctgaagagatgagtgctcagagccctcatgctgttgaggctaaagggaggcctggaacggtggggcgtttgactggaatggaccccagggactgtccaggtgcagcccctcctagtacacatgggcccccgaggccgtggtcctgggagccaggaagactccgcagtgggtgagaatgaaaacttgagactcccaagttctgggccagcccattgctctgggctgttttaaagcccatttcacgaggaacaaagatttacttcctgtcctgccattcgtgtgcttccatggacaaacctgatttttttctcttagttctaaagaatcttgggttattttgtagcggtgccagtatttcagtagatgggatttcagccaagtaggttcccctgtaacctcctacaaagcaatattccaaaggaacattttaactgtaaaggctggagacaagaaaaaataagtagatcgttttaataacaattatttaattgcctataagtttgctgtttcagaggctagcccaaaggcatcaaatttaataaagttaaacaaattgatttacttcagagcaaatatgatcctattaaaataatatagggtaaataccctacctcttagaaagggcaaaaatgcaaagaagctttctttaaaactaaaagggttttttggggggggagttggcggggaggaaataaggctaacagaggttgacctaaaattagccttacaaaggagaaaggaccacattgcttacttgaaacagacaatgaaaacaaccaaagtgatatataaaatagttgatgagaactagacttatgactgtagtttactagagtttagttttcagttgctgaagtagctcattttctcttactaatgtttggttcctcagggaagaatctcacttgactagagaggaggtgggaacagaagagagaaggaggcagggagatgtatttcttagggctcaccccttcacagactgacagaatggttttgttttgttttgttttgttttgttttgtttttgagatggactctagctctgtcacccaggctggagtgcagtggtgcgatctcggctcactgcaagctccgcctcccgggttctcaccattctcctgcctcagcctcccgagtagctgggactacaggcgcccaccaccacgcccggctaattttttgtattttttagtagagacggggtttcaccatgttagccaggatggtctcgatctcctgacctcgtgatccgcccgcctcggcctcccaaagtgctgggattacaggcgtgagccaccgtgcctgccccagaatggtttttaaagccacagttgagaggccacccattgcccggcgcctggacagtgatcatcttgttcatcttgttcagtcctttcttgtgtgattggaattattcatcccctttgaaagatgagaaggttgagatgcaaagagtctacctttccaagttctcactgctggaaagagctagaagcacagttcaaagttctggcttctggactctgcagtccaggtctcccttctcccacttgcctaccctcaatgccacactgtttttgaagtggcccataacttgaaggaaaagtttaaagacagttcaatttaatcatcagaatgcattcttttttttttcggagacggagtttcactcttgctgcccaggctggagtgcaatggtgcaatgacctcggctcactgcaacctctgcctcctgggttcaagtgattctccagcctcagcctcccgagtagctgggattatgggcgcccaccaccatgcccagctaatttttgtattttttttttttagtagagatggggtttcgccaggttggccaggctggtcttgtgaactcctggcctcaggtgatctgcccacctcatcctccaaaagtgctgggattacaggcatgagccactgcgcctggcctcagaatgcattcttacacatctatcctagacatttataagcactctaatggataacaatccaagaataaatgattgtaaaagatgatgccgaagagttgatgtcaatctttttttcctaagaaaaaaagtccgcgagtattaaatatttagatcaatgtttataaaatgattactttgtatatctcattattcctattttggaataaaaactgaccttctttaatcatatacttgtcttttgtaaatagcagcttttgtgtcattctccccactttattagttaatttaaattggaaaaaaccctcaaactaatattcttgtctgttccagtcttataaataaaacttataatgcatgta

SEQ ID NO: 138990 - DNA, 2052 bp, Homo sapiens
  Payload ID: 7233
  Gene Symbol: GREB1
  Gene Name: growth regulation by estrogen in breast cancer 1
  ENST ID: ENST00000432985
  CDS Start-End: 430-2052
ctggtctctgtggtgatatattgtcccaactcaccttgccagacagccctgggagaatgcagggcagaatcctccctgcttggagtcagggaggcaagacctggcaggcagcacccagtgaagctctggaaggtgctctgcccacaaggtgtcccattggtggtgctggaggagtgacaggtggcggctgcttggctctgggcaagtccctccctccagccccctcacttgtaaaaaataagaggattggacgaaatgaaccagcaagtggcacagccccattggttagaaaaggtgactcctctcatcctaggctccaggagggtgagcaggtgcactcaatgagcaaggcttcccaggacagggcactcgagggacctggcgcagctcacctatctccttcagtgccctcacccccagagaacccacatgtatgggaccgtaagctgtgcacaagactgggtgccaagtcgctgctgttcctctgcaggccatgggaacttcccttacctctgtgggaacctgaatgacgtcgtggtcagccccctcttgtacacgtgctaccagaattcccagtctgtctcacgggcatacgagcagtacggcgcctctgccatccagcccatctccgaggagatgcagctcctgcttaccgtctactacctggtccagctggccgcggaccaggtgcccttgatggaggacctggagcagatcttcctgcgctcttggcgcgagtcgcacctgaccgagatccggcagtaccagcaggcgccgccgcagcccttcccgcccgcgcccagcgccgcggcacccgtgacctccgcgcagctgccctggctggccagcctggccgccagctcctgcaacgacagcgtgcacgtcatcgagtgtgcttactccctggccgagggcctctccgagatgttccggctgttggtcgagggcaagcttgccaagaccaactacgtggtcatcatctgcgcctgccgcagcgcggccatcgactcctgcatcgccgtcaccggaaaataccaagcccggattctttccgagagccttctcactcctgcggagtaccagaaggaagtcaattacgagctggttacggggaaggtagactcgctgggggccttctttagcaccctctgtccagagggtgacattgacattttgctggacaaatttcaccaggaaaatcaaggccatatttcttcctcactcgctgcctcttctgtcactaaagcagcatccctggatgtcagtgggacaccggtgtgcacaagttacaatctggagccacacagcatccggcccttccagctggcagtagcgcagaagctcctctcccatgtgtgttccattgcggattccagcacccaaaatctggacctgggatcctttgagaaggtggactttctcatttgcattcccccctcagaagtgacctaccagcagactctgctccatgtgtggcattcaggggttttgctggagcttggtctgaagaaagagcacatgacgaagcagagggtggaacagtatgttctgaagctagacacggaggcacagacaaaatttaaggcttttctgcaaaactccttccagaacccgcatacactttttgtcctaatccatgaccatgcgcactgggatcttgtgagtagcactgttcataacctctattctcaaagtgacccgtcggtgggattggtggaccgattgctcaactgcagggaggtgaaggaggcccccaacattgtgacacttcacgtgacctccttcccgtatgcactgcagacacagcacaccctcatcagcccctacaacgagatccactggcctgcctcctgcagtaatggagtggacttatatcatgaaaataagaagtacttcgggctgtcggagtttattgaatccaccctttcaggacacagcctccccttgctcagatacgatagctcctttgaggccatggtcactgcattaggaaaaaggttcccccgcctgcacagcgcggtgatcaggacctttgttctcgtgcagcactac

SEQ ID NO: 138991 - DNA, 438 bp, Homo sapiens
  Payload ID: 7233
  Gene Symbol: GREB1
  Gene Name: growth regulation by estrogen in breast cancer 1
  ENST ID: ENST00000628795
  CDS Start-End: 200-438
ctcaggtgcgaggttccgtccatctttctgaacccacgcagctgcagctgaggacagccaccctttcttcgtctctgctgagcgaaggctacacggcccttcctccttgcagctgtttcaccttctaccttgcgtggagccaggcttttgcaccgaatctgagatgccattttaaacagaagactccatcctcttgaagatgggaaattcttacgctggacagctgaagacgacacgctttgaagaggtcttgcacaattccatcgaggcatccctgcggtccaacaacctggtgcccaggcccatcttttcccagctgtacctggaagctgagcagcagcttgccgctctagaaggtggtagccgagtggacaatgaggaagaggaagaagagggagaaggagggctggaaacaaatggccccccaaaccctttcca

SEQ ID NO: 138992 - DNA, 5600 bp, Homo sapiens
  Payload ID: 7234
  Gene Symbol: GREB1L
  Gene Name: growth regulation by estrogen in breast cancer-like
  Uniprot ID: Q9C091
  ENST ID: ENST00000269218
  CDS Start-End: 156-5600
ccctggtcctctgccctcgcgccccgctagggccaggtgcacaaaaagctttaaacaagttaaaatctaggcaacagactccctgaagtgttgactgcccaacttaatcatgactgtgattcaaaaatgttaataaataaaccaaggtgtagatcatggggaattcatatgctgggcaactgaaatctgctcgatttgaggaagctctccacaactccatagaagcctccctcagatgtagtagtgtggtaccacggccaattttttcccagctatacctggaccctgaccagcatcctttctcatctgcagatgtcaaacccaaggtggaggatctggacaaagatttggtaaaccgctacactcaaaatggaagtctggatttttctaacaatctaacagttaatgaaatggaagatgatgaagacgatgaagaaatgtctgattcaaacagcccaccaattccctattcacaaaaacctgccccagaaggatcttgcactacagatggtttttgtcaagcaggaaaggatttgcgtttggtatcactgtgtatggaacaaattgacatcccagcaggattcctcctggtgggggccaagtctcccaatctgcctgaacacatcctagtttgtgctgtggacaagcgatttctaccagatgatcatggaaaaaatgcacttttagggttttctggaaattgtatcggctgtggagaaagaggatttcgatatttcacggaattttccaaccacattaacttgaagctcaccactcagccaaagaagcagaagcacttaaagtactacctagtcagaagctcccagggtgtactgtctaaaggacctcttatctgctggaaagaatgtagaagccgacaatcctctgcttcttgccactctattaagccaagctcttcagtgtcgtcaactgtgaccccagaaaatgggacaactaatggatacaaatcaggattcactcagacagatgctgctaatggaaacagtagccatggagggaagggcagtgcatccagctccactccagcccacacagggaattactctttgtcaccacgacctagctatgcatcaggagatcaagctaccatgttcatttctgggccaccaaagaaacgacaccggggatggtatcctgggtcacctctcccccaacctggcttagttgtacctgtccctacagttcgccctctttcaagaacggagccccttttatctgccccagttccacagaccccactaactggaattttacaacccaggcccattcctgcaggggaaactgtaattgttcctgaaaacctgctgagtaactcaggagttagaccagtaattctgataggctatggcactttaccctatttctatggaaatgttggtgacattgttgtgagtcctctgctggtgaattgctacaagattccacagttggaaaacaaagatttggaaaaattagggttgaccggcagccaatttctgagcgtggaaaacatgattcttctgacgatacagtatcttgtgcggctgggtcagcaccagtcccgagctctggcagagagcatgctcaccacaagtgagtttttgaaagaaattagttatgagcttatcacaggaaaggtcagtttcctggcatcacatttcaaaaccacatcattaggcgatgacctagacaagctgctggaaaaaatgcaacaaagaagaggagacagtgtggttacccctttcgatggagaccttaatgaatgtgtgtcaccccaggaggctgctgctatgattcccacacaaaacctggatttagataatgaaaccttccacatttatcaaccgcagctaacagttgccagaaaactcttatcccaggtgtgtgctatagcggacagtggcagccagagcctggacctcggtcacttcagcaaagtagacttcatcatcattgttcccagatcggaggtgttggttcagcaaactcttcagcggattcgacaatcaggtgtccttgtagacttgggtctggaggaaaatgggacagcccatcagagagcagaaaaatatgttgttcgtctagacaatgagattcaaaccaagtttgaagtttttatgaggagagtgaaacagaacccgtacacactgtttgtgctagttcatgacaactcccatgtggaactaacgagtgtcatttcaggctctttgtcacatagcgaacccagtcatgggctagctgatagagtcattaattgcagagaagttctggaagctttcaacctcctggtgctccaggtcagctccttcccatacactctgcagacccaacagtcccgcattagctctagcaatgaggttcactggatacagctggatactggggaggacgtgggctgcgaggagaagctgtactttggcttgagtgagtacagcaagtctctgcagtgggggatcacgagcccacttctgagatgtgacgagacttttgaaaaaatggtgaacacactcttggagaggtaccccaggctgcacagcatggtcgtccgctgctatcttctcatccagcagtactctgaggccctgatggctctcaccaccatggcgtcactccgcgaccacagcacaccagaaacactcagcattatggatgacctcatcagctccccaggcaaaaacaaaagtgggaggggacacatgctcattatcagggtgccctcggtgcagctggcgatgttagccaaggagcggctacaggaggtgcgcgacaaactgggtctgcagtatcggtttgagatcatccttgggaacccggccaccgaactcagtgttgcaactcactttgtggcgcgattaaagagttggagaggaaatgaaccagaagagtggatccctcggacataccaagatttagacggtctaccttgtattgtgatattaactggcaaagatcctcttggagaaacctttcccaggtctttgaagtactgtgacctccggttaattgactcaagctatttaactcgcacggccttggagcaggaggtgggtctggcatgctgctatgtctcaaaagaggtcatccggggacccactgttgccctggacctcagcgggaaggagcaggagagagctgctgtcagtgagaatgactccgatgagctgctcatcgacctggagcggccccagagcaacagcagcgctgtcacagggacctcgggttccatcatggagaatggagtgagctcttccagcacagctgacaagtcccagaagcagtccctgacccccagctttcagagcccagccaccagcttggggctggatgaaggggtctccgccagctcagctggagccggagccggggagactctgaagcaggaatgtgactccctgggcccccagatggcgagcagcaccacctccaagccgtcatcatcatcctcaggacccaggaccctcccatggccgggacagcccatcagaggctgccggggcccacaggcagccctgccaccagtggtgatcctatccaaagcggcctacagtctcctgggctcccagaagagtggcaagctgccatcctcctcctccctgctgccccacgccgacgtggcctgggtgagctccctgcggccactcctgaacaaggacatgagcagtgaggagcagtccctctactacaggcagtggaccttggcccggcagcaccacgctgactatagcaaccagctggacccggcctctggcacccgaaacttccacccccgacggctcctgctgacagggcccccacaggtgggaaagacgggctcctatttacagttcctcaggatcctcttccgcatgctcatcaggctcctggaggtggacgtgtatgatgaggaggagatcaacaccgatcacaatgaaagcagtgaagtgagccagtcagagggagagccctggcctgacatcgagagcttcagtaaaatgccttttgatgtcagtgtgcatgaccccaagtacagtttgatgagcctggtgtatactgagaagctggcaggggtcaaacaagaagtgataaaggaatccaaagttgaagagcccaggaaacgggaaactgtatccataatgctgaccaaatatgcagcctataacacctttcaccactgtgaacagtgccgccagtacatggacttcacctctgcctcccagatgtctgactccacccttcatgccttcacattctcttcttctatgctgggagaagaggttcagctctatttcatcattcccaaatccaaagagagtcattttgtcttcagcaagcagggcaagcacctggagagcatgcggctgcccctggtttcagacaagaatttgaatgcagtcaagagccctattttcactccttccagtggtcgacatgagcacggactcctaaaccttttccacgccatggagggcatcagccaccttcacctcctggtggtcaaagagtatgagatgcctctgtaccgcaagtactggcccaaccacatcatgctggtgcttcccggcatgttcaataatgcaggcgtgggtgctgccaggttcctcatcaaggagctatcatatcacaacctagaattggagagaaaccgcctggaggagctaggcattaaacgccagtgtgtctggcctttcatcgtcatgatggatgactcatgtgtcctatggaacattcacagtgttcaggagccatccagccagcccatggaagtaggagtttccagtaagaatgtgtccttgaagactgtcttgcagcacattgaagccacaccaaaaattgtccactatgcaatcttgggcatacagaaatggagcagcaagctgacttctcagagcctaaaggccccattctctaggtgtcacgtgcatgatttcattctcctcaacacagacttgactcagaatgtgcagtatgacttcaacaggtatttctgtgaagatgctgactttaatctgagaacaaacagtagtggcctgctcatctgccgctttaataacttcagtctcatgaagaaacatgttcaggttggagggcaaagggactttatcattaaaccaaagatcatggtgtcagagagcttagcacccatcttgccccttcaatacatctgtgctcccgacagtgaacacacactactggcagcccctgcacagtttctcctggagaaattccttcagcacgcctcatataaactcttccccaaagccatccataacttcaggagtcctgtgctggccattgactgctaccttaacattggaccagaggtggccatatgctatatcagctccagaccccactccagcaatgtcaactgtgaaggggtgtttttcagtggactccttttgtacctctgtgactcttttgtaggtgctgatcttaagaaatttaaatttctaaaaggtgctacactgtgtgtcatctgccaagacagaagttccttgcgccaaacaattgtccgcttagagctagaagatgagtggcagttccgcctccgggacgagtttcaaactgctaacagcagtgatgacaagcctctctactttcttactggacgtcatgtatga

SEQ ID NO: 138993 - DNA, 6052 bp, Homo sapiens
  Payload ID: 7234
  Gene Symbol: GREB1L
  Gene Name: growth regulation by estrogen in breast cancer-like
  Uniprot ID: Q9C091
  ENST ID: ENST00000424526
  CDS Start-End: 272-6043
cagccgccggcggcgctagcacctcggagtcgggcggccggagcagcggagcgcagcgcggcgcagggaacggcactgggggtggggagaccagcccggccgagccgagggccaccccctggtcctctgccctcgcgccccgctagggccaggtgcacaaaaagctttaaacaagttaaaatctaggcaacagactccctgaagtgttgactgcccaacttaatcatgactgtgattcaaaaatgttaataaataaaccaaggtgtagatcatggggaattcatatgctgggcaactgaaatctgctcgatttgaggaagctctccacaactccatagaagcctccctcagatgtagtagtgtggtaccacggccaattttttcccagctatacctggaccctgaccagcatcctttctcatctgcagatgtcaaacccaaggtggaggatctggacaaagatttggtaaaccgctacactcaaaatggaagtctggatttttctaacaatctaacagttaatgaaatggaagatgatgaagacgatgaagaaatgtctgattcaaacagcccaccaattccctattcacaaaaacctgccccagaaggatcttgcactacagatggtttttgtcaagcaggaaaggatttgcgtttggtatcactgtgtatggaacaaattgacatcccagcaggattcctcctggtgggggccaagtctcccaatctgcctgaacacatcctagtttgtgctgtggacaagcgatttctaccagatgatcatggaaaaaatgcacttttagggttttctggaaattgtatcggctgtggagaaagaggatttcgatatttcacggaattttccaaccacattaacttgaagctcaccactcagccaaagaagcagaagcacttaaagtactacctagtcagaagctcccagggtgtactgtctaaaggacctcttatctgctggaaagaatgtagaagccgacaatcctctgcttcttgccactctattaagccaagctcttcagtgtcgtcaactgtgaccccagaaaatgggacaactaatggatacaaatcaggattcactcagacagatgctgctaatggaaacagtagccatggagggaagggcagtgcatccagctccactccagcccacacagggaattactctttgtcaccacgacctagctatgcatcaggagatcaagctaccatgttcatttctgggccaccaaagaaacgacaccggggatggtatcctgggtcacctctcccccaacctggcttagttgtacctgtccctacagttcgccctctttcaagaacggagccccttttatctgccccagttccacagaccccactaactggaattttacaacccaggcccattcctgcaggggaaactgtaattgttcctgaaaacctgctgagtaactcaggagttagaccagtaattctgataggctatggcactttaccctatttctatggaaatgttggtgacattgttgtgagtcctctgctggtgaattgctacaagattccacagttggaaaacaaagatttggaaaaattagggttgaccggcagccaatttctgagcgtggaaaacatgattcttctgacgatacagtatcttgtgcggctgggtcctgatcaggtacctctcagggaagaatttgagcaaattatgctgaaagctatgcaagaatttactctgagagaaagagccctgcagataggtgctcagtgtgtccctgtgtcaccaggacaactcccctggcttgctagattaattgccagcgtatctcaagacttggttcatgtggttgtgacccagaactctttggcggagggcatttcagagaccttaaggactctcagtgaaatgagacactatcaaaggctgccagattatgtggtggtaatttgtgcatcgaaaatcagaggaaatgaattttgtgtggtagtgttaggtcagcaccagtcccgagctctggcagagagcatgctcaccacaagtgagtttttgaaagaaattagttatgagcttatcacaggaaaggtcagtttcctggcatcacatttcaaaaccacatcattaggcgatgacctagacaagctgctggaaaaaatgcaacaaagaagaggagacagtgtggttacccctttcgatggagaccttaatgaatgtgtgtcaccccaggaggctgctgctatgattcccacacaaaacctggatttagataatgaaaccttccacatttatcaaccgcagctaacagttgccagaaaactcttatcccaggtgtgtgctatagcggacagtggcagccagagcctggacctcggtcacttcagcaaagtagacttcatcatcattgttcccagatcggaggtgttggttcagcaaactcttcagcggattcgacaatcaggtgtccttgtagacttgggtctggaggaaaatgggacagcccatcagagagcagaaaaatatgttgttcgtctagacaatgagattcaaaccaagtttgaagtttttatgaggagagtgaaacagaacccgtacacactgtttgtgctagttcatgacaactcccatgtggaactaacgagtgtcatttcaggctctttgtcacatagcgaacccagtcatgggctagctgatagagtcattaattgcagagaagttctggaagctttcaacctcctggtgctccaggtcagctccttcccatacactctgcagacccaacagtcccgcattagctctagcaatgaggttcactggatacagctggatactggggaggacgtgggctgcgaggagaagctgtactttggcttgagtgagtacagcaagtctctgcagtgggggatcacgagcccacttctgagatgtgacgagacttttgaaaaaatggtgaacacactcttggagaggtaccccaggctgcacagcatggtcgtccgctgctatcttctcatccagcagtactctgaggccctgatggctctcaccaccatggcgtcactccgcgaccacagcacaccagaaacactcagcattatggatgacctcatcagctccccaggcaaaaacaaaagtgggaggggacacatgctcattatcagggtgccctcggtgcagctggcgatgttagccaaggagcggctacaggaggtgcgcgacaaactgggtctgcagtatcggtttgagatcatccttgggaacccggccaccgaactcagtgttgcaactcactttgtggcgcgattaaagagttggagaggaaatgaaccagaagagtggatccctcggacataccaagatttagacggtctaccttgtattgtgatattaactggcaaagatcctcttggagaaacctttcccaggtctttgaagtactgtgacctccggttaattgactcaagctatttaactcgcacggccttggagcaggaggtgggtctggcatgctgctatgtctcaaaagaggtcatccggggacccactgttgccctggacctcagcgggaaggagcaggagagagctgctgtcagtgagaatgactccgatgagctgctcatcgacctggagcggccccagagcaacagcagcgctgtcacagggacctcgggttccatcatggagaatggagtgagctcttccagcacagctgacaagtcccagaagcagtccctgacccccagctttcagagcccagccaccagcttggggctggatgaaggggtctccgccagctcagctggagccggagccggggagactctgaagcaggaatgtgactccctgggcccccagatggcgagcagcaccacctccaagccgtcatcatcatcctcaggacccaggaccctcccatggccgggacagcccatcagaggctgccggggcccacaggcagccctgccaccagtggtgatcctatccaaagcggcctacagtctcctgggctcccagaagagtggcaagctgccatcctcctcctccctgctgccccacgccgacgtggcctgggtgagctccctgcggccactcctgaacaaggacatgagcagtgaggagcagtccctctactacaggcagtggaccttggcccggcagcaccacgctgactatagcaaccagctggacccggcctctggcacccgaaacttccacccccgacggctcctgctgacagggcccccacaggtgggaaagacgggctcctatttacagttcctcaggatcctcttccgcatgctcatcaggctcctggaggtggacgtgtatgatgaggaggagatcaacaccgatcacaatgaaagcagtgaagtgagccagtcagagggagagccctggcctgacatcgagagcttcagtaaaatgccttttgatgtcagtgtgcatgaccccaagtacagtttgatgagcctggtgtatactgagaagctggcaggggtcaaacaagaagtgataaaggaatccaaagttgaagagcccaggaaacgggaaactgtatccataatgctgaccaaatatgcagcctataacacctttcaccactgtgaacagtgccgccagtacatggacttcacctctgcctcccagatgtctgactccacccttcatgccttcacattctcttcttctatgctgggagaagaggttcagctctatttcatcattcccaaatccaaagagagtcattttgtcttcagcaagcagggcaagcacctggagagcatgcggctgcccctggtttcagacaagaatttgaatgcagtcaagagccctattttcactccttccagtggtcgacatgagcacggactcctaaaccttttccacgccatggagggcatcagccaccttcacctcctggtggtcaaagagtatgagatgcctctgtaccgcaagtactggcccaaccacatcatgctggtgcttcccggcatgttcaataatgcaggcgtgggtgctgccaggttcctcatcaaggagctatcatatcacaacctagaattggagagaaaccgcctggaggagctaggcattaaacgccagtgtgtctggcctttcatcgtcatgatggatgactcatgtgtcctatggaacattcacagtgttcaggagccatccagccagcccatggaagtaggagtttccagtaagaatgtgtccttgaagactgtcttgcagcacattgaagccacaccaaaaattgtccactatgcaatcttgggcatacagaaatggagcagcaagctgacttctcagagcctaaaggccccattctctaggtgtcacgtgcatgatttcattctcctcaacacagacttgactcagaatgtgcagtatgacttcaacaggtatttctgtgaagatgctgactttaatctgagaacaaacagtagtggcctgctcatctgccgctttaataacttcagtctcatgaagaaacatgttcaggttggagggcaaagggactttatcattaaaccaaagatcatggtgtcagagagcttagcacccatcttgccccttcaatacatctgtgctcccgacagtgaacacacactactggcagcccctgcacagtttctcctggagaaattccttcagcacgcctcatataaactcttccccaaagccatccataacttcaggagtcctgtgctggccattgactgctaccttaacattggaccagaggtggccatatgctatatcagctccagaccccactccagcaatgtcaactgtgaaggggtgtttttcagtggactccttttgtacctctgtgactcttttgtaggtgctgatcttaagaaatttaaatttctaaaaggtgctacactgtgtgtcatctgccaagacagaagttccttgcgccaaacaattgtccgcttagagctagaagatgagtggcagttccgcctccgggacgagtttcaaactgctaacagcagtgatgacaagcctctctactttcttactggacgtcatgtatgagcttttgaa

SEQ ID NO: 138994 - DNA, 568 bp, Homo sapiens
  Payload ID: 7234
  Gene Symbol: GREB1L
  Gene Name: growth regulation by estrogen in breast cancer-like
  ENST ID: ENST00000580384
  CDS Start-End: 1-568
acgccagtgtgtctggcctttcatcgtcatgatggatgactcatgtgtcctatggaacattcacagtgttcaggagccatccagccagcccatggaagtaggagtttccagtaagaatgtgtccttgaagactgtcttgcagcacattgaagccacaccaaaaattgtccactatgcaatcttgggcatacagaaatggagcagcaagctgacttctcagagcctaaaggccccattctctaggtgtcacgtgcatgatttcattctcctcaacacagacttgactcagaatgtgcagtatgacttcaacaggtatttctgtgaagatgctgactttaatctgagaacaaacagtagtggcctgctcatctgccgctttaataacttcagtctcatgaagaaacatgttcaggttggagggcaaagggactttatcattaaaccaaagatcatgccatccataacttcaggagtcctgtgctggccattgactgctaccttaacattggaccagaggtggccatatgctatatcagctccagaccccactccagcaatgtcaactgtg

SEQ ID NO: 138995 - DNA, 598 bp, Homo sapiens
  Payload ID: 7234
  Gene Symbol: GREB1L
  Gene Name: growth regulation by estrogen in breast cancer-like
  ENST ID: ENST00000579454
  CDS Start-End: 1-598
gaagctcaccactcagccaaagaagcagaagcacttaaagtactacctagtcagaagctcccagggtgtactgtctaaaggacctcttatctgctggaaagaatgtagaagccgacaatcctctgcttcttgccactctattaagccaagctcttcagtgtcgtcaactgtgaccccagaaaatgggacaactaatggatacaaatcaggattcactcagacagattcgccgattctcagtccagctaattctgcaatcaatttaagtggagctcaggacctgacccggaataacaatgttgtgaaaccactggctttatctttgcaggttgtagggaagacttttgctgcagatgctgctaatggaaacagtagccatggagggaagggcagtgcatccagctccactccagcccacacagggaattactctttgtcaccacgacctagctatgcatcaggagatcaagctaccatgttcatttctgggccaccaaagaaacgacaccggggatggtatcctgggtcacctctcccccaacctggcttagttgtacctgtccctacagttcgccctctttcaagaacggagcccctt

SEQ ID NO: 138996 - DNA, 682 bp, Homo sapiens
  Payload ID: 7234
  Gene Symbol: GREB1L
  Gene Name: growth regulation by estrogen in breast cancer-like
  ENST ID: ENST00000581327
  CDS Start-End: 1-528
ctcccctggcttgctagattaattgccagcgtatctcaagacttggttcatgtggttgtgacccagaactctttggcggagggcatttcagagaccttaaggactctcagtgaaatgagacactatcaaaggctgccagattatgtggtggtaatttgtgcatcgaaaatcagaggaaatgaattttgtgtggtagtgttaggtcagcaccagtcccgagctctggcagagagcatgctcaccacaagtgagtttttgaaagaaattagttatgagcttatcacaggaaaggtcagtttcctggcatcacatttcaaaaccacatcattaggcgatgacctagacaagctgctggaaaaaatgcaacaaagaagaggagacagtgtggttacccctttcgatggagaccttaatgaatgtgtgtcaccccaggaggctgctgctatgattcccacacaaaacctgggtaatgtcatctcagaccaagaggaggaagtcagtccttgggacagacattgtaaaaactaagtcattctaagggttttgaggattcttcaagtcacagaccacaacagccttttcctgattgtctacatgataaacctggttgaaattaaaaatgctttcccatgtggcctggatcaaaggctttgttcctagtaaaagtcttctggaatgaaaa

SEQ ID NO: 138997 - DNA, 8749 bp, Homo sapiens
  Payload ID: 7234
  Gene Symbol: GREB1L
  Gene Name: growth regulation by estrogen in breast cancer-like
  Uniprot ID: Q9C091
  ENST ID: ENST00000580732
  CDS Start-End: 382-6153
gtttctgagagcatctgtcactttaggcattacaagatggatgggtctccagtgaactgctggttgaagcaaatggtgaaaataagaaaatcaaggggtttcagggtctgcagaggggacagacaacaaggaaacactgttagaaatcaagagtaagctgagcaatagaggaagagagcaaagatggatcagatgtcattttataaacatcttggaaatcagaatcttttggtggctttcgtgatctgagggagacatctgcatcatggtgcacaaaaagctttaaacaagttaaaatctaggcaacagactccctgaagtgttgactgcccaacttaatcatgactgtgattcaaaaatgttaataaataaaccaagatcatggggaattcatatgctgggcaactgaaatctgctcgatttgaggaagctctccacaactccatagaagcctccctcagatgtagtagtgtggtaccacggccaattttttcccagctatacctggaccctgaccagcatcctttctcatctgcagatgtcaaacccaaggtggaggatctggacaaagatttggtaaaccgctacactcaaaatggaagtctggatttttctaacaatctaacagttaatgaaatggaagatgatgaagacgatgaagaaatgtctgattcaaacagcccaccaattccctattcacaaaaacctgccccagaaggatcttgcactacagatggtttttgtcaagcaggaaaggatttgcgtttggtatcactgtgtatggaacaaattgacatcccagcaggattcctcctggtgggggccaagtctcccaatctgcctgaacacatcctagtttgtgctgtggacaagcgatttctaccagatgatcatggaaaaaatgcacttttagggttttctggaaattgtatcggctgtggagaaagaggatttcgatatttcacggaattttccaaccacattaacttgaagctcaccactcagccaaagaagcagaagcacttaaagtactacctagtcagaagctcccagggtgtactgtctaaaggacctcttatctgctggaaagaatgtagaagccgacaatcctctgcttcttgccactctattaagccaagctcttcagtgtcgtcaactgtgaccccagaaaatgggacaactaatggatacaaatcaggattcactcagacagatgctgctaatggaaacagtagccatggagggaagggcagtgcatccagctccactccagcccacacagggaattactctttgtcaccacgacctagctatgcatcaggagatcaagctaccatgttcatttctgggccaccaaagaaacgacaccggggatggtatcctgggtcacctctcccccaacctggcttagttgtacctgtccctacagttcgccctctttcaagaacggagccccttttatctgccccagttccacagaccccactaactggaattttacaacccaggcccattcctgcaggggaaactgtaattgttcctgaaaacctgctgagtaactcaggagttagaccagtaattctgataggctatggcactttaccctatttctatggaaatgttggtgacattgttgtgagtcctctgctggtgaattgctacaagattccacagttggaaaacaaagatttggaaaaattagggttgaccggcagccaatttctgagcgtggaaaacatgattcttctgacgatacagtatcttgtgcggctgggtcctgatcaggtacctctcagggaagaatttgagcaaattatgctgaaagctatgcaagaatttactctgagagaaagagccctgcagataggtgctcagtgtgtccctgtgtcaccaggacaactcccctggcttgctagattaattgccagcgtatctcaagacttggttcatgtggttgtgacccagaactctttggcggagggcatttcagagaccttaaggactctcagtgaaatgagacactatcaaaggctgccagattatgtggtggtaatttgtgcatcgaaaatcagaggaaatgaattttgtgtggtagtgttaggtcagcaccagtcccgagctctggcagagagcatgctcaccacaagtgagtttttgaaagaaattagttatgagcttatcacaggaaaggtcagtttcctggcatcacatttcaaaaccacatcattaggcgatgacctagacaagctgctggaaaaaatgcaacaaagaagaggagacagtgtggttacccctttcgatggagaccttaatgaatgtgtgtcaccccaggaggctgctgctatgattcccacacaaaacctggatttagataatgaaaccttccacatttatcaaccgcagctaacagttgccagaaaactcttatcccaggtgtgtgctatagcggacagtggcagccagagcctggacctcggtcacttcagcaaagtagacttcatcatcattgttcccagatcggaggtgttggttcagcaaactcttcagcggattcgacaatcaggtgtccttgtagacttgggtctggaggaaaatgggacagcccatcagagagcagaaaaatatgttgttcgtctagacaatgagattcaaaccaagtttgaagtttttatgaggagagtgaaacagaacccgtacacactgtttgtgctagttcatgacaactcccatgtggaactaacgagtgtcatttcaggctctttgtcacatagcgaacccagtcatgggctagctgatagagtcattaattgcagagaagttctggaagctttcaacctcctggtgctccaggtcagctccttcccatacactctgcagacccaacagtcccgcattagctctagcaatgaggttcactggatacagctggatactggggaggacgtgggctgcgaggagaagctgtactttggcttgagtgagtacagcaagtctctgcagtgggggatcacgagcccacttctgagatgtgacgagacttttgaaaaaatggtgaacacactcttggagaggtaccccaggctgcacagcatggtcgtccgctgctatcttctcatccagcagtactctgaggccctgatggctctcaccaccatggcgtcactccgcgaccacagcacaccagaaacactcagcattatggatgacctcatcagctccccaggcaaaaacaaaagtgggaggggacacatgctcattatcagggtgccctcggtgcagctggcgatgttagccaaggagcggctacaggaggtgcgcgacaaactgggtctgcagtatcggtttgagatcatccttgggaacccggccaccgaactcagtgttgcaactcactttgtggcgcgattaaagagttggagaggaaatgaaccagaagagtggatccctcggacataccaagatttagacggtctaccttgtattgtgatattaactggcaaagatcctcttggagaaacctttcccaggtctttgaagtactgtgacctccggttaattgactcaagctatttaactcgcacggccttggagcaggaggtgggtctggcatgctgctatgtctcaaaagaggtcatccggggacccactgttgccctggacctcagcgggaaggagcaggagagagctgctgtcagtgagaatgactccgatgagctgctcatcgacctggagcggccccagagcaacagcagcgctgtcacagggacctcgggttccatcatggagaatggagtgagctcttccagcacagctgacaagtcccagaagcagtccctgacccccagctttcagagcccagccaccagcttggggctggatgaaggggtctccgccagctcagctggagccggagccggggagactctgaagcaggaatgtgactccctgggcccccagatggcgagcagcaccacctccaagccgtcatcatcatcctcaggacccaggaccctcccatggccgggacagcccatcagaggctgccggggcccacaggcagccctgccaccagtggtgatcctatccaaagcggcctacagtctcctgggctcccagaagagtggcaagctgccatcctcctcctccctgctgccccacgccgacgtggcctgggtgagctccctgcggccactcctgaacaaggacatgagcagtgaggagcagtccctctactacaggcagtggaccttggcccggcagcaccacgctgactatagcaaccagctggacccggcctctggcacccgaaacttccacccccgacggctcctgctgacagggcccccacaggtgggaaagacgggctcctatttacagttcctcaggatcctcttccgcatgctcatcaggctcctggaggtggacgtgtatgatgaggaggagatcaacaccgatcacaatgaaagcagtgaagtgagccagtcagagggagagccctggcctgacatcgagagcttcagtaaaatgccttttgatgtcagtgtgcatgaccccaagtacagtttgatgagcctggtgtatactgagaagctggcaggggtcaaacaagaagtgataaaggaatccaaagttgaagagcccaggaaacgggaaactgtatccataatgctgaccaaatatgcagcctataacacctttcaccactgtgaacagtgccgccagtacatggacttcacctctgcctcccagatgtctgactccacccttcatgccttcacattctcttcttctatgctgggagaagaggttcagctctatttcatcattcccaaatccaaagagagtcattttgtcttcagcaagcagggcaagcacctggagagcatgcggctgcccctggtttcagacaagaatttgaatgcagtcaagagccctattttcactccttccagtggtcgacatgagcacggactcctaaaccttttccacgccatggagggcatcagccaccttcacctcctggtggtcaaagagtatgagatgcctctgtaccgcaagtactggcccaaccacatcatgctggtgcttcccggcatgttcaataatgcaggcgtgggtgctgccaggttcctcatcaaggagctatcatatcacaacctagaattggagagaaaccgcctggaggagctaggcattaaacgccagtgtgtctggcctttcatcgtcatgatggatgactcatgtgtcctatggaacattcacagtgttcaggagccatccagccagcccatggaagtaggagtttccagtaagaatgtgtccttgaagactgtcttgcagcacattgaagccacaccaaaaattgtccactatgcaatcttgggcatacagaaatggagcagcaagctgacttctcagagcctaaaggccccattctctaggtgtcacgtgcatgatttcattctcctcaacacagacttgactcagaatgtgcagtatgacttcaacaggtatttctgtgaagatgctgactttaatctgagaacaaacagtagtggcctgctcatctgccgctttaataacttcagtctcatgaagaaacatgttcaggttggagggcaaagggactttatcattaaaccaaagatcatggtgtcagagagcttagcacccatcttgccccttcaatacatctgtgctcccgacagtgaacacacactactggcagcccctgcacagtttctcctggagaaattccttcagcacgcctcatataaactcttccccaaagccatccataacttcaggagtcctgtgctggccattgactgctaccttaacattggaccagaggtggccatatgctatatcagctccagaccccactccagcaatgtcaactgtgaaggggtgtttttcagtggactccttttgtacctctgtgactcttttgtaggtgctgatcttaagaaatttaaatttctaaaaggtgctacactgtgtgtcatctgccaagacagaagttccttgcgccaaacaattgtccgcttagagctagaagatgagtggcagttccgcctccgggacgagtttcaaactgctaacagcagtgatgacaagcctctctactttcttactggacgtcatgtatgagcttttgaagagaccaaaacagcaaaaagatgcctaggtgggatgggacagaaacaatttgggatttttctttttcctttaaagtacaatcactgtggagcaaagtgcaacatatttgtctaaattctccaaagaactccccaaatctgatccaggtctttggggacatcactttccttcagttccaattacaggacccttaaattcaggtaaactctatcctaggcagttatgcaattacttaagatacggtctgcccatgggatcctgaggaggatatactttggagagtgaatatggagtttgcattatttttttctattactatgttagggggaaactgactgtcaggattaactagcctgaatgtgttacatgagactcatgccattggtgtggaatcaattgaagattaacgtttgaggcctgaaccctcagtttctcttcagatctgtactttggtacagtattactcaggggtttgaaatgatagaatgtagacgatatttgtatttaaaaaaagaagtagctttgtctttctctgtgcagtgttagtttaagatttataatcttctatgtattgaaacttttggcaaaatttccacaggagttagaagtttactatttaaactgaacaaacaaatcagtaaatgcagagcaggcattgtgtgcatttatgcatcttctcctagcctaattcctttgctttacccactctttaaatgtgtttccagtctttaagaatatcttatctatgagactatggaacagtgattaatcttttgcaagaacttaagtcagttaagaagctttcagcaggtaacctgcacccaccgtttggttggaattaagcagttggcaccagcaaacctaaatgtcaggctgaggttctgttgcagagtgaaactagtttgtttcctttcagggactcaagcaaagcttcctttaaaagatgcactaaatattaccaccttacactgacaacgccacagaaattgccgaattgggaaattgagccatagaaagagaaatgtttttttacttaatcttaccagtgactcttgtgaggagtaaggaagactccattaagagtctttttgattcattaaaatcagcagggggtgtttgtccagtatcggcaatgggaggcatatgtttctacagatttctcaaatattttaatcaaaaacattatttttagaaagtgttctagataaaactaagtcttagaagtttactcttaaattactccagttctcatcattgaacaatctcttgagagttttctcattagcccatatttactactttatccccacttaaaatggccatttttacttgaatcaatcttgtttgtgacctgaaactactgaggggcctactaagcctgcatttacttagaacaaatagtgttaattgaccagctttattatcttatgacaacaaggagtttacaaagctagtgaaaaaatggaatgtattagactaaaaatggtttgcagatctcttggttttaatatagctacttataatgctttaactgtattttgaagtgaacaattccttttaaccccatttttaattgtccttcaaagaggacctgccttatatatgctttaaaaaatactccttaattttagtacagcagaatttttggtaaagaggtatgttttgaagcaatttggtttaaatatgaatgtatttcacttgttcctgttttgttgaaagggcctaatgcaaataataccaagaaacccactgtctgtgcaatattccaataacatttacatagggcaaataaaatacttgaaagaattctgaaacaattgtacctggggtggatggcctctcagggtttcttctggctttatgacttcatagtttaaagaactttttttttaagtagttacatcagatgcaggtactccattagttagggctgcactctgaaaattcaaattattattatgagctcttaaatactatttaactctggaagagatatgccagaataaagccaaaagaccatcacccctataatggagaaattgatctgcctattcttttcaaagcctatcttactaatgtttggatcttttaaaatcatcttatcatcagtataattcttgagtatgttaggtccttctttaaggataaaattgcacaagcacaggacaccatgatttgtgtgtatatatatatatatcctagtgtgttcagctttaagctttgcaatcccttaggacactgatgtgggatgaatggattcgctaggcccacacagtaactcacctgtagacctgctgaacctcagcatgtatgacagttcacacaggttaatactgaatgtaaacgaaaaactagaagacaattgttataattttttttggctgtaatttatgcaattgctttttgtgatttttagaaaatggggcacccgtgttattactgtaaaatgttcttaaccaaaatttggtgaatttcactagtctacctcacattttgttaatgattcaaaattgtcttgtgtctactgttatatttttgtcctttgatttaatttgcttaatgtattaaagttatctcccaccccctc

SEQ ID NO: 138998 - DNA, 1933 bp, Homo sapiens
  Payload ID: 7235
  Gene Symbol: GRASP
  Gene Name: GRP1 (general receptor for phosphoinositides 1)-associated scaffold protein
  Uniprot ID: Q7Z6J2
  ENST ID: ENST00000293662
  CDS Start-End: 81-1268
ccggctggcatcccccagccgccgccagccccgccgaggggagccagcgccgtctctgaggggcgtccggcgccggagccatgaccctccgccgactcaggaagctgcagcagaaggaggaggcggcggccaccccggaccccgccgcccggactcccgactcggaagtcgcgcccgccgctccggtcccgaccccgggaccccctgccgcagccgccacccctgggcccccagcggacgagctgtacgcggcgctggaggactatcaccctgccgagctgtaccgcgcgctcgccgtgtccgggggcaccctgccccgccgaaagggctcaggattccgctggaagaatctcagccagagtcctgaacagcagcggaaagtgctgacgttggagaaggaggataaccagaccttcggctttgagatccagacttatggccttcaccaccgggaggagcagcgtgtggaaatggtgacctttgtctgccgagttcatgagtctagccctgcccagctggctgggctcacaccaggggacaccatcgccagcgtcaatggcctgaatgtggaaggcatccggcatcgagagattgtggacatcattaaggcgtcaggcaatgttctcagactggaaactctatatgggacatcaattcggaaggcagaactggaggctcgtctgcagtacctgaagcaaaccctgtatgagaagtggggagagtacaggtccctaatggtgcaggagcagcggctggtgcatggcctggtggtgaaggaccccagcatctacgacacgctggagtcggtgcgctcctgcctctacggcgcgggcctgctcccgggctcgctgcccttcgggcctctgctcgccgtgcccgggcgtccccgcggaggcgcccgacgggccaggggcgacgccgacgacgccgtctaccacacgtgcttcttcggggactccgagccgccggcgctgccgcccccgccgcccccggcccgcgccttcggcccgggccccgccgagacccctgccgtggggccgggccctgggccgcgggccgcgctgagccgcagcgccagtgtgcggtgcgcgggccctggcgggggcggaggcgggggcgcgccgggcgcgctctggactgaggctcgcgagcaggccctatgcggccccggcctgcgcaaaaccaagtaccgcagcttccgccggcggctgctcaagttcatccccggactcaaccgctccctggaggaggaggagagccagctgtaggggcgggggcgggcagggaggtatttatttatttattcgcaacagccagcgctaaaagagggggaggccgagccaagaggaccccaggagcccagagcagcgggagagggtccttcctagcctcggcccgccgggtcggttcctggctggtgtctgctgagggagtggggggcccagccccttctcttctcccccgccaaaccacagtgggagctggggcagggggagagccaggcaatcgggggccaaagatgggggtgctcgcctacagtctgcatctgtagtgccttgtggggtatccaggaacaccctcccagcaggggatgggaaccctgtcccatgaagccctctcctcagctttacttgctcccccgcccttagccttggggagaaatggcccgtggtgggctgaccccccaccctccacacacacagttccatgacccagcgggcccccaggggcatcaggtgctggtcctcctccctcctggcctcgacccctaagggcttcgcccctcccaggggcctgtaactaagtcgggtcctgccaggcagggggcctgtgttctgtgccccttgggagacaggaactggcgagttcaggtggggtggggacagcacagactgttccaccgttgtgcatattgttgcttctgaaccacaaa

SEQ ID NO: 138999 - DNA, 794 bp, Homo sapiens
  Payload ID: 7235
  Gene Symbol: GRASP
  Gene Name: GRP1 (general receptor for phosphoinositides 1)-associated scaffold protein
  ENST ID: ENST00000546756
  CDS Start-End: 131-794
ccaggctgtggctgaatttcgggccttagctagtcagaaagtgctgacgttggagaaggaggataaccagaccttcggctttgagatccagacttatggccttcaccaccgggaggagcagcgtgtggaaatggtgacctttgtctgccgagttcatgagtctagccctgcccagctggctgggctcacaccaggggacaccatcgccagcgtcaatggcctgaatgtggaaggcatccggcatcgagagattgtggacatcattaaggcgtcaggcaatgttctcagactggaaactctatatgggacatcaattcggaaggcagaactggaggctcgtctgcagtacctgaagcaaaccctgtatgagaagtggggagagtacaggtccctaatggtgcaggagcagcggctggtgcatggcctggtggtgaaggaccccagcatctacgacacgctggagtcggtgcgctcctgcctctacggcgcgggcctgctcccgggctcgctgcccttcgggcctctgctcgccgtgcccgggcgtccccgcggaggcgcccgacgggccaggggcgacgccgacgacgccgtctaccacacgtgcttcttcggggactccgagccgccggcgctgccgcccccgccgcccccggcccgcgccttcggcccgggccccgccgagacccctgccgtggggccgggccctgggccgcgggccgcgctgagccgcagcgccagtgtgcggtgcgcgggccctggcgggggcggaggcgggggcgcgccgggcgcgctct

SEQ ID NO: 139000 - DNA, 1688 bp, Homo sapiens
  Payload ID: 7235
  Gene Symbol: GRASP
  Gene Name: GRP1 (general receptor for phosphoinositides 1)-associated scaffold protein
  Uniprot ID: Q7Z6J2
  ENST ID: ENST00000552049
  CDS Start-End: 242-1000
gaggctccaggctgtggctgaatttcgggccttagctagtcagaaagtgctgacgttggagaaggaggataaccagaccttcggctttgagatccagacttatggccttcaccaccgggaggagcagcgtgtggaaatggtgacctttgtctgccgagttcatgagtctagccctgcccagctggctgggctcacaccaggtggggcctgagcccaggacacccaggtctgggaaggggatatgaccttactcccaagcaaagggggggacaccatcgccagcgtcaatggcctgaatgtggaaggcatccggcatcgagagattgtggacatcattaaggcgtcaggcaatgttctcagactggaaactctatatgggacatcaattcggaaggcagaactggaggctcgtctgcagtacctgaagcaaaccctgtatgagaagtggggagagtacaggtccctaatggtgcaggagcagcggctggtgcatggcctggtggtgaaggaccccagcatctacgacacgctggagtcggtgcgctcctgcctctacggcgcgggcctgctcccgggctcgctgcccttcgggcctctgctcgccgtgcccgggcgtccccgcggaggcgcccgacgggccaggggcgacgccgacgacgccgtctaccacacgtgcttcttcggggactccgagccgccggcgctgccgcccccgccgcccccggcccgcgccttcggcccgggccccgccgagacccctgccgtggggccgggccctgggccgcgggccgcgctgagccgcagcgccagtgtgcggtgcgcgggccctggcgggggcggaggcgggggcgcgccgggcgcgctctggactgaggctcgcgagcaggccctatgcggccccggcctgcgcaaaaccaagtaccgcagcttccgccggcggctgctcaagttcatccccggactcaaccgctccctggaggaggaggagagccagctgtaggggcgggggcgggcagggaggtatttatttatttattcgcaacagccagcgctaaaagagggggaggccgagccaagaggaccccaggagcccagagcagcgggagagggtccttcctagcctcggcccgccgggtcggttcctggctggtgtctgctgagggagtggggggcccagccccttctcttctcccccgccaaaccacagtgggagctggggcagggggagagccaggcaatcgggggccaaagatgggggtgctcgcctacagtctgcatctgtagtgccttgtggggtatccaggaacaccctcccagcaggggatgggaaccctgtcccatgaagccctctcctcagctttacttgctcccccgcccttagccttggggagaaatggcccgtggtgggctgaccccccaccctccacacacacagttccatgacccagcgggcccccaggggcatcaggtgctggtcctcctccctcctggcctcgacccctaagggcttcgcccctcccaggggcctgtaactaagtcgggtcctgccaggcagggggcctgtgttctgtgccccttgggagacaggaactggcgagttcaggtggggtggggacagcacagactgttccaccgttgtgcatattgttgcttctgaaccacaaactgtataaatggatggttttttg

SEQ ID NO: 139001 - DNA, 2775 bp, Homo sapiens
  Payload ID: 7236
  Gene Symbol: GRPEL1
  Gene Name: GrpE-like 1, mitochondrial (E. coli)
  Uniprot ID: Q9HAV7
  ENST ID: ENST00000264954
  CDS Start-End: 166-819
aagatgctcttccgtgacccacaattattggtgactattgcctgtccataacaggaaaagcgattacggattggctgaggcgaagtagtagggcagaaaagtgggtatagctgcctgcacgcacgcttggtgcgtgcgcggcgactgcgacgggcagtggcagtcatggcggctcagtgcgtgaggttggcgcggcgcagtcttcctgctttggcgttgtctctcaggccatctccccggttgttgtgcacagccacgaaacaaaagaacagtggccagaacctggaagaggacatgggtcagagtgaacagaaggcagatcctcctgctacagagaagaccctcctggaagagaaggtcaagttggaggaacagctgaaggagactgtggaaaaatataaacgagctttggcagacactgagaacttacggcagaggagccagaaattggtggaggaggcaaaattatacggcattcaagccttctgcaaggacttgttggaggtggcagacgttctggagaaggcaacacagtgtgttccaaaagaagaaattaaagacgataaccctcacctgaagaacctctatgaggggctggtcatgactgaagtccagatccagaaggtgttcacaaagcatggcttgctcaagttgaaccctgtcggagccaagttcgacccttatgaacatgaggccttgttccacacaccggttgaggggaaggagccaggcacagtggccctagttagcaaagtggggtacaagctgcatgggcgcactctgagacccgccctggtgggggtggtgaaggaagcttagctgctgttgatggggtgggtgtttttaaactcacttgatgtaactctcaaggctggttcattgtttctcatctatgagtacgtgtgaccttttcccaaaccttattggaaaccttaagtaaccagtggctaaacagaaaagccggttgcccaactgcattaatgaactctaattcgggagtctgttcccttttagtgccacgcgttgaatagttccacatactttcagaagagctcagcagggccctgcctggtctcccgagcatcatgagtaacgtgtctgctcagactctgctgacaccaaagtattttaaacaaataaaaggtcttggggaattctgtttggctacctgggcacgccagtctgcaccatgtgtccctgcggcgcatgagtgactggcgtatttagcccgtcacatttcattcgctgaaggaaaggcaagagagttgaaacatttttcttacttaaaaaaaatgatctttgtgaagaacatagtgagttcgtttgtcttcagtcaacagcggctgaaactgaccactgagaaatgggtgtgggcactgacagttctcccccattatttggccaggaattgagcttggcttggcaaagttccttttaccctgttctgttcatctaaatgcagacatatttaaatcatattcaactagttactaatgacctcaagttgtattccctggcaaaatggactttctcaaaataggactgcacgcttggtgtactttaaatgttaatgtttaatttaaaatttttatttaagaggattaaagccctaatgtttattttcctactttctgaaaacaattttgtgtcctctcatggagatccttgccgctgaggcaagcatggcttagccttcccattctctactccagcccagaagctgtcagcttgacacgtgcgtgcgtgcacattcacgtacacacatatacaggcttctacacagaaagggagagccacactcccccagtgcagctgcagcccgtccggtaagaatacgaaacacccaggagccacagcaagggcacaggatttgcaaaatcatcttgccaaagggctgttcctcatttacacggtcatccagggcttagaaaaaggctgaatgattggcgtctgttacaaaaaagagaaaagaacctttcgctgcctttgcttctagaatggaagatacttgtgaaagccatttgctgcacaggaaagatggggcagtttatttcacttctaattttaaaagacgcaagtaatggtcccataatacttcatcttgggataccattcccaaacatgttccacctttaagatgccttaagttaatttggtcagaaacaactaaaggcagcatcgtgtattgaagaaaacatgactgggagctccagcgctgcctgttttcacgctgtggggttgtgagtgcatcatcacccctggagctcccgagttaaatggaggctaagaaaagtaatttatcaactcatttctgtgaatgtttgcagtctcctaccgtctcaactacagctgcagttgctaaaaagcacttaactcgtaacctagaggcaatatagcttaagtagcaaaatatttttttacagtaagcttcagtcatccatagtcactataagttggttatcatctgaaatgcttagaaccagaattgtttcaaacttggggggttttcggattttggaatatagtcaagcatggcttaaccacagggatgtgttctgagaaatgcgctgtcaggcagtttttcctgtgaacaccatgtgtacctacatggacctaaaaaacaggtggtggagcctcctccacacctaggctatatggtgtatgtagcctgttgctctagactggagggcacgttactgtactgatactgtaggcaactgttaacacaatggtatctgtgtatctgaacataacatagtaaaggtacagtgcaaa

SEQ ID NO: 139002 - DNA, 4089 bp, Homo sapiens
  Payload ID: 7237
  Gene Symbol: GRPEL2
  Gene Name: GrpE-like 2, mitochondrial (E. coli)
  Uniprot ID: Q8TAA5
  ENST ID: ENST00000329271
  CDS Start-End: 111-788
tgtccggaagtcctgagagggaaacgcccgcaaaggctggtttttaagcgggagcatctcttcactcgcagcaagtgcgcgtgcgctgcctctcagcccaaattggaaacatggccgtacggtcgctgtgggcgggccggctgcgggtgcagcgcctactggcctggagtgccgcgtgggagagcaagggatggccgcttccattcagcactgccacccagagaactgctggtgaggactgccgttctgaggaccctcctgatgagcttgggccccctcttgctgaacgagccttaagggtaaaagctgttaaactggagaaagaagtccaagatttaacagtgagataccagagagctatagctgattgtgaaaacataaggaggcgaacccagagatgtgtggaagacgccaagatatttggaatccagagtttctgtaaggacttggtggaggtggctgacattttggagaagactacagagtgcatttctgaagaatcggagcctgaggaccaaaagctcactctggagaaggtcttccgagggttgttgcttttagaagcaaagctgaaaagtgtgtttgccaagcatggcctggagaaactgacacccattggtgacaaatatgacccccatgagcatgaactcatctgtcatgtgccagctggtgttggggtgcagcctggcaccgtggcattagtaagacaagatggctacaaacttcatggccgcaccattaggcttgcccgagtggaagtggcagtggagtctcagagaagactgtgaagaggccatcaggaactggatgttctcccagagcgcagtcacctatgtttcttttatttattaaactaggtttgtattgtacatgaggtacttcatgtgatatgttttggatttagtcatattggctttatttctaagatattctattgatttaatgtgacctgtttggtctcatcagaagtcttaccattgggcatttgaacagtgtgacaggtgttccaatggcctttatcaaaacatgtttaggaaaattggtactgtgataaatttgaatccaaaatccttttaactatgggttttcaactacatgtttcttcctagcggtctctataacaggaattgtgtagtatcttgtattttgtggaaaaaggagatggtagggattggttcaacatttgggtacttagaggataaagcttcgtggtcgtataaatttagatcatttggattgatttttatacacatagattttcaggactttaccttttgttttgtttttttccttttagccatcttttgttcttgtaatcccaactagataggctttatgctcacatcattgtcccatacccacccctttctcatccccatttgcaggggctaaaggtctagatgagacttggaaggcaaggagcatcgaaatttgagatacccaggaccctttcaagcaagaatggccaaaaagccttgtgctgtctttgctcttcaaattattttcagcctccttgtcatataatcatttcaggcaaactgaggcaacactaacagctaatgacccagatggctctatttgggtaatttacctacaacttattccaccagcctttactcctctgcccttttgtcaattttaccttataatcctttattaaatgatgggaggtggtgatcaggacaaaagtgttaggttcccatgatttctcatttcatttattaatagttaatgctgaatttttttttaagtttcctctggctctatttatgttactttttgcgataagaacacttaacataagtattctctcctcttggcaattttttttttttttcctgtgttgcccaggctgacctccaactcctgggcccaagcaatcctgcctcagcctgccaagtagctaggactacaggcgttcaccactgcgcccgcaaagtttttttgttgtttttttttttaagttggtactcacaaatcactacctctgttatattgacaagctctatttcctattctttgtatctgttaagtcacatctgtgtaaacattgagctcaccttttatatattaacctctagaattaatgggcctatgtggttttttttcagtcttatagctggtgttctgtaaaagatttgtccaataaacgacttaatgaatgatacatcagtcagattttaggaaggcagtcaattatggatattttaatgttggaagaggccttaatgatcaaatctcaccctttctgcttctgaagtatgaaaatctagtctttttaggactggacacaaggaaaataatctctaaactattgactaaattccagtgagagtatgaatgaagaacaactagatattaatgtcaatcatttaagattaatgggcatgcaattaagtctccatttaagattaatgggcatgcaatgaagtctccagcagacaatcagatgttgttggatgtctagattatataggtttaggttgaagttataaaataaaataaaattcattttccactggaactctatgacattcagtggagtggtggaaagttaacctcttatacattatagataattctaagacagcacacaaacttatcaataaagccatctccttgtgggccttaccatcttcatcagatttagacccttaaaaaacaagtaaatatgcacttttaaaatgcaatcaaaagactggtggttaagcttgtaaaaccagaacatcttttggcattccactaagtatatattgtaaatttaatgaacaatcaaggttcacaataggaagttgtctttttttgccttccattctgtgagatttgacagatggtgacaataagaaaatgagctgattgtaattactctctgtgtgtttttttattgctagctatcattaccagttagaattaacattaattacaattaacaataattttaggtatggaatgttatgattacctaaagagatgtctctacctaatgagctcaagtgatcctcccacctcagcctaccaagtagccaggaccacaggcaagtgcaccaccatgactggctagttttgttttttggtttttggtttttggtttttggttttttttttttggttggttggttgttttttacaggcggggtctcactatattgtccaggctagaagaattttctaatggtctattacacctcccgttttggcaagtaaattcagaataattttaggttcttttgttattcagtagttttgcagacttaaaagtgtaaatttagaattagaagatgaagctatagtagtaagaatctcaagctgaagggctttggggagccaaagcagcatattagagcataggcttgaacttaaatctcagctcagtcacctgcaggactttaggcaccagtgatttcacccttctgagcctgtttctttattcgtaaaatgattataataattctttcacagcgttgtgaggattaagtgaaatgtgttaaatgcctactacagtaggtgctcagatatttatttttatttttttattatgcacattgtttttcctgcctttttatggctgtctaaagtctagggaaaagggaagactggttaatgatgagtagaaaaaacttgtaagctaatcattcactgacttattttccttccattttctggtttttaaaattagccacaccacaggaaacccacatttttagatggaaagagcaagaaaattgtgtcagtgctcttagttattttcatcttaatggtatagtgaaaagacattgacttgagatgatactaaggaagctttggctcactctcacttgaagaggggatcttggtgttgtagtacttggactgtacaaatgttttactgacttttcttactgctgtaaaggaatcaggcagttgggtattgatatgttatttggtgctctcattcatggcaaaggatttgataaataaaagttctttaaacactaaagcaaaatcaaatgagcaaaactaaggatgaaatgtaatattcatcagaacaaggatcactgagaaaaaatattcagaaacaactttaataaaacctgaattgaaataactgca

SEQ ID NO: 139003 - DNA, 1006 bp, Homo sapiens
  Payload ID: 7237
  Gene Symbol: GRPEL2
  Gene Name: GrpE-like 2, mitochondrial (E. coli)
  Uniprot ID: Q8TAA5
  ENST ID: ENST00000416916
  CDS Start-End: 39-407
aagtgcgcgtgcgctgcctctcagcccaaattggaaacatggccgtacggtcgctgtgggcgggccggctgcgggtgcagcgcctactggcctggagtgccgcgtgggagagcaagggatggccgcttccattcagcactgccacccagagaactgctggtgaggactgccgttctgaggaccctcctgatgagcttgggccccctcttgctgaacgagccttaagggtaaaagctgttaaactggagaaagaagtccaagatttaacagaatccagagtttctgtaaggacttggtggaggtggctgacattttggagaagactacagagtgcatttctgaagaatcggagcctgaggaccaaaagctcactctggagaaggtcttccgagggttgttgcttttagaagcaaagctgaaaagtgtgtttgccaagcatggcctggagaaactgacacccattggtgacaaatatgacccccatgagcatgaactcatctgtcatgtgccagctggtgttggggtgcagcctggcaccgtggcattagtaagacaagatggctacaaacttcatggccgcaccattaggcttgcccgagtggaagtggcagtggagtctcagagaagactgtgaagaggccatcaggaactggatgttctcccagagcgcagtcacctatgtttcttttatttattaaactaggtttgtattgtacatgaggtacttcatgtgatatgttttggatttagtcatattggctttatttctaagatattctattgatttaatgtgacctgtttggtctcatcagaagtcttaccattgggcatttgaacagtgtgacaggtgttccaatggcctttatcaaaacatgtttaggaaaattggtactgtgataaatttgaatccaaaatccttttaactatgggttttcaactacatgtttcttcctagcggtctctataacaggaattgtgtagtatcttgtattttgtggaaaaagga

SEQ ID NO: 139004 - DNA, 546 bp, Homo sapiens
  Payload ID: 7237
  Gene Symbol: GRPEL2
  Gene Name: GrpE-like 2, mitochondrial (E. coli)
  ENST ID: ENST00000513661
  CDS Start-End: 111-497
tgtccggaagtcctgagagggaaacgcccgcaaaggctggtttttaagcgggagcatctcttcactcgcagcaagtgcgcgtgcgctgcctctcagcccaaattggaaacatggccgtacggtcgctgtgggcgggccggctgcgggtgcagcgcctactggcctggagtgccgcgtgggagagcaagggatggccgcttccattcagcactgccacccagagaactgctggtgaggactgccgttctgaggaccctcctgatgagcttgggccccctcttgctgaacgagccttaagggtaaaagctgttaaactggagaaagaagtccaagatttaacagtgagataccagagagctatagctgattgtgaaaacataaggaggcgaacccagagatgtgtggaagacgccaagatatttggtgagagatttatttacaataaaaatgtctttggttgggcacagtggcttatgcctgtaatcccagcactttgagagtctaaggctgtcagatcacatgagatcaggattcaagaccagtctg

SEQ ID NO: 139005 - DNA, 1663 bp, Homo sapiens
  Payload ID: 7238
  Gene Symbol: GSX1
  Gene Name: GS homeobox 1
  Uniprot ID: Q9H4S2
  ENST ID: ENST00000302945
  CDS Start-End: 49-843
gtgggcgcagagggcgggctggctgcggggcgaccgcgcgccggggccatgccgcgctccttcctggtggactcgctagtgctgcgcgaggcgggcgagaagaaggcgcccgagggcagcccgccgccgctcttcccctacgctgtgcccccgccgcacgcgctgcacggtctctcgcctggcgcctgccacgcgcgcaaggctgggctgctgtgcgtgtgcccgctctgcgtcaccgcctcgcagctgcatgggccccccgggccgcccgcgctgcctctactcaaggcttccttcccacccttcggctcgcagtactgccacgcgcccctgggccgccagcactctgctgtgtcgcccggggtcgctcacggcccggccgccgctgctgctgccgccgcgctctaccagacctcctacccgctgcctgaccccaggcagttccactgcatctctgtggacagcagctctaaccagctgcccagcagcaagaggatgcgcacggctttcaccagcacgcagctgctagagctggagcgcgagttcgcttctaatatgtacctgtcccgcctacgtcgcatcgagatcgcgacctacctgaatctgtccgagaagcaggtgaagatctggtttcagaaccgccgagtgaagcacaagaaggagggcaagggcagcaaccatcgtggcggcggcggcgggggtgccggtggtggcgggagcgcaccgcaaggctgcaagtgcgcatcgctctcctcagccaagtgctccgaggatgacgacgaattgcccatgtctccgtcctcctcagggaaggacgaccgggatcttacggtcactccctaggcgcgtgtctccctaggtcgcccaccccaagacctccctgcgcctcggagactagtcctgggactcagcgctgattcccaggcacccgcagccaaaccactgcctggcatggatttggcactgctttgcagaggtcccgggcctgggcagggctgagagcttggcagagactggaccatggcgtccccgccccagggctcgctcgtgtccaaagccaactccaagctgtgaacactgtaagcgctcgagtcctcctgggcagtgcagcaccgcggcccccgcccgcaagcctgcttggcgcagcgccttgctggcagccggcgcctcctagcccgccctctctgggctggcttgggcttcctcgcttactctactctcctccgctctcggtcaaggtcggcggccttggatgctcgttcgcttctctttttaaaatgtctttttgtccctccccacctctttcctgtgatcatttattcactcggcccccgcccgccaacacacacatttatgaacccccactttttttttccttctccttttcccttcccctcctcagggagcctcctccttcagtcagtccatttgtcccttgatctggccttgctgtcctcagtccccacggctcctctcacagatgataaatttcgcccgtagtatccatattggggaaacagatttgctctgtttccaacacgctcttccttcctctaaacataggaccccgctctgcgccgctggcgaccccactcttccccctccagactctggcccgccccagcctagctgtgtaattgtacggcctctgcaatgccagaag

SEQ ID NO: 139006 - DNA, 1812 bp, Homo sapiens
  Payload ID: 7239
  Gene Symbol: GSX2
  Gene Name: GS homeobox 2
  Uniprot ID: Q9BZM3
  ENST ID: ENST00000326902
  CDS Start-End: 315-1229
gcggcttctgttgtgactcgggcagcctatcccgagggtgcggagctgccgaggagcctgagccgagcggtactccgcagcatcacgtgccagggtggggggctataaaatacccgagccggggcgccgggcgggggacgtgaggaccagccctctccggggacccctttgttcccagcccagacgccaacacctctgcgtccccaagggcttgactgcccgtgtctgcgcggctcccagggcagagcttagaacactagaggagaggggtcgccgcgaactgccggggcttccagccacccacccctctcgacatgtcgcgctccttctatgtcgactcgctcatcatcaaggacacctcacggcctgcgccctcgctgcctgaaccgcaccccgggccggatttcttcatcccgcttggcatgccgcccccattggtgatgtccgtgtccggccccggctgcccgtcccgcaagagcggcgcgttctgcgtgtgccctctctgcgtcacttcgcacctgcactcctctcgggggtctgtgggcgccggcagcgggggcgcaggggccggggttaccggggccggaggcagtggggtggcaggggccgcaggggcactgcctctgcttaagggccagttctcttcggctcctggggacgcgcagttttgcccgcgggtgaaccatgcgcatcatcaccaccacccgccgcagcaccaccatcaccatcatcagccccagcagcctggctcggccgcggcggcggcagcagcagcagcggcggcggcggccgcggcggccttggggcacccgcagcaccacgcacctgtctgcaccgccaccacctacaacgtggcggacccgcggagattccactgcctcaccatgggaggctctgacgccagccaggtacccaatggcaagaggatgaggacggcgttcactagcacgcaactcctggagctggagagagaattctcttccaacatgtacctgtctcgactccggaggattgaaatcgccacttacctgaacctgtcggagaagcaggtgaaaatctggtttcagaaccgccgagtgaagcacaagaaggaggggaagggcacgcagaggaacagtcacgcgggctgcaagtgcgtcgggagccaggtgcactacgcgcgctccgaggatgaggactccctgtcgccggcctcagccaacgatgacaaggagatttcccccttatgagggagggcctcctccctcacatcccccgctcctggcagaccaggcaacgccaaggcgtggggcacccaggggccagaatccttgctcattgcagtggtcccatctggagaagaaacgaacctggaagttctggaatggacaagccgggacctgacccttcgcgtctccttcttgacctgtttatctaggactccaacttgaagttacagatttttttaaaaaatgtaaataacctataattcaactcattcttgtcgtataacagaggaaaaacagggttggtttaagtttaacactgtatggggtttttgaaagcacatgtcagttccccatccctactctctttcagaactcgataagaacacaggatttattgattattttctgttgtcgttttcaaacaaaaacacccaagttgaaaataatttagaaaattagaccttgtaggtcttgctttctgaaatttcgcctggggagaatttaaaatctaagtcgctggaagtccctttgtatgtgaataggtttatataaaatttatatttatatttatttaaataaatgaaacaaaaaccagaattttaaa

SEQ ID NO: 139007 - DNA, 1181 bp, Homo sapiens
  Payload ID: 7239
  Gene Symbol: GSX2
  Gene Name: GS homeobox 2
  ENST ID: ENST00000503800
  CDS Start-End: 173-577
aggaccagccctctccggggacccctttgttcccagcccagacgccaacacctctgcgtccccaagggcttgactgcccgtgtctgcgcggctcccagggcagagcttagaacactagaggagaggggtcgccgcgaactgccggggcttccagccacccacccctctcgacatgtcgcgctccttctatgtcgactcgctcatcatcaaggacacctcacggcctgcgccctcgctgcctgaaccgcaccccgggccggatttcttcatcccgcttggcatgccgcccccattggtgatgtccgtgtccggccccggctgcccgtcccgcaagagcggcgcgttctgcgtgtgccctctctgcgtcacttcgcacctgcactcctctcgggggtctgtgggcgccggcagcgggggcgcaggggccggggttaccggggccggaggcagtggggtggcaggggccgcaggggcactgcctctgcttaagggccagttctcttcggctcctggggacgcgcagttttgcccgcgggaggctctgacgccagccaggtacccaatggcaagaggatgaggacggcgttcactagcacgcaactcctggagctggagagagaattctcttccaacatgtacctgtctcgactccggaggattgaaatcgccacttacctgaacctgtcggagaagcaggtgaaaatctggtttcagaaccgccgagtgaagcacaagaaggaggggaagggcacgcagaggaacagtcacgcgggctgcaagtgcgtcgggagccaggtgcactacgcgcgctccgaggatgaggactccctgtcgccggcctcagccaacgatgacaaggagatttcccccttatgagggagggcctcctccctcacatcccccgctcctggcagaccaggcaacgccaaggcgtggggcacccaggggccagaatccttgctcattgcagtggtcccatctggagaagaaacgaacctggaagttctggaatggacaagccgggacctgacccttcgcgtctccttcttgacctgtttatctaggactccaacttgaagttacagatttttttaaaaaatgtaaataacctataattcaactcattcttgtcgtataacagaggaaaaacagggttggtttaagtttaacactgtatgggg

SEQ ID NO: 139008 - DNA, 1262 bp, Homo sapiens
  Payload ID: 7239
  Gene Symbol: GSX2
  Gene Name: GS homeobox 2
  Uniprot ID: Q9BZM3
  ENST ID: ENST00000611459
  CDS Start-End: 315-1229
gcggcttctgttgtgactcgggcagcctatcccgagggtgcggagctgccgaggagcctgagccgagcggtactccgcagcatcacgtgccagggtggggggctataaaatacccgagccggggcgccgggcgggggacgtgaggaccagccctctccggggacccctttgttcccagcccagacgccaacacctctgcgtccccaagggcttgactgcccgtgtctgcgcggctcccagggcagagcttagaacactagaggagaggggtcgccgcgaactgccggggcttccagccacccacccctctcgacatgtcgcgctccttctatgtcgactcgctcatcatcaaggacacctcacggcctgcgccctcgctgcctgaaccgcaccccgggccggatttcttcatcccgcttggcatgccgcccccattggtgatgtccgtgtccggccccggctgcccgtcccgcaagagcggcgcgttctgcgtgtgccctctctgcgtcacttcgcacctgcactcctctcgggggtctgtgggcgccggcagcgggggcgcaggggccggggttaccggggccggaggcagtggggtggcaggggccgcaggggcactgcctctgcttaagggccagttctcttcggctcctggggacgcgcagttttgcccgcgggtgaaccatgcgcatcatcaccaccacccgccgcagcaccaccatcaccatcatcagccccagcagcctggctcggccgcggcggcggcagcagcagcagcggcggcggcggccgcggcggccttggggcacccgcagcaccacgcacctgtctgcaccgccaccacctacaacgtggcggacccgcggagattccactgcctcaccatgggaggctctgacgccagccaggtacccaatggcaagaggatgaggacggcgttcactagcacgcaactcctggagctggagagagaattctcttccaacatgtacctgtctcgactccggaggattgaaatcgccacttacctgaacctgtcggagaagcaggtgaaaatctggtttcagaaccgccgagtgaagcacaagaaggaggggaagggcacgcagaggaacagtcacgcgggctgcaagtgcgtcgggagccaggtgcactacgcgcgctccgaggatgaggactccctgtcgccggcctcagccaacgatgacaaggagatttcccccttatgagggagggcctcctccctcacatcccccgctcct

SEQ ID NO: 139009 - DNA, 666 bp, Homo sapiens
  Payload ID: 7240
  Gene Symbol:
  Gene Name: GS1-114I9.3
  ENST ID: ENST00000442800
  CDS Start-End: 1-35
taaatagatcttgccctgagcacccttcagattaagcgtcagcttcctgttttataggttttcttgtcttgacaagatgcttgaaaaaccaagaggatatgaaaatctgtctctggagaaacaaagacgcaggcatactcagccagaaatctgagttttgtgagacttggtaatacagagatggacaatcgtactggggtaaaaaaaccctgctgaagagaggacagtgaccacagaactcagtgtaccaaacatgcatacaaaggacacacagggattttgaaaatgctgcacatcccttaatagtcatctacataggggtgataatgagaagcaatggactagaggattcaagtggaagagtcttcatcacccgtgagttctcctgggaaagtgaattggaaacaagctaagtgcattttctcagcagaaggaagatcttacacatcacctagtgaatatccagttgggaatctgaaagcagcagtgggcaggcaggggaatcaggagcaatgttcatcagtgaatgaaaggagtgctggaaagagaaccaaatgctgacatcaaagaaccttcaatcatatgattttagtgtggaaagccagatgatacactctaacatctgtgaaatcaaatcaaaatgcaaattggtttttggctttcctg

SEQ ID NO: 139010 - DNA, 830 bp, Homo sapiens
  Payload ID: 7241
  Gene Symbol:
  Gene Name: GS1-259H13.13
  ENST ID: ENST00000455905
  CDS Start-End: 121-501
ggggctgtctacagcggcccgggagaggctgtggtggccccgagcgcgagtgtgtaggtgacaggacagcggccaggcccgcccctcccctcgtgatggtcattgtcctccagagcagtgatggaggaaataccagcccaggaagcagcagggtcaccaagggtccagtttcagtctttggagacccagtctgagtgtctgtccccagagcctcagtttgtgcaggacaccgacatggaacagggactcactggggttccaagagcctctgagttcctgccttttttcatctctgaatccccaccattggcctacattgggagtggggcgacctgtgatgctgacgttagaggacaaggacatgaagggattctcctgggccatagtcccagccttaacctccctaggctacctgattatactggtggtctccatctttcccttctgggtgcgactgacaaacgaggagtcccacgaagtctttttcagtggcctatttgagaactgcttcaatgccaaatgctggaagcctcgacccttatccatttacatcatcctcggccgggttttcctgctctctgcagttttcttggctttcgtcaccaccttcatcatgatgccctttgcatccgagttcttcccgaggacctggaagcaaaactttgtgttagcctgcatcagcttcttcacaggggcctgtgccttcctggctttggtgctgcatgccctggagatcaaggctctgaggatgaagctcggccccctgcagttctccgtgctgtggccttactacgtgctgggcttcggcatctttctgttcatagtggctg

SEQ ID NO: 139011 - DNA, 1596 bp, Homo sapiens
  Payload ID: 7242
  Gene Symbol:
  Gene Name: GS1-393G12.13
  ENST ID: ENST00000531225
  CDS Start-End: 1-79
tctgaagcgggcctaccggggcctggaggaagtccagtggtgtctggagcagctgctcaccagcccctcacccagctaggcagccacagacctgggacacctcagccagcttgcccaccctccacctttgcccaatttcagatatttgagcattttgttaaaataaaacatttttaggagttctgtgtgtgtggtcctcagggtagggttgggcaacaggttatacctgatggagccactggggctacagccggcccagagcctgtgtgttgtggggtcagggtggtcccatgggctcttgagcctgcaggtggccatgcctttgcctgcccactgctgggtccagtgtgtgtgttccgtcctcggggacactggtgagcttgtctgtggttgcatgtgggtggggggtgggagggggtggggccccgcccagctgtggggctcactgagtggtcgccgcctgcaaatttctctccagctcaggcctagggtgtccacccatccacccttcacatggggactgtgaacaggccatacagggggcctccagtggatggactggccaagaagttaatgcctaccgcaggacctcaccctggactccctaagaggtggtcaacagagcagccccttctagaacctgcccagaacttctagaacccatccgcggtccaccctgggccgctccctggcctcgctgccctgtcagtcgcctgtgagctcctgctccttcctgggcctgcagccctggagaatttgctcaccgagatgcctaagggccgggccggcagcctgcccacgacctccatcggctggcgcttccagctctggttcctaggactcacctgcccggagcgccacctggccagacgcctcaagaacaatagcttctacccattcgtgcagcaggagccaaacgtcttcgtgctcgaatactacctggacacactgtggaaggggatgctgctcttcatcatcagcgtggtcctggtcagcttcagctccctgagagaggtgcagaagcaagagacctgggtcttcctcgtgtacggcgtgggcgtgggcctgtggctcgtgatctcgtcgctgccgcggcgccgcctggtgctgaaccacacgcgcggcgtgtaccacttctccatccagggccgcaccgtgtgccagggccccttgcatctggtctacgtgcgcctggcgctcagctccgatgcccacggaaggtgcttcttccacctggtcctcggcggccacaggttggagcccctggtgctggtgcagctgtcggagcactacgagcaaatggaatacttgggccgttacatcgcccggaaactcaacatcaactacttcgactacctggccacctcctaccggcacgtggttcgccactggccaccccctggcgctggcactgtgatgggcaagagccccatgggtcacaagcccagctcctctcagtccagcctggaggtgtgactctgagggcctcccccacctcgggactgtgttctcggtaacctcccagccccactctggggcagatcaaatgtgagtcccactcactggccttcctttcaataaagctgcctcagcttc

SEQ ID NO: 139012 - DNA, 7495 bp, Homo sapiens
  Payload ID: 7243
  Gene Symbol: GSE1
  Gene Name: Gse1 coiled-coil protein
  Uniprot ID: Q14687
  ENST ID: ENST00000253458
  CDS Start-End: 177-3830
tcctcggcggcgacagcagcaggtgtttcttggccggggccccggaagctccacctccccagcgggcccgagctgccgccgccgagcagccccgggtgagataagcagtttagacaaacactgggcgacggtggctccagcatgtatcagccgaggtggagctgcggggccctggcatgaaaggcatgagccatgagcccaagtccccttcgctagggatgctttccaccgcgaccaggaccaccgccaccgtcaaccccctcaccccctcgccgctcaatggcgccctggtgcccagcggcagccccgccaccagcagcgcgctgtcggcccaggccgcgccatcctccagctttgccgccgcgctgcgcaagctcgccaaacaggcggaggagcccagagggtcctcactgagcagcgagtcgtcccccgtgtcctctccggccaccaaccacagctcccccgccagcacacccaagcgcgtgcccatgggccctatcatcgtcccccctgggggccacagcgtgcccagcaccccccccgtggtgaccatcgctccaaccaaaaccgtgaatggtgtctggaggagtgagagccggcaggatgccggctccaggagcagcagtggaggtcgggaacgcctcattgtggagcccccgctccctcaggagaaggcagggggaccagccatcccctcgcacctgctcagcaccccctaccccttcggcctctcccccagctcagttgtgcaggattcccgcttcccgccactcaacctccagcggcccgtgcaccacgtggtgccccccagtaccgtgaccgaggactacctgagaagcttccggccctaccacaccaccgacgacctccgcatgtcctcactgcctcccctcggcctggacccggccactgctgcagcctactaccaccccagctacctggccccacaccccttcccccacccggccttcaggatggacgactcctactgcctgtctgccctgaggtccccgttctaccccatccccacccccggctccctgcccccactgcacccatcagcgatgcacctgcacctctctggggtccgctaccctcccgagctctcccactcatccctggcagcgctgcactcggagcgcatgtctggcctcagcgcggagaggctgcagatggacgaggagctaaggcgggagagggagcgcgagcgcgagcgcgagcgtgagcgtgaggctgaccgcgagcgggagaaggaacgtgagcgcgaacgcgagaaggagcgcgagcaagagaaggagcgtgagcgtgagaaggagcgcgagcgcgagctggagcgccagcgggagcagcgggcccgggagaaggagctgctggccgccaaggccctggagcccagcttcctgcccgtggccgagctgcatgggctgcgtggccatgccactgaggagcggggcaagccctcggagcagctgaccccaacccgagcagagaagctgaaggatgccggcctgcaggcgcccaagcccgtccaacaccccttgcatccggtgcccaccccacaccacacggtgcccagcctcatctccaaccatggcatcttctctctgcctagcagcagtgctgccacagccctgctgatccagcgcaccaatgaggaggagaagtggctggcgcggcagcggcggctgcggcaggagaaggaggaccggcagtctcaggtgtccgagttccggcagcaggtgctggagcagcacctggatatgggccggcccccggtgccggcggaggcagagcacaggccggagagcaccaccaggccaggaccaaaccgtcacgagccaggtggccgtgaccctccgcagcactttggggggccaccacctctgatttcgcccaagccccagctccatgctgcacccacggccctctggaaccccgtgtccctgatggacaacaccttggagacgcggcgggccgaaagccactctctgcacagccacccggctgcatttgagcccagccgccaggcagccgtgccgctggtgaaggtggagcgggtcttctgcccggagaaagcagaggaggggccacggaagcgtgagcctgcccctctggacaagtaccagccacctccgccgccaccacgagagggagggagcctggagcaccagcccttcctgcccgggcccgggcccttcctggctgagctcgagaagtccacccagaccatcctgggccagcagcgggcctccctcccacaggcggccaccttcggggagctcagcggacccctgaagcctggctcgccctaccggcccccagtgccacgggcccccgaccctgcctacatctatgatgagttcctgcagcagcgccggaggctggtcagcaagctggacctggaggagcgcaggcggcgggaggcccaggagaaagggtactactacgacctcgatgactcttacgacgagagcgatgaggaggaggtcagggcccacctccgttgcgtggccgagcagccgcccctcaaactggacacgtcctctgagaagctagagtttttgcaactttttggcttgaccacccaacagcagaaggaggaattggtggcccagaagcggaggaagcggcggaggatgctgcgagagagaagcccgtcgcccccaacaattcagagcaagcggcagacgccttcaccgagactggcgctgtctacccgctacagccctgatgagatgaacaacagtcccaacttcgaagaaaagaagaagttcctgaccatcttcaacctgacccacatcagcgctgagaagaggaaagacaaagagagacttgttgaaatgctccgtgccatgaagcagaaggcactgtcagcagcagtggccgactccttgacaaactctccgagggacagtcctgccgtctccctgagtgaaccagccacgcagcaagcctctctggatgtggagaagccggttggtgttgctgcttccttgtctgacatcccaaaggccgcggagcctgggaagctggaacaggtccggccccaggagctgtcgagagtccaggagctagctcctgccagcggggagaaggccaggctgagcgaggcccctggaggcaaaaagagtctgagcatgcttcactatatccggggcgctgcacccaaggacattcctgtgccgctgtcccacagcaccaatgggaagagcaagccgtgggagccctttgtggcagaagagtttgcacatcagttccacgagtcagtgctgcagtccacccagaaggccctgcagaagcataaagggagcgtggctgtgctgtctgcagagcagaaccacaaggttgacacgtccgtccactacaacattcctgagctgcagtcctccagccgcgcccctccaccccagcacaatgggcagcaggagccccccactgcaaggaagggccccccaacccaggagttggaccgggactcggaggaggaggaagaggaggatgatgaagatggagaagatgaggaggaagtccccaagcgcaagtggcaagggatcgaggccgtttttgaagcttaccaggaacacatagaagagcaaaatctggagcggcaggtgttacagacacaatgtagacgactggaggcccggcactacagcctcagcctgacggcagagcagctctcccacagcgtggcggagttgaggagccagaaacagaagatggtctcagaaagggagcggctccaggcagaactggaccacttacgaaagtgccttgccttgcctgcaatgcactggcctaggggctacctgaagggatatcccaggtgacggtttcccttgcactaggccgaacctatagtatagaaatattatctattttattaccttgaatatttaatatttttcactgggaggtttgaagcttacaaaatgagaatgtgccatgcatgaagcaaaggattccaggctccagaaaaaatgaatgaactcaccttgacgtcaatgcaattgaatcaccgttgtcattcagcgagcaaccaatgtaggattgcccacagtttttctttttaaaggtggttttcgcccttcctctcccacattatttcttaatctgaacatgaaggctccattagcaacactaaaacttgatcattaacagccccctgtgcatatgagtggatcaaaccggttctgttctttcttgtgttgccatgttactatgcctcaagcccagtttgcttttgccgcagcgatggggccagtctcattcctccccaggagtgaaacttgcttcagctgaaaaggttgggtgcattgtcagtaaaaagggcttatttgtttcattttactttcctgcaaaattttcttcaaagcaacaagtcctaggagcacacaaagcaacccaaaggcttttccctggaaaagctctttcttacctaaagataaaaccaattcacaaactgaaggtagctttttattactccgtggggagcatgtacagagctctgtgtatacacagcttcacacccaccagattgttactacagtgggttgggttttcatacagacgtaaattttgagagaaaagtcaaaggtgcttcagccttgtactgtgtatatatattaaaaaaaaaacaaagttttgtatgtttttattactttaactattgttataaaaagcctgccatttttaatatgtggtttgggggatttttgtttgtttttcctgtttgggggttttgtttgttgttttggttttttttgggcaaaaaaaaaaaaaaaaccttgcttttagtgtttgtactgctgctggtcaggacattaaaatattgaagtgtttttaaaaattaaagaagaagaaaagtaaaagagcttaccactggcgcctatgcgatcacttcatttttagtttgagttgcaccagaagctgccgtagaaagccatgcgctactgcttacctcctccactccccctgcctgcccccagcatctggacaagctaatagcaaatattacccattgctatcaagggaggagggggtagtctgtagaacccatgtgtgacagtcatgtgcacacatgggcgggggcttttaaaaacctttcaggaagtcaatgatttctgtgattgatataattctaaggtgtctgagagcaggtacagaataggaacttcagaggctttgtttaaacgcaaagctttgtaaaagccacaaggtctgagctgaacccctcctttttgaacttactgtgacaagcacaggaacggtcagaaactgggctcatcacaccaaggcaaagcaacgggcgagtcttcctccttgtcctagttactgcctatggaggcagtgtttagatcaagaaggcctctcttgctcccaagggccctcaccagaggccagggctgccagtcactggtctggggggtggaggcctgagctgagggcagggtgcctgacctgtgtgccggctgctcactgctgtgaccagcagccgagcccttggccctagcccttgctgcgcagaacagcttgctggcagctggcatcgtgtcgctttatctgcccccgcacagtttgctttgtacgtctgccaagaatcttccagttattagcaaactcagacgaatgtaccgccagtattatcagcagtcaacaagcaccttcctctccacagaagcagctggaagagaactcgaggggctgtgctgcaggcctcccctcgaaagacactgggaggtcagcatgttccacaggtgttcagagggagtctgctacaaactatcagggcaaaatctcactggatttctccactgaaaacctacttgaggtttctggtctgaaggcttaagagtcacatcttagcacttccgctctcaggcctcctcctccatcacagatgtctggatgcttttggaaatggccttggctaaagtaaaagggaaaagtagatccgataacttaaaaacgtagctcatcccttaccatccaaggggcactcccttggttggattttctatgacagcacaggggacaggtggcacaccatgagaggtctgcccagggtgggagcagtgtcactgtgctagcaatagttggcttctcccctgtcagtggaaaccccacttctgcccggcccttgagcttcttgcccactgtctccccatccttccacctacttgtggcgatctgagtactctactcttgctcaagaagtaatacgacaatcagaatacaaaccagtaaggcaacacgaataaactaagaaaaaggtaagaactgtctcaaaaacgaaagcacaccacccaagacacagtacccagtcatggtttccccatccaactattagtttcatactttgaaaacttactttcagattattctcaaagaacacagtagcacctaaatctgttttcaattgggcttaaaaattgacatgcaatctcttaagttttttgttcagctacttcacactgagtacctcaaatctgctctggagtcgattatgccacctgtgtgtcaggatgcacctgaaagccctcggctcggtccttagaccatcttcctacattacctggaagggagctgccatctgtccctctgcagagggataccttccaatagtaaattatctggttcctcactgaaacaagttatttttgcttcatatagtcagagtcagactgacatgataaaatatcatgttcctaatctgttgtctcagataagtgaccaagacgggactttccacattttagtctacattctaatcttaaaggaataaagcactgaattgggactaacattctgataggttgcacccttaagagtattcagagagcatcaaaaggagcccacaccttcagcagtgaaggattctaacacagggaatctgcagtttgtagcagaatggtattttcctcaagtagctcataatactgccaaatctcaaaagttaagctgaatttcacaccagatcctacccctttccctgagccacatgtttcacacaagtgtagaaaatgccagggatccaccacaagatggagatggtcagcacaaaccgattctgttcctctttaaagtgtatattagccacttagcaatctctatattctttcaagtaaccaagctgttgactttcttactacttgcagtagcctgtccccaacttttccatccagtgcttaacctaaaaaactccttaactctgccttgacctgaggaagaccatgctaactggtgttattttgtatgtaccctgtgcttaattctataacagtaaaccccatacgcaggtgggagggaggaacaccggtgcctcggtcactctgggggcagtttagatgctgtgaaattaaacctgttctaagtgtacttgtttgaattaattgtattgtaatattatttgttgaatgtagtaattaggtatttatgaatatattgctgtaatttctgacaacatccaaaaaataaaatcttcctaaattatgtt

SEQ ID NO: 139013 - DNA, 7140 bp, Homo sapiens
  Payload ID: 7243
  Gene Symbol: GSE1
  Gene Name: Gse1 coiled-coil protein
  Uniprot ID: Q14687
  ENST ID: ENST00000393243
  CDS Start-End: 41-3475
ccagcatgtatcagccgaggtggagctgcggggccctggcatgaaagggtcctcactgagcagcgagtcgtcccccgtgtcctctccggccaccaaccacagctcccccgccagcacacccaagcgcgtgcccatgggccctatcatcgtcccccctgggggccacagcgtgcccagcaccccccccgtggtgaccatcgctccaaccaaaaccgtgaatggtgtctggaggagtgagagccggcaggatgccggctccaggagcagcagtggaggtcgggaacgcctcattgtggagcccccgctccctcaggagaaggcagggggaccagccatcccctcgcacctgctcagcaccccctaccccttcggcctctcccccagctcagttgtgcaggattcccgcttcccgccactcaacctccagcggcccgtgcaccacgtggtgccccccagtaccgtgaccgaggactacctgagaagcttccggccctaccacaccaccgacgacctccgcatgtcctcactgcctcccctcggcctggacccggccactgctgcagcctactaccaccccagctacctggccccacaccccttcccccacccggccttcaggatggacgactcctactgcctgtctgccctgaggtccccgttctaccccatccccacccccggctccctgcccccactgcacccatcagcgatgcacctgcacctctctggggtccgctaccctcccgagctctcccactcatccctggcagcgctgcactcggagcgcatgtctggcctcagcgcggagaggctgcagatggacgaggagctaaggcgggagagggagcgcgagcgcgagcgcgagcgtgagcgtgaggctgaccgcgagcgggagaaggaacgtgagcgcgaacgcgagaaggagcgcgagcaagagaaggagcgtgagcgtgagaaggagcgcgagcgcgagctggagcgccagcgggagcagcgggcccgggagaaggagctgctggccgccaaggccctggagcccagcttcctgcccgtggccgagctgcatgggctgcgtggccatgccactgaggagcggggcaagccctcggagcagctgaccccaacccgagcagagaagctgaaggatgccggcctgcaggcgcccaagcccgtccaacaccccttgcatccggtgcccaccccacaccacacggtgcccagcctcatctccaaccatggcatcttctctctgcctagcagcagtgctgccacagccctgctgatccagcgcaccaatgaggaggagaagtggctggcgcggcagcggcggctgcggcaggagaaggaggaccggcagtctcaggtgtccgagttccggcagcaggtgctggagcagcacctggatatgggccggcccccggtgccggcggaggcagagcacaggccggagagcaccaccaggccaggaccaaaccgtcacgagccaggtggccgtgaccctccgcagcactttggggggccaccacctctgatttcgcccaagccccagctccatgctgcacccacggccctctggaaccccgtgtccctgatggacaacaccttggagacgcggcgggccgaaagccactctctgcacagccacccggctgcatttgagcccagccgccaggcagccgtgccgctggtgaaggtggagcgggtcttctgcccggagaaagcagaggaggggccacggaagcgtgagcctgcccctctggacaagtaccagccacctccgccgccaccacgagagggagggagcctggagcaccagcccttcctgcccgggcccgggcccttcctggctgagctcgagaagtccacccagaccatcctgggccagcagcgggcctccctcccacaggcggccaccttcggggagctcagcggacccctgaagcctggctcgccctaccggcccccagtgccacgggcccccgaccctgcctacatctatgatgagttcctgcagcagcgccggaggctggtcagcaagctggacctggaggagcgcaggcggcgggaggcccaggagaaagggtactactacgacctcgatgactcttacgacgagagcgatgaggaggaggtcagggcccacctccgttgcgtggccgagcagccgcccctcaaactggacacgtcctctgagaagctagagtttttgcaactttttggcttgaccacccaacagcagaaggaggaattggtggcccagaagcggaggaagcggcggaggatgctgcgagagagaagcccgtcgcccccaacaattcagagcaagcggcagacgccttcaccgagactggcgctgtctacccgctacagccctgatgagatgaacaacagtcccaacttcgaagaaaagaagaagttcctgaccatcttcaacctgacccacatcagcgctgagaagaggaaagacaaagagagacttgttgaaatgctccgtgccatgaagcagaaggcactgtcagcagcagtggccgactccttgacaaactctccgagggacagtcctgccgtctccctgagtgaaccagccacgcagcaagcctctctggatgtggagaagccggttggtgttgctgcttccttgtctgacatcccaaaggccgcggagcctgggaagctggaacaggtccggccccaggagctgtcgagagtccaggagctagctcctgccagcggggagaaggccaggctgagcgaggcccctggaggcaaaaagagtctgagcatgcttcactatatccggggcgctgcacccaaggacattcctgtgccgctgtcccacagcaccaatgggaagagcaagccgtgggagccctttgtggcagaagagtttgcacatcagttccacgagtcagtgctgcagtccacccagaaggccctgcagaagcataaagggagcgtggctgtgctgtctgcagagcagaaccacaaggttgacacgtccgtccactacaacattcctgagctgcagtcctccagccgcgcccctccaccccagcacaatgggcagcaggagccccccactgcaaggaagggccccccaacccaggagttggaccgggactcggaggaggaggaagaggaggatgatgaagatggagaagatgaggaggaagtccccaagcgcaagtggcaagggatcgaggccgtttttgaagcttaccaggaacacatagaagagcaaaatctggagcggcaggtgttacagacacaatgtagacgactggaggcccggcactacagcctcagcctgacggcagagcagctctcccacagcgtggcggagttgaggagccagaaacagaagatggtctcagaaagggagcggctccaggcagaactggaccacttacgaaagtgccttgccttgcctgcaatgcactggcctaggggctacctgaagggatatcccaggtgacggtttcccttgcactaggccgaacctatagtatagaaatattatctattttattaccttgaatatttaatatttttcactgggaggtttgaagcttacaaaatgagaatgtgccatgcatgaagcaaaggattccaggctccagaaaaaatgaatgaactcaccttgacgtcaatgcaattgaatcaccgttgtcattcagcgagcaaccaatgtaggattgcccacagtttttctttttaaaggtggttttcgcccttcctctcccacattatttcttaatctgaacatgaaggctccattagcaacactaaaacttgatcattaacagccccctgtgcatatgagtggatcaaaccggttctgttctttcttgtgttgccatgttactatgcctcaagcccagtttgcttttgccgcagcgatggggccagtctcattcctccccaggagtgaaacttgcttcagctgaaaaggttgggtgcattgtcagtaaaaagggcttatttgtttcattttactttcctgcaaaattttcttcaaagcaacaagtcctaggagcacacaaagcaacccaaaggcttttccctggaaaagctctttcttacctaaagataaaaccaattcacaaactgaaggtagctttttattactccgtggggagcatgtacagagctctgtgtatacacagcttcacacccaccagattgttactacagtgggttgggttttcatacagacgtaaattttgagagaaaagtcaaaggtgcttcagccttgtactgtgtatatatattaaaaaaaaaacaaagttttgtatgtttttattactttaactattgttataaaaagcctgccatttttaatatgtggtttgggggatttttgtttgtttttcctgtttgggggttttgtttgttgttttggttttttttgggcaaaaaaaaaaaaaaaaccttgcttttagtgtttgtactgctgctggtcaggacattaaaatattgaagtgtttttaaaaattaaagaagaagaaaagtaaaagagcttaccactggcgcctatgcgatcacttcatttttagtttgagttgcaccagaagctgccgtagaaagccatgcgctactgcttacctcctccactccccctgcctgcccccagcatctggacaagctaatagcaaatattacccattgctatcaagggaggagggggtagtctgtagaacccatgtgtgacagtcatgtgcacacatgggcgggggcttttaaaaacctttcaggaagtcaatgatttctgtgattgatataattctaaggtgtctgagagcaggtacagaataggaacttcagaggctttgtttaaacgcaaagctttgtaaaagccacaaggtctgagctgaacccctcctttttgaacttactgtgacaagcacaggaacggtcagaaactgggctcatcacaccaaggcaaagcaacgggcgagtcttcctccttgtcctagttactgcctatggaggcagtgtttagatcaagaaggcctctcttgctcccaagggccctcaccagaggccagggctgccagtcactggtctggggggtggaggcctgagctgagggcagggtgcctgacctgtgtgccggctgctcactgctgtgaccagcagccgagcccttggccctagcccttgctgcgcagaacagcttgctggcagctggcatcgtgtcgctttatctgcccccgcacagtttgctttgtacgtctgccaagaatcttccagttattagcaaactcagacgaatgtaccgccagtattatcagcagtcaacaagcaccttcctctccacagaagcagctggaagagaactcgaggggctgtgctgcaggcctcccctcgaaagacactgggaggtcagcatgttccacaggtgttcagagggagtctgctacaaactatcagggcaaaatctcactggatttctccactgaaaacctacttgaggtttctggtctgaaggcttaagagtcacatcttagcacttccgctctcaggcctcctcctccatcacagatgtctggatgcttttggaaatggccttggctaaagtaaaagggaaaagtagatccgataacttaaaaacgtagctcatcccttaccatccaaggggcactcccttggttggattttctatgacagcacaggggacaggtggcacaccatgagaggtctgcccagggtgggagcagtgtcactgtgctagcaatagttggcttctcccctgtcagtggaaaccccacttctgcccggcccttgagcttcttgcccactgtctccccatccttccacctacttgtggcgatctgagtactctactcttgctcaagaagtaatacgacaatcagaatacaaaccagtaaggcaacacgaataaactaagaaaaaggtaagaactgtctcaaaaacgaaagcacaccacccaagacacagtacccagtcatggtttccccatccaactattagtttcatactttgaaaacttactttcagattattctcaaagaacacagtagcacctaaatctgttttcaattgggcttaaaaattgacatgcaatctcttaagttttttgttcagctacttcacactgagtacctcaaatctgctctggagtcgattatgccacctgtgtgtcaggatgcacctgaaagccctcggctcggtccttagaccatcttcctacattacctggaagggagctgccatctgtccctctgcagagggataccttccaatagtaaattatctggttcctcactgaaacaagttatttttgcttcatatagtcagagtcagactgacatgataaaatatcatgttcctaatctgttgtctcagataagtgaccaagacgggactttccacattttagtctacattctaatcttaaaggaataaagcactgaattgggactaacattctgataggttgcacccttaagagtattcagagagcatcaaaaggagcccacaccttcagcagtgaaggattctaacacagggaatctgcagtttgtagcagaatggtattttcctcaagtagctcataatactgccaaatctcaaaagttaagctgaatttcacaccagatcctacccctttccctgagccacatgtttcacacaagtgtagaaaatgccagggatccaccacaagatggagatggtcagcacaaaccgattctgttcctctttaaagtgtatattagccacttagcaatctctatattctttcaagtaaccaagctgttgactttcttactacttgcagtagcctgtccccaacttttccatccagtgcttaacctaaaaaactccttaactctgccttgacctgaggaagaccatgctaactggtgttattttgtatgtaccctgtgcttaattctataacagtaaaccccatacgcaggtgggagggaggaacaccggtgcctcggtcactctgggggcagtttagatgctgtgaaattaaacctgttctaagtgtacttgtttgaattaattgtattgtaatattatttgttgaatgtagtaattaggtatttatgaatatattgctgtaatttctgacaacatccaaaaaataaaatcttcctaaattatgtt

SEQ ID NO: 139014 - DNA, 4366 bp, Homo sapiens
  Payload ID: 7243
  Gene Symbol: GSE1
  Gene Name: Gse1 coiled-coil protein
  Uniprot ID: Q14687
  ENST ID: ENST00000405402
  CDS Start-End: 210-3551
accgtgtggtgcgtaaattatagcgtccggccaaggccgcaaggggggcgccgccggtgagctggcgggtcgtgcggggaagcagcacccccgcgccgtgccagggccggccagcgtccgcagggtcctcactgagcagcgagtcgtcccccgtgtcctctccggccaccaaccacagctcccccgccagcacacccaagcgcgtgcccatgggccctatcatcgtcccccctgggggccacagcgtgcccagcaccccccccgtggtgaccatcgctccaaccaaaaccgtgaatggtgtctggaggagtgagagccggcaggatgccggctccaggagcagcagtggaggtcgggaacgcctcattgtggagcccccgctccctcaggagaaggcagggggaccagccatcccctcgcacctgctcagcaccccctaccccttcggcctctcccccagctcagttgtgcaggattcccgcttcccgccactcaacctccagcggcccgtgcaccacgtggtgccccccagtaccgtgaccgaggactacctgagaagcttccggccctaccacaccaccgacgacctccgcatgtcctcactgcctcccctcggcctggacccggccactgctgcagcctactaccaccccagctacctggccccacaccccttcccccacccggccttcaggatggacgactcctactgcctgtctgccctgaggtccccgttctaccccatccccacccccggctccctgcccccactgcacccatcagcgatgcacctgcacctctctggggtccgctaccctcccgagctctcccactcatccctggcagcgctgcactcggagcgcatgtctggcctcagcgcggagaggctgcagatggacgaggagctaaggcgggagagggagcgcgagcgcgagcgcgagcgtgagcgtgaggctgaccgcgagcgggagaaggaacgtgagcgcgaacgcgagaaggagcgcgagcaagagaaggagcgtgagcgtgagaaggagcgcgagcgcgagctggagcgccagcgggagcagcgggcccgggagaaggagctgctggccgccaaggccctggagcccagcttcctgcccgtggccgagctgcatgggctgcgtggccatgccactgaggagcggggcaagccctcggagcagctgaccccaacccgagcagagaagctgaaggatgccggcctgcaggcgcccaagcccgtccaacaccccttgcatccggtgcccaccccacaccacacggtgcccagcctcatctccaaccatggcatcttctctctgcctagcagcagtgctgccacagccctgctgatccagcgcaccaatgaggaggagaagtggctggcgcggcagcggcggctgcggcaggagaaggaggaccggcagtctcaggtgtccgagttccggcagcaggtgctggagcagcacctggatatgggccggcccccggtgccggcggaggcagagcacaggccggagagcaccaccaggccaggaccaaaccgtcacgagccaggtggccgtgaccctccgcagcactttggggggccaccacctctgatttcgcccaagccccagctccatgctgcacccacggccctctggaaccccgtgtccctgatggacaacaccttggagacgcggcgggccgaaagccactctctgcacagccacccggctgcatttgagcccagccgccaggcagccgtgccgctggtgaaggtggagcgggtcttctgcccggagaaagcagaggaggggccacggaagcgtgagcctgcccctctggacaagtaccagccacctccgccgccaccacgagagggagggagcctggagcaccagcccttcctgcccgggcccgggcccttcctggctgagctcgagaagtccacccagaccatcctgggccagcagcgggcctccctcccacaggcggccaccttcggggagctcagcggacccctgaagcctggctcgccctaccggcccccagtgccacgggcccccgaccctgcctacatctatgatgagttcctgcagcagcgccggaggctggtcagcaagctggacctggaggagcgcaggcggcgggaggcccaggagaaagggtactactacgacctcgatgactcttacgacgagagcgatgaggaggaggtcagggcccacctccgttgcgtggccgagcagccgcccctcaaactggacacgtcctctgagaagctagagtttttgcaactttttggcttgaccacccaacagcagaaggaggaattggtggcccagaagcggaggaagcggcggaggatgctgcgagagagaagcccgtcgcccccaacaattcagagcaagcggcagacgccttcaccgagactggcgctgtctacccgctacagccctgatgagatgaacaacagtcccaacttcgaagaaaagaagaagttcctgaccatcttcaacctgacccacatcagcgctgagaagaggaaagacaaagagagacttgttgaaatgctccgtgccatgaagcagaaggcactgtcagcagcagtggccgactccttgacaaactctccgagggacagtcctgccgtctccctgagtgaaccagccacgcagcaagcctctctggatgtggagaagccggttggtgttgctgcttccttgtctgacatcccaaaggccgcggagcctgggaagctggaacaggtccggccccaggagctgtcgagagtccaggagctagctcctgccagcggggagaaggccaggctgagcgaggcccctggaggcaaaaagagtctgagcatgcttcactatatccggggcgctgcacccaaggacattcctgtgccgctgtcccacagcaccaatgggaagagcaagccgtgggagccctttgtggcagaagagtttgcacatcagttccacgagtcagtgctgcagtccacccagaaggccctgcagaagcataaagggagcgtggctgtgctgtctgcagagcagaaccacaaggttgacacgtccgtccactacaacattcctgagctgcagtcctccagccgcgcccctccaccccagcacaatgggcagcaggagccccccactgcaaggaagggccccccaacccaggagttggaccgggactcggaggaggaggaagaggaggatgatgaagatggagaagatgaggaggaagtccccaagcgcaagtggcaagggatcgaggccgtttttgaagcttaccaggaacacatagaagagcaaaatctggagcggcaggtgttacagacacaatgtagacgactggaggcccggcactacagcctcagcctgacggcagagcagctctcccacagcgtggcggagttgaggagccagaaacagaagatggtctcagaaagggagcggctccaggcagaactggaccacttacgaaagtgccttgccttgcctgcaatgcactggcctaggggctacctgaagggatatcccaggtgacggtttcccttgcactaggccgaacctatagtatagaaatattatctattttattaccttgaatatttaatatttttcactgggaggtttgaagcttacaaaatgagaatgtgccatgcatgaagcaaaggattccaggctccagaaaaaatgaatgaactcaccttgacgtcaatgcaattgaatcaccgttgtcattcagcgagcaaccaatgtaggattgcccacagtttttctttttaaaggtggttttcgcccttcctctcccacattatttcttaatctgaacatgaaggctccattagcaacactaaaacttgatcattaacagccccctgtgcatatgagtggatcaaaccggttctgttctttcttgtgttgccatgttactatgcctcaagcccagtttgcttttgccgcagcgatggggccagtctcattcctccccaggagtgaaacttgcttcagctgaaaaggttgggtgcattgtcagtaaaaagggcttatttgtttcattttactttcctgcaaaattttcttcaaagcaacaagtcctaggagcacacaaagcaacccaaaggcttttccctggaaaagctctttcttacctaaagataaaaccaattcacaaactgaaggtagctttttattactccgtggggagcatgtacagagctctgtgtatacacagcttcacacccaccagattgttactacagtgggttgggttttcatacagacgtaaattttgagagaaaagtcaaaggtgcttcagccttgtactgtgtatatatattaaaaaaaaaacaaagttt

SEQ ID NO: 139015 - DNA, 6625 bp, Homo sapiens
  Payload ID: 7243
  Gene Symbol: GSE1
  Gene Name: Gse1 coiled-coil protein
  ENST ID: ENST00000412692
  CDS Start-End: 1-2960
cccgcttcccgccactcaacctccagcggcccgtgcaccacgtggtgccccccagtaccgtgaccgaggactacctgagaagcttccggccctaccacaccaccgacgacctccgcatgtcctcactgcctcccctcggcctggacccggccactgctgcagcctactaccaccccagctacctggccccacaccccttcccccacccggccttcaggatggacgactcctactgcctgtctgccctgaggtccccgttctaccccatccccacccccggctccctgcccccactgcacccatcagcgatgcacctgcacctctctggggtccgctaccctcccgagctctcccactcatccctggcagcgctgcactcggagcgcatgtctggcctcagcgcggagaggctgcagatggacgaggagctaaggcgggagagggagcgcgagcgcgagcgcgagcgtgagcgtgaggctgaccgcgagcgggagaaggaacgtgagcgcgaacgcgagaaggagcgcgagcaagagaaggagcgtgagcgtgagaaggagcgcgagcgcgagctggagcgccagcgggagcagcgggcccgggagaaggagctgctggccgccaaggccctggagcccagcttcctgcccgtggccgagctgcatgggctgcgtggccatgccactgaggagcggggcaagccctcggagcagctgaccccaacccgagcagagaagctgaaggatgccggcctgcaggcgcccaagcccgtccaacaccccttgcatccggtgcccaccccacaccacacggtgcccagcctcatctccaaccatggcatcttctctctgcctagcagcagtgctgccacagccctgctgatccagcgcaccaatgaggaggagaagtggctggcgcggcagcggcggctgcggcaggagaaggaggaccggcagtctcaggtgtccgagttccggcagcaggtgctggagcagcacctggatatgggccggcccccggtgccggcggaggcagagcacaggccggagagcaccaccaggccaggaccaaaccgtcacgagccaggtggccgtgaccctccgcagcactttggggggccaccacctctgatttcgcccaagccccagctccatgctgcacccacggccctctggaaccccgtgtccctgatggacaacaccttggagacgcggcgggccgaaagccactctctgcacagccacccggctgcatttgagcccagccgccaggcagccgtgccgctggtgaaggtggagcgggtcttctgcccggagaaagcagaggaggggccacggaagcgtgagcctgcccctctggacaagtaccagccacctccgccgccaccacgagagggagggagcctggagcaccagcccttcctgcccgggcccgggcccttcctggctgagctcgagaagtccacccagaccatcctgggccagcagcgggcctccctcccacaggcggccaccttcggggagctcagcggacccctgaagcctggctcgccctaccggcccccagtgccacgggcccccgaccctgcctacatctatgatgagttcctgcagcagcgccggaggctggtcagcaagctggacctggaggagcgcaggcggcgggaggcccaggagaaagggtactactacgacctcgatgactcttacgacgagagcgatgaggaggaggtcagggcccacctccgttgcgtggccgagcagccgcccctcaaactggacacgtcctctgagaagctagagtttttgcaactttttggcttgaccacccaacagcagaaggaggaattggtggcccagaagcggaggaagcggcggaggatgctgcgagagagaagcccgtcgcccccaacaattcagagcaagcggcagacgccttcaccgagactggcgctgtctacccgctacagccctgatgagatgaacaacagtcccaacttcgaagaaaagaagaagttcctgaccatcttcaacctgacccacatcagcgctgagaagaggaaagaaccagccacgcagcaagcctctctggatgtggagaagccggttggtgttgctgcttccttgtctgacatcccaaaggccgcggagcctgggaagctggaacaggtccggccccaggagctgtcgagagtccaggagctagctcctgccagcggggagaaggccaggctgagcgaggcccctggaggcaaaaagagtctgagcatgcttcactatatccggggcgctgcacccaaggacattcctgtgccgctgtcccacagcaccaatgggaagagcaagccgtgggagccctttgtggcagaagagtttgcacatcagttccacgagtcagtgctgcagtccacccagaaggccctgcagaagcataaagggagcgtggctgtgctgtctgcagagcagaaccacaaggttgacacgtccgtccactacaacattcctgagctgcagtcctccagccgcgcccctccaccccagcacaatgggcagcaggagccccccactgcaaggaagggccccccaacccaggagttggaccgggactcggaggaggaggaagaggaggatgatgaagatggagaagatgaggaggaagtccccaagcgcaagtggcaagggatcgaggccgtttttgaagcttaccaggaacacatagaagagcaaaatctggagcggcaggtgttacagacacaatgtagacgactggaggcccggcactacagcctcagcctgacggcagagcagctctcccacagcgtggcggagttgaggagccagaaacagaagatggtctcagaaagggagcggctccaggcagaactggaccacttacgaaagtgccttgccttgcctgcaatgcactggcctaggggctacctgaagggatatcccaggtgacggtttcccttgcactaggccgaacctatagtatagaaatattatctattttattaccttgaatatttaatatttttcactgggaggtttgaagcttacaaaatgagaatgtgccatgcatgaagcaaaggattccaggctccagaaaaaatgaatgaactcaccttgacgtcaatgcaattgaatcaccgttgtcattcagcgagcaaccaatgtaggattgcccacagtttttctttttaaaggtggttttcgcccttcctctcccacattatttcttaatctgaacatgaaggctccattagcaacactaaaacttgatcattaacagccccctgtgcatatgagtggatcaaaccggttctgttctttcttgtgttgccatgttactatgcctcaagcccagtttgcttttgccgcagcgatggggccagtctcattcctccccaggagtgaaacttgcttcagctgaaaaggttgggtgcattgtcagtaaaaagggcttatttgtttcattttactttcctgcaaaattttcttcaaagcaacaagtcctaggagcacacaaagcaacccaaaggcttttccctggaaaagctctttcttacctaaagataaaaccaattcacaaactgaaggtagctttttattactccgtggggagcatgtacagagctctgtgtatacacagcttcacacccaccagattgttactacagtgggttgggttttcatacagacgtaaattttgagagaaaagtcaaaggtgcttcagccttgtactgtgtatatatattaaaaaaaaaacaaagttttgtatgtttttattactttaactattgttataaaaagcctgccatttttaatatgtggtttgggggatttttgtttgtttttcctgtttgggggttttgtttgttgttttggttttttttgggcaaaaaaaaaaaaaaaaccttgcttttagtgtttgtactgctgctggtcaggacattaaaatattgaagtgtttttaaaaattaaagaagaagaaaagtaaaagagcttaccactggcgcctatgcgatcacttcatttttagtttgagttgcaccagaagctgccgtagaaagccatgcgctactgcttacctcctccactccccctgcctgcccccagcatctggacaagctaatagcaaatattacccattgctatcaagggaggagggggtagtctgtagaacccatgtgtgacagtcatgtgcacacatgggcgggggcttttaaaaacctttcaggaagtcaatgatttctgtgattgatataattctaaggtgtctgagagcaggtacagaataggaacttcagaggctttgtttaaacgcaaagctttgtaaaagccacaaggtctgagctgaacccctcctttttgaacttactgtgacaagcacaggaacggtcagaaactgggctcatcacaccaaggcaaagcaacgggcgagtcttcctccttgtcctagttactgcctatggaggcagtgtttagatcaagaaggcctctcttgctcccaagggccctcaccagaggccagggctgccagtcactggtctggggggtggaggcctgagctgagggcagggtgcctgacctgtgtgccggctgctcactgctgtgaccagcagccgagcccttggccctagcccttgctgcgcagaacagcttgctggcagctggcatcgtgtcgctttatctgcccccgcacagtttgctttgtacgtctgccaagaatcttccagttattagcaaactcagacgaatgtaccgccagtattatcagcagtcaacaagcaccttcctctccacagaagcagctggaagagaactcgaggggctgtgctgcaggcctcccctcgaaagacactgggaggtcagcatgttccacaggtgttcagagggagtctgctacaaactatcagggcaaaatctcactggatttctccactgaaaacctacttgaggtttctggtctgaaggcttaagagtcacatcttagcacttccgctctcaggcctcctcctccatcacagatgtctggatgcttttggaaatggccttggctaaagtaaaagggaaaagtagatccgataacttaaaaacgtagctcatcccttaccatccaaggggcactcccttggttggattttctatgacagcacaggggacaggtggcacaccatgagaggtctgcccagggtgggagcagtgtcactgtgctagcaatagttggcttctcccctgtcagtggaaaccccacttctgcccggcccttgagcttcttgcccactgtctccccatccttccacctacttgtggcgatctgagtactctactcttgctcaagaagtaatacgacaatcagaatacaaaccagtaaggcaacacgaataaactaagaaaaaggtaagaactgtctcaaaaacgaaagcacaccacccaagacacagtacccagtcatggtttccccatccaactattagtttcatactttgaaaacttactttcagattattctcaaagaacacagtagcacctaaatctgttttcaattgggcttaaaaattgacatgcaatctcttaagttttttgttcagctacttcacactgagtacctcaaatctgctctggagtcgattatgccacctgtgtgtcaggatgcacctgaaagccctcggctcggtccttagaccatcttcctacattacctggaagggagctgccatctgtccctctgcagagggataccttccaatagtaaattatctggttcctcactgaaacaagttatttttgcttcatatagtcagagtcagactgacatgataaaatatcatgttcctaatctgttgtctcagataagtgaccaagacgggactttccacattttagtctacattctaatcttaaaggaataaagcactgaattgggactaacattctgataggttgcacccttaagagtattcagagagcatcaaaaggagcccacaccttcagcagtgaaggattctaacacagggaatctgcagtttgtagcagaatggtattttcctcaagtagctcataatactgccaaatctcaaaagttaagctgaatttcacaccagatcctacccctttccctgagccacatgtttcacacaagtgtagaaaatgccagggatccaccacaagatggagatggtcagcacaaaccgattctgttcctctttaaagtgtatattagccacttagcaatctctatattctttcaagtaaccaagctgttgactttcttactacttgcagtagcctgtccccaacttttccatccagtgcttaacctaaaaaactccttaactctgccttgacctgaggaagaccatgctaactggtgttattttgtatgtaccctgtgcttaattctataacagtaaaccccatacgcaggtgggagggaggaacaccggtgcctcggtcactctgggggcagtttagatgctgtgaaattaaacctgttctaagtgtacttgtttgaattaattgtattgtaatattatttgttgaatgtagtaattaggtatttatgaatatattgctgtaatttctgacaacatccaaaaaataaaatcttcctaaattatgtt

SEQ ID NO: 139016 - DNA, 872 bp, Homo sapiens
  Payload ID: 7243
  Gene Symbol: GSE1
  Gene Name: Gse1 coiled-coil protein
  ENST ID: ENST00000411612
  CDS Start-End: 241-872
gtcagggagccgggagcgagccagtggcccgggagtgggcggcgttgcgtttgggtgtgtcctcggcggcgacagcagcaggtgtttcttggccggggccccggaagctccacctccccagcgggcccgagctgccgccgccgagcagccccggggtcctcactgagcagcgagtcgtcccccgtgtcctctccggccaccaaccacagctcccccgccagcacacccaagcgcgtgcccatgggccctatcatcgtcccccctgggggccacagcgtgcccagcaccccccccgtggtgaccatcgctccaaccaaaaccgtgaatggtgtctggaggagtgagagccggcaggatgccggctccaggagcagcagtggaggtcgggaacgcctcattgtggagcccccgctccctcaggagaaggcagggggaccagccatcccctcgcacctgctcagcaccccctaccccttcggcctctcccccagctcagttgtgcaggattcccgcttcccgccactcaacctccagcggcccgtgcaccacgtggtgccccccagtaccgtgaccgaggactacctgagaagcttccggccctaccacaccaccgacgacctccgcatgtcctcactgcctcccctcggcctggacccggccactgctgcagcctactaccaccccagctacctggccccacaccccttcccccacccggccttcaggatggacgactcctactgcctgtctgccctgaggtccccgttctaccccatccccacccccggctccctgcccccactgcacccatcagcgatgcacctgcacctctctggggtccgctaccctcccgagctctcccactcatccct

SEQ ID NO: 139017 - DNA, 1741 bp, Homo sapiens
  Payload ID: 7243
  Gene Symbol: GSE1
  Gene Name: Gse1 coiled-coil protein
  ENST ID: ENST00000438180
  CDS Start-End: 1-1259
ttggcttgaccacccaacagcagaaggaggaattggtggcccagaagcggaggaagcggcggaggatgctgcgagagagaagcccgtcgcccccaacaattcagagcaagcggcagacgccttcaccgagactggcgctgtctacccgctacagccctgatgagatgaacaacagtcccaacttcgaagaaaagaagaagttcctgaccatcttcaacctgacccacatcagcgctgagaagaggaaagacaaagagagacttgttgaaatgctccgtgccatgaagcagaaggcactgtcagcagcagtggccgactccttgacaaactctccgagggacagtcctgccgtctccctgagtgaaccagccacgcagcaagcctctctggatgtggagaagccggttggtgttgctgcttccttgtctgacatcccaaaggccgcggagcctgggaagctggaacaggtccggccccaggagctgtcgagagtccaggagctagctcctgccagcggggagaaggccaggctgagcgaggcccctggaggcaaaaagagtctgagcatgcttcactatatccggggcgctgcacccaaggacattcctgtgccgctgtcccacagcaccaatgggaagagcaagccgtgggagccctttgtggcagaagagtttgcacatcagttccacgagtcagtgctgcagtccacccagaaggccctgcagaagcataaagggagcgtggctgtgctgtctgcagagcagaaccacaaggttgacacgtccgtccactacaacattcctgagctgcagtcctccagccgcgcccctccaccccagcacaatgggcagcaggagccccccactgcaaggaagggccccccaacccaggagttggaccgggactcggaggaggaggaagaggaggatgatgaagatggagaagatgaggaggaagtccccaagcgcaagtggcaagggatcgaggccgtttttgaagcttaccaggaacacatagaagagcaaaatctggagcggcaggtgttacagacacaatgtagacgactggaggcccggcactacagcctcagcctgacggcagagcagctctcccacagcgtggcgatggggtttccccatgttggccaggctggtctcgaactcctgacgacaggtgatctgcccgcctcgacctccaaaagtgctgggattacaggcgtgagccaccacgcccggccgggacattttcaaatgagttgaggagccagaaacagaagatggtctcagaaagggagcggctccaggcagaactggaccacttacgaaagtgccttgccttgcctgcaatgcactggcctaggggctacctgaagggatatcccaggtgacggtttcccttgcactaggccgaacctatagtatagaaatattatctattttattaccttgaatatttaatatttttcactgggaggtttgaagcttacaaaatgagaatgtgccatgcatgaagcaaaggattccaggctccagaaaaaatgaatgaactcaccttgacgtcaatgcaattgaatcaccgttgtcattcagcgagcaaccaatgtaggattgcccacagtttttctttttaaaggtggttttcgcccttcctctcccacattatttcttaatctgaacatgaaggctccattagcaacactaaaacttgatcattaacagccccctgtgcatatgagtggatc

SEQ ID NO: 139018 - DNA, 1173 bp, Homo sapiens
  Payload ID: 7244
  Gene Symbol: GSG1L
  Gene Name: GSG1-like
  Uniprot ID: Q6UXU4
  ENST ID: ENST00000380897
  CDS Start-End: 167-697
ggcagctgagtcagtgagcagcgccatgatgaggggcagtccctgccagcaccaacaggggctggaaacccagcgataggagcatcagcatctccgaggggtcctgtggctgtctgtggtctccgaggtgctgtacattctgctgctggtggttggcttcagcctcatgtgtctcgagctcttccactccagcaatgtcatcgacgggctcaagctcaatgccttcgcggctgtcttcacggtgctctcaggcctcctgggaatggtcgcccacatgatgtacacgcaggtgttccaggtcaccgtgagcctcggtcctgaggactggagaccccattcctgggactacgggtggtccttctgcctggcgtggggctcctttacctgctgcatggcagcctctgtcaccacgctcaactcctacaccaagacggtcattgagttccggcacaagcgcaaggtctttgagcagggctaccgggaagagccgaccttcatagaccctgaggccatcaagtacttccgggagaggatggagaagagggacgggagcgaggaggactttcacttagactgccgccacgagagataccctgcccgacaccagccacacatggcggattcctggccccggagctccgcacaggaagcaccagagctgaaccgacagtgctgggtcttggggcactgggtgtgaccaagacctcaacctggcccgcggacctcaggccatcgctggcaccagcccctgctgcaagaccaccagagtggtgcccccagaaccctggcctgtgtgccgtgaactcagtcagcctgcgtgggagatgccaggcctgtcctgcccatcgctgcctgggtcccatggccttggaaatggggccagggcaggcccaagggaatgcacagggctgcacagagtgactttgggacagcagccccggactcttgccatcatcacatgagccctgctgggcacagctgcgatgccaggagacacatggccactggccactgaatggctggcacccacaagccagtcaggtgcccagaggggcagagccctttggggggcagagagtggcttcctgaaggagggggcagtggcgcaggcactgcaggggtgtcacacagcaggcacacagcaggggctcaataaatgcttgttgaacttgt

SEQ ID NO: 139019 - DNA, 1399 bp, Homo sapiens
  Payload ID: 7244
  Gene Symbol: GSG1L
  Gene Name: GSG1-like
  Uniprot ID: Q6UXU4
  ENST ID: ENST00000395724
  CDS Start-End: 78-920
tgacgcggggcgccagctgccaacttcgcgcgcggagctccccggcggtgcagtcccgtcccggcggcgcgggcggcatgaagactagccgccgcggccgagcgctcctggccgtggccctgaacctgctggcgctgctgttcgccaccaccgctttcctcaccacgcactggtgccagggcacgcagcgggtccccaagccgggctgcggccagggcgggcgcgccaactgccccaactcgggcgccaacgccacggccaacggcaccgccgcccccgccgccgccgccgccgccgccaccgcctcggggaacggcccccctggcggcgcgctctacagctgggagaccggcgacgaccgcttcctcttcaggaatttccacaccggcatctggtactcgtgcgaggaggagctcagcgggcttggtgaaaaatgtcgcagcttcattgacctggccccggcatcggagaaaggcctcctgggaatggtcgcccacatgatgtacacgcaggtgttccaggtcaccgtgagcctcggtcctgaggactggagaccccattcctgggactacgggtggtccttctgcctggcgtggggctcctttacctgctgcatggcagcctctgtcaccacgctcaactcctacaccaagacggtcattgagttccggcacaagcgcaaggtctttgagcagggctaccgggaagagccgaccttcatagaccctgaggccatcaagtacttccgggagaggatggagaagagggacgggagcgaggaggactttcacttagactgccgccacgagagataccctgcccgacaccagccacacatggcggattcctggccccggagctccgcacaggaagcaccagagctgaaccgacagtgctgggtcttggggcactgggtgtgaccaagacctcaacctggcccgcggacctcaggccatcgctggcaccagcccctgctgcaagaccaccagagtggtgcccccagaaccctggcctgtgtgccgtgaactcagtcagcctgcgtgggagatgccaggcctgtcctgcccatcgctgcctgggtcccatggccttggaaatggggccagggcaggcccaagggaatgcacagggctgcacagagtgactttgggacagcagccccggactcttgccatcatcacatgagccctgctgggcacagctgcgatgccaggagacacatggccactggccactgaatggctggcacccacaagccagtcaggtgcccagaggggcagagccctttggggggcagagagtggcttcctgaaggagggggcagtggcgcaggcactgcaggggtgtcacacagcaggcacacagcaggggctcaataaatgcttgttgaacttgtttt

SEQ ID NO: 139020 - DNA, 4916 bp, Homo sapiens
  Payload ID: 7244
  Gene Symbol: GSG1L
  Gene Name: GSG1-like
  Uniprot ID: Q6UXU4
  ENST ID: ENST00000447459
  CDS Start-End: 86-1081
gcggccgctgacgcggggcgccagctgccaacttcgcgcgcggagctccccggcggtgcagtcccgtcccggcggcgcgggcggcatgaagactagccgccgcggccgagcgctcctggccgtggccctgaacctgctggcgctgctgttcgccaccaccgctttcctcaccacgcactggtgccagggcacgcagcgggtccccaagccgggctgcggccagggcgggcgcgccaactgccccaactcgggcgccaacgccacggccaacggcaccgccgcccccgccgccgccgccgccgccgccaccgcctcggggaacggcccccctggcggcgcgctctacagctgggagaccggcgacgaccgcttcctcttcaggaatttccacaccggcatctggtactcgtgcgaggaggagctcagcgggcttggtgaaaaatgtcgcagcttcattgacctggccccggcatcggagaaaggggtcctgtggctgtctgtggtctccgaggtgctgtacattctgctgctggtggttggcttcagcctcatgtgtctcgagctcttccactccagcaatgtcatcgacgggctcaagctcaatgccttcgcggctgtcttcacggtgctctcaggcctcctgggaatggtcgcccacatgatgtacacgcaggtgttccaggtcaccgtgagcctcggtcctgaggactggagaccccattcctgggactacgggtggtccttctgcctggcgtggggctcctttacctgctgcatggcagcctctgtcaccacgctcaactcctacaccaagacggtcattgagttccggcacaagcgcaaggtctttgagcagggctaccgggaagagccgaccttcatagaccctgaggccatcaagtacttccgggagaggatggagaagagggacgggagcgaggaggactttcacttagactgccgccacgagagataccctgcccgacaccagccacacatggcggattcctggccccggagctccgcacaggaagcaccagagctgaaccgacagtgctgggtcttggggcactgggtgtgaccaagacctcaacctggcccgcggacctcaggccatcgctggcaccagcccctgctgcaagaccaccagagtggtgcccccagaaccctggcctgtgtgccgtgaactcagtcagcctgcgtgggagatgccaggcctgtcctgcccatcgctgcctgggtcccatggccttggaaatggggccagggcaggcccaagggaatgcacagggctgcacagagtgactttgggacagcagccccggactcttgccatcatcacatgagccctgctgggcacagctgcgatgccaggagacacatggccactggccactgaatggctggcacccacaagccagtcaggtgcccagaggggcagagccctttggggggcagagagtggcttcctgaaggagggggcagtggcgcaggcactgcaggggtgtcacacagcaggcacacagcaggggctcaataaatgcttgttgaacttgttttcttgcggtgtatggaggccagttgctctgtgggctgtggctgccctgtcattgccccaccccattactcctcaaggaggctgaaggtgacagcagagactgtgcagaggccagggccagacactgcagggtggcagggagggagcacagagcccaggctggacacaggctggcagggctgccttgtattccagagagtgggcaaggcaggggccaggcaagcaagagatgtggggcgagcaagaagtgggcccccaaacccaagccctaagcagggagggtgaagaagccacatttctcttcagagctcagcaacatcacaccaccctgaccctgaggaggctttaccctgtgcctagcaccacctttacagaaaatcccagggcttagatgcctggagaaacagattcttattataaagaggaggaaaattagggtcacagagatgaatgaagtaacttgcctgtgattacagagctagcaaatggcagagatggggtttgaatcaggactcctgactccaagttcagtcatttcccaagaggccttattccttcccagaagaatttctagagcttttccccacgtagaatatattcttctcctttatccttccatccttccatccatcatccatcactcatccagccattatccattatccatccatccattcatcattcgtccatctattatccacccattcatcatctattatccatccatcattcatcatccatccatcattcataattcatctttccactcatccatccatcattcattcattcatccatccttccatccatccatcatctatccattcatccatccatttgccatccatccactcattcatcagctatccatcatctatccatccatccatccatccagcatctatcactcatccagctattgtccattgtccattcatccatttttcattcatccctccatcatcattaatccattatccacccactcatcatctattatccatctatagtccatcaaccatccatccttcatcatccatccatccatccttcatccatccatccacccatccatccatccatcatctgtccatccattatctatccattcatccatccattcatcatccacccacctattcatcagctatctatccatcatccatccatccatcatccatccatccatccatccatccatcatctatccattcattgtctatgctttcatccatccattcatcatccatccacccattcgttagctatttatccattatccattcctccatctatccatcatccattcatcccttatccattcaaccattatgcatttcttcatttatccattatttatccttccatccatcatccatcatctttccatccactatctatccattcatccatctatccatcatccatccatcctttatccatcattcatcagccatcatccctccatctatccattatccatcatccactcatccattcatccctccatctgcccattatccatcaaccatccatccatccattatccgtcatccacacatccattcatccctccatctgcccattatccatcaaccatccatccatccattatccatttctgcattatccatttattctttatccatttcttcatctattcatcatctatccatccattatccttacacctatctatcatccatccattccttcatctatccatcatccatcaattatccatccattcatccatccatctatccatcttctattgattgcttgtcatccttccttgtatcagacttccatccatcctccttccatgtgtcacacatcctcattactcaaccatccagctgtgcatccatctattcactgatatagttcactgtgcccctactatgtgccaagcactgtggtaggcacttgaggtgggatgctggagcatccagagagggcatctattgtcgtgagcctgggttcagattccaccttctccacttgtgaccttgggcgagttacttgacctttctgtgcctgtttcctcatccattaaatccggataatcattatacctacctcttcaagctgttgtgcaaattaaatgagctaacatatttgaagtgtctagaacagagcctggcacaagtaaacactttgtgggtgtttactaacaggacaacaaggggaaatcggggctgtgggagctgtagtctagggaggctcctttgagaaaatgatgtctaagccaagacatgaagattgtctgggcatcagccaggcaagagtatagcagggaaagaaagtacattagaggactttaaaatagtcccaatggcaggtgtggagagcagggaggtcaggaggcagttgtgggaaattaggcatcagagggcagtggagccaggccaggaggaactggaaaccttcttagggagcttagagtttaccctggggcaatggggagtgggcagtgagatgcttttagcagactgggatgcgcctgggtgtacatttgaggaagatcaccgcaactatgggcacagaatagttgtgggagatgcttctcccttcctcatccctcttacactcaagaaagagaagaaagtgggctggcttaggaaagttgccctggggaggggaccatgcgggcagattcaggaaccaattaggagggaatagactgagtgggagaagaggaaagttggtgacgactctcaggttacagggtcagcttgggggatagggaagacggagacttcgtggttcagatgtcttgagtctcaggggctcaggggacagccagctggaggtttgtgctcattcattcacgcattgattcatcaagcgaacaatttgttaattcactttccattcattcagtaaatattaatgacctactaggtggggcttaaggcggggctggaaatgggcctgggagagcaattatggtccagctctactgaggccttgaatgtcagaacaaggaatttgggctttggcctcatgcaagagagggcggctgccatatatgggcctgggcagggacagatctgacagggatctagccctggccaccaggcatctaggagctcttgttctcacccagggtccttctgaagttggcgagtggaccgcaggaggtccaggagatgattgtagttgacacatggggaaaattttaatctattttaatagttgtgtttatgtaaatgtgtattagaaaaaaatgtacagtgggcacatcagtgctatgacttcacagacgttactgcttaggatgaaaccaaaataggcatttaagtaaaagaaaaaaagagttggcttaaagaaaaatattaaataaataatcgtg

SEQ ID NO: 139021 - DNA, 585 bp, Homo sapiens
  Payload ID: 7244
  Gene Symbol: GSG1L
  Gene Name: GSG1-like
  Uniprot ID: Q6UXU4
  ENST ID: ENST00000569166
  CDS Start-End: 1-585
atgtgtctcgagctcttccactccagcaatgtcatcgacgggctcaagctcaatgccttcgcggctgtcttcacggtgctctcaggcctcctgggaatggtcgcccacatgatgtacacgcaggtgttccaggtcaccgtgagcctcggtcctgaggactggagaccccattcctgggactacgggtggtccttctgcctggcgtggggctcctttacctgctgcatggcagcctctgtcaccacgctcaactcctacaccaagacggtcattgagttccggcacaagcgcaaggtctttgagcagggctaccgggaagagccgaccttcatagaccctgaggccatcaagtacttccgggagaggtggcaaatcgaggcacagagagggagggcgacttgccccaggtcacacagctggatggagaagagggacgggagcgaggaggactttcacttagactgccgccacgagagataccctgcccgacaccagccacacatggcggattcctggccccggagctccgcacaggaagcaccagagctgaaccgacagtgctgggtcttggggcactgggtgtga

SEQ ID NO: 139022 - DNA, 779 bp, Homo sapiens
  Payload ID: 7244
  Gene Symbol: GSG1L
  Gene Name: GSG1-like
  ENST ID: ENST00000562611
  CDS Start-End: 1-529
cggcccccctggcggcgcgctctacagctgggagaccggcgacgaccgcttcctcttcaggaatttccacaccggcatctggtactcgtgcgaggaggagctcagcgggcttggtgaaaaatgtcgcagcttcattgacctggccccggcatcggagaaaggggtcctgtggctgtctgtggtctccgaggtgctgtacattctgctgctggtggttggcttcagcctcatgtgtctcgagctcttccactccagcaatgtcatcgacgggctcaagctcaatgccttcgcggctgtcttcacggtgctctcagttgaagactccacgctggttttccctcagcctccctggccactctgcctcagctttctttgctggtccctcctgctctgcttaatatcagatgttggcttcatcctgggacccttctctctcctcttcctacagtctctctccaggcctcctgggaatggtcgcccacatgatgtacacgcaggtgttccaggtcaccgtgagcctcggtcctgaggactggagaccccattcctgggactacgggtggtccttctgcctggcgtggggctcctttacctgctgcatggcagcctctgtcaccacgctcaactcctacaccaagacggtcattgagttccggcacaagcgcaaggtctttgagcagggctaccgggaagagccgaccttcatagaccctgaggccatcaagtacttccgggagaggtggcaaatcgaggcacagagagggagggcgacttgcccc

SEQ ID NO: 139023 - DNA, 882 bp, Homo sapiens
  Payload ID: 7245
  Gene Symbol: GSG1L2
  Gene Name: GSG1-like 2
  Uniprot ID: A8MUP6
  ENST ID: ENST00000399363
  CDS Start-End: 1-882
atggacagggccaagcagcagcaggcgctgctcctcctccctgtctgcctcgccctcaccttctccctcaccgccgtggtcagcagccactggtgtgaggggacccgacgggtggtgaagccactgtgccaggaccagccgggagggcagcactgcattcacttcaaacgggacaacagcagcaatggcaggatggacaacaatagccaggctgtcctgtacatttgggagctgggtgatgacaagttcattcagcgggggttccatgtggggctctggcagtcctgcgaggagagcctcaacggtgaagatgaaaagtgtaggagtttccggagtgtagtgccagctgaagaacaaggtgttttgtggctgtccatcgggggcgaggtcctggatatcgttctgatactgacaagcgccatcctcctgggctccagagtgagttgtcgcagccctgggttccactggctcagggtggatgccttggtagccatcttcatggtgctggcagggcttctaggcatggtggcccacatgatgtacacaaccatttttcaaatcactgtgaaccttggaccagaagattggaagcctcagacctgggactatggctggtcatattgccttgcctggggttctttcgccctctgcctggctgtgtcggtctcggccatgagcaggttcacggcagcccgcctggaattcaccgagaagcagcaggcacagaacggcagtcggcactctcaacacagcttcctggaacccgaggcttcggagagcatttggaaaacaggagctgctccttgccctgctgaacaagccttcaggaatgtttctggacacctcccaccaggcgccccaggcaaggtgtccatatgctag

SEQ ID NO: 139024 - DNA, 2140 bp, Homo sapiens
  Payload ID: 7246
  Gene Symbol: GSKIP
  Gene Name: GSK3B interacting protein
  Uniprot ID: Q9P0R6
  ENST ID: ENST00000438650
  CDS Start-End: 119-538
ggagcagttccggctccgagggggcggggcggaagaaggcggggagggagggggcggcaccgccggtcggctccagtcgcctccggaggaaggaagaagaggacgccgggcgcgcagaatggaaacagactgtaatcccatggagctaagcagtatgtcaggatttgaagaaggttcagagctgaacggttttgaaggaactgacatgaaagacatgaggctcgaagctgaagcagttgtaaatgatgttctctttgctgttaacaacatgtttgtctcgaaaagcctgcggtgtgcggatgatgtggcctatatcaatgtggaaacaaaggaaagaaacagatattgcctagaactcactgaagcagggctcaaggtggtaggctatgcttttgaccaggtagatgatcatttacagactccctaccatgaaacagtctactccttgttggatacactcagccccgcctaccgagaagcatttggaaacgcactgcttcaaagactggaagctttgaaaagagatggacagtcatgactacactttttcctttcagaggggctggtgctggtacagaatgttgatataaagcttaaaattcttgcatatggtcatagaaaatgcatctttggttttgtgtttttatcacttgcttccaacttaggcttttggctcagaagattattgaataatgatttgtcttagtttctgtttcagtaagggaattctgaggccgttgctatgataccatcattaagacattcacatgtcttcatataatatctcttcatttcaaatcctaatcactatttcatactattacagggctttgatgctgccagcactgtcttttacataggaaattctagatttgcacagtaatagaggaattagaagtacctaactatacactttgattcagcctgctaaatcaggggttcaatactagcttggacaaactttgtagtaattaattgctaccagccttattggaaacaaattatcaactagtttcccctgcacaaattttgaaattcactgcttcacttaatctatttatattactaataatggattaataaagatgaattaattatatattacttaactagtattaaatgaaaaacagggactgaaatagttctgtattccgtgtttgcaacagccagccaactaagcagaggataaaccgttagcaaatgaatgtaataattactcatttccaagatatctaagcacataagcaaatacaggaacagacttcattctttttcttaacaaaaaagcatcttcagtgtgtgatttaaaagaaagaagattctggtttcctagaaaacaatattttggcctgtgttgattcttattctgaatgtgtgtttacataatgtacagtatatattcagaaagtatttttgcttcaacgtttactttctatgatgtagtgctttggtattcctacagcaccccaccttccccaacagatgtacagtgttctgtctccattcgaaatctacaatgtaatatgagtgcattgtatgggtttgaaaccaaaggatgaatgaagcattcagagacttaatatttgaaaaaggaatagtcagtattttatattttattacaggtactgatatttataaatttaataaactgtaccatgctgctgcatgttttcaagtacatgttgaacagtaaggattggggagttgttttttaatggtcacctaaagcagctgctatagaaatgttgaactaaaattttgcatctggtcataccttcatgcatttatcatttgcagatatttttccatcattattaaaaaacaggaacttttaggctctgaagatcatgtggaccagagcaaattaaagttcagtttgtgtcacaattcattgccagacttcattggaatgctttgtttgatgatgtatgttcattctcagctttattttcagatgcttaactgggcaacgaagtctaacttcaggttgaactttctcatgtttaatctcaggctaaatgtaaatgatatttgtaaagtttgaataaaattctgtttactcattttgagttagtatgaaaaaaagtgattgtatgtttaagaattgaaattgttcattttgtgataaatgattaattcc

SEQ ID NO: 139025 - DNA, 2218 bp, Homo sapiens
  Payload ID: 7246
  Gene Symbol: GSKIP
  Gene Name: GSK3B interacting protein
  Uniprot ID: Q9P0R6
  ENST ID: ENST00000555181
  CDS Start-End: 195-614
ggggcggaagaaggcggggagggagggggcggcaccgccggtcggctccagtcgcctccggaggaaggaagaagaggacgccgggcgcgcagctcggtgctgattatcacaactgtttggtgacctacttcactgacctgtgaggattccttcccttcaggtactggattcttgatctttctgcatcatcaagaatggaaacagactgtaatcccatggagctaagcagtatgtcaggatttgaagaaggttcagagctgaacggttttgaaggaactgacatgaaagacatgaggctcgaagctgaagcagttgtaaatgatgttctctttgctgttaacaacatgtttgtctcgaaaagcctgcggtgtgcggatgatgtggcctatatcaatgtggaaacaaaggaaagaaacagatattgcctagaactcactgaagcagggctcaaggtggtaggctatgcttttgaccaggtagatgatcatttacagactccctaccatgaaacagtctactccttgttggatacactcagccccgcctaccgagaagcatttggaaacgcactgcttcaaagactggaagctttgaaaagagatggacagtcatgactacactttttcctttcagaggggctggtgctggtacagaatgttgatataaagcttaaaattcttgcatatggtcatagaaaatgcatctttggttttgtgtttttatcacttgcttccaacttaggcttttggctcagaagattattgaataatgatttgtcttagtttctgtttcagtaagggaattctgaggccgttgctatgataccatcattaagacattcacatgtcttcatataatatctcttcatttcaaatcctaatcactatttcatactattacagggctttgatgctgccagcactgtcttttacataggaaattctagatttgcacagtaatagaggaattagaagtacctaactatacactttgattcagcctgctaaatcaggggttcaatactagcttggacaaactttgtagtaattaattgctaccagccttattggaaacaaattatcaactagtttcccctgcacaaattttgaaattcactgcttcacttaatctatttatattactaataatggattaataaagatgaattaattatatattacttaactagtattaaatgaaaaacagggactgaaatagttctgtattccgtgtttgcaacagccagccaactaagcagaggataaaccgttagcaaatgaatgtaataattactcatttccaagatatctaagcacataagcaaatacaggaacagacttcattctttttcttaacaaaaaagcatcttcagtgtgtgatttaaaagaaagaagattctggtttcctagaaaacaatattttggcctgtgttgattcttattctgaatgtgtgtttacataatgtacagtatatattcagaaagtatttttgcttcaacgtttactttctatgatgtagtgctttggtattcctacagcaccccaccttccccaacagatgtacagtgttctgtctccattcgaaatctacaatgtaatatgagtgcattgtatgggtttgaaaccaaaggatgaatgaagcattcagagacttaatatttgaaaaaggaatagtcagtattttatattttattacaggtactgatatttataaatttaataaactgtaccatgctgctgcatgttttcaagtacatgttgaacagtaaggattggggagttgttttttaatggtcacctaaagcagctgctatagaaatgttgaactaaaattttgcatctggtcataccttcatgcatttatcatttgcagatatttttccatcattattaaaaaacaggaacttttaggctctgaagatcatgtggaccagagcaaattaaagttcagtttgtgtcacaattcattgccagacttcattggaatgctttgtttgatgatgtatgttcattctcagctttattttcagatgcttaactgggcaacgaagtctaacttcaggttgaactttctcatgtttaatctcaggctaaatgtaaatgatatttgtaaagtttgaataaaattctgtttactcattttgagttagtatgaaaaaaagtgattgtatgtttaagaattgaaattgttcattttgtgataaatgattaattccaa

SEQ ID NO: 139026 - DNA, 501 bp, Homo sapiens
  Payload ID: 7246
  Gene Symbol: GSKIP
  Gene Name: GSK3B interacting protein
  ENST ID: ENST00000553699
  CDS Start-End: 268-501
agtcgcctccggaggaaggaagaagaggacgccgggcgcgcagcatcatgcttgggctagtggccccatctcaacatggctacttggaacagcttgagctgtgtgctgtgactgaactaatctgattaaagtgaccaagaagtccgggcgcagtggttcatgcctctcggtgctgattatcacaactgtttggtgacctacttcactgacctgtgaggattccttcccttcaggtactggattcttgatctttctgcatcatcaagaatggaaacagactgtaatcccatggagctaagcagtatgtcaggatttgaagaaggttcagagctgaacggttttgaaggaactgacatgaaagacatgaggctcgaagctgaagcagttgtaaatgatgttctctttgctgttaacaacatgtttgtctcgaaaagcctgcggtgtgcggatgatgtggcctatatcaatgtggaaacaaaggaaagaaacagatattgccta

SEQ ID NO: 139027 - DNA, 3834 bp, Homo sapiens
  Payload ID: 7246
  Gene Symbol: GSKIP
  Gene Name: GSK3B interacting protein
  Uniprot ID: Q9P0R6
  ENST ID: ENST00000556095
  CDS Start-End: 1813-2232
ccgggcgcgcaggtgagcggcagccggggtggctgcgggcgaggggcggcccccgagaagggctaggggctcggggcgccggcgggccgtcaggccttccggatggggacgcgacgccatgcagctggctgggccgagaggggcggcaggctgcaggggccccgcgcccgtgttaagaggggtctgggggccggtctggccggcctggctctcccggctcccctcagacctcggcgccccggaaacgcacacttggggctccgccgtctccgctgggaggactggagcccttctcgagcatccccgcccgcacccgagcattgaccggtgcccattgtcagcaagttcttcggcccccgcctcattcaggtattgtttctgaggcagcttcttcgttgccgtttgcctggcggtttgcagagcgcttctcgcatacgctcgcttaatcctgggtgtgtcatagcaacgatcaggaaacttgggttttcgaagcatctgtgggcaaaactgcattccttgagaaatgctaaaggctcctgaccccgccggaacctgggtgaagaacttgggctgttctggcagtctgcgcaatcgtatttctgccttttgggaggtaactcctgcagaggcggagccggctgttaagttaagtcaacctcgaaaggcctgggtgcgggtgttctatggcccagaagccagatgtccttcgttagaatcccggcactgacacctattagccgcccagccactttgagcggccactgccctccccgagcccacgttgcctcctttgccgagtgtgagcggattaaaatcttatgtgcatggatttgttgggaagattaaatgatatgagtagggcacgaacctgaacagagtcctgaaacatacagctgtttaatcacagtgaattaagacgaccagtttaaggagtgaaatgtttactgtctcggcaactttcatgaatgccttggaaatacagcccaaaatattggtagatggagaaacatctggttcccctttccacaaccaccttttcgttttagaaccagggtactttgtatgcagttgcttggattgttgatttccctcattctttgtagactcatctcaagtattctcagtaacttagattcccttgctcttcattcagaaatatttgttaaggtccattaaatgaaagtcaccacagttgatcatgtgaacagtgtcaagaatcaggccgaaccttcaaggagtttatgttctaaaacggaagcatggtggtacctgcttgtggaggctgaggcggaaggatcgcttgagcccaggactttgaggctgcataattgcattgacgctatccatagagtgcctgcaatttcaaatatcagaaaggatcgtacgagctatgatcatgccactgcactccagcctgaaccacagagcaagaccctttctctcaataaagtggaagtttgttcatttattcagtaaatatttattgattgccttctgtgtgccaagcactgttctaggtactgggattacagcagtgaacagataaatctcttccttcctggaacttacattttattgaagggaggagacatacaataaatgagtgaataatatgctttgtggtgataagggctgttggaaaaacgaaagcaatgtaaagggagtggagatggggaagagagaagggacttgccatttttatatgagatgctcggtgctgattatcacaactgtttggtgacctacttcactgacctgtgaggattccttcccttcaggtactggattcttgatctttctgcatcatcaagaatggaaacagactgtaatcccatggagctaagcagtatgtcaggatttgaagaaggttcagagctgaacggttttgaaggaactgacatgaaagacatgaggctcgaagctgaagcagttgtaaatgatgttctctttgctgttaacaacatgtttgtctcgaaaagcctgcggtgtgcggatgatgtggcctatatcaatgtggaaacaaaggaaagaaacagatattgcctagaactcactgaagcagggctcaaggtggtaggctatgcttttgaccaggtagatgatcatttacagactccctaccatgaaacagtctactccttgttggatacactcagccccgcctaccgagaagcatttggaaacgcactgcttcaaagactggaagctttgaaaagagatggacagtcatgactacactttttcctttcagaggggctggtgctggtacagaatgttgatataaagcttaaaattcttgcatatggtcatagaaaatgcatctttggttttgtgtttttatcacttgcttccaacttaggcttttggctcagaagattattgaataatgatttgtcttagtttctgtttcagtaagggaattctgaggccgttgctatgataccatcattaagacattcacatgtcttcatataatatctcttcatttcaaatcctaatcactatttcatactattacagggctttgatgctgccagcactgtcttttacataggaaattctagatttgcacagtaatagaggaattagaagtacctaactatacactttgattcagcctgctaaatcaggggttcaatactagcttggacaaactttgtagtaattaattgctaccagccttattggaaacaaattatcaactagtttcccctgcacaaattttgaaattcactgcttcacttaatctatttatattactaataatggattaataaagatgaattaattatatattacttaactagtattaaatgaaaaacagggactgaaatagttctgtattccgtgtttgcaacagccagccaactaagcagaggataaaccgttagcaaatgaatgtaataattactcatttccaagatatctaagcacataagcaaatacaggaacagacttcattctttttcttaacaaaaaagcatcttcagtgtgtgatttaaaagaaagaagattctggtttcctagaaaacaatattttggcctgtgttgattcttattctgaatgtgtgtttacataatgtacagtatatattcagaaagtatttttgcttcaacgtttactttctatgatgtagtgctttggtattcctacagcaccccaccttccccaacagatgtacagtgttctgtctccattcgaaatctacaatgtaatatgagtgcattgtatgggtttgaaaccaaaggatgaatgaagcattcagagacttaatatttgaaaaaggaatagtcagtattttatattttattacaggtactgatatttataaatttaataaactgtaccatgctgctgcatgttttcaagtacatgttgaacagtaaggattggggagttgttttttaatggtcacctaaagcagctgctatagaaatgttgaactaaaattttgcatctggtcataccttcatgcatttatcatttgcagatatttttccatcattattaaaaaacaggaacttttaggctctgaagatcatgtggaccagagcaaattaaagttcagtttgtgtcacaattcattgccagacttcattggaatgctttgtttgatgatgtatgttcattctcagctttattttcagatgcttaactgggcaacgaagtctaacttcaggttgaactttctcatgtttaatctcaggctaaatgtaaatgatatttgtaaagtttgaataaaattctgtttactcattttgagttagtatgaaaaaaagtgattgtatgtttaagaattgaaattgttcattttgtgataaatgattaattcc

SEQ ID NO: 139028 - DNA, 760 bp, Homo sapiens
  Payload ID: 7246
  Gene Symbol: GSKIP
  Gene Name: GSK3B interacting protein
  Uniprot ID: Q9P0R6
  ENST ID: ENST00000554182
  CDS Start-End: 113-532
agtcgcctccggaggaaggaagaagaggacgccgggcgcgcagctcggtgctgattatcacaactgtttggtgacctacttcactgacctgtgaggattccttcccttcagaatggaaacagactgtaatcccatggagctaagcagtatgtcaggatttgaagaaggttcagagctgaacggttttgaaggaactgacatgaaagacatgaggctcgaagctgaagcagttgtaaatgatgttctctttgctgttaacaacatgtttgtctcgaaaagcctgcggtgtgcggatgatgtggcctatatcaatgtggaaacaaaggaaagaaacagatattgcctagaactcactgaagcagggctcaaggtggtaggctatgcttttgaccaggtagatgatcatttacagactccctaccatgaaacagtctactccttgttggatacactcagccccgcctaccgagaagcatttggaaacgcactgcttcaaagactggaagctttgaaaagagatggacagtcatgactacactttttcctttcagaggggctggtgctggtacagaatgttgatataaagcttaaaattcttgcatatggtcatagaaaatgcatctttggttttgtgtttttatcacttgcttccaacttaggcttttggctcagaagattattgaataatgatttgtcttagtttctgtttcagtaagggaattctgaggccgttgctatgataccatcattaagacattca

SEQ ID NO: 139029 - DNA, 361 bp, Homo sapiens
  Payload ID: 7246
  Gene Symbol: GSKIP
  Gene Name: GSK3B interacting protein
  ENST ID: ENST00000555757
  CDS Start-End: 35-361
tcacaactgtttggtgacctacttcactgacctaatggaaacagactgtaatcccatggagctaagcagtatgtcaggatttgaagaaggttcagagctgaacggttttgaaggaactgacatgaaagacatgaggctcgaagctgaagcagttgtaaatgatgttctctttgctgttaacaacatgtttgtctcgaaaagcctgcggtgtgcggatgatgtggcctatatcaatgtggaaacaaaggaaagaaacagatattgcctagaactcactgaagcagggctcaaggtggtaggctatgcttttgaccaggtagatgatcatttacagactccctaccatgaaacagtctactcc

SEQ ID NO: 139030 - DNA, 1803 bp, Homo sapiens
  Payload ID: 7247
  Gene Symbol: GTF2H2C
  Gene Name: GTF2H2 family member C
  Uniprot ID: Q6P1K8
  ENST ID: ENST00000380729
  CDS Start-End: 289-1476
gtccgcgtgtggaagtctgtgaggcgcagaggtggggcaggccgtctgactagctaggcggctgggagcgttttcgtggcggggaacggaggttgaattgccctgcctgggctcatagggaaggaggatgtgaaggagcttgtgaaggcagaggaaggctggagtgcagtggcacaaccttggctcgctccagtgtctacctcccaggttcaagtgattctcctgcctcagcctcccgagtagctgggattacagattattgaataataaaatacagttttgaaaaaaatggatgaagaacctgaaagaactaagcgatgggaaggaggctatgaaagaacatgggagattcttaaagaagatgaatctggatcacttaaagctacaatagaagacattctattcaaggcaaagagaaaaagagtatttgagcaccatggacaagttcgacttggaatgatgcgccacctttatgtggtagtagatggatcaagaacaatggaagaccaagatttaaagcctaatagactgacgtgtactttaaagttgttggaatactttgtagaggaatattttgatcaaaatcctattagtcagattggaataattgtaactaagagtaaaagagctgaaaaattgactgaactttcaggaaacccaagaaaacatataacgtctttgaaggaagctgtggatatgacctgccatggagagccatctctttataattccctaagcatggctatgcagactctaaaacacatgcctggacatacaagtcgagaagtactaatcatctttagcagccttacaacttgcgatccatctaatatttatgatctaatcaagaccctaaaggcagctaaaattagagtatctgttattggattgtctgcagaagttcgcgtttgcactgtacttgctcgtgaaactggtggcacgtaccatgttattttagatgaaagccattacaaagagttgctcacacatcatcttagtcctcctcctgctagctcaagttctgaatgctcacttattcgtatgggatttcctcagcacaccattgcttctttatctgaccaggatgcaaaaccctctttcagcatggcgcatttggatggcaatactgagccagggcttacattaggaggctatttctgcccacagtgtcgggcaaagtactgtgagctacctgttgaatgtaaaatctgtggtcttactttggtgtctgctccccacttggcacggtcttaccatcatttgtttcctttggatgcttttcaagaaattcccctagaagaatataatggagaaagattttgttatggatgtcagggggaattgaaagaccaacatgtttatgtttgtgctgtgtgccaaaatgttttctgtgtggactgtgatgtttttgttcatgattctctacactgttgccctggctgtattcataagattccagctccttcaggtgtttgattccagcatgtagtatacattgtatgtgttaaaaagaaatttgcaactgtgaataaaaggacttctttagaagaagcttcatttaaaacatgaaaggataatctgacttaagaaactttttgctaagaaaaggtaatattttattaaattttaaatttgtgttgtcacagaaatacctgaaattcagtagtacttcattcaattaattttgttttctattattttgagttatactgttttcaaagtcattatgcagtatgtataaacttataagaattaaattgatgtgataattttatgtttttataattaaatatagaatcttta

SEQ ID NO: 139031 - DNA, 1956 bp, Homo sapiens
  Payload ID: 7247
  Gene Symbol: GTF2H2C
  Gene Name: GTF2H2 family member C
  ENST ID: ENST00000446221
  CDS Start-End: 144-299
gactagctaggcggctgggagcgttttcgtggcggggaacggaggttgaattgccctgcctgggctcatagggaaggaggatgtgaaggagcttgtgaaggcagaggaagattattgaataataaaatacagttttgaaaaaaatggatgaagaacctgaaagaactaagcgatgggaaggaggctatgaaagaacatgggagattcttaaagaagatgaatctggatcacttaaagctacaatagaagacattctattcaaggcaaagagaaaaagatgcgccacctttatgtggtagtagatggatcaagaacaatggaagaccaagatttaaagcctaatagactgacgtgtactttaaagttgttggaatactttgtagaggaatattttgatcaaaatcctattagtcagattggaataattgtaactaagagtaaaagagctgaaaaattgactgaactttcaggaaacccaagaaaacatataacgtctttgaaggaagctgtggatatgacctgccatggagagccatctctttataattccctaagcatggctatgcagactctaaaacacatgcctggacatacaagtcgagaagtactaatcatctttagcagccttacaacttgcgatccatctaatatttatgatctaatcaagaccctaaaggcagctaaaattagagtatctgttattggattgtctgcagaagttcgcgtttgcactgtacttgctcgtgaaactggtggcacgtaccatgttattttagatgaaagccattacaaagagttgctcacacatcatcttagtcctcctcctgctagctcaagttctgaatgctcacttattcgtatgggatttcctcagcacaccattgcttctttatctgaccaggatgcaaaaccctctttcagcatggcgcatttggatggcaatactgagccagggcttacattaggaggctatttctgcccacagtgtcgggcaaagtactgtgagctacctgttgaatgtaaaatctgtggtcttactttggtgtctgctccccacttggcacggtcttaccatcatttgtttcctttggatgcttttcaagaaattcccctagaagaatataatggagaaagattttgttatggatgtcagggggaattgaaagaccaacatgtttatgtttgtgctgtgtgccaaaatgttttctgtgtggactgtgatgtttttgttcatgattctctacactgttgccctggctgtattcataagattccagctccttcaggtgtttgattccagcatgtagtatacattgtatgtgttaaaaagaaatttgcaactgtgaataaaaggacttctttagaagaagcttcatttaaaacatgaaaggataatctgacttaagaaactttttgctaagaaaaggtaatattttattaaattttaaatttgtgttgtcacagaaatacctgaaattcagtagtacttcattcaattaattttgttttctattattttgagttatactgttttcaaagtcattatgcagtatgtataaacttataagaattaaattgatgtgataattttatgtttttataattaaatatagaatctttatgatttatgttaattcattaatttagtgtaagaagaaagttaagtctgaatgtaaattcagtgtaagatgaaaatttatcaatacttatgaaattaggctgggcgctgtggctcacacctgtaatcccaacactttgggaggctgaggtgggcagatcacttgaggtcaggagttcgagaccagcctggccaacatggtgaaaccccgtcactactaaaaatacaaaaaataattagccgggcatggtggttcacgcctggagtcccagctacttgggaggctgaggcaggagaatcgcttgaacccaggaggcggaggttgcagtgagccgaga

SEQ ID NO: 139032 - DNA, 610 bp, Homo sapiens
  Payload ID: 7247
  Gene Symbol: GTF2H2C
  Gene Name: GTF2H2 family member C
  ENST ID: ENST00000514162
  CDS Start-End: 191-562
gtccgcgtgtggaagtctgtgaggcgcagaggtggggcaggccgtctgactagctaggcggctgggagcgttttcgtggcggggaacggaggttgaattgccctgcctgggctcatagggaaggaggatgtgaaggagcttgtgaaggcagaggaagattattgaataataaaatacagttttgaaaaaaatggatgaagaacctgaaagaactaagcgatgggaaggaggctatgaaagaacatgggagattcttaaagaagatgaatctggatcacttaaagctacaatagaagacattctattcaaggcaaagagaaaaagagtatttgagcaccatggacaagttcgacttggaatgatgcgccacctttatgtggtagtagatggatcaagaacaatggaagaccaagatttaaagcctaatagactgacgtgtactttaaagttgttggaatactttgtagaggaatattttgatcaaaatcctattagtcagattggaataattgtaactaagagtaaaagagctgaaaaattgactgaactttcaggtgtttgattccagcatgtagtatacattgtatgtgttaaaaagaaatttgcaact

SEQ ID NO: 139033 - DNA, 2952 bp, Homo sapiens
  Payload ID: 7247
  Gene Symbol: GTF2H2C
  Gene Name: GTF2H2 family member C
  Uniprot ID: Q6P1K8
  ENST ID: ENST00000510979
  CDS Start-End: 196-1383
ggtgagtccgcgtgtggaagtctgtgaggcgcagaggtggggcaggccgtctgactagctaggcggctgggagcgttttcgtggcggggaacggaggttgaattgccctgcctgggctcatagggaaggaggatgtgaaggagcttgtgaaggcagaggaagattattgaataataaaatacagttttgaaaaaaatggatgaagaacctgaaagaactaagcgatgggaaggaggctatgaaagaacatgggagattcttaaagaagatgaatctggatcacttaaagctacaatagaagacattctattcaaggcaaagagaaaaagagtatttgagcaccatggacaagttcgacttggaatgatgcgccacctttatgtggtagtagatggatcaagaacaatggaagaccaagatttaaagcctaatagactgacgtgtactttaaagttgttggaatactttgtagaggaatattttgatcaaaatcctattagtcagattggaataattgtaactaagagtaaaagagctgaaaaattgactgaactttcaggaaacccaagaaaacatataacgtctttgaaggaagctgtggatatgacctgccatggagagccatctctttataattccctaagcatggctatgcagactctaaaacacatgcctggacatacaagtcgagaagtactaatcatctttagcagccttacaacttgcgatccatctaatatttatgatctaatcaagaccctaaaggcagctaaaattagagtatctgttattggattgtctgcagaagttcgcgtttgcactgtacttgctcgtgaaactggtggcacgtaccatgttattttagatgaaagccattacaaagagttgctcacacatcatcttagtcctcctcctgctagctcaagttctgaatgctcacttattcgtatgggatttcctcagcacaccattgcttctttatctgaccaggatgcaaaaccctctttcagcatggcgcatttggatggcaatactgagccagggcttacattaggaggctatttctgcccacagtgtcgggcaaagtactgtgagctacctgttgaatgtaaaatctgtggtcttactttggtgtctgctccccacttggcacggtcttaccatcatttgtttcctttggatgcttttcaagaaattcccctagaagaatataatggagaaagattttgttatggatgtcagggggaattgaaagaccaacatgtttatgtttgtgctgtgtgccaaaatgttttctgtgtggactgtgatgtttttgttcatgattctctacactgttgccctggctgtattcataagattccagctccttcaggtgtttgattccagcatgtagtatacattgtatgtgttaaaaagaaatttgcaactgtgaataaaaggacttctttagaagaagcttcatttaaaacatgaaaggataatctgacttaagaaactttttgctaagaaaaggtaatattttattaaattttaaatttgtgttgtcacagaaatacctgaaattcagtagtacttcattcaattaattttgttttctattattttgagttatactgttttcaaagtcattatgcagtatgtataaacttataagaattaaattgatgtgataattttatgtttttataattaaatatagaatctttatgatttatgttaattcattaatttagtgtaagaagaaagttaagtctgaatgtaaattcagtgtaagatgaaaatttatcaatacttatgaaattaggctgggcgctgtggctcacacctgtaatcccaacactttgggaggctgaggtgggcagatcacttgaggtcaggagttcgagaccagcctggccaacatggtgaaaccccgtcactactaaaaatacaaaaaataattagccgggcatggtggttcacgcctggagtcccagctacttgggaggctgaggcaggagaatcgcttgaacccaggaggcggaggttgcagtgagccgagattgtgccactgcactccaccctagagtaagactccctctcaaaaaaaaaaaaagttatgaaattaatacatatgaaatgatgtactgctacatccaccagagaggtctttttaggtttaaccaaacatctggaatatgtttatcaagttagtacatctgaaattatttgtggctatgaccaacagaagtcactttacattaaacattcaaactcacaagactgccatggccatacttggtacccgcttactcagaaggatattaaacagaaacaacagcctgccagcacagcatcaagcagtcctcattagcagtggaagtccttgtagcagtccactagtacaatttgggtgcaaggagataagatcctccacaggcatcaaggaaccaatatctcttaacaattccataaacacagcttccaggtatccacaagggatgtgtcaatttcaagagtcactacactcaggaaagcctaaagcttgaagactccatttatttatagtgcatcccaatccagatacgtaacaattaacgagttatttttactataagcaaagttgcctaaaatcatagttgatactaaccatggttaacagagctctaaagtttgacagaaagtgagattcaaatcctttcactctcatatgctaaaccttttgccttactctgggtcatcagagaaatttaggtgagaatgtatgatgaagtctgtgttttagattcaatgcagatatatcattgtgggcagaactctttctggttatatccagttaagagtaaatcaggctttcagccgggcgcggtggctcacgcctgtaatcctagcactttgggaggccgaggcgggcagatcacgaggtcaggagatcgagaccatcctggctaacacggtgaaaccccgtct

SEQ ID NO: 139034 - DNA, 583 bp, Homo sapiens
  Payload ID: 7247
  Gene Symbol: GTF2H2C
  Gene Name: GTF2H2 family member C
  ENST ID: ENST00000514069
  CDS Start-End: 166-321
gagtttccggctgagagtccttctagcggcgccggctggagtgcagtggcacaaccttggctcgctccagtgtctacctcccaggttcaagtgattctcctgcctcagcctcccgagtagctgggattacagattattgaataataaaatacagttttgaaaaaaatggatgaagaacctgaaagaactaagcgatgggaaggaggctatgaaagaacatgggagattcttaaagaagatgaatctggatcacttaaagctacaatagaagacattctattcaaggcaaagagaaaaagatgcgccacctttatgtggtagtagatggatcaagaacaatggaagaccaagatttaaagcctaatagactgacgtgtactttaaagattggaataattgtaactaagagtaaaagagctgaaaaattgactgaactttcaggaaacccaagaaaacatataacgtctttgaaggaagctgtggatatgacctgccatggagagccatctctttataattccctaagcatggctatgcagactctaaaacacatgcctggacatacaagtcgagaagtactaat

SEQ ID NO: 139035 - DNA, 832 bp, Homo sapiens
  Payload ID: 7247
  Gene Symbol: GTF2H2C
  Gene Name: GTF2H2 family member C
  ENST ID: ENST00000512736
  CDS Start-End: 69-566
tgagtttccggctgagagtccttctagcggcgccgattattgaataataaaatacagttttgaaaaaaatggatgaagaacctgaaagaactaagcgatgggaaggaggctatgaaagaacatgggagattcttaaagaagatgaatctggatcacttaaagctacaatagaagacattctattcaaggcaaagagaaaaagagtatttgagcaccatggacaagttcgacttggaatgatgcgccacctttatgtggtagtagatggatcaagaacaatggaagaccaagatttaaagcctaatagactgacgtgtactttaaagttgttggaatactttgtagaggaatattttgatcaaaatcctattagtcagattggaataattgtaactaagagtaaaagagctgaaaaattgactgaactttcaggaaacccaagaaaacatataacgtctttgaaggaagctgtggatatgacctgccatggagagccatctctttataattccctaagcatggctatgcagactctaaagttagtattatacattatgtataattgaattagaagttttttaaatgagttaagttgaagtgatgtgttaatatggggcccataaacccagctataacaaaattgttaagtacgagaattatgtagtgttatttatgatgtttagtgtggtgttggttagtaatttttattttacattttagtaagatattgttaaaggttttataaaaatataatttaaaactgtcggcagtatcaatagtacaaaaataggttgatgaaaaaatattttattaaaatgagatttaatatagt

SEQ ID NO: 139036 - DNA, 769 bp, Homo sapiens
  Payload ID: 7247
  Gene Symbol: GTF2H2C
  Gene Name: GTF2H2 family member C
  ENST ID: ENST00000506129
  CDS Start-End: 52-330
gtccttctagcggcgccgattattgaataataaaatacagttttgaaaaaaatggatgaagaacctgaaagaactaagcgatgggaaggaggctatgaaagaacatgggagattcttaaagaagatgaatctggatcacttaaagctacaatagaagacattctattcaaggcaaagagaaaaagagtatttgagcaccatggacaagttcgacttggaatgatgcgccacctttatgtggtagtagatggatcaagaacaatggaagaccaagatttaaagcctaatagactgacgtgtactttaaaggaaacccaagaaaacatataacgtctttgaaggaagctgtggatatgacctgccatggagagccatctctttataattccctaagcatggctatgcagactctaaaacacatgcctggacatacaagtcgagaagtactaatcatctttagcagccttacaacttgcgatccatctaatatttatgatctaatcaagaccctaaaggcagctaaaattagagtatctgttattggattgtctgcagaagttcgcgtttgcactgtacttgctcgtgaaactggtggcacgtaccatgttattttagatgaaagccattacaaagagttgctcacacatcatcttagtcctcctcctgctagctcaagttctgaatgctcacttattcgtatgggatttcctcagcacaccattgcttctttatctgaccaggatgcaaaaccctctttcagcatggcgca

SEQ ID NO: 139037 - DNA, 772 bp, Homo sapiens
  Payload ID: 7247
  Gene Symbol: GTF2H2C
  Gene Name: GTF2H2 family member C
  ENST ID: ENST00000507595
  CDS Start-End: 12-772
ttttgaaaaaaatggatgaagaacctgaaagaactaagcgatgggaaggaggctatgaaagaacatgggagattcttaaagaagatgaatctggatcacttaaagctacaatagaagacattctattcaaggcaaagagaaaaagagtatttgagcaccatggacaagttcgacttggaatgatgcgccacctttatgtggtagtagatggatcaagaacaatggaagaccaagatttaaagcctaatagactgacgtgtactttaaagattggaataattgtaactaagagtaaaagagctgaaaaattgactgaactttcaggaaacccaagaaaacatataacgtctttgaaggaagctgtggatatgacctgccatggagagccatctctttataattccctaagcatggctatgcagactctaaaacacatgcctggacatacaagtcgagaagtactaatcatctttagcagccttacaacttgcgatccatctaatatttatgatctaatcaagaccctaaaggcagctaaaattagagtatctgttattggattgtctgcagaagttcgcgtttgcactgtacttgctcgtgaaactggtggcacgtaccatgttattttagatgaaagccattacaaagagttgctcacacatcatcttagtcctcctcctgctagctcaagttctgaatgctcacttattcgtatgggatttcctcagcacaccattgcttctttatctgaccaggatgcaaaaccctcttt

SEQ ID NO: 139038 - DNA, 1872 bp, Homo sapiens
  Payload ID: 7247
  Gene Symbol: GTF2H2C
  Gene Name: GTF2H2 family member C
  ENST ID: ENST00000511629
  CDS Start-End: 54-209
gagtccttctagcggcgccgattattgaataataaaatacagttttgaaaaaaatggatgaagaacctgaaagaactaagcgatgggaaggaggctatgaaagaacatgggagattcttaaagaagatgaatctggatcacttaaagctacaatagaagacattctattcaaggcaaagagaaaaagatgcgccacctttatgtggtagtagatggatcaagaacaatggaagaccaagatttaaagcctaatagactgacgtgtactttaaagttgttggaatactttgtagaggaatattttgatcaaaatcctattagtcagattggaataattgtaactaagagtaaaagagctgaaaaattgactgaactttcagatggagtcttgctctgtcgccaggctagagtgcagtggcacaatttcggatcactgcaaagtccgcctcacgggttcaagcgattccctgcctcagcctcctgagtagctggaactacagatgcccgccaccacgccctgctaattttttgtattttagtagatacggggtttcaccatgttggccagtatggtctcaatctcttgaccttgtgatcagcccgcctcagcctctcaaagtgctgggattacaggcttgagccaccgcatccggccttatcctgaagatattaaaatacagttattgtaatcatttataaaatccagttaatcttaaaattaaattcttaaaaagttaagcatctaatttaaaagggaaaaagtataaaaattaaactgtagctattgctaatgaatcaatttttctgcttccatgacatacctaactgaattttagtttcaaaacgtagtaatggcattttttatttgctttgatatatatgctgttacaaatttgcatcactgattctattttattttctgtgaaatacactctcccttaaatctggttttcaaccttttatccttgccggcacacataagggaaatgacatactttcttcattagtagtttttcattaaatgcagtgaggagtgaaatgtacattggcctggagtgattcaagaaactcagttgtgagtaaccaaaagaatgtcacactagcttaagtgcagaaggaaaattttgggctatgttcaaaggtgggccaattccatatatagttgctgcatatgttggggtcctggctttgtctggcttcattctctgatagattttctggaagttgaaaagatgtctcttaattgtcccagttctacattgtacccgtagcctatagcttcagcacacgtctagggagaactctgattggcctgagttacgatctgcccatccatgaacaaagtggccaggaaatgaagtattttgtttgtacgcttcgattgcctgctgatgcccagagcaggatagaagtagggtcagcaccacatgaactaagcaggattattatatagtggaagaaggatggttcctccaaggtaggaatataaggtcaatattttcctctcactttacccaccccgagttaccagcagttttctattgcttcttttttttttttttgagaaggagtctctcactctgtcgcccaggcggtgctgtcttggctcactgcaacctccgcctcccgggttcaagagattctcctgcctccccctcccgagtagctgggattacaggtgtgcgctgccacacctggctaattttatttttagtagagacaggatttcaccatgctggccaggctgatctcgaactcctgacctcaggtgatctacccacctcagcctcccaaagtgttgggattacaggcatcagccaccatgcccggccccagcagttttctatggatgttagtgaagtcatgtataaa

SEQ ID NO: 139039 - DNA, 1686 bp, Homo sapiens
  Payload ID: 7248
  Gene Symbol: GTF2H2C_2
  Gene Name: GTF2H2 family member C, copy 2
  Uniprot ID: Q6P1K8
  ENST ID: ENST00000621406
  CDS Start-End: 169-1356
ggcgcagaggtggggcaggccgtctgactagctaggcggctgggagcgttttcgtggcggggaacggaggttgaattgccctgcctgggctcatagggaaggaggatgtgaaggagcttgtgaaggcagaggaagattattgaataataaaatacagttttgaaaaaaatggatgaagaacctgaaagaactaagcgatgggaaggaggctatgaaagaacatgggagattcttaaagaagatgaatctggatcacttaaagctacaatagaagacattctattcaaggcaaagagaaaaagagtatttgagcaccatggacaagttcgacttggaatgatgcgccacctttatgtggtagtagatggatcaagaacaatggaagaccaagatttaaagcctaatagactgacgtgtactttaaagttgttggaatactttgtagaggaatattttgatcaaaatcctattagtcagattggaataattgtaactaagagtaaaagagctgaaaaattgactgaactttcaggaaacccaagaaaacatataacgtctttgaaggaagctgtggatatgacctgccatggagagccatctctttataattccctaagcatggctatgcagactctaaaacacatgcctggacatacaagtcgagaagtactaatcatctttagcagccttacaacttgcgatccatctaatatttatgatttaatcaagaccctaaaggcagctaaaattagagtatctgttattggattgtctgcagaagttcgcgtttgcactgtacttgctcgtgaaactggtggcacgtaccatgttattttagatgaaagccattacaaagagttgctcacacatcatcttagtcctcctcctgctagctcaagttctgaatgctcacttattcgtatgggatttcctcagcacaccattgcttctttatctgaccaggatgcaaaaccctctttcagcatggcgcatttggatggcaatactgagccagggcttacattaggaggctatttctgcccacagtgtcgggcaaagtactgtgagctacctgttgaatgtaaaatctgtggtcttactttggtgtctgctccccacttggcacggtcttaccatcatttgtttcctttggatgcttttcaagaaattcccctagaagaatataatggagaaagattttgttatggatgtcagggggaattgaaagaccaacatgtttatgtttgtgctgtgtgccaaaatgttttctgtgtggactgtgatgtttttgttcatgattctctacactgttgccctggctgtattcataagattccagctccttcaggtgtttgattccagcatgtagtatacattgtatgtgttaaaaagaaatttgcaactgtgaataaaaggacttctttagaagaagcttcatttaaaacatgaaaggataatctgacttaagaaactttttgctaagaaaaggtaatattttattaaattttaaatttgtgttgtcacagaaatacctgaaattcagtagtacttcattcaattaattttgttttctattattttgagttatactgttttcaaagtcattatgcagtatgtataaacttataagaattaaattgatgtgataattttatgtttttataattaaatatagaatctttatga

SEQ ID NO: 139040 - DNA, 830 bp, Homo sapiens
  Payload ID: 7248
  Gene Symbol: GTF2H2C_2
  Gene Name: GTF2H2 family member C, copy 2
  ENST ID: ENST00000612211
  CDS Start-End: 68-565
gagtttccggctgagagtccttctagcggcgccgattattgaataataaaatacagttttgaaaaaaatggatgaagaacctgaaagaactaagcgatgggaaggaggctatgaaagaacatgggagattcttaaagaagatgaatctggatcacttaaagctacaatagaagacattctattcaaggcaaagagaaaaagagtatttgagcaccatggacaagttcgacttggaatgatgcgccacctttatgtggtagtagatggatcaagaacaatggaagaccaagatttaaagcctaatagactgacgtgtactttaaagttgttggaatactttgtagaggaatattttgatcaaaatcctattagtcagattggaataattgtaactaagagtaaaagagctgaaaaattgactgaactttcaggaaacccaagaaaacatataacgtctttgaaggaagctgtggatatgacctgccatggagagccatctctttataattccctaagcatggctatgcagactctaaagttagtattatacattatgtataattgaattagaagttttttaaatgagttaagttgaagtgatgtgttaatatggggcccataaacccagctataacaaaattgttaagtacgagaattatgtagtgttatttatgatgtttagtgtggtgttggttagtaatttttattttacattttagtaagatattgttaaaggttttataaaaatataatttaaaactgtcggcagtatcaatagtacaaaaataggttgatgaaaaaatattttattaaaatgagatttaatatag

SEQ ID NO: 139041 - DNA, 1956 bp, Homo sapiens
  Payload ID: 7248
  Gene Symbol: GTF2H2C_2
  Gene Name: GTF2H2 family member C, copy 2
  ENST ID: ENST00000619880
  CDS Start-End: 144-299
gactagctaggcggctgggagcgttttcgtggcggggaacggaggttgaattgccctgcctgggctcatagggaaggaggatgtgaaggagcttgtgaaggcagaggaagattattgaataataaaatacagttttgaaaaaaatggatgaagaacctgaaagaactaagcgatgggaaggaggctatgaaagaacatgggagattcttaaagaagatgaatctggatcacttaaagctacaatagaagacattctattcaaggcaaagagaaaaagatgcgccacctttatgtggtagtagatggatcaagaacaatggaagaccaagatttaaagcctaatagactgacgtgtactttaaagttgttggaatactttgtagaggaatattttgatcaaaatcctattagtcagattggaataattgtaactaagagtaaaagagctgaaaaattgactgaactttcaggaaacccaagaaaacatataacgtctttgaaggaagctgtggatatgacctgccatggagagccatctctttataattccctaagcatggctatgcagactctaaaacacatgcctggacatacaagtcgagaagtactaatcatctttagcagccttacaacttgcgatccatctaatatttatgatttaatcaagaccctaaaggcagctaaaattagagtatctgttattggattgtctgcagaagttcgcgtttgcactgtacttgctcgtgaaactggtggcacgtaccatgttattttagatgaaagccattacaaagagttgctcacacatcatcttagtcctcctcctgctagctcaagttctgaatgctcacttattcgtatgggatttcctcagcacaccattgcttctttatctgaccaggatgcaaaaccctctttcagcatggcgcatttggatggcaatactgagccagggcttacattaggaggctatttctgcccacagtgtcgggcaaagtactgtgagctacctgttgaatgtaaaatctgtggtcttactttggtgtctgctccccacttggcacggtcttaccatcatttgtttcctttggatgcttttcaagaaattcccctagaagaatataatggagaaagattttgttatggatgtcagggggaattgaaagaccaacatgtttatgtttgtgctgtgtgccaaaatgttttctgtgtggactgtgatgtttttgttcatgattctctacactgttgccctggctgtattcataagattccagctccttcaggtgtttgattccagcatgtagtatacattgtatgtgttaaaaagaaatttgcaactgtgaataaaaggacttctttagaagaagcttcatttaaaacatgaaaggataatctgacttaagaaactttttgctaagaaaaggtaatattttattaaattttaaatttgtgttgtcacagaaatacctgaaattcagtagtacttcattcaattaattttgttttctattattttgagttatactgttttcaaagtcattatgcagtatgtataaacttataagaattaaattgatgtgataattttatgtttttataattaaatatagaatctttatgatttatgttaattcattaatttagtgtaagaagaaagttaagtctgaatgtaaattcagtgtaagatgaaaatttatcaatacttatgaaattaggctgggcgctgtggctcacacctgtaatcccaacactttgggaggctgaggtgggcagatcacttgaggtcaggagttcgagaccagcctggccaacatggtgaaaccccgtcactactaaaaatacaaaaaataattagccgggcatggtggttcacgcctggagtcccagctacttgggaggctgaggcaggagaatcgcttgaacccaggaggcggaggttgcagtgagccgaga

SEQ ID NO: 139042 - DNA, 1873 bp, Homo sapiens
  Payload ID: 7248
  Gene Symbol: GTF2H2C_2
  Gene Name: GTF2H2 family member C, copy 2
  ENST ID: ENST00000612324
  CDS Start-End: 54-209
gagtccttctagcggcgccgattattgaataataaaatacagttttgaaaaaaatggatgaagaacctgaaagaactaagcgatgggaaggaggctatgaaagaacatgggagattcttaaagaagatgaatctggatcacttaaagctacaatagaagacattctattcaaggcaaagagaaaaagatgcgccacctttatgtggtagtagatggatcaagaacaatggaagaccaagatttaaagcctaatagactgacgtgtactttaaagttgttggaatactttgtagaggaatattttgatcaaaatcctattagtcagattggaataattgtaactaagagtaaaagagctgaaaaattgactgaactttcagatggagtcttgctctgtcgccaggctagagtgcagtggcacaatttcggatcactgcaaagtccgcctcacgggttcaagcgattccctgcctcagcctcctgagtagctggaactacagatgcccgccaccacgccctgctaattttttgtattttagtagatacggggtttcaccatgttggccagtatggtctcaatctcttgaccttgtgatcagcccgcctcagcctctcaaagtgctgggattacaggcttgagccaccgcatccggccttatcctgaaaatattaaaatacagttattgtaatcatttataaaatccagttaatcttaaaattaaattcttaaaaagttaagcatctaatttaaaagggaaaaagtataaaaattaaactgtagctattgctaatgaatcaatttttctgcttccatgacatacctaactgaattttagtttcaaaacgtagtaatggcattttttatttgctttggtatatatgctgttacaaatttgcatcactgattctattttattttctgtgaaatacactctcccttaaatctggttttcaaccttttatccttgccggcacacataagggaaatgacatactttcttcattagtagtttttcattaaatgcagtgaggagtgaaatgtacattggcctggagtgattcaagaaactcagttgtgagtaaccaaaagaatgtcacactagcttaagtgcagaaggaaaattttgggctatgttcaaaggtgggccaattccatatatagttgctgcatatgttggggtcctggctttgtctggcttcattctctgatagattttctggaagttgaaaagatgtctcttaattgtcccagttctacattgtacccgtagcctatagcttcagcacacgtctagggagaactctgattggcctgagttacgatctgcccatccatgaacaaagtggccaggaaatgaagtattttgtttgtacgcttcgattgcctgctgatgcccagagcaggatagaagtagggtcagcaccacatgaactaagcaggattattatatagtggaagaaggatggttcctccaaggtaggaatataaggtcaatattttcctctcactttacccaccccgagttaccagcagttttctattgcttctttttttttttttttgagaaggagtctctcactctgtcgcccaggcggtgctgtcttggctcactgcaacctccgcctcccgggttcaagagattctcctgcctccccctcccgagtagctgggattacaggtgtgcgctgccacacctggctaattttatttttagtagagacaggatttcaccatgctggccaggctgatctcgaactcctgacctcaggtgatctacccacctcagcctcccaaagtgttgggattacaggcatcagccaccatgcccggccccagcagttttctatggatgttagtgaagtcatgtataaa

SEQ ID NO: 139043 - DNA, 1803 bp, Homo sapiens
  Payload ID: 7248
  Gene Symbol: GTF2H2C_2
  Gene Name: GTF2H2 family member C, copy 2
  Uniprot ID: Q6P1K8
  ENST ID: ENST00000619699
  CDS Start-End: 289-1476
gtccgcgtgtggaagtctgtgaggcgcagaggtggggcaggccgtctgactagctaggcggctgggagcgttttcgtggcggggaacggaggttgaattgccctgcctgggctcatagggaaggaggatgtgaaggagcttgtgaaggcagaggaaggctggagtgcagtggcacaaccttggctcgctccagtgtctacctcccaggttcaagtgattctcctgcctcagcctcccgagtagctgggattacagattattgaataataaaatacagttttgaaaaaaatggatgaagaacctgaaagaactaagcgatgggaaggaggctatgaaagaacatgggagattcttaaagaagatgaatctggatcacttaaagctacaatagaagacattctattcaaggcaaagagaaaaagagtatttgagcaccatggacaagttcgacttggaatgatgcgccacctttatgtggtagtagatggatcaagaacaatggaagaccaagatttaaagcctaatagactgacgtgtactttaaagttgttggaatactttgtagaggaatattttgatcaaaatcctattagtcagattggaataattgtaactaagagtaaaagagctgaaaaattgactgaactttcaggaaacccaagaaaacatataacgtctttgaaggaagctgtggatatgacctgccatggagagccatctctttataattccctaagcatggctatgcagactctaaaacacatgcctggacatacaagtcgagaagtactaatcatctttagcagccttacaacttgcgatccatctaatatttatgatttaatcaagaccctaaaggcagctaaaattagagtatctgttattggattgtctgcagaagttcgcgtttgcactgtacttgctcgtgaaactggtggcacgtaccatgttattttagatgaaagccattacaaagagttgctcacacatcatcttagtcctcctcctgctagctcaagttctgaatgctcacttattcgtatgggatttcctcagcacaccattgcttctttatctgaccaggatgcaaaaccctctttcagcatggcgcatttggatggcaatactgagccagggcttacattaggaggctatttctgcccacagtgtcgggcaaagtactgtgagctacctgttgaatgtaaaatctgtggtcttactttggtgtctgctccccacttggcacggtcttaccatcatttgtttcctttggatgcttttcaagaaattcccctagaagaatataatggagaaagattttgttatggatgtcagggggaattgaaagaccaacatgtttatgtttgtgctgtgtgccaaaatgttttctgtgtggactgtgatgtttttgttcatgattctctacactgttgccctggctgtattcataagattccagctccttcaggtgtttgattccagcatgtagtatacattgtatgtgttaaaaagaaatttgcaactgtgaataaaaggacttctttagaagaagcttcatttaaaacatgaaaggataatctgacttaagaaactttttgctaagaaaaggtaatattttattaaattttaaatttgtgttgtcacagaaatacctgaaattcagtagtacttcattcaattaattttgttttctattattttgagttatactgttttcaaagtcattatgcagtatgtataaacttataagaattaaattgatgtgataattttatgtttttataattaaatatagaatcttta

SEQ ID NO: 139044 - DNA, 3430 bp, Homo sapiens
  Payload ID: 7249
  Gene Symbol: GTF2IRD1
  Gene Name: GTF2I repeat domain containing 1
  Uniprot ID: Q9UHL9
  ENST ID: ENST00000265755
  CDS Start-End: 394-3273
taaatggcagccaatggagggtggtgttgcgcggggctgggattagggccggggcgaatggctggcaatcttactgggattacagaacaaagagcctccccgcgctcccgctctccgctcctctccccgcgccgccccgccctccgccgcagcccgcgccgggggtgggggccgccgagcgccagccccccggccggccgattccccccccgcgccccctccccgcgcctccctccccgccctcgccgcgccgccgtcctcgcctccctctgcctctccttcccccattctcccggattaattaaggaggcagcggcaggaggctgagtcctggccgcgggccggggccggggcgccgctggcaggagcgcttggggatcctccaaggcgaccatggccttgctgggtaagcgctgtgacgtccccaccaacggctgcggacccgaccgctggaactccgcgttcacccgcaaagacgagatcatcaccagcctcgtgtctgccttagactccatgtgctcagcgctgtccaaactgaacgccgaggtggcctgtgtcgccgtgcacgatgagagcgcctttgtggtgggcacagagaaggggagaatgttcctgaatgcccggaaggagctacagtcagacttcctcaggttctgccgagggcccccgtggaaggatccggaggcagagcaccccaagaaggtgcagcggggcgagggtggaggccgtagcctccctcggtcctccctggaacatggctcagatgtgtaccttctgcggaagatggtagaggaggtgtttgatgttctttatagcgaggccctgggaagggccagtgtggtgccactgccctatgagaggctgctcagggagccagggctgctggccgtgcaggggctgcccgaaggcctggccttccgaaggccagccgagtatgaccccaaggccctcatggccatcctggaacacagccaccgcatccgcttcaagctcaagaggccacttgaggatggcgggcgggactcgaaggccctggtggagctgaacggtgtctccctgattcccaaggggtcacgggactgtggcctgcatggccaggcccccaaggtgccaccccaggacctgcccccaaccgccacctcctcctccatggccagcttcctgtacagcacggcgctccccaaccacgccatccgagagctcaagcaggaagcaccttcctgcccccttgcccccagcgacctgggcctgagtcggcccatgccagagcccaaggccaccggtgcccaagacttctccgactgttgtggacagaagcccactgggcctggtgggcctctcatccagaacgtccatgcctccaagcgcattctcttctccatcgtccatgacaagtcagagaagtgggacgccttcataaaggaaaccgaggacatcaacacgctccgggagtgtgtgcagatcctgtttaacagcagatatgcggaagccctgggcctggaccacatggtccccgtgccctaccggaagattgcctgtgacccggaggctgtggagatcgtgggcatcccggacaagatccccttcaagcgcccctgcacttatggagtccccaagctgaagcggatcctggaggagcgccatagtatccacttcatcattaagaggatgtttgatgagcgaattttcacagggaacaagtttaccaaagacaccacgaagctggagccagccagcccgccagaggacacctctgcagaggtctctagggccaccgtccttgaccttgctgggaatgctcggtcagacaagggcagcatgtctgaagactgtgggccaggaacctccggggagctgggcgggctgaggccgatcaaaattgagccagaggatctggacatcattcaggtcaccgtcccagacccctcgccaacctctgaggaaatgacagactcgatgcctgggcacctgccatcggaggattctggttatgggatggagatgctgacagacaaaggtctgagtgaggacgcgcggcccgaggagaggcccgtggaggacagccacggtgacgtgatccggcccctgcggaagcaggtggagctgctcttcaacacacgatacgccaaggccattggcatctcggagcccgtcaaggtgccgtactccaagtttctgatgcacccggaggagctgtttgtggtgggactgcctgaaggcatctccctccgcaggcccaactgcttcgggatcgccaagctccggaagattctggaggccagcaacagcatccagtttgtcatcaagaggcccgagctgctcactgagggagtcaaagagcccatcatggatagtcaaggaactgcctcctcacttggcttctctccccctgccctgcccccagagagggattccggggaccctctggtggacgagagcctgaagagacagggctttcaagaaaattatgacgcgaggctctcacggatcgacatcgccaacacactaagggagcaggtccaggaccttttcaataagaaatacggggaagccttgggcatcaagtacccggtccaggtcccctacaagcggatcaagagtaaccccggctccgtgatcatcgaggggctgcccccaggaatcccgttccgaaagccctgtaccttcggctcccagaacctggagaggattcttgctgtggctgacaagatcaagttcacagtcaccaggcctttccaaggactcatcccaaagcctgatgaagatgacgccaacagactcggggagaaggtgatcctgcgggagcaggtgaaggaactcttcaacgagaaatacggtgaggccctgggcctgaaccggccggtgctggtcccttataaactaatccgggacagcccagacgccgtggaggtcacgggtctgcctgatgacatccccttccggaaccccaacacgtacgacatccaccggctggagaagatcctgaaggcccgagagcatgtccgcatggtcatcattaaccagctccaaccctttgcagaaatctgcaatgatgccaaggtgccagccaaagacagcagcattcccaagcgcaagagaaagcgggtctcggaaggaaattccgtctcctcttcctcctcgtcttcctcttcctcgtcctctaacccggattcagtggcatcggccaaccagatctcactcgtgcaatggccaatgtacatggtggactatgccggcctgaacgtgcagctcccgggacctcttaattactagacctcagtactgaatcaggacctcactcagaaagactaaaggaaatgtaatttatgtacaaaatgtatattcggatatgtatcgatgccttttagtttttccaatgatttttacactatattcctgccaccaaggcctttttaaataagtaaaaaaa

SEQ ID NO: 139045 - DNA, 3315 bp, Homo sapiens
  Payload ID: 7249
  Gene Symbol: GTF2IRD1
  Gene Name: GTF2I repeat domain containing 1
  Uniprot ID: Q9UHL9
  ENST ID: ENST00000455841
  CDS Start-End: 214-3144
gccagccccccggccggccgattccccccccgcgccccctccccgcgcctccctccccgccctcgccgcgccgccgtcctcgcctccctctgcctctccttcccccattctcccggattaattaaggaggcagcggcaggaggctgagtcctggccgcgggccggggccggggcgccgctggcaggagcgcttggggatcctccaaggcgaccatggccttgctgggtaagcgctgtgacgtccccaccaacggctgcggacccgaccgctggaactccgcgttcacccgcaaagacgagatcatcaccagcctcgtgtctgccttagactccatgtgctcagcgctgtccaaactgaacgccgaggtggcctgtgtcgccgtgcacgatgagagcgcctttgtggtgggcacagagaaggggagaatgttcctgaatgcccggaaggagctacagtcagacttcctcaggttctgcctctccgcagctcagcacagggcagcgacatcccagctcgaaggccgggtggtgagacgggtgctcactgtggcctcgcgtgctctgtgtcccacaggagggcccccgtggaaggatccggaggcagagcaccccaagaaggtgcagcggggcgagggtggaggccgtagcctccctcggtcctccctggaacatggctcagatgtgtaccttctgcggaagatggtagaggaggtgtttgatgttctttatagcgaggccctgggaagggccagtgtggtgccactgccctatgagaggctgctcagggagccagggctgctggccgtgcaggggctgcccgaaggcctggccttccgaaggccagccgagtatgaccccaaggccctcatggccatcctggaacacagccaccgcatccgcttcaagctcaagaggccacttgaggatggcgggcgggactcgaaggccctggtggagctgaacggtgtctccctgattcccaaggggtcacgggactgtggcctgcatggccaggcccccaaggtgccaccccaggacctgcccccaaccgccacctcctcctccatggccagcttcctgtacagcacggcgctccccaaccacgccatccgagagctcaagcaggaagcaccttcctgcccccttgcccccagcgacctgggcctgagtcggcccatgccagagcccaaggccaccggtgcccaagacttctccgactgttgtggacagaagcccactgggcctggtgggcctctcatccagaacgtccatgcctccaagcgcattctcttctccatcgtccatgacaagtcagagaagtgggacgccttcataaaggaaaccgaggacatcaacacgctccgggagtgtgtgcagatcctgtttaacagcagatatgcggaagccctgggcctggaccacatggtccccgtgccctaccggaagattgcctgtgacccggaggctgtggagatcgtgggcatcccggacaagatccccttcaagcgcccctgcacttatggagtccccaagctgaagcggatcctggaggagcgccatagtatccacttcatcattaagaggatgtttgatgagcgaattttcacagggaacaagtttaccaaagacaccacgaagctggagccagccagcccgccagaggacacctctgcagaggtctctagggccaccgtccttgaccttgctgggaatgctcggtcagacaagggcagcatgtctgaagactgtgggccaggaacctccggggagctgggcgggctgaggccgatcaaaattgagccagaggatctggacatcattcaggtcaccgtcccagacccctcgccaacctctgaggaaatgacagactcgatgcctgggcacctgccatcggaggattctggttatgggatggagatgctgacagacaaaggtctgagtgaggacgcgcggcccgaggagaggcccgtggaggacagccacggtgacgtgatccggcccctgcggaagcaggtggagctgctcttcaacacacgatacgccaaggccattggcatctcggagcccgtcaaggtgccgtactccaagtttctgatgcacccggaggagctgtttgtggtgggactgcctgaaggcatctccctccgcaggcccaactgcttcgggatcgccaagctccggaagattctggaggccagcaacagcatccagtttgtcatcaagaggcccgagctgctcactgagggagtcaaagagcccatcatggatagtcaagagagggattccggggaccctctggtggacgagagcctgaagagacagggctttcaagaaaattatgacgcgaggctctcacggatcgacatcgccaacacactaagggagcaggtccaggaccttttcaataagaaatacggggaagccttgggcatcaagtacccggtccaggtcccctacaagcggatcaagagtaaccccggctccgtgatcatcgaggggctgcccccaggaatcccgttccgaaagccctgtaccttcggctcccagaacctggagaggattcttgctgtggctgacaagatcaagttcacagtcaccaggcctttccaaggactcatcccaaagcctgatgaagatgacgccaacagactcggggagaaggtgatcctgcgggagcaggtgaaggaactcttcaacgagaaatacggtgaggccctgggcctgaaccggccggtgctggtcccttataaactaatccgggacagcccagacgccgtggaggtcacgggtctgcctgatgacatccccttccggaaccccaacacgtacgacatccaccggctggagaagatcctgaaggcccgagagcatgtccgcatggtcatcattaaccagctccaaccctttgcagaaatctgcaatgatgccaaggtgccagccaaagacagcagcattcccaagcgcaagagaaagcgggtctcggaaggaaattccgtctcctcttcctcctcgtcttcctcttcctcgtcctctaacccggattcagtggcatcggccaaccagatctcactcgtgcaatggccaatgtacatggtggactatgccggcctgaacgtgcagctcccgggacctcttaattactagacctcagtactgaatcaggacctcactcagaaagactaaaggaaatgtaatttatgtacaaaatgtatattcggatatgtatcgatgccttttagtttttccaatgatttttacactatattcctgccaccaaggcctttttaaataagtaaaaaaagaaaaaaaaaaaaa

SEQ ID NO: 139046 - DNA, 3077 bp, Homo sapiens
  Payload ID: 7249
  Gene Symbol: GTF2IRD1
  Gene Name: GTF2I repeat domain containing 1
  Uniprot ID: Q9UHL9
  ENST ID: ENST00000424337
  CDS Start-End: 75-2909
gaggctgagtcctggccgcgggccggggccggggcgccgctggcaggagcgcttggggatcctccaaggcgaccatggccttgctgggtaagcgctgtgacgtccccaccaacggctgcggacccgaccgctggaactccgcgttcacccgcaaagacgagatcatcaccagcctcgtgtctgccttagactccatgtgctcagcgctgtccaaactgaacgccgaggtggcctgtgtcgccgtgcacgatgagagcgcctttgtggtgggcacagagaaggggagaatgttcctgaatgcccggaaggagctacagtcagacttcctcaggttctgccgagggcccccgtggaaggatccggaggcagagcaccccaagaaggtgcagcggggcgagggtggaggccgtagcctccctcggtcctccctggaacatggctcagatgtgtaccttctgcggaagatggtagaggaggtgtttgatgttctttatagcgaggccctgggaagggccagtgtggtgccactgccctatgagaggctgctcagggagccagggctgctggccgtgcaggggctgcccgaaggcctggccttccgaaggccagccgagtatgaccccaaggccctcatggccatcctggaacacagccaccgcatccgcttcaagctcaagaggccacttgaggatggcgggcgggactcgaaggccctggtggagctgaacggtgtctccctgattcccaaggggtcacgggactgtggcctgcatggccaggcccccaaggtgccaccccaggacctgcccccaaccgccacctcctcctccatggccagcttcctgtacagcacggcgctccccaaccacgccatccgagagctcaagcaggaagcaccttcctgcccccttgcccccagcgacctgggcctgagtcggcccatgccagagcccaaggccaccggtgcccaagacttctccgactgttgtggacagaagcccactgggcctggtgggcctctcatccagaacgtccatgcctccaagcgcattctcttctccatcgtccatgacaagtcagagaagtgggacgccttcataaaggaaaccgaggacatcaacacgctccgggagtgtgtgcagatcctgtttaacagcagatatgcggaagccctgggcctggaccacatggtccccgtgccctaccggaagattgcctgtgacccggaggctgtggagatcgtgggcatcccggacaagatccccttcaagcgcccctgcacttatggagtccccaagctgaagcggatcctggaggagcgccatagtatccacttcatcattaagaggatgtttgatgagcgaattttcacagggaacaagtttaccaaagacaccacgaagctggagccagccagcccgccagaggacacctctgcagaggtctctagggccaccgtccttgaccttgctgggaatgctcggtcagacaagggcagcatgtctgaagactgtgggccaggaacctccggggagctgggcgggctgaggccgatcaaaattgagccagaggatctggacatcattcaggtcaccgtcccagacccctcgccaacctctgaggaaatgacagactcgatgcctgggcacctgccatcggaggattctggttatgggatggagatgctgacagacaaaggtctgagtgaggacgcgcggcccgaggagaggcccgtggaggacagccacggtgacgtgatccggcccctgcggaagcaggtggagctgctcttcaacacacgatacgccaaggccattggcatctcggagcccgtcaaggtgccgtactccaagtttctgatgcacccggaggagctgtttgtggtgggactgcctgaaggcatctccctccgcaggcccaactgcttcgggatcgccaagctccggaagattctggaggccagcaacagcatccagtttgtcatcaagaggcccgagctgctcactgagggagtcaaagagcccatcatggatagtcaagagagggattccggggaccctctggtggacgagagcctgaagagacagggctttcaagaaaattatgacgcgaggctctcacggatcgacatcgccaacacactaagggagcaggtccaggaccttttcaataagaaatacggggaagccttgggcatcaagtacccggtccaggtcccctacaagcggatcaagagtaaccccggctccgtgatcatcgaggggctgcccccaggaatcccgttccgaaagccctgtaccttcggctcccagaacctggagaggattcttgctgtggctgacaagatcaagttcacagtcaccaggcctttccaaggactcatcccaaagcctgatgaagatgacgccaacagactcggggagaaggtgatcctgcgggagcaggtgaaggaactcttcaacgagaaatacggtgaggccctgggcctgaaccggccggtgctggtcccttataaactaatccgggacagcccagacgccgtggaggtcacgggtctgcctgatgacatccccttccggaaccccaacacgtacgacatccaccggctggagaagatcctgaaggcccgagagcatgtccgcatggtcatcattaaccagctccaaccctttgcagaaatctgcaatgatgccaaggtgccagccaaagacagcagcattcccaagcgcaagagaaagcgggtctcggaaggaaattccgtctcctcttcctcctcgtcttcctcttcctcgtcctctaacccggattcagtggcatcggccaaccagatctcactcgtgcaatggccaatgtacatggtggactatgccggcctgaacgtgcagctcccgggacctcttaattactagacctcagtactgaatcaggacctcactcagaaagactaaaggaaatgtaatttatgtacaaaatgtatattcggatatgtatcgatgccttttagtttttccaatgatttttacactatattcctgccaccaaggcctttttaaataagtaaaaaaagaaaaaaaaaa

SEQ ID NO: 139047 - DNA, 824 bp, Homo sapiens
  Payload ID: 7249
  Gene Symbol: GTF2IRD1
  Gene Name: GTF2I repeat domain containing 1
  ENST ID: ENST00000470715
  CDS Start-End: 1-824
tccggcccctgcggaagcaggtggagctgctcttcaacacacgatacggcccgagctgctcactgagggagtcaaagagcccatcatggatagtcaagagagggattccggggaccctctggtggacgagagcctgaagagacagggctttcaagaaaattatgacgcgaggctctcacggatcgacatcgccaacacactaagggagcaggtccaggaccttttcaataagaaatacggggaagccttgggcatcaagtacccggtccaggtcccctacaagcggatcaagagtaaccccggctccgtgatcatcgaggggctgcccccaggaatcccgttccgaaagccctgtaccttcggctcccagaacctggagaggattcttgctgtggctgacaagatcaagttcacagtcaccaggcctttccaaggactcatcccaaagcctgatgaagatgacgccaacagactcggggagaaggtgatcctgcgggagcaggtgaaggaactcttcaacgagaaatacggtgaggccctgggcctgaaccggccggtgctggtcccttataaactaatccgggacagcccagacgccgtggaggtcacgggtctgcctgatgacatccccttccggaaccccaacacgtacgacatccaccggctggagaagatcctgaaggcccgagagcatgtccgcatggtcatcattaaccagctccaaccctttgcagaaatctgcaatgatgccaaggtgccagccaaagacagcagcattcccaagcgcaagagaaagcgggtctcggaaggaaattccgtctcct

SEQ ID NO: 139048 - DNA, 5868 bp, Homo sapiens
  Payload ID: 7249
  Gene Symbol: GTF2IRD1
  Gene Name: GTF2I repeat domain containing 1
  ENST ID: ENST00000476977
  CDS Start-End: 1692-4574
aacatttagcagcaaactcaacatacattttggccaaacgcccaccggccagttgtttaaatcaatatttatccacagccaaaaagcagaggagagccagaactgaggccagagccgagctctgatgcatctctcatttctcgggatgtttctgtccctgtggttggacacctctggccttgtgaagtgtgatgcactgtcacatctcctgttctgtgtcattggccaatgatcatatatcatgacctgctggaaggcctgtctgtggctgggaccacacgccttgggccttatgcacactgggcactggtcgggatcctggggtgcaacagtggcaggcagacctggtttctgccctcaaagagcttacagatggcaggggcacccatggcggcagaagacaccccaggcctggtgccctttgtggtgccagccccatggtcctcctgcctgggccttccctaccccattgggtgcagaaactccctgtctgcaggtaggagacagagggtaggttttcaggctcccttgggaactgcagccctgctctctgccatcaacacccagcaggggccacacagagagcaccgggactgagcccatagaggggaaccgagaggcccctgcctctagtctctgccttctttgcttggattggtgcagggacagctgccttgagggcaggccctggcactggggcagcctgtgggtgccccctgggtcaagaaggagaggggcagggtagaaccaggagccaaaggaggctgatctttgcatctcatgggtgcccagctggacactgtcatacccaggaagcctgtgccatgccatggggacccacaactgggggccctggacttgagggggaggatgcagctctgtcccccaggaaccccattgcaacaggacacagtcctgccctggggagcccctgacctgagacaaagcagcctcggccctgctgtatctttccatacccctgatgccaagtctcctggctaggagggaaactgaggctggaaggcctcggcgggggtggcattggcctcgggagcatgtggcttgatgcagaaatgtgacggcagagctcagaggcatgcggaagggaggggaggacatcaccggctcctgacccagctgggcttcaggttgggggtacaggaggtgggcaagcaggttggacaattaaaagcttcgatgaggctgggtgagtggcttatgcctgtatttccaacactttgggaggctgaggtgggcagatcacctgaggccaggagttcaagaccagcctggccaacatggtgaaaccccatctctactaaaaatacaaaaattagccagacgtgtggtggcacctgtaatcccagctacccgggaggctgaggcaggagaatcactcgaacccaggaaggggaggttgcagtgagccaagattgcaccactgcactatagcctgggcaacagagtgagactctgtctcgaaataaaattaaatttaaaatttaaaaaagcttcaaggacaaccagcagatgatggcaggaccaggaagggtgcttcaggcagcgggaactgaacctgcacagactagggaagcatgaacatcggtacatctgggagtggcacagcttagagggcctggagcatggagtgtgagggggaactggagtgagggacaggagaccaggcgaccatggccttgctgggtaagcgctgtgacgtccccaccaacggctgcggacccgaccgctggaactccgcgttcacccgcaaagacgagatcatcaccagcctcgtgtctgccttagactccatgtgctcagcgctgtccaaactgaacgccgaggtggcctgtgtcgccgtgcacgatgagagcgcctttgtggtgggcacagagaaggggagaatgttcctgaatgcccggaaggagctacagtcagacttcctcaggttctgccgagggcccccgtggaaggatccggaggcagagcaccccaagaaggtgcagcggggcgagggtggaggccgtagcctccctcggtcctccctggaacatggctcagatgtgtaccttctgcggaagatggtagaggaggtgtttgatgttctttatagcgaggccctgggaagggccagtgtggtgccactgccctatgagaggctgctcagggagccagggctgctggccgtgcaggggctgcccgaaggcctggccttccgaaggccagccgagtatgaccccaaggccctcatggccatcctggaacacagccaccgcatccgcttcaagctcaagaggccacttgaggatggcgggcgggactcgaaggccctggtggagctgaacggtgtctccctgattcccaaggggtcacgggactgtggcctgcatggccaggcccccaaggtgccaccccaggacctgcccccaaccgccacctcctcctccatggccagcttcctgtacagcacggcgctccccaaccacgccatccgagagctcaagcaggaagcaccttcctgcccccttgcccccagcgacctgggcctgagtcggcccatgccagagcccaaggccaccggtgcccaagacttctccgactgttgtggacagaagcccactgggcctggtgggcctctcatccagaacgtccatgcctccaagcgcattctcttctccatcgtccatgacaagtcagagaagtgggacgccttcataaaggaaaccgaggacatcaacacgctccgggagtgtgtgcagatcctgtttaacagcagatatgcggaagccctgggcctggaccacatggtccccgtgccctaccggaagattgcctgtgacccggaggctgtggagatcgtgggcatcccggacaagatccccttcaagcgcccctgcacttatggagtccccaagctgaagcggatcctggaggagcgccatagtatccacttcatcattaagaggatgtttgatgagcgaattttcacagggaacaagtttaccaaagacaccacgaagctggagccagccagcccgccagaggacacctctgcagaggtctctagggccaccgtccttgaccttgctgggaatgctcggtcagacaagggcagcatgtctgaagactgtgggccaggaacctccggggagctgggcgggctgaggccgatcaaaattgagccagaggatctggacatcattcaggtcaccgtcccagacccctcgccaacctctgaggaaatgacagactcgatgcctgggcacctgccatcggaggattctggttatgggatggagatgctgacagacaaaggtctgagtgaggacgcgcggcccgaggagaggcccgtggaggacagccacggtgacgtgatccggcccctgcggaagcaggtggagctgctcttcaacacacgatacgccaaggccattggcatctcggagcccgtcaaggtgccgtactccaagtttctgatgcacccggaggagctgtttgtggtgggactgcctgaaggcatctccctccgcaggcccaactgcttcgggatcgccaagctccggaagattctggaggccagcaacagcatccagtttgtcatcaagaggcccgagctgctcactgagggagtcaaagagcccatcatggatagtcaagagagggattccggggaccctctggtggacgagagcctgaagagacagggctttcaagaaaattatgacgcgaggctctcacggatcgacatcgccaacacactaagggagcaggtccaggaccttttcaataagaaatacggggaagccttgggcatcaagtacccggtccaggtcccctacaagcggatcaagagtaaccccggctccgtgatcatcgaggggctgcccccaggaatcccgttccgaaagccctgtaccttcggctcccagaacctggagaggattcttgctgtggctgacaagatcaagttcacagtcaccaggcctttccaaggactcatcccaaagcctgatgaagatgacgccaacagactcggggagaaggtgatcctgcgggagcaggtgaaggaactcttcaacgagaaatacggtgaggccctgggcctgaaccggccggtgctggtcccttataaactaatccgggacagcccagacgccgtggaggtcacgggtctgcctgatgacatccccttccggaaccccaacacgtacgacatccaccggctggagaagatcctgaaggcccgagagcatgtccgcatggtcatcattaaccagctccaaccctttgcagaaatctgcaatgatgccaaggtgccagccaaagacagcagcattcccaagcgcaagagaaagcgggtctcggaaggaaattccgtctcctcttcctcctcgtcttcctcttcctcgtcctctaacccggattcagtggcatcggccaaccagatctcactcgtggtaaagttgcaccgatttggactccggcactcatctctgtggccctcacccctctgtctggcagggccgtctactctgggatgtgggcccaggggacggggaggcactgggctttgagtggggaccttccggcctcgggggttatagatgcatccacctgtctcacccaagaggtagcccatccttctcgtggggtactcacaggcactcaggcaggaattcacatcctcgctgggcagatgggccggctgaggtccacctgcccacacccttcagccgcaccagagctggagacatgaaaagacatggctggcgggtgcagtggctcacgcctgtaatcccagcactttggcaggtcaagtcgggtggatcacctgaggtcaggagtttgagaccaggctgaccaacacggggaaaccccatctctactaaaaatacaaaattagccgggcaaagtggggcatagtggctcatgcctgtaatcccagctacttggaaggctgagataggagaatcgcttgaacctgggaggcagaggttgcaatgagccgaggtcgcgccattgcactgcagcctgggcaacaagagtgaaacactgtctcagaaaaaaaaattagccaggcatggtggcacgtgcctgtggtcgcagctacttgggaggctggggcaggaggatcatttgagcccaaggggattgaggctgcagtgagccaagatcgtcccattgcactccagcctgggcaagagaacgagactccatctcaaaaataaataaataggctgggtgtggtggctcacgcctgtaatcctagcactttgggaggccgaggcaggcggatcacttgaggctcaggagttcaagaccagcctggccaacatggcaaaaccccgtctctactaaaaatagaaaaattagccgggcatggtggcgggcgcctataatcccagctactcgggaggctgaggcaggagactcgcttgaacccgcggggccaaggttgcagtgagccgagattgcatcactgcactccagcctgggcagaagagtgaaactccatctcaaaaaaataaaaaatataaataaatagcctctgagaaagctcttccaaaagcagaactaagcattttgggtttgttccgcatcacctggagtcctaatccagtccctttgtccctctctctagcaatggccaatgtacatggtggactatgccggcctgaacgtgcagctcccgggacctcttaattactagacctcagtactgaatcaggacctcactcagaaagactaaaggaaatgtaatttatgtacaaaatgtatattcggatatgtatcgatgccttttagtttttccaatgatttttacactatattcctgccaccaaggcctttttaaataagtaaaaaaag

SEQ ID NO: 139049 - DNA, 3558 bp, Homo sapiens
  Payload ID: 7250
  Gene Symbol: GTF2IRD2
  Gene Name: GTF2I repeat domain containing 2
  ENST ID: ENST00000451013
  CDS Start-End: 191-3040
gggaaagaaagaaagagaaaaaggagggcgagtggcgagcaggggcttcggccgccacccacacgccccgaagcgtgctcgtcccccgcgcggggctctcggccgccgccctcggccatcggctgctccccggtggcccaggcctcggactccgcggccggcccggcgcggcccagcgccctcagggatcatggcccaggtagcagtgtccaccctgcctgttgaagaagagtcctcctcagagaccaggatggtggtgacattcctcgtgtctgccctcgaatccatgtgtaaagaactggccaagtccaaggcagaagtggcctgcatcgcagtgtacgaaacagacgtgtttgtcgtcggaaccgagagaggatgcgcttttgttaatgccaggacggattttcagaaagattttgcaaaatactgcgttgcagagggactgtgtgaggtgaaacctccctgccctgtgaacgggatgcaggtccactcaggcgaaacggaaatactcaggaaggcagtggaggactatttctgcttttgttatggtaaagccttagggacaacagtgatggtgcctgttccctatgagaagatgctgcgagaccagtcggctgtggtagtgcaggggcttccggaaggcgttgcctttcaacaccctgagaattacgaccttgcaaccctgaaatggattttggagaacaaagcagggatttcattcatcataaatagacccttcctaggaccagagagtcagctgggtggccctgggatggtaacagatgcggagagatccatagtatcaccaagtgaaagctgcggccccatcaatgtgaaaactgaacccatggaagattctggcatttcactgaaagcagaagctgtctcagtcaagaaagaatcagaagatcctaattactatcaatataatatgcaaggaagccacccttcttccacaagcaatgaagtaatagaaatggaattaccaatggaagattccactccgctggtcccttcagaagaaccaaatgaggaccctgaagccgaggtgaaaatcgaaggaaacacaaattcatccagtgttacaaattctgcagcaggtgttgaagatcttaacatcgttcaagtgactgttccagataatgagaaggaaagattatcaagcattgaaaagattaaacagctaagagaacaagttaatgacctctttagccgaaaatttggtgaagcaattggcgtggatttccctgtgaaagttccctacaggaagatcacattcaaccctggctgtgtggtgattgatggcatgcccccgggggtggtattcaaggcccccggctatctggaaatcagttccatgaggaggatcttggaggcagctgagtttatcaaattcacagtcatcaggccgcttccagggcttgagctcagtaatgtgggaaaacgcaagatagaccaggagggccgtgtgtttcaagaaaagtgggagagagcgtatttcttcgtggaagtacagaatattccaacatgtctcatatgcaaacaaagcatgtctgtgtccaaagaatataacctaagacgccactatcaaaccaatcacagcaagcattatgaccagtatatggaaagaatgcgtgacgagaagcttcacgagctgaaaaaagggctcaggaagtatctcttaggctcatcagacaccgagtgtcccgagcaaaaacaagtgtttgcaaacccaagtccaacccagaaatcccccgtgcagcctgtagaggacctagctgggaacttatgggagaagttacgtgaaaaaatcaggtcttttgtggcatattctatcgcaatcgatgagatcacggatataaataataccacccagttggccatattcatccgtggtgtcgatgagaatttcgatgtgtccgaagaacttctggacacggtgcccatgacgggtacaaaatctggcaacgagatcttttcgcgtgttgagaaaagcctgaaaaacttctgtatcgactggtcgaaattagtaagcgtggcctccactggcaccccagcgatggtggatgccaataacgggcttgtcacaaaactgaagtccagggtggcgacgttctgcaagggtgcggaactgaagtccatctgttgtataattcatccggaatcactctgtgctcagaagttgaagatggaccacgtcatggacgtggtagtgaagtccgtgaactggatatgctcccggggactgaaccacagtgagttcacaaccttgctctatgagctggacagccagtatggtagcctcctgtactacacggagattaagtggctcagtcgcgggctcgtgctaaagagatttttcgaatccttggaagaaatcgactccttcatgtcatccagagggaaacccctgcctcaactgagctccatagattggatccgagacctggccttcttggttgacatgacgatgcatctgaacgctttgaacatctctctccaaggacactcccaaatcgtcacgcagatgtatgacctgatccgggcgttcctagcaaaactgtgcctctgggagactcatttgacgaggaataatctggcccactttcccaccctgaaattggcttccagaaatgaaagcgatggcctgaactacattcccaaaatcgcggaactccagaccgaattccagaaaaggctgtctgatttcaaactctacgaaagcgaactgactctgttcagctccccgttctccacgaagatcgacagtgtgcacgaggagctccagatggaggttatcgacctgcaatgcaacacggtcctgaagacgaaatacgacaaggtgggaataccagaattctacaagtacctctggggtagctacccgaaatacaagcaccattgcgcaaagattctttccatgttcgggagcacctacatctgcgaacagctgttctccattatgaaactgagcaaaacaaaatactgctcccagttaaaggattcccagtgggattctgtactccacatcgcaacgtgatggagagaaaactcctggcagggccctatggtgggaaaggctggagtcttctagtcccaagggattgggagatgacaaaatgaatttttttttcttttttgagatggagtcttgctctgtcgcccaggttggagtgcagtggcgtgatctcggcttactgcaacttccagctcctgggttcgaacgattctcctgcctcagcctcccgagcagctgggactacaggcgtgcgccaccatgcctggctaatttttgtattagtagagatgaggtttcaccatgttggccaggctggtctccaactcctgacctcaggtgatccacctgcctcgacctcacaaagtgctgggattacaggcatgaaccactgtgcccagctgacaaaatgagttcttaaacttttttttttttcagttttttttccactttgaatcagaaatataatctgcagtatcatacttgtttatattacattgtatgcctcactattcattaaaaatcaagaaagttttattgta

SEQ ID NO: 139050 - DNA, 578 bp, Homo sapiens
  Payload ID: 7250
  Gene Symbol: GTF2IRD2
  Gene Name: GTF2I repeat domain containing 2
  Uniprot ID: Q86UP8
  ENST ID: ENST00000614386
  CDS Start-End: 169-495
ggagggcgagtggcgagcaggggcttcggccgccacccacacgccccgaagcgtgctcgtcccccgcgcggggctctcggccgccgccctcggccatcggctgctccccggtggcccaggcctcggactccgcggccggcccggcgcggcccagcgccctcagggatcatggcccaggtagcagtgtccaccctgcctgttgaagaagagtcctcctcagagaccaggatggtggtgacattcctcgtgtctgccctcgaatccatgtgtaaagaactggccaagtccaaggcagaagtggcctgcatcgcagtgtacgaaacagacgtgtttgtcgtcggaaccgagagaggatgcgcttttgttaatgccaggacggattttcagaaagattttgcaaaatactgtaggtgttttaattttatcctttgtattcccaatctcaaaaggatcgcaggcaagacttccacagtattttcttctaagctatcataagcattctcctagaaacgatcctaacacatcttcttggattcagcttaccaaataaacactgcttaacactgcagagtccaaga

SEQ ID NO: 139051 - DNA, 1910 bp, Homo sapiens
  Payload ID: 7250
  Gene Symbol: GTF2IRD2
  Gene Name: GTF2I repeat domain containing 2
  ENST ID: ENST00000625377
  CDS Start-End: 180-1673
aaagagaaaaaggagggcgagtggcgagcaggggcttcggccgccacccacacgccccgaagcgtgctcgtcccccgcgcggggctctcggccgccgccctcggccatcggctgctccccggtggcccaggcctcggactccgcggccggcccggcgcggcccagcgccctcagggatcatggcccaggtagcagtgtccaccctgcctgttgaagaagagtcctcctcagagaccaggatggtggtgacattcctcgtgtctgccctcgaatccatgtgtaaagaactggccaagtccaaggcagaagtggcctgcatcgcagtgtacgaaacagacgtgtttgtcgtcggaaccgagagaggatgcgcttttgttaatgccaggacggattttcagaaagattttgcaaaatactgcgttgcagagggactgtgtgaggtgaaacctccctgccctgtgaacgggatgcaggtccactcaggcgaaacggaaatactcaggaaggcagtggaggactatttctgcttttgttatggtaaagccttagggacaacagtgatggtgcctgttccctatgagaagatgctgcgagaccagtcggctgtggtagtgcaggggcttccggaaggcgttgcctttcaacaccctgagaattacgaccttgcaaccctgaaatggattttggagaacaaagcagggatttcattcatcataaatagacccttcctaggaccagagagtcagctgggtggccctgggatggtaacagatgcggagagatccatagtatcaccaagtgaaagctgcggccccatcaatgtgaaaactgaacccatggaagattctggcatttcactgaaagcagaagctgtctcagtcaagaaagaatcagaagatcctaattactatcaatataatatgcaaggaagccacccttcttccacaagcaatgaagtaatagaaatggaattaccaatggaagattccactccgctggtcccttcagaagaaccaaatgaggaccctgaagccgaggtgaaaatcgaaggaaacacaaattcatccagtgttacaaattctgcagcaggtgttgaagatcttaacatcgttcaagtgactgttccagataatgagaaggaaagattatcaagcattgaaaagattaaacagctaagagaacaagttaatgacctctttagccgaaaatttggtgaagcaattggcgtggatttccctgtgaaagttccctacaggaagatcacattcaaccctggctgtgtggtgattgatggcatgcccccgggggtggtattcaaggcccccggctatctggaaatcagttccatgaggaggatcttggaggcagctgagtttatcaaattcacagtcatcaggccgcttccagggcttgagctcagtaatggacttttggaggccaaggcaagaggattgcttgaggccaggagtttgagaccagcctgggcaacacaagaccccatctctacaaaaaatttaaaaattagctggaaacagtggctcacacctgtagccccagctacttggcaggctaaagcaggaggatcacttaaactcaggagtttgagacagcagagaaccataattgcaatactacactccagcctgggtgacagaacaagaccctgtctctaaaaagaaaatgcaaacatattatcaaataattcctgtttaaactggacataacaagcacagctacatgctgaacctcatcaaaggtgtcttttgtttggctcatgtacttttgaaaataaggatgaggcctggcacggtggctcctgtaatcccagcactttgggaggccaaggcgggtggatcgcttgagcctggggtttcagaccagcctgggcaacaaggtaagactccagctct

SEQ ID NO: 139052 - DNA, 3485 bp, Homo sapiens
  Payload ID: 7251
  Gene Symbol: GTF2IRD2B
  Gene Name: GTF2I repeat domain containing 2B
  Uniprot ID: Q6EKJ0
  ENST ID: ENST00000418185
  CDS Start-End: 160-840
gtggcgagcaggggcctcggccgccacccacacgccccgaagcgtgctcgtcccccgcgcggggctcccggccgccgccctcggccatcggctgctccccggtggcccaggcctcggactccgcggccggcccggcgcggcccagcgccctcagggatcatggcccaggtagcagtgtccaccctgcctgttgaagaagagtcctcctcagagaccaggatggtggtgacattcctcgtgtctgccctcgaatccatgtgtaaagaactggccaagtccaaggcagaagtggcctgcatcgcagtgtacgaaacagacgtgtttgtcgtcggaaccgagagaggatgcgcttttgttaatgccaggacggattttcagaaagattttgcaaaatactgcgttgcagagggactgtgtgaggtgaaacctccctgccctgtgaacgggatgcaggtccactcgggcgaaacggaaatactcaggaaggcagtggaggactatttctgcttttgttatggtaaagccttagggacaacagtgatggtgcctgttccctatgagaagatgctgcgagaccagtcggctgtggtagtgcaggggcttccggaaggcgttgcctttcaacaccctgagaattacgaccttgcaaccctgaaatggattttggagaacaaagcagggatttcattcatcataaatagacccttcctaggaccagagagtcagctgggtggccctgggatggtaacagatgcggagagatccatagtatcaccaagtgaaaggcatttcactgaaagcagaagctgtctcagtcaagaaagaatcagaagatcctaattactatcaatataatatgcaaggaagccacccttcttccacaagcaatgaagtaatagaaatggaattaccaatggaagattccactccgctggtcccttcagaagaaccaaatgaggaccctgaagccgaggtgaaaatcgaaggaaacacaaattcatccagtgttacaaattctgcagcaggtgttgaagatcttaacatcgttcaagtgactgttccagataatgagaaggaaagattatcaagcattgaaaagattaaacagctaagagaacaagttaatgacctctttagccgaaaatttggtgaagcaattggcgtggatttccctgtgaaagttccctacaggaagatcacattcaaccctggctgtgtggtgattgatggcatgcccccgggggtggtattcaaggcccccggctatctggaaatcagttccatgaggaggatcttggaggcagctgagtttatcaaattcacagtcatcaggccgcttccagggcttgagctcagtaatgtgggaaaacgcaagatagaccaggagggccgtgtgtttcaagaaaagtgggagagagcgtatttcttcgtggaagtacagaatattccaacatgtctcatatgcaaacaaagcatgtctgtgtccaaagaatataacctaagacgccactatcaaaccaatcacagcaagcattatgaccagtatacggaaagaatgcgtgacgagaagcttcacgagctgaaaaaagggctcaggaagtatctcttaggctcgtcagacaccgagtgtcccgagcaaaaacaagtgtttgcaaacccaagtccaacccagaaatcccccgtgcagcctgtagaggacctagctgggaacttatgggagaagttacgtgaaaaaatcaggtcttttgtggcatattctatcgcaatcgatgagatcacggatataaataataccacccagttggccatattcatccgtggtgtcgatgagaatttcgatgtgtccgaagaacttctggacacggtgcccatgacgggtacaaaatctggcaacgagatctttttgcgtgttgagaagagcctgaaaaagttctgtatcaactggtcgagattagtaagcgtggcctccactggcaccccagcgatggtggatgccaataacgggcttgtcacaaaactgaagtccagggtggcgacgttctgcaagggtgcggaactgaagtccatctgttgtataattcatccggaatcactctgtgctcagaagttgaagatggaccacgtcatggacgtggtagtgaagtccgtgaactggatatgctcccggggactgaaccacagcgagttcacaaccttgctctatgagctggacagccagtatggtagcctcctgtactacacggagattaagtggctcagtcgcgggctcgtgctaaagagatttttcgaatccttggaagaaatcgactccttcatgtcatccagagggaaacccctgcctcaactgagctccatagattggatccgagacctggccttcttggttgacatgacgatgcatctgaacgctttgaacatctctctccaaggacactcccaaatcgtcacgcagatgtatgacctgatccgggcgttcctagcaaaactgtgcctctgggagactcatttgacgaggaataatctggcccactttcccaccctgaaattggtttccagaaatgaaagcgatggcctgaactacattcccaaaatcgcggaactcaagaccgaattccagaaaaggctgtctgatttcaaactctacgaaagcgaactgactctgttcagctccccgttctccacgaagatcgacagtgtgcacgaggagctccagatggaggttatcgacctgcaatgcaacacggtcctgaagacgaaatacgacaaggtgggaataccagaattctacaagtacctctggggtagctacccgaaatacaagcaccattgcgcaaagattctttccatgttcgggagcacctacatctgcgaacagctgttctccattatgaaactgagcaaaacaaaatactgctcccagttaaaggattcccagtgggattctgtactccacatcgcaacgtgatggagagaaaactcctggcagggccctatggtgggaaaggctggagtcttctagtcccaagggattgggagatgacaaaatgaattttttttttcttttttgagatggagtcttgctctgtcgcccaggttggagtgcagtggcgtgatctcggcttactgcaacttccagctcctgggttcgaacgattctcctgcctcagcctcccgagcagctgggactacaggcatgcgccaccatgcccggctaatttttgtattagtagagatgaggtttcaccatgttggccaggctggtctccaactcctgacctcaggtgatccacctgcctcgacctcacaaagtgctgggattacaggcatgaaccactgtgcccagctgacaaaatgagttcttaaactttttttttttttcagttttttttccactttgaatcagaaatataatctgcagtatcatacttgtttatattacattgtatgcctcactattcattaaaaatcaagaaagttttattgta

SEQ ID NO: 139053 - DNA, 1932 bp, Homo sapiens
  Payload ID: 7251
  Gene Symbol: GTF2IRD2B
  Gene Name: GTF2I repeat domain containing 2B
  ENST ID: ENST00000619142
  CDS Start-End: 180-1493
aaagagaaaaaggagggcgagtggcgagcaggggcctcggccgccacccacacgccccgaagcgtgctcgtcccccgcgcggggctcccggccgccgccctcggccatcggctgctccccggtggcccaggcctcggactccgcggccggcccggcgcggcccagcgccctcagggatcatggcccaggtagcagtgtccaccctgcctgttgaagaagagtcctcctcagagaccaggatggtggtgacattcctcgtgtctgccctcgaatccatgtgtaaagaactggccaagtccaaggcagaagtggcctgcatcgcagtgtacgaaacagacgtgtttgtcgtcggaaccgagagaggatgcgcttttgttaatgccaggacggattttcagaaagattttgcaaaatactgcgttgcagagggactgtgtgaggtgaaacctccctgccctgtgaacgggatgcaggtccactcgggcgaaacggaaatactcaggaaggcagtggaggactatttctgcttttgttatggtaaagccttagggacaacagtgatggtgcctgttccctatgagaagatgctgcgagaccagtcggctgtggtagtgcaggggcttccggaaggcgttgcctttcaacaccctgagaattacgaccttgcaaccctgaaatggattttggagaacaaagcagggatttcattcatcataaatagacccttcctaggaccagagagtcagctgggtggccctgggatggtaacagatgcggagagatccatagtatcaccaagtgaaagctgcggccccatcaatgtgaaaactgaacccatggaagattctggcatttcactgaaagcagaagctgtctcagtcaagaaagaatcagaagatcctaattactatcaatataatatgcaaggaagccacccttcttccacaagcaatgaagtaatagaaatggaattaccaatggaagattccactccgctggtcccttcagaagaaccaaatgaggaccctgaagccgaggtgaaaatcgaaggaaacacaaattcatccagtgttacaaattctgcagcaggtgttgaagatcttaacatcgttcaagtgactgttccagataatgagaaggaaagattatcaagcattgaaaagattaaacagctaagagaacaagttaatgacctctttagccgaaaatttggtgaagcaattggcgtggatttccctgtgaaagttccctacaggaagatcacattcaaccctggctgtgtggtgattgatggcatgcccccgggggtggtattcaaggcccccggctatctggaaatcagttccatgaggaggatcttggaggcagctgagtttatcaaattcacagtcatcaggccgcttccagggcttgagctcagtaatggacttttggaggccaaggcaagaggattgcttgaggccaggagtttgagaccagcctgggcaacatagcaagaccccatctctacaaaaaatttaaaaattagctggaaacagtggctcacacctgtagccccagctacttggcaggctaaagcaggaggatcacttaaactcaggagtttgagacagcagagaaccataattgcaatactacactccagcctgggtgacagaacaagaccctgtctctaaaaagaaaatgcaaacatattatcaaataattcctgtttaaactggacataacaagcacagctacatgctgaacctcatcaaaggtgtcttttgtttggctcatgtacttttgaaaataaggatgaggcctggcacggtggctcctgtaatcccagcactttgggaggccaaggcgggtggatcgcttgagcctggggtttcagaccagcctgggcaacaaggtaagactccagctctacaaaaaaaagaaaaagaa

SEQ ID NO: 139054 - DNA, 3560 bp, Homo sapiens
  Payload ID: 7251
  Gene Symbol: GTF2IRD2B
  Gene Name: GTF2I repeat domain containing 2B
  Uniprot ID: Q6EKJ0
  ENST ID: ENST00000472837
  CDS Start-End: 191-3040
gggaaagaaagaaagagaaaaaggagggcgagtggcgagcaggggcctcggccgccacccacacgccccgaagcgtgctcgtcccccgcgcggggctcccggccgccgccctcggccatcggctgctccccggtggcccaggcctcggactccgcggccggcccggcgcggcccagcgccctcagggatcatggcccaggtagcagtgtccaccctgcctgttgaagaagagtcctcctcagagaccaggatggtggtgacattcctcgtgtctgccctcgaatccatgtgtaaagaactggccaagtccaaggcagaagtggcctgcatcgcagtgtacgaaacagacgtgtttgtcgtcggaaccgagagaggatgcgcttttgttaatgccaggacggattttcagaaagattttgcaaaatactgcgttgcagagggactgtgtgaggtgaaacctccctgccctgtgaacgggatgcaggtccactcgggcgaaacggaaatactcaggaaggcagtggaggactatttctgcttttgttatggtaaagccttagggacaacagtgatggtgcctgttccctatgagaagatgctgcgagaccagtcggctgtggtagtgcaggggcttccggaaggcgttgcctttcaacaccctgagaattacgaccttgcaaccctgaaatggattttggagaacaaagcagggatttcattcatcataaatagacccttcctaggaccagagagtcagctgggtggccctgggatggtaacagatgcggagagatccatagtatcaccaagtgaaagctgcggccccatcaatgtgaaaactgaacccatggaagattctggcatttcactgaaagcagaagctgtctcagtcaagaaagaatcagaagatcctaattactatcaatataatatgcaaggaagccacccttcttccacaagcaatgaagtaatagaaatggaattaccaatggaagattccactccgctggtcccttcagaagaaccaaatgaggaccctgaagccgaggtgaaaatcgaaggaaacacaaattcatccagtgttacaaattctgcagcaggtgttgaagatcttaacatcgttcaagtgactgttccagataatgagaaggaaagattatcaagcattgaaaagattaaacagctaagagaacaagttaatgacctctttagccgaaaatttggtgaagcaattggcgtggatttccctgtgaaagttccctacaggaagatcacattcaaccctggctgtgtggtgattgatggcatgcccccgggggtggtattcaaggcccccggctatctggaaatcagttccatgaggaggatcttggaggcagctgagtttatcaaattcacagtcatcaggccgcttccagggcttgagctcagtaatgtgggaaaacgcaagatagaccaggagggccgtgtgtttcaagaaaagtgggagagagcgtatttcttcgtggaagtacagaatattccaacatgtctcatatgcaaacaaagcatgtctgtgtccaaagaatataacctaagacgccactatcaaaccaatcacagcaagcattatgaccagtatacggaaagaatgcgtgacgagaagcttcacgagctgaaaaaagggctcaggaagtatctcttaggctcgtcagacaccgagtgtcccgagcaaaaacaagtgtttgcaaacccaagtccaacccagaaatcccccgtgcagcctgtagaggacctagctgggaacttatgggagaagttacgtgaaaaaatcaggtcttttgtggcatattctatcgcaatcgatgagatcacggatataaataataccacccagttggccatattcatccgtggtgtcgatgagaatttcgatgtgtccgaagaacttctggacacggtgcccatgacgggtacaaaatctggcaacgagatctttttgcgtgttgagaagagcctgaaaaagttctgtatcaactggtcgagattagtaagcgtggcctccactggcaccccagcgatggtggatgccaataacgggcttgtcacaaaactgaagtccagggtggcgacgttctgcaagggtgcggaactgaagtccatctgttgtataattcatccggaatcactctgtgctcagaagttgaagatggaccacgtcatggacgtggtagtgaagtccgtgaactggatatgctcccggggactgaaccacagcgagttcacaaccttgctctatgagctggacagccagtatggtagcctcctgtactacacggagattaagtggctcagtcgcgggctcgtgctaaagagatttttcgaatccttggaagaaatcgactccttcatgtcatccagagggaaacccctgcctcaactgagctccatagattggatccgagacctggccttcttggttgacatgacgatgcatctgaacgctttgaacatctctctccaaggacactcccaaatcgtcacgcagatgtatgacctgatccgggcgttcctagcaaaactgtgcctctgggagactcatttgacgaggaataatctggcccactttcccaccctgaaattggtttccagaaatgaaagcgatggcctgaactacattcccaaaatcgcggaactcaagaccgaattccagaaaaggctgtctgatttcaaactctacgaaagcgaactgactctgttcagctccccgttctccacgaagatcgacagtgtgcacgaggagctccagatggaggttatcgacctgcaatgcaacacggtcctgaagacgaaatacgacaaggtgggaataccagaattctacaagtacctctggggtagctacccgaaatacaagcaccattgcgcaaagattctttccatgttcgggagcacctacatctgcgaacagctgttctccattatgaaactgagcaaaacaaaatactgctcccagttaaaggattcccagtgggattctgtactccacatcgcaacgtgatggagagaaaactcctggcagggccctatggtgggaaaggctggagtcttctagtcccaagggattgggagatgacaaaatgaattttttttttcttttttgagatggagtcttgctctgtcgcccaggttggagtgcagtggcgtgatctcggcttactgcaacttccagctcctgggttcgaacgattctcctgcctcagcctcccgagcagctgggactacaggcatgcgccaccatgcccggctaatttttgtattagtagagatgaggtttcaccatgttggccaggctggtctccaactcctgacctcaggtgatccacctgcctcgacctcacaaagtgctgggattacaggcatgaaccactgtgcccagctgacaaaatgagttcttaaactttttttttttttcagttttttttccactttgaatcagaaatataatctgcagtatcatacttgtttatattacattgtatgcctcactattcattaaaaatcaagaaagttttattgta

SEQ ID NO: 139055 - DNA, 573 bp, Homo sapiens
  Payload ID: 7251
  Gene Symbol: GTF2IRD2B
  Gene Name: GTF2I repeat domain containing 2B
  ENST ID: ENST00000614064
  CDS Start-End: 172-498
aaaggagggcgagtggcgagcaggggcctcggccgccacccacacgccccgaagcgtgctcgtcccccgcgcggggctcccggccgccgccctcggccatcggctgctccccggtggcccaggcctcggactccgcggccggcccggcgcggcccagcgccctcagggatcatggcccaggtagcagtgtccaccctgcctgttgaagaagagtcctcctcagagaccaggatggtggtgacattcctcgtgtctgccctcgaatccatgtgtaaagaactggccaagtccaaggcagaagtggcctgcatcgcagtgtacgaaacagacgtgtttgtcgtcggaaccgagagaggatgcgcttttgttaatgccaggacggattttcagaaagattttgcaaaatactgtaggtgttttaattttatcctttgtattcccaatctcaaaaggatcgcaggcaagacttccacagtattttcttctaagctatcataagcattctcctagaaacgatcctaacacatcttcttggattcagcttaccaaataaatactgcctaacactgcaga

SEQ ID NO: 139056 - DNA, 1910 bp, Homo sapiens
  Payload ID: 7251
  Gene Symbol: GTF2IRD2B
  Gene Name: GTF2I repeat domain containing 2B
  ENST ID: ENST00000629105
  CDS Start-End: 180-1673
aaagagaaaaaggagggcgagtggcgagcaggggcctcggccgccacccacacgccccgaagcgtgctcgtcccccgcgcggggctcccggccgccgccctcggccatcggctgctccccggtggcccaggcctcggactccgcggccggcccggcgcggcccagcgccctcagggatcatggcccaggtagcagtgtccaccctgcctgttgaagaagagtcctcctcagagaccaggatggtggtgacattcctcgtgtctgccctcgaatccatgtgtaaagaactggccaagtccaaggcagaagtggcctgcatcgcagtgtacgaaacagacgtgtttgtcgtcggaaccgagagaggatgcgcttttgttaatgccaggacggattttcagaaagattttgcaaaatactgcgttgcagagggactgtgtgaggtgaaacctccctgccctgtgaacgggatgcaggtccactcgggcgaaacggaaatactcaggaaggcagtggaggactatttctgcttttgttatggtaaagccttagggacaacagtgatggtgcctgttccctatgagaagatgctgcgagaccagtcggctgtggtagtgcaggggcttccggaaggcgttgcctttcaacaccctgagaattacgaccttgcaaccctgaaatggattttggagaacaaagcagggatttcattcatcataaatagacccttcctaggaccagagagtcagctgggtggccctgggatggtaacagatgcggagagatccatagtatcaccaagtgaaagctgcggccccatcaatgtgaaaactgaacccatggaagattctggcatttcactgaaagcagaagctgtctcagtcaagaaagaatcagaagatcctaattactatcaatataatatgcaaggaagccacccttcttccacaagcaatgaagtaatagaaatggaattaccaatggaagattccactccgctggtcccttcagaagaaccaaatgaggaccctgaagccgaggtgaaaatcgaaggaaacacaaattcatccagtgttacaaattctgcagcaggtgttgaagatcttaacatcgttcaagtgactgttccagataatgagaaggaaagattatcaagcattgaaaagattaaacagctaagagaacaagttaatgacctctttagccgaaaatttggtgaagcaattggcgtggatttccctgtgaaagttccctacaggaagatcacattcaaccctggctgtgtggtgattgatggcatgcccccgggggtggtattcaaggcccccggctatctggaaatcagttccatgaggaggatcttggaggcagctgagtttatcaaattcacagtcatcaggccgcttccagggcttgagctcagtaatggacttttggaggccaaggcaagaggattgcttgaggccaggagtttgagaccagcctgggcaacacaagaccccatctctacaaaaaatttaaaaattagctggaaacagtggctcacacctgtagccccagctacttggcaggctaaagcaggaggatcacttaaactcaggagtttgagacagcagagaaccataattgcaatactacactccagcctgggtgacagaacaagaccctgtctctaaaaagaaaatgcaaacatattatcaaataattcctgtttaaactggacataacaagcacagctacatgctgaacctcatcaaaggtgtcttttgtttggctcatgtacttttgaaaataaggatgaggcctggcacggtggctcctgtaatcccagcactttgggaggccaaggcgggtggatcgcttgagcctggggtttcagaccagcctgggcaacaaggtaagactccagctct

SEQ ID NO: 139057 - DNA, 5126 bp, Homo sapiens
  Payload ID: 7252
  Gene Symbol: GTPBP1
  Gene Name: GTP binding protein 1
  Uniprot ID: O00178
  ENST ID: ENST00000216044
  CDS Start-End: 234-2243
ttgggatttgggcctcattaattattcattaggtacttgaaagctctgcagggattggtggctgagaggcctagtcgactgtttcttagctagaggtacgtgtcacccagtacgcggctggagttttgcataaattattccgataaggagcggggcggggctctgtgcatagattagtcaaatgagcctgggagggagggaagccggctacgaattagcctaagttattaaagatggcgacggagcgcagtcgctccgcgatggactcgccggtcccggcctctatgttcgcccccgagcccagctccccgggggcggccagggccgcggcggccgccgcccgactccacggcggctttgactcggactgcagcgaggacggcgaggcgctcaacggcgagccagagctggacctcaccagcaagctggttctagtgagccctacatcagagcagtatgacagcctacttcggcagatgtgggagaggatggacgagggatgcggagagaccatatatgtcattgggcagggatcagatgggactgagtatgggctgagtgaagctgacatggaggcctcctacgccacagtgaagagcatggcggaacagatagaggccgatgtcatccttctgcgggaacggcaagaagctgggggccgcgtgcgtgattacctggtccggaaacgagtaggagacaatgacttcctggaggtcagggtagcagtggtgggcaacgtggatgctggcaaaagcacgcttctgggggtcctgacacatggggagctggacaatggccgaggctttgcccgccagaaactcttccgccacaaacatgaaattgaatctggtcgcaccagcagtgtgggcaacgacattctgggctttgacagtgaaggcaatgtagtgaacaagcctgacagccacggcggcagcctggagtggaccaagatctgtgagaagtccacgaaagtcattaccttcatcgacttggctggtcatgagaagtacctgaaaaccactgtcttcggcatgacaggccatctgcctgacttctgcatgctcatggtgggcagcaatgctggcatcgtggggatgaccaaagaacacctgggcttggcactggcactcaatgtacctgtctttgtggtagtcaccaagattgacatgtgtcctgccaacatcctgcaagaaaccctgaagctgttacagcgcctgctgaagtcaccaggctgccggaagatccccgtgctggtgcagagcaaagatgatgtgattgtcacagcctccaacttcagctctgaaaggatgtgcccgatattccagatctccaacgttacaggcgagaacctagatctgctgaagatgttcctcaacctcctctccccccgcaccagctacagggaggaggagcctgctgagtttcagattgatgacacctactccgtcccgggtgtggggacagtggtttcggggacaacactgagaggcctgatcaagctgaatgacacgctgctgctgggcccagaccccttgggtaacttcctgtccattgctgtcaaatccatccatcgcaagcgcatgcctgtcaaggaggtgcggggtggccagacagcatcctttgcgctgaagaagatcaagcgctcgtccatccggaagggcatggtgatggtttccccacgtttgaatccccaagcctcctgggagtttgaggccgagattctcgtcctccaccaccccaccacaattagcccgcgctaccaggccatggtgcactgtgggagcatcaggcagacagccaccattctgagcatggacaaggactgtctgcgcactggggacaaggccactgtacacttccgcttcatcaagacccctgagtacctgcacatagaccagcggctggtgttccgggaaggccgcaccaaggctgtcggcaccatcaccaagctcctccagaccaccaacaactccccaatgaactccaagccgcagcagattaaaatgcagtcgacgaaaaagggccccctgacgaaacgagacgaggggggcccgtctggtgggccagcagtaggagcacccccacctggagatgaagcctcctctgtaggggcagggcaaccagctgcgtccagcaatctccagcctcagcctaagcccagcagtggaggccggcgacgagggggccagcgccacaaggtgaagtcccagggggcctgtgtgactcctgccagcggctgctgaaccttcccctggcccaccctcaccacccaaggggtcatcatctctggccaccactccaccagatgggcagagcagctatgaccgccacccagccctcccgctcaggccacagccggagcctccgcattgcccccacccccattttccaggggggttgtaatttataagctgacgaaggtagccagacttccggaggactgaccatctctcactgtcctccccaccttcttcctcactcacacattttttgtacatctgggcccttagtttttattctgtttattatatgtctctgtctctctctattgtgtgtgtgtgtgtgtgtgtgtgtgtgtgtgtgtgtgtggtgcaggagtgccacccccagggccctgtcaacctctcttttctcctccatggctgtctgcctgcgtatctgtctctgagaatcctcggggcggtcaggggatgtcaggaggggaaggagccgccctccctatcttgctgctcctcttggcactcaggggcaccttccatggagccagaccgggtggaggggcttctgggatttggtgtctgctgctgccagagcaggaacccccagtctaggacttgggcattttaacagggagaaagtagtggcttcccttttctctctctcctcctttttccctttaagcccacagattcaggtcatgccaaaagctctctggttgtaacctggagacatgtggaggggaatggcgatgggattataggactctccccatctcgggccctgaccctgacccttgccaccaacccaaagacagctggtgggtttccccttggagacaatcctgcgtttgcctgggccggccctggctgccctcagctttcgctgatctgcccggcctggagcctcccatcaccccgcttcttgttgggcctcaggcactggttaccagaagggggtctgggtctgctcaggatcatgttttgtagcacctcctgttggaggggtggagggatgttcccctgagccaggctgagactagaaccccatcttccctgagccaggctgagactagaaccccatcttccccaccacgccacccctgtggctgctacaggagcacagtagtgaaggcctgagctccaggtttgaaagacccaactggagcgtggggcgggcaggcaggggttagtgaaaggacacttccagggttaggacagagcatttagccttctggaagaacccctgcctggggtgggactgtgcaggccagagaaggtggcatgggcctgaacccacctggactgacttctgcactgaagccacagatggagggtaggctggtgggtgggggtggttcgttctctagccggggcagacacccagctggctgggtccttcctcagccttgcctcctcctgtccccaaccctttcctttcctcctgcttgcggactgctggtcccctctccttccctccttccagctgtttctagttaccacctacccctggccgtggactgatcagaccagcattcaaaataaaagtttgttccaagttgacagtgtggtgctccctgcccagcccctccaggtggaggtgctgccacgggaacgcagttgctctgcctgccctggggcccctggcgacagctgggagcagggcagtgctgtgaggagcccagctttcccagtcaggcaggcatggcttccgtgttcaggctccctcaccagctggtgacacgggacaagcttacaaaccttctctgaacctcagttttctcatttacaagaggcaaagccatccatcaccttgtgtggattcagagaatgtgaggccctggggtgtcctacacaagggaaaggcttgctcagtgagcggtctgcacaccgttagccaccctgccacctctgtgccctgggcaggctccaaaggaaagctctggctgggactgccaggagtctcacacgctcctgttgacattcccagcagccgcccctgaggtcgatgtttgttctgtttttctttttcttttttgagacggagtctcgctgtgttgccaggctggagtgcagtggtgtgatctctgctcactgcaacctccgcctgccagtttcaagtgattctctgcctcagccttctgagtagctgggactacaggtgcacgccaccacgcccagctaactttttgtattttagtagagacagggtttcgccatgtcggccagggtggtcttgatctcctgacctcatgatccacccgcctcagcctcccaaagtgctgggattacaggtatgagccaccgcaccgggcctgttctatttttctagttaagggaactgaagctcagagaggtgtcaccagcaggtgttcattcccatgccagccttgccccccggcttttcccaggcaggctcctgcgtgcccactggctccagcctggtcctctgtctcttggctgcttcactcctgctctttgtcccgactctggccctgcttacaggggccactacctgctggtgcctccataacaagcgtctggcgttgagacccctggcatggcaggggctttggggtctggtttccacaaggcttagccatggcagaacctcgttttattttaactctttgcccctacaaacaaacagcagtacttgccagaaccattcttgggattcaggagctcgggcgactgccttggcctctggccgcacccaggagggtggggttggatctgtgtagttgccaggcccacacctgccagcagggggctgactggatccatgctttactgtgtttaatgggggtaacaggggtccctacagccctcccagctaaacatttggaacaaaacaccagcccttttgtagtggatgcagaataaaattgttaatccaatcacctccaa

SEQ ID NO: 139058 - DNA, 1350 bp, Homo sapiens
  Payload ID: 7252
  Gene Symbol: GTPBP1
  Gene Name: GTP binding protein 1
  ENST ID: ENST00000458073
  CDS Start-End: 1-1050
ctgaatgacacgctgctgctgggcccagaccccttgggtaacttcctgtccattgctgtcaaatccatccatcgcaagcgcatgcctgtcaaggaggtgcggggtggccagacagcatcctttgcgctgaagaagatcaagcgctcgtccatccggaagggcatggtgatggtttccccacgtttgaatccccaagcctcctgggagtttgaggccgagattctcgtcctccaccaccccaccacaattagcccgcgctaccaggccatggtgcactgtgggagcatcaggcagacagccaccattctgagcatggacaaggactgtctgcgcactggggacaaggccactgtacacttccgcttcatcaagacccctgagtacctgcacatagaccagcggctggtgttccgggaaggccgcaccaaggctgtcggcaccatcaccaagctcctccagaccaccaacaactccccaatgaactccaagccgcagcagattaaaatgcagtcgacgaaaaagggccccctgacgaaacgagacgaggggggcccgtctggtgggccagcagtaggagcacccccacctggagatgaagcctcctctgtaggggcagggcaaccagctgcgtccagcaatctccagcctcagcctaagcccagcagtggaggccggcgacgagggggccagcgccacaagtcacaggtccaaggggcaaatagcgaattcccatggaggagaatcactgcactccaagtggacgtggctggtaggatgggaagcagacgccacgggcacagagggaaggaagaagggagctgctggagcctgctaaccgcctcgagccacctgctgctcaggagaccctgcccgtccttttcatctgcatggggccacaggctcctctcttgtgctcctagaagtcagagcgccgagcaagcgtgtgggggaagcggcggggtgctgttcacccactcccagatggctggcagcaggcaccagaagcttccctcatgctgcccttctggaaggtgccttcccctgtgctgacgtctgcaggatgcgtgttacaccccatttggatatcacatcttgagctgtgggaaaggagagcagggcttccctctctgaaccccatgcctggcagggtaagtgcccagggagcacctgctgcctggatggggagtctgcgccacttctgctagcacagcagcatcccgtacctgaaagtgaaacgtctgaataggctcgccgtcctgatcgtaagtgaacttgccaaggagtgtcccctcctgctgcaggtcttcgtcaaacccctgcaaagagagcggagggaagtggggaggggct

SEQ ID NO: 139059 - DNA, 810 bp, Homo sapiens
  Payload ID: 7252
  Gene Symbol: GTPBP1
  Gene Name: GTP binding protein 1
  ENST ID: ENST00000418601
  CDS Start-End: 8-220
attaaagatggcgacggagcgcagtcgctccgcgatggactcgccggtcccggcctctatgttcgcccccgagcccagctccccgggggcggccagggccgcggcggccgccgcccgactccacggcggctttgactcggactgcagcgaggacggcgaggcgctcaacggcgagccagagctggacctcaccagcaagatgggactgagtatgggctgagtgaagctgacatggaggcctcctacgccacagtgaagagcatggcggaacagatagaggccgatgtcatccttctgcgggaacggcaagaagctgggggccgcgtgcgtgattacctggtccggaaacgagtaggagacaatgacttcctggaggtcagggtagcagtggtgggcaacgtggatgctggcaaaagcacgcttctgggggtcctgacacatggggagctggacaatggccgaggctttgcccgccagaaactcttccgccacaaacatgaaattgaatctggtcgcaccagcagtgtgggcaacgacattctgggctttgacagtgaaggcaatgtagtgaacaagcctgacagccacggcggcagcctggagtggaccaagatctgtgagaagtccacgaaagtcattaccttcatcgacttggctggtcatgagaagtacctgaaaaccactgtcttcggcatgacaggccatctgcctgacttctgcatgctcatggtgggcagcaatgctggcatcgtggggatgaccaaagaacacctgggcttggcactggcactcaatgtacctgtctttgtg

SEQ ID NO: 139060 - DNA, 418 bp, Homo sapiens
  Payload ID: 7252
  Gene Symbol: GTPBP1
  Gene Name: GTP binding protein 1
  ENST ID: ENST00000489527
  CDS Start-End: 1-122
cacaggtccaaggggcaaatagcgaattcccatggaggagaatcactgcactccaagtggacgtggctggtaggaagcttccctcatgctgcccttctggaaggtgccttcccctgtgctgacgtctgcaggatgcgtgttacaccccatttggatatcacatcttgagctgtgggaaaggagagcagggcttccctctctgaaccccatgcctggcagggtaagtgcccagggagcacctgctgcctggatggggagtctgcgccacttctgctagcacagcagcatcccgtacctgaaagtgaaacgtctgaataggctcgccgtcctgatcgtaagtgaacttgccaaggagtgtcccctcctgctgcaggtcttcgtcaaacccctgcaaagagagcggagggaagtggggagg

SEQ ID NO: 139061 - DNA, 582 bp, Homo sapiens
  Payload ID: 7252
  Gene Symbol: GTPBP1
  Gene Name: GTP binding protein 1
  ENST ID: ENST00000488787
  CDS Start-End: 323-582
acttgaggggattcggagaccgagagtctcctctccctggaccgcgcgggacagcagaggggcgagggggcccgggcagggggccgagacgctcatgaagacaggtagtcggaggccagggcagggtggccgccgcgtctcttcccagactcgggaaaggaaacagaaagtagtcgctcagctggggaggagcatgtccgagaatgtctacttttcgaggccacccgaaacaaaatggaaagatggtcaggctccttagtctcgctatcctctggttctagtgagccctacatcagagcagtatgacagcctacttcggcagatgtgggagaggatggacgagggatgcggagagaccatatatgtcattgggcagggatcagatgggactgagtatgggctgagtgaagctgacatggaggcctcctacgccacagtgaagagcatggcggaacagatagaggccgatgtcatccttctgcgggaacggcaagaagctgggggccgcgtgcgtgattacctggtccggaaacgagtaggagacaatgacttcctggaggtcagggtagcagtggtgggcaa

SEQ ID NO: 139062 - DNA, 582 bp, Homo sapiens
  Payload ID: 7252
  Gene Symbol: GTPBP1
  Gene Name: GTP binding protein 1
  ENST ID: ENST00000484971
  CDS Start-End: 1-92
ctaagcccagcagtggaggccggcgacgagggggccagcgccacaaggtgaagtcccagggggcctgtgtgactcctgccagcggctgctgaaccttcccctggcccaccctcaccacccaaggggtcatcatctctggccaccactccaccagatgggcagagcagctatgaccgccacccagccctcccgctcaggccacagccggagcctccgcattgcccccacccccattttccaggggggttgtaatttataagctgacgaagccatgatgaggagcagccctgggccaggtgccacggtcagtatgagaggctccaggatcaggctagagaaccacgcgaaccagtcacaggtccaaggggcaaatagcgaattcccatggaggagaatcactgcactccaagtggacgtggctggtaggatgggaagcagacgccacgggcacagagggaaggaagaagggagctgctggagcctgctaaccgcctcgagccacctgctgctcaggagaccctgcccgtccttttcatctgcatggggccacaggctcctctcttgtgctcctagaagtcagag

SEQ ID NO: 139063 - DNA, 505 bp, Homo sapiens
  Payload ID: 7252
  Gene Symbol: GTPBP1
  Gene Name: GTP binding protein 1
  ENST ID: ENST00000470836
  CDS Start-End: 389-505
gattcggagaccgagagtctcctctccctggaccgcgcgggacagcagaggggcgagggggcccgggcagggggccgagacgctcatgaagacaggtagtcggaggccagggcagggtggccgccgcgtctcttcccagactcgggaaaggaaacagaaagtagtcgctcagctggggaggagcatgtccgagaatgtctacttttcgaggccacccgaaacaaaatggaaagatggtcaggctccttagtctcgctatcctgtgagtggaagctcatcttgtatgagtggagcagtgaaggacgtttaaaaccgtgttttttgagctgtcgagaagctggttctagtgagccctacatcagagcagtatgacagcctacttcggcagatgtgggagaggatggacgagggatgcggagagaccatatatgtcattgggcagggatcagatgggactgagtatgggctgagtgaagctgacatggaggcctcctacgccacagtg

SEQ ID NO: 139064 - DNA, 585 bp, Homo sapiens
  Payload ID: 7252
  Gene Symbol: GTPBP1
  Gene Name: GTP binding protein 1
  ENST ID: ENST00000484657
  CDS Start-End: 128-585
aattattcattaggtacttgaaagctctgcagggattggtggctgagaggcctagtcgactgtttcttagctagagctggttctagtgagccctacatcagagcagtatgacagcctacttcggcagatgtgggagaggatggacgagggatgcggagagaccatatatgtcattgggcagggatcagatgggactgagtatgggctgagtgaagctgacatggaggcctcctacgccacagtgaagagcatggcggaacagatagaggccgatgtcatccttctgcgggaacggcaagaagctgggggccgcgtgcgtgattacctggtccggaaacgagtaggagacaatgacttcctggaggtcagggtagcagtggtgggcaacgtggatgctggcaaaagcacgcttctgggggtcctgacacatggggagctggacaatggccgaggctttgcccgccagaaactcttccgccacaaacatgaaattgaatctggtcgcaccagcagtgtgggcaacgacattctgggctttgacagtgaaggcaatgtagtgaacaagcctgacagccacggcggcag

SEQ ID NO: 139065 - DNA, 358 bp, Homo sapiens
  Payload ID: 7252
  Gene Symbol: GTPBP1
  Gene Name: GTP binding protein 1
  ENST ID: ENST00000487538
  CDS Start-End: 1-273
tcacaggtccaaggggcaaatagcgaattcccatggaggagaatcactgcactccaagtggacgtggctggtagggtaacttctgccagcctcttcccccagcccccaccaactgccccacagagaacaaaccagaagggcgactacctgaacaagagctgcaagagcccaagggggcagcctgagcggacgacccctacatcagggcctggatgggaagcagacgccacgggcacagagggaaggaagaagggagctgctggagcctgctaaccgcctcgagccacctgctgctcaggagaccctgcccgtccttttcatctgcatggggccacaggctcctctcttgtgctcctag

SEQ ID NO: 139066 - DNA, 2933 bp, Homo sapiens
  Payload ID: 7253
  Gene Symbol: GTPBP2
  Gene Name: GTP binding protein 2
  Uniprot ID: Q9BX10
  ENST ID: ENST00000307126
  CDS Start-End: 1-1809
atggactcgcgggtatcggagctgttcggcggctgctgccggcccggagggggcccggccgtgggcggaaccctcaaggctaggggggccggcagcagcagcggctgcggggggccaaagggaaagaagaagaacggaaggaacagagggggcaaagccaacaaccccccgtatttgccccccgaggctgaagatggaaacattgaatataaattgaagctggtgaatccatcccagtaccgctttgagcacctggtgacacaaatgaagtggcggctccaggagggacgtggtgaggccgtctaccagattggggtagaggacaatgggctgctggtggggctggctgaggaggaaatgcgagcttcgctcaagaccctgcaccggatggcagagaaggttggggcagacataaccgttcttcgagagcgagaagtggattatgatagcgacatgccccggaagatcaccgaggtgctagtacgaaaggtccctgacaaccaacagttcctagacctccgtgtggccgtcctggggaatgtggactctgggaagtcaactctgcttggagtcctgacccagggagagctggacaatgggcggggccgggctcggctcaaccttttccgccacctgcatgagattcagtctggccgaacctccagcatcagcttcgagatcctgggctttaacagcaagggagaggtggtgaattacagcgactcacggacagcagaagagatctgtgagagcagctccaagatgatcaccttcatcgacctggcaggccaccataagtacctacacaccaccatctttggcctcacatcatactgccccgactgcgccctgctcctcgtcagtgccaacactgggattgctggcaccacaagggaacatctggggctggccctggccctgaaagtgcccttcttcatcgtggtcagcaagatcgacctatgtgccaagaccacagtggagaggacagtacgccagctggagcgggtcctcaagcagcctggctgccacaaggtccccatgctggtcacctctgaggatgatgccgtcactgctgcccagcagtttgctcagtcacccaatgtcacccccatcttcacattgtccagtgtgtctggagagagtctggacctcctcaaagtctttctgaatattctgccgccactcaccaacagcaaagagcaggaggaactcatgcagcagctgacggagttccaggtggatgaaatctacacagtaccagaggtggggactgttgttggaggaacactttccagtgggatttgccgtgagggggaccagctggtggtgggccccacggatgatggctgcttcctggagctgagagtatgcagcatccagcgcaaccgctctgcctgtcgtgtgctgcgagctggtcaggctgctacactggcgcttggggactttgaccgtgcactgcttcgcaagggcatggtgatggtgagcccggagatgaatcctaccatctgctcggtgtttgaggcagagatagtcttactgttccatgccaccaccttccgacgaggattccaggtgacagtacacgtgggcaacgtacgtcagacggcagtggtggaaaagatccatgccaaggacaaactgcggacaggcgagaaggcagtggtacgtttccgcttcctgaaacacccagagtacctgaaggtgggcgccaaactgctgttccgggagggtgtcaccaagggcatcggccatgtcactgatgtacaagccattacagcaggagaagcccaggccaacatgggcttctgaacccttcaggcagggacagttctattgctgtccctacaatatataaggtgacttctggccatgctgccctgccattggcggctctgtgtgttaataggctagggagagaggggtgctgtctgccacttgctccctgccaactttctggagaggtgccaaacttggtgtggccaggaaagggcagtcctgagggagaagacaggattcagggcagtgctccgaagctgtgtgctcacctggttggctcatcaaacctggcaaccctgtggcctgtctgccggagctgactggatccactcatcaattcttcgtccccactactaagactgggcatgttttgctggtgtggtctctgcacttcaggaatggtcacaacagggggtagccctcaaaagcactcctttttctatacctcttctcaaggccatgtaagttgcccatctctacctggctgtggacaaaaggttatctgctcttggccatctggtggtggtggcggcccagagtctgaagaaatggcacagggacagtgaatggtagtgttgccaccctgtgctgaggcctgaggcctcttcctcagctttatctccctttccttcactcaagggccatttccccagtccctatctcccccatcccctcccggcttataggccccacaggtgctatttgttgtgctggcccaggcgtggggctaccaagcaaaggcttggcatataccaaaggccagctgcatgcccatcagtctggtctttttcctctgcggtcatgttggctttcatgctggatcaaatgttttactttcccagactggtggcatctgagttccccatcctaccactctcaccccactttcctgccccacctaaaccctcgttttagtaatttgtagtgactgttcccttccctctgttgcagggaaccaggaggaaagggaaagatgttgccatatttcctactctttaggcatggactctcctttccctttgttagtgtcctgggttcccatggactcagggatttgttggctaaggtttctctgtgcatatatatatatatacatatgtatatatatttaaatacacatatatattgtacagaataaaaatgttttattgaataca

SEQ ID NO: 139067 - DNA, 2830 bp, Homo sapiens
  Payload ID: 7253
  Gene Symbol: GTPBP2
  Gene Name: GTP binding protein 2
  Uniprot ID: Q9BX10
  ENST ID: ENST00000307114
  CDS Start-End: 154-1698
gtttcctagaccagtgacaaagaaaggttttaacagcctgggcacagaggagacatagacttctgggaaaagcaggctgaagatggaaacattgaatataaattgaagctggtgaatccatcccagtaccgctttgagcacctggtgacacaaatgaagtggcggctccaggagggacgtggtgaggccgtctaccagattggggtagaggacaatgggctgctggtggggctggctgaggaggaaatgcgagcttcgctcaagaccctgcaccggatggcagagaaggttggggcagacataaccgttcttcgagagcgagaagtggattatgatagcgacatgccccggaagatcaccgaggtgctagtacgaaaggtccctgacaaccaacagttcctagacctccgtgtggccgtcctggggaatgtggactctgggaagtcaactctgcttggagtcctgacccagggagagctggacaatgggcggggccgggctcggctcaaccttttccgccacctgcatgagattcagtctggccgaacctccagcatcagcttcgagatcctgggctttaacagcaagggagaggtggtgaattacagcgactcacggacagcagaagagatctgtgagagcagctccaagatgatcaccttcatcgacctggcaggccaccataagtacctacacaccaccatctttggcctcacatcatactgccccgactgcgccctgctcctcgtcagtgccaacactgggattgctggcaccacaagggaacatctggggctggccctggccctgaaagtgcccttcttcatcgtggtcagcaagatcgacctatgtgccaagaccacagtggagaggacagtacgccagctggagcgggtcctcaagcagcctggctgccacaaggtccccatgctggtcacctctgaggatgatgccgtcactgctgcccagcagtttgctcagtcacccaatgtcacccccatcttcacattgtccagtgtgtctggagagagtctggacctcctcaaagtctttctgaatattctgccgccactcaccaacagcaaagagcaggaggaactcatgcagcagctgacggagttccaggtggatgaaatctacacagtaccagaggtggggactgttgttggaggaacactttccagtgggatttgccgtgagggggaccagctggtggtgggccccacggatgatggctgcttcctggagctgagagtatgcagcatccagcgcaaccgctctgcctgtcgtgtgctgcgagctggtcaggctgctacactggcgcttggggactttgaccgtgcactgcttcgcaagggcatggtgatggtgagcccggagatgaatcctaccatctgctcggtgtttgaggcagagatagtcttactgttccatgccaccaccttccgacgaggattccaggtgacagtacacgtgggcaacgtacgtcagacggcagtggtggaaaagatccatgccaaggacaaactgcggacaggcgagaaggcagtggtacgtttccgcttcctgaaacacccagagtacctgaaggtgggcgccaaactgctgttccgggagggtgtcaccaagggcatcggccatgtcactgatgtacaagccattacagcaggagaagcccaggccaacatgggcttctgaacccttcaggcagggacagttctattgctgtccctacaatatataaggtgacttctggccatgctgccctgccattggcggctctgtgtgttaataggctagggagagaggggtgctgtctgccacttgctccctgccaactttctggagaggtgccaaacttggtgtggccaggaaagggcagtcctgagggagaagacaggattcagggcagtgctccgaagctgtgtgctcacctggttggctcatcaaacctggcaaccctgtggcctgtctgccggagctgactggatccactcatcaattcttcgtccccactactaagactgggcatgttttgctggtgtggtctctgcacttcaggaatggtcacaacagggggtagccctcaaaagcactcctttttctatacctcttctcaaggccatgtaagttgcccatctctacctggctgtggacaaaaggttatctgctcttggccatctggtggtggtggcggcccagagtctgaagaaatggcacagggacagtgaatggtagtgttgccaccctgtgctgaggcctgaggcctcttcctcagctttatctccctttccttcactcaagggccatttccccagtccctatctcccccatcccctcccggcttataggccccacaggtgctatttgttgtgctggcccaggcgtggggctaccaagcaaaggcttggcatataccaaaggccagctgcatgcccatcagtctggtctttttcctctgcggtcatgttggctttcatgctggatcaaatgttttactttcccagactggtggcatctgagttccccatcctaccactctcaccccactttcctgccccacctaaaccctcgttttagtaatttgtagtgactgttcccttccctctgttgcagggaaccaggaggaaagggaaagatgttgccatatttcctactctttaggcatggactctcctttccctttgttagtgtcctgggttcccatggactcagggatttgttggctaaggtttctctgtgcatatatatatatatacatatgtatatatatttaaatacacatatatattgtacagaataaaaatgttttattgaatacactgtgctt

SEQ ID NO: 139068 - DNA, 1394 bp, Homo sapiens
  Payload ID: 7253
  Gene Symbol: GTPBP2
  Gene Name: GTP binding protein 2
  ENST ID: ENST00000419497
  CDS Start-End: 1-460
tgggatttgccgtgagggggaccagctggtggtgggccccacggatgatggctgcttcctggagctgagagtatgcagcatccagcgcaaccgctctgcctgtcgtgtgctgcgagctggtcaggctgctacactggcgcttggggactttgaccgtgcactgcttcgcaagggcatggtgatggtgagcccggagatgaatcctaccatctgctcggtgtttgaggcagagatagtcttactgttccatgccaccaccttccgacgaggattccaggtgacagtacacgtgggcaacgtacgtcagacggcagtggtggaaaagatccatgccaaggacaaactgcggacaggcgagaaggcagtggctagggagagaggggtgctgtctgccacttgctccctgccaactttctggagaggtgccaaacttggtgtggccaggaaagggcagtcctgagggagaagacaggattcagggcagtgctccgaagctgtgtgctcacctggttggctcatcaaacctggcaaccctgtggcctgtctgccggagctgactggatccactcatcaattcttcgtccccactactaagactgggcatgttttgctggtgtggtctctgcacttcaggaatggtcacaacagggggtagccctcaaaagcactcctttttctatacctcttctcaaggccatgtaagttgcccatctctacctggctgtggacaaaaggttatctgctcttggccatctggtggtggtggcggcccagagtctgaagaaatggcacagggacagtgaatggtagtgttgccaccctgtgctgaggcctgaggcctcttcctcagctttatctccctttccttcactcaagggccatttccccagtccctatctcccccatcccctcccggcttataggccccacaggtgctatttgttgtgctggcccaggcgtggggctaccaagcaaaggcttggcatataccaaaggccagctgcatgcccatcagtctggtctttttcctctgcggtcatgttggctttcatgctggatcaaatgttttactttcccagactggtggcatctgagttccccatcctaccactctcaccccactttcctgccccacctaaaccctcgttttagtaatttgtagtgactgttcccttccctctgttgcagggaaccaggaggaaagggaaagatgttgccatatttcctactctttaggcatggactctcctttccctttgttagtgtcctgggttcccatggactcagggatttgttggctaaggtttctctgtgcatatatatatatatacatatgtatatatatttaaatacacatatatattgtacagaataaaaatgttttattgaataca

SEQ ID NO: 139069 - DNA, 1850 bp, Homo sapiens
  Payload ID: 7253
  Gene Symbol: GTPBP2
  Gene Name: GTP binding protein 2
  ENST ID: ENST00000432918
  CDS Start-End: 1-463
tgggatttgccgtgagggggaccagctggtggtgggccccacggatgatggctgcttcctggagctgagagtatgcagcatccagcgcaaccgctctgcctgtcgtgtgctgcgagctggtcaggctgctacactggcgcttggggactttgaccgtgcactgcttcgcaagggcatggtgatggtgagcccggagatgaatcctaccatctgctcggtgtttgaggcagagatagtcttactgttccatgccaccaccttccgacgaggattccaggtgacagtacacgtgggcaacgtacgtcagacggcagtggtggaaaagatccatgccaaggtgagagggacctggccttccatttctccagaggtcagaaaagagggaggcctgccccagactggcagagaactccttgatcccacaatgggaataaaaccccacttagggtgggtagcggcctgataggcctctggagggtggagagccacggctggcagagaatgggacagaaggcactggccaggggagtgaccacttatttgctgcaggacaaactgcggacaggcgagaaggcagtggtacgtttccgcttcctgaaacacccagagtacctgaaggtgggcgccaaactgctgttccgggagggtgtcaccaagggcatcggccatgtcactgatgtacaagccattacagcaggagaagcccaggccaacatgggcttctgaacccttcaggcagggacagttctattgctgtccctacaatatataaggtgacttctggccatgctgccctgccattggcggctctgtgtgttaataggctagggagagaggggtgctgtctgccacttgctccctgccaactttctggagaggtgccaaacttggtgtggccaggaaagggcagtcctgagggagaagacaggattcagggcagtgctccgaagctgtgtgctcacctggttggctcatcaaacctggcaaccctgtggcctgtctgccggagctgactggatccactcatcaattcttcgtccccactactaagactgggcatgttttgctggtgtggtctctgcacttcaggaatggtcacaacagggggtagccctcaaaagcactcctttttctatacctcttctcaaggccatgtaagttgcccatctctacctggctgtggacaaaaggttatctgctcttggccatctggtggtggtggcggcccagagtctgaagaaatggcacagggacagtgaatggtagtgttgccaccctgtgctgaggcctgaggcctcttcctcagctttatctccctttccttcactcaagggccatttccccagtccctatctcccccatcccctcccggcttataggccccacaggtgctatttgttgtgctggcccaggcgtggggctaccaagcaaaggcttggcatataccaaaggccagctgcatgcccatcagtctggtctttttcctctgcggtcatgttggctttcatgctggatcaaatgttttactttcccagactggtggcatctgagttccccatcctaccactctcaccccactttcctgccccacctaaaccctcgttttagtaatttgtagtgactgttcccttccctctgttgcagggaaccaggaggaaagggaaagatgttgccatatttcctactctttaggcatggactctcctttccctttgttagtgtcctgggttcccatggactcagggatttgttggctaaggtttctctgtgcatatatatatatatacatatgtatatatatttaaatacacatatatattgtacagaataaaaatgttttattgaataca

SEQ ID NO: 139070 - DNA, 681 bp, Homo sapiens
  Payload ID: 7253
  Gene Symbol: GTPBP2
  Gene Name: GTP binding protein 2
  ENST ID: ENST00000452781
  CDS Start-End: 1-681
atggactcgcgggtatcggagctgttcggcggctgctgccggcccggagggggcccggccgtgggcggaaccctcaaggctaggggggccggcagcagcagcggctgcggggggccaaagggaaagaagaagaacggaaggaacagagggggcaaagccaacaaccccccgtatttgccccccgaggctgaagatggaaacattgaatataaataccgctttgagcacctggtgacacaaatgaagtggcggctccaggagggacgtggtgaggccgtctaccagattggggtagaggacaatgggctgctggtggggctggctgaggaggaaatgcgagcttcgctcaagaccctgcaccggatggcagagaaggttggggcagacataaccgttcttcgagagcgagaagtggattatgatagcgacatgccccggaagatcaccgaggtgctagtacgaaaggtccctgacaaccaacagttcctagacctccgtgtggccgtcctggggaatgtggactctgggaagtcaactctgcttggagtcctgacccagggagagctggacaatgggcggggccgggctcggctcaaccttttccgccacctgcatgagattcagtctggccgaacctccagcatcagcttcgagatcctgggctttaacagcaagggagag

SEQ ID NO: 139071 - DNA, 946 bp, Homo sapiens
  Payload ID: 7253
  Gene Symbol: GTPBP2
  Gene Name: GTP binding protein 2
  ENST ID: ENST00000442748
  CDS Start-End: 1-946
cccagggaggaggggcacgggaggagaacacctctttcaggtcccgggaccccagggaggaagggcagagactggactctcaggctgaagatggaaacattgaatataaattgaagctggtgaatccatcccagtaccgctttgagcacctggtgacacaaatgaagtggcggctccaggagggacgtggtgaggccgtctaccagattggggtagaggacaatgggctgctggtggggctggctgaggaggaaatgcgagcttcgctcaagaccctgcaccggatggcagagaaggttggggcagacataaccgttcttcgagagcgagaagtggattatgatagcgacatgccccggaagatcaccgaggtgctagtacgaaaggtccctgacaaccaacagttcctagacctccgtgtggccgtcctggggaatgtggactctgggaagtcaactctgcttggagtcctgacccagggagagctggacaatgggcggggccgggctcggctcaaccttttccgccacctgcatgagattcagtctggccgaacctccagcatcagcttcgagatcctgggctttaacagcaagggagaggtggtgaattacagcgactcacggacagcagaagagatctgtgagagcagctccaagatgatcaccttcatcgacctggcaggccaccataagtacctacacaccaccatctttggcctcacatcatactgccccgactgcgccctgctcctcgtcagtgccaacactgggattgctggcaccacaagggaacatctggggctggccctggccctgaaagtgcccttcttcatcgtggtcagcaagatcgacctatgtgccaagaccacagtggagaggacagtacgccagctggagcgggtcctcaagcagcctggctgccacaaggtccccatgctggtcac

SEQ ID NO: 139072 - DNA, 516 bp, Homo sapiens
  Payload ID: 7253
  Gene Symbol: GTPBP2
  Gene Name: GTP binding protein 2
  ENST ID: ENST00000496137
  CDS Start-End: 1-318
ggcatggtgatggtgagcccggagatgaatcctaccatctgctcggtgtttgaggcagagatagtcttactgttccatgccaccaccttccgacgaggattccaggtgacagtacacgtgggcaacgtacgtcagacggcagtggtggaaaagatccatgccaaggacaaactgcggacaggcgagaaggcagtggtacgtttccgcttcctgaaacacccagagtacctgaaggttcagagttccagtattgtaaccaagtattgtggcctattttccgtagttcaagtgagcagaatactgaggcctttcacgtgaaataggtagctaccctgtatttgaagagttggccacttgctagtggtcagaatagtaaggagcccacttctgtgccctggcagagatacagtgccagctacttaaagaagagtagaatttagagacaaaaggtaaagagcagctgatatgtaaattgcaaagcccaccccaggaataaagaaagaaaatcttacatca

SEQ ID NO: 139073 - DNA, 2579 bp, Homo sapiens
  Payload ID: 7254
  Gene Symbol: GTPBP3
  Gene Name: GTP binding protein 3 (mitochondrial)
  Uniprot ID: Q969Y2
  ENST ID: ENST00000324894
  CDS Start-End: 69-1547
cggggccccctgcccagacttgaagccacacaggcaggtcgggcaggcgggtcgcaggttgtaaatccatgtggcgggggctttggaccctggcggcccaagcggcacgtgggcctcgcagattgtgcacgcgccggagcagcggcgcaccagcccccggctccggcgccaccatcttcgcgctaagctctggccaaggccgctgcggcatcgcagtgatccggaccagcggccccgccagcggccacgccctccgaattctcacagcaccccgagacctgccccttgctcgccacgccagcctgcgcctgctcagcgatccccgctccggggagcctctggaccgcgcactggtgctctggttcccaggtccccagagtttcaccggtgaggactgcgtggagttccacgtgcatggaggcccggcagtggtgagcggcgtcctgcaggccttgggcagcgtgccagggcttcgaccggcggaggcaggcgagttcaccagacgggcgttcgccaatgggaagctgaacctgaccgaagtggaggggctggcggaccttatccacgcggaaacagaggcgcagcggcggcaggccctcaggcagctggacggagagctgggccacctctgccgtggctgggccgagaccctcaccaaagctctggcccacgtggaggcctatatcgatttcggcgaggatgacaacctggaggagggggtcctggagcaagccgacatcgaagtacgggcactgcaggtggccctgggtgcacatctacgagatgccaggcgcgggcagaggctccgctcaggggtgcacgtagtggtcactggaccccccaatgcgggcaagagcagcctagtgaacctgctcagtcggaagcctgtgtccatcgtgtccccggagccagggaccacccgtgacgtgctggagaccccagtcgacctggccggatttcctgtgctgctgagcgacacggctgggttgcgggagggcgtggggcccgtggagcaggagggcgtgcggcgcgcccgggagaggctagagcaggctgacctcattctggccatgctggatgcttctgacctggcctctccctccagttgcaacttcctggccaccgtcgtagcctctgtgggagcccagagccccagtgacagcagccagcgcctcctcctggtgctgaacaagtcggacctgctgtccccggagggcccaggtcccggtcctgacctgcccccgcacctgctgctgtcctgtctgacgggagaggggctggacggcctcctggaggcgctgaggaaggagctagctgcagtgtgtggggacccgtccacagatcccccgctgctgacccgagcaaggcaccagcaccacctccagggttgcctggatgccctcggccactacaagcagtcaaaagacctggccctggcggcagaggcgctgcgggtggcccggggtcacctgacccggctcacaggtggagggggtaccgaggagatcctggacatcatcttccaggacttctgtgtgggcaagtgacgggatccagggaagtcgcacccaagctgcgtggagacccaggagcctcgggggatctggaaacagtttaggccaattgggattctcattcgcctgggaaagaacttgattctcaaatagtgaagcaacacagctgagaggtagtgagatccctgcagggactccctggagattcaggccctggaatggggctgaatggaggtcccgttcgacccttgatgctggggcatccgggttgggatggagataggaggatctcagtatatttgtttcgtagttttttatttattttgcaaataccaaaggaatgtaaaaaaaactcaggtgatctagaagtgtttattttcttcccttcccttcccttccctttccttttccctttccctttccccttccccttccccttccccttcccctacccttccctcctctgtctattgcccaggctggagtgcagtggtgcgaccttggctcactgcaacctccatctccggggctcaagcgcttctcctgcctcagcctcctgagtagctgggattacaggcatgtgccagcatgcccggctaatttttttctttttttgagacagagtctcgctctgtcacccaggctggagttcagtggtgcgacctcggcttactgcaacctccacctcccgggttcaagtgattctcctgcctcagcctcttgagtagctgggactacaggcgcacaccaccacgccaggctaatttttgtatttttagtagagacaaggtttcaccatgttgaccaggctggtcttgaactccttgacctcaggtaatctgcctaccttggcctcccaaagtgctgggatcacaggcgtgagctatcacacctggccccagaagtgtttcaacatggaaattttccttagcccttctgtggttgtcatggcttaatgtgtgtctttccagaactttgaatgtttgcatacttgtggatgtacctttcaaatatgtttgtcttgtgtatcatatataaatggtattgtgttcattgctctacaaa

SEQ ID NO: 139074 - DNA, 1951 bp, Homo sapiens
  Payload ID: 7254
  Gene Symbol: GTPBP3
  Gene Name: GTP binding protein 3 (mitochondrial)
  Uniprot ID: Q969Y2
  ENST ID: ENST00000358792
  CDS Start-End: 58-1632
gcccagacttgaagccacacaggcaggtcgggcaggcgggtcgcaggttgtaaatccatgtggcgggggctttggaccctggcggcccaagcggcacgtgggcctcgcagattgtgcacgcgccggagcagcggcgcaccagcccccggctccggcgccaccatcttcgcgctaagctctggccaaggccgctgcggcatcgcagtgatccggaccagcggccccgccagcggccacgccctccgaattctcacagcaccccgagacctgccccttgctcgccacgccagcctgcgcctgctcagcgatccccgctccggggagcctctggaccgcgcactggtgctctggttcccaggtccccagagtttcaccggtgaggactgcgtggagttccacgtgcatggaggcccggcagtggtgagcggcgtcctgcaggccttgggcagcgtgccagggcttcgaccggcggaggcaggcgagttcaccagacgggcgttcgccaatgggaagctgaacctgaccgaagtggaggggctggcggaccttatccacgcggaaacagaggcgcagcggcggcaggccctcaggcagctggacggagagctgggccacctctgccgtggctgggccgagaccctcaccaaagctctggcccacgtggaggcctatatcgatttcggcgaggatgacaacctggaggagggggtcctggagcaaggtgggtctacctggtggtgggggaggaagacacctcatatcagccctcaaaggctcccctcactgtctctctctgcctgccttctctcacccacagccgacatcgaagtacgggcactgcaggtggccctgggtgcacatctacgagatgccaggcgcgggcagaggctccgctcaggggtgcacgtagtggtcactggaccccccaatgcgggcaagagcagcctagtgaacctgctcagtcggaagcctgtgtccatcgtgtccccggagccagggaccacccgtgacgtgctggagaccccagtcgacctggccggatttcctgtgctgctgagcgacacggctgggttgcgggagggcgtggggcccgtggagcaggagggcgtgcggcgcgcccgggagaggctagagcaggctgacctcattctggccatgctggatgcttctgacctggcctctccctccagttgcaacttcctggccaccgtcgtagcctctgtgggagcccagagccccagtgacagcagccagcgcctcctcctggtgctgaacaagtcggacctgctgtccccggagggcccaggtcccggtcctgacctgcccccgcacctgctgctgtcctgtctgacgggagaggggctggacggcctcctggaggcgctgaggaaggagctagctgcagtgtgtggggacccgtccacagatcccccgctgctgacccgagcaaggcaccagcaccacctccagggttgcctggatgccctcggccactacaagcagtcaaaagacctggccctggcggcagaggcgctgcgggtggcccggggtcacctgacccggctcacaggtggagggggtaccgaggagatcctggacatcatcttccaggacttctgtgtgggcaagtgacgggatccagggaagtcgcacccaagctgcgtggagacccaggagcctcgggggatctggaaacagtttaggccaattgggattctcattcgcctgggaaagaacttgattctcaaatagtgaagcaacacagctgagaggtagtgagatccctgcagggactccctggagattcaggccctggaatggggctgaatggaggtcccgttcgacccttgatgctggggcatccgggttgggatggagataggaggatctcagtatatttgtttcgtagttttttatttattttgcaaataccaaaggaatgtaaaaaaaa

SEQ ID NO: 139075 - DNA, 1894 bp, Homo sapiens
  Payload ID: 7254
  Gene Symbol: GTPBP3
  Gene Name: GTP binding protein 3 (mitochondrial)
  Uniprot ID: Q969Y2
  ENST ID: ENST00000361619
  CDS Start-End: 85-1629
gttcgcgtctccgcccgtgttgttttctgggtttccttctcgcccgcctacctcgctccctgctgctggtccccgcccgcactgatggtgcattctccaacttgtccccacccatgctttcttctggtccccgcctcggagcctcagtttccccatctgcaaactccggaccctggagacgctgtttggaatgtgagatgggcattgtgcacgcgccggagcagcggcgcaccagcccccggctccggcgccaccatcttcgcgctaagctctggccaaggccgctgcggcatcgcagtgatccggaccagcggccccgccagcggccacgccctccgaattctcacagcaccccgagacctgccccttgctcgccacgccagcctgcgcctgctcagcgatccccgctccggggagcctctggaccgcgcactggtgctctggttcccaggtccccagagtttcaccggtgaggactgcgtggagttccacgtgcatggaggcccggcagtggtgagcggcgtcctgcaggccttgggcagcgtgccagggcttcgaccggcggaggcaggcgagttcaccagacgggcgttcgccaatgggaagctgaacctgaccgaagtggaggggctggcggaccttatccacgcggaaacagaggcgcagcggcggcaggccctcaggcagctggacggagagctgggccacctctgccgtggctgggccgagaccctcaccaaagctctggcccacgtggaggcctatatcgatttcggcgaggatgacaacctggaggagggggtcctggagcaagccgacatcgaagtacgggcactgcaggtggccctgggtgcacatctacgagatgccaggcgcgggcagaggctccgctcaggggtgcacgtagtggtcactggaccccccaatgcgggcaagagcagcctagtgaacctgctcagtcggaagcctgtgtccatcgtgtccccggagccagggaccacccgtgacgtgctggagaccccagtcgacctggccggatttcctgtgctgctgagcgacacggctgggttgcgggagggcgtggggcccgtggagcaggagggcgtgcggcgcgcccgggagaggctagagcaggctgacctcattctggccatgctggatgcttctgacctggcctctccctccagttgcaacttcctggccaccgtcgtagcctctgtgggagcccagagccccagtgacagcagccagcgcctcctcctggtgctgaacaagtcggacctgctgtccccggagggcccaggtcccggtcctgacctgcccccgcacctgctgctgtcctgtctgacgggagaggggctggacggcctcctggaggcgctgaggaaggagctagctgcagtgtgtggggacccgtccacagatcccccgctgctgacccgagcaaggcaccagcaccacctccagggttgcctggatgccctcggccactacaagcagtcaaaagacctggccctggcggcagaggcgctgcgggtggcccggggtcacctgacccggctcacaggtggagggggtaccgaggagatcctggacatcatcttccaggacttctgtgtgggcaagtgacgggatccagggaagtcgcacccaagctgcgtggagacccaggagcctcgggggatctggaaacagtttaggccaattgggattctcattcgcctgggaaagaacttgattctcaaatagtgaagcaacacagctgagaggtagtgagatccctgcagggactccctggagattcaggccctggaatggggctgaatggaggtcccgttcgacccttgatgctggggcatccgggttgggatggagataggaggatctcagtata

SEQ ID NO: 139076 - DNA, 1105 bp, Homo sapiens
  Payload ID: 7254
  Gene Symbol: GTPBP3
  Gene Name: GTP binding protein 3 (mitochondrial)
  ENST ID: ENST00000600610
  CDS Start-End: 25-159
aggcgggtcgcaggttgtaaatccatgtggcgggggctttggaccctggcggcccaagcggcacgtgggcctcgcagaacatccaatttgtgcatcccccagccgcagaacccccccacctggagcatctcgcgatcatcgagccctcggtctacttgacactgaggctgagcctcccaggtgcgctgattcgcctcccctccggttccagattgtgcacgcgccggagcagcggcgcaccagcccccggctccggcgccaccatcttcgcgctaagctctggccaaggccgctgcggcatcgcagtgatccggaccagcggccccgccagcggccacgccctccgaattctcacagcaccccgagacctgccccttgctcgccacgccagcctgcgcctgctcagcgatccccgctccggggagcctctggaccgcgcactggtgctctggttcccaggtccccagagtttcaccggtgaggactgcgtggagttccacgtgcatggaggcccggcagtggtgagcggcgtcctgcaggccttgggcagcgtgccagggcttcgaccggcggaggcaggcgagttcaccagacgggcgttcgccaatgggaagctgaacctgaccgaagtggaggggctggcggaccttatccacgcggaaacagaggcgcagcggcggcaggccctcaggcagctggacggagagctgggccacctctgccgtggctgggccgagaccctcaccaaagctctggcccacgtggaggcctatatcgatttcggcgaggatgacaacctggaggagggggtcctggagcaagccgacatcgaagtacgggcactgcaggtggccctgggtgcacatctacgagatgccaggcgcgggcagaggctccgctcaggggtgcacgtagtggtcactggaccccccaatgcgggcaagagcagcctagtgaacctgctcagtcggaagcctgtgtccatcgtgtccccggagccagggaccacccgtgacgtgctggagaccccagtcgacctggccggatttcctgtgctgctgagcgacacggctgggttgcgggagggcgtggggcccgtggagca

SEQ ID NO: 139077 - DNA, 617 bp, Homo sapiens
  Payload ID: 7254
  Gene Symbol: GTPBP3
  Gene Name: GTP binding protein 3 (mitochondrial)
  ENST ID: ENST00000602165
  CDS Start-End: 42-347
acacaggcaggtcgggcaggcgggtcgcaggttgtaaatccatgtggcgggggctttggaccctggcggcccaagcgattgtgcacgcgccggagcagcggcgcaccagcccccggctccggcgccaccatcttcgcgctaagctctggccaaggccgctgcggcatcgcagtgatccggaccagcggccccgccagcggccacgccctccgaattctcacagcaccccgagacctgccccttgctcgccacgccagcctgcgcctgctcagcgatccccgctccggggagcctctggaccgcgcactggtgctctggttcccaggtccccagagtttcaccggtgaggactgcgtggagttccacgtgcatggaggcccggcagtggtgagcggcgtcctgcaggccttgggcagcgtgccagggcttcgaccggcggaggcaggcgagttcaccagacgggcgttcgccaatgggaagctgaacctgaccgaagtggaggggctggcggaccttatccacgcggaaacagaggcgcagcggcggcaggccctcaggcagctggacggagagctgggccacctctgccgtggctgggccgagaccctcaccaaagc

SEQ ID NO: 139078 - DNA, 934 bp, Homo sapiens
  Payload ID: 7254
  Gene Symbol: GTPBP3
  Gene Name: GTP binding protein 3 (mitochondrial)
  ENST ID: ENST00000594018
  CDS Start-End: 21-704
gggtcgcaggttgtaaatccatgtggcgggggctttggaccctggcggcccaagcggcacgtgggcctcgcagattgtgcacgcgccggagcagcggcgcaccagcccccggctccggcgccaccatcttcgcgctaagctctggccaaggccgctgcggcatcgcagtgatccggaccagcggccccgccagcggccacgccctccgaattctcacagcaccccgagacctgccccttgctcgccacgccagcctgcgcctgctcagcgatccccgctccggggagcctctggaccgcgcactggtgctctggttcccaggtccccagagtttcaccggtgaggactgcgtggagttccacgtgcatggaggcccggcagtggtgagcggcgtcctgcaggccttgggcagcgtgccagggcttcgaccggcggaggcaggcgagttcaccagacgggcgttcgccaatgggaagctgaacctgaccgaagtggaggggctggcggaccttatccacgcggaaacagaggcgcagcggcggcaggccctcaggcagctggacggagagctgggccacctctgccgtggctgggccgagaccctcaccaaaccgacatcgaagtacgggcactgcaggtggccctgggtgcacatctacgagatgccaggcgcgggcagaggctccgctcaggggtgcacgtagtggtcactggaccccccaatgcgggcaagagcagcctagtgaacctgctcagtcggaagcctgtgtccatcgtgtccccggagccagggaccacccgtgacgtgctggagaccccagtcgacctggccggatttcctgtgctgctgagcgacacggctgggttgcgggagggcgtggggcccgtggagcaggagggcgtgcggcgcgcccgggagaggctagagcaggct

SEQ ID NO: 139079 - DNA, 584 bp, Homo sapiens
  Payload ID: 7254
  Gene Symbol: GTPBP3
  Gene Name: GTP binding protein 3 (mitochondrial)
  ENST ID: ENST00000601213
  CDS Start-End: 5-382
actgatggtgcattctccaacttgtccccacccatgctttcttctggtccccgcctcggagcctcagtttccccatctgcaaactccggaccctggagacgctgtttggaatattgtgcacgcgccggagcagcggcgcaccagcccccggctccggcgccaccatcttcgcgctaagctctggccaaggccgctgcggcatcgcagtgatccggaccagcggccccgccagcggccacgccctccgaattctcacagcaccccgagacctgccccttgctcgccacgccagcctgcgcctgctcagcgatccccgctccggggagcctctggaccgcgcactggtgctctggttcccaggtccccagagtttcaccggtgaggactgcgtggagttccacgtgcatggaggcccggcagtggtgagcggcgtcctgcaggccttgggcagcgtgccagggcttcgaccggcggaggcaggcgagttcaccagacgggcgttcgccaatgggaagctgaacctgaccgaagtggaggggctggcggaccttatccacgcggaaacagaggcgcagcggcggcag

SEQ ID NO: 139080 - DNA, 808 bp, Homo sapiens
  Payload ID: 7254
  Gene Symbol: GTPBP3
  Gene Name: GTP binding protein 3 (mitochondrial)
  ENST ID: ENST00000598493
  CDS Start-End: 54-509
agacttgaagccacacaggcaggtcgggcaggcgggtcgcaggttgtaaatccatgtggcgggggctttggaccctggcggcccaagcggcacgtgggcctcgcagattgtgcacgcgccggagcagcggcgcaccagcccccggctccggcgccaccatcttcgcgctaagctctggccaaggccgctgcggcatcgcagtgatccggaccagcggccccgccagcggccacgccctccgaattctcacagcaccccgagacctgccccttgctcgccacgccagcctgcgcctgctcagcgatccccgctccggggagcctctggaccgcgcactggtgctctggttcccaggtccccagagtttcaccggtgaggactgcgtggagttccacgtgcatggaggcccggcagtggtgagcggcgtcctgcaggccttgggcagcgtgccagggcttcgaccggcggaggcaggcgcgggcagaggctccgctcaggggtgcacgtagtggtcactggaccccccaatgcgggcaagagcagcctagtgaacctgctcagtcggaagcctgtgtccatcgtgtccccggagccagggaccacccgtgacgtgctggagaccccagtcgacctggccggatttcctgtgctgctgagcgacacggctgggttgcgggagggcgtggggcccgtggagcaggagggcgtgcggcgcgcccgggagaggctagagcaggctgacctcattctggccatgctggatgcttctgacctggcctctccctccagttgcaacttcctggccacc

SEQ ID NO: 139081 - DNA, 2493 bp, Homo sapiens
  Payload ID: 7254
  Gene Symbol: GTPBP3
  Gene Name: GTP binding protein 3 (mitochondrial)
  Uniprot ID: Q969Y2
  ENST ID: ENST00000600625
  CDS Start-End: 58-1473
gcccagacttgaagccacacaggcaggtcgggcaggcgggtcgcaggttgtaaatccatgtggcgggggctttggaccctggcggcccaagcggcacgtgggcctcgcagattgtgcacgcgccggagcagcggcgcaccagcccccggctccggcgccaccatcttcgcgctaagctctggccaaggccgctgcggcatcgcagtgatccggaccagcggccccgccagcggccacgccctccgaattctcacagcaccccgagacctgccccttgctcgccacgccagcctgcgcctgctcagcgatccccgctccggggagcctctggaccgcgcactggtgctctggttcccaggtccccagagtttcaccggtgaggactgcgtggagttccacgtgcatggaggcccggcagtggtgagcggcgtcctgcaggccttgggcagcgtgccagggcttcgaccggcggaggcaggcgagttcaccagacgggcgttcgccaatgggaagctgaacctgaccgaagtggaggggctggcggaccttatccacgcggaaacagaggcgcagcggcggcaggccctcaggcagctggacggagagctgggccacctctgccgtggctgggccgagaccctcaccaaagctctggcccacgtggaggcctatatcgatttcggcgaggatgacaacctggaggagggggtcctggagcaagccgacatcgaagtacgggcactgcaggtggccctgggtgcacatctacgagatgccaggcgcgggcagaggctccgctcaggggtgcacgtagtggtcactggaccccccaatgcgggcaagagcagcctagtgaacctgctcagtcggaagcctgtgtccatcgtgtccccggagccagggaccacccgtgacgtgctggagaccccagtcgacctggccggatttcctgtgctgctgagcgacacggctgggttgcgggagggcgtggggcccgtggagcaggagggcgtgcggcgcgcccgggagagttgcaacttcctggccaccgtcgtagcctctgtgggagcccagagccccagtgacagcagccagcgcctcctcctggtgctgaacaagtcggacctgctgtccccggagggcccaggtcccggtcctgacctgcccccgcacctgctgctgtcctgtctgacgggagaggggctggacggcctcctggaggcgctgaggaaggagctagctgcagtgtgtggggacccgtccacagatcccccgctgctgacccgagcaaggcaccagcaccacctccagggttgcctggatgccctcggccactacaagcagtcaaaagacctggccctggcggcagaggcgctgcgggtggcccggggtcacctgacccggctcacaggtggagggggtaccgaggagatcctggacatcatcttccaggacttctgtgtgggcaagtgacgggatccagggaagtcgcacccaagctgcgtggagacccaggagcctcgggggatctggaaacagtttaggccaattgggattctcattcgcctgggaaagaacttgattctcaaatagtgaagcaacacagctgagaggtagtgagatccctgcagggactccctggagattcaggccctggaatggggctgaatggaggtcccgttcgacccttgatgctggggcatccgggttgggatggagataggaggatctcagtatatttgtttcgtagttttttatttattttgcaaataccaaaggaatgtaaaaaaaactcaggtgatctagaagtgtttattttcttcccttcccttcccttccctttccttttccctttccctttccccttccccttccccttccccttcccctacccttccctcctctgtctattgcccaggctggagtgcagtggtgcgaccttggctcactgcaacctccatctccggggctcaagcgcttctcctgcctcagcctcctgagtagctgggattacaggcatgtgccagcatgcccggctaatttttttctttttttgagacagagtctcgctctgtcacccaggctggagttcagtggtgcgacctcggcttactgcaacctccacctcccgggttcaagtgattctcctgcctcagcctcttgagtagctgggactacaggcgcacaccaccacgccaggctaatttttgtatttttagtagagacaaggtttcaccatgttgaccaggctggtcttgaactccttgacctcaggtaatctgcctaccttggcctcccaaagtgctgggatcacaggcgtgagctatcacacctggccccagaagtgtttcaacatggaaattttccttagcccttctgtggttgtcatggcttaatgtgtgtctttccagaactttgaatgtttgcatacttgtggatgtacctttcaaatatgtttgtcttgtgtatcatatataaatggtattgtgttca

SEQ ID NO: 139082 - DNA, 756 bp, Homo sapiens
  Payload ID: 7255
  Gene Symbol: GTPBP4
  Gene Name: GTP binding protein 4
  ENST ID: ENST00000360059
  CDS Start-End: 337-756
gggtccaccagagatcggatcccccagagaccggggtccacctaagaccgtggtccacccaaagactgagggcccccagagatgggggtacacccagagttgggttccctggaggggccccgggtgacgatgtgggcgagtggagggggaccccgacatgtgagggaggaagcgttccgtggtccgtgatgagccttcggattctgggtttggcgtagccccctcccctctcaggaatcctgggacttcatagacctcacgttgtcgaagactcaacgaaagactccaaccgttattcataaacattaccaaatacatcgcattagacatttttacatgagaaaagtcaaatttactcaacagaattaccatgatagactttcacaaattctaacagatttccccaaattggatgatattcatccgttctatgctgatttgatgaatattctctacgacaaggatcattacaagttggctctggggcaaataaatattgccaaaaatttagtggacaatgttgctaaagattatgtgcgactgatgaagtatggcgactctctctaccgctgcaaacagctgaagcgtgcggccctgggacggatgtgcacagtgatcaagaggcagaagcagagtttggagtatttggagcaagtgcgtcagcatttatcccgtttgccaaccattgatccgaataccaggaccctgcttttgtgtgggtacccaaatgttgggaagtccagcttcatcaacaag

SEQ ID NO: 139083 - DNA, 5075 bp, Homo sapiens
  Payload ID: 7255
  Gene Symbol: GTPBP4
  Gene Name: GTP binding protein 4
  Uniprot ID: Q9BZE4
  ENST ID: ENST00000360803
  CDS Start-End: 462-2366
tttgcggggctcgccgcgacccaggacccccagactcccggatcccctagaccctctggactcctaagccccgcaactcccaaatcccaagaccccggaccctccaaccctggcccagggcgcgtggctgggggcctgaacccgctccagaaacccgcagggcagtctgtcggaaacccccgctttactcagcaggaatttagtctccgcgctccccctaaaacccgggcgtcctctcctctgtaccctcgctcctgaggccctcacacgccctccgtggctgacctccaagccgggcgggtgcgctgtgcgacgcggaaagcgccgtagagcacgcagaacacgattggctgagctcccggaagtgacgtacctcaaccgcccgacagtggaagtcccacctgcgcccgacggcggaagttccgggagtgccaagtacccgcgtgcatacggctgccggcatggcacattacaacttcaagaaaattacggtggtgccgtccgccaaggacttcatagacctcacgttgtcgaagactcaacgaaagactccaaccgttattcataaacattaccaaatacatcgcattagacatttttacatgagaaaagtcaaatttactcaacagaattaccatgatagactttcacaaattctaacagatttccccaaattggatgatattcatccgttctatgctgatttgatgaatattctctacgacaaggatcattacaagttggctctggggcaaataaatattgccaaaaatttagtggacaatgttgctaaagattatgtgcgactgatgaagtatggcgactctctctaccgctgcaaacagctgaagcgtgcggccctgggacggatgtgcacagtgatcaagaggcagaagcagagtttggagtatttggagcaagtgcgtcagcatttatcccgtttgccaaccattgatccgaataccaggaccctgcttttgtgtgggtacccaaatgttgggaagtccagcttcatcaacaaggtgacgagagcagacgtggatgtccagccctatgcgttcacaaccaagtctctgtttgttgggcacatggattataagtatctacgttggcaggttgtagacactcctgggatcctggaccaccctctggaggataggaacaccatcgagatgcaggccatcactgccctggcccacctccgtgctgcggtcctgtatgtgatggatttgtctgagcagtgtgggcatgggctgagggagcagctagaactcttccagaacatcagacctctcttcatcaacaagcctctcatagttgtagccaacaaatgtgatgtgaagagaatagctgaactttctgaagatgatcagaaaatatttacagatttgcagtctgaaggattccctgtaatagagaccagcaccctgactgaggaaggtgttattaaagttaaaacagaggcttgcgataggcttttggctcatcgagtggaaaccaaaatgaagggaaataaagtgaatgaggtgctgaatagactgcacctggctatcccaaccaggagggacgataaggagaggccccctttcatccctgaaggagtggtggctcgcaggaagaggatggaaactgaggagtccaggaagaagagggaacgagatcttgagctggaaatgggagatgattatattttggatcttcagaagtactgggatttaatgaatttgtctgaaaaacatgataagataccagaaatctgggaaggccataatatagctgattatattgatccagccatcatgaagaaattggaagaattagaaaaagaagaagagctgagaacagctgctggagagtatgacagtgtatctgagagtgaagacgaagagatgctggaaatccgacagctggcaaagcaaattcgagagaaaaagaagttgaaaattctggagtccaaagaaaagaatacacagggacccaggatgccgcgaactgctaagaaggttcagaggacagttttggagaaggagatgcgtagtcttggtgttgacatggacgataaagacgatgcccattacgcagtccaggcaagaagatcccggagcatcactaggaaaagaaagcgggaagactctgctcccccgtcctctgtggcccggagtgggagttgctctcgaactccacgtgacgtttctggtcttagggatgtcaagatggtgaagaaagccaagactatgatgaagaatgctcagaagaagatgaatcggttggggaagaaaggggaggcggatagacacgtgtttgatatgaagcccaagcacttgctgtctgggaagaggaaagctggtaaaaaggacaggagatagtatccgtttggttggcgtggcttcgctagagtgttgctgtttatttcctggtttggcacagtatggtttcatgaaattggagctctgtataaactgaaaaagacaaaataagtaaagcacttgttgctttgctgaaaactatggttaaccctatataggtgtgggaaatttttgtcactgcataatattacaaatattttgagtagacagtgtttccacatttaatggagtatcagttgcttcagattttcagaactgggaagatttactggtttaactaggttgtttttgatggagaaaaaccttattttcttttgtaagagctgggagcaaacacgtttatgagtgtgtcggaatcccgtgcttaaaatacgctcttaaattattttctagtcttattttacaatgtctcattgtagtctgtcttcaactattttatccaaaataaacctccagaagaaagtagttttcatttacttagctcatgttttggtttagttatagtcgctatggatttggccaaataaaaaggcaaacaacatgacatttctattttgttttaaagcaaaaatacttttgggggagtaaaatgttgctggaggcattaggcaattaaatatgggcattctcctatttctgtggcccgtccctgaagttacatgttcagtaaaacacaaaaacaccgccaatgccacctcaaaagcacctgctggggagcgttggggtgaagagctgtggggtcggagggacctgcccaggggtccgtgtgctcctggagctccaaagacacacaggggtccaagagccaccacggataagttatcaagtcacacaatcaacattatagctgaggaaaggactttagttaatcacacttctggattacatgtggcaattttaaaaatttaccagggctgggctgggcgcaggggctcaagcctgtagttccagcactttgggaggccgaggtgggcagatcaggaggtcaggagttcgagaccagcctggccaacatggtgaaaccccatctctactaaaaatacaaaaattagccatgcgtggtggtgggcatctgtaatcctagctgctcgggaggctaaggcaggagaattgcttgagcccagaggcggaggttgcagtgagccgagatcgtgccactgcactccagcctgggtgacagagagagactccgtgtgaaaaaaaaaaaaaaaataccaggtctggtttttgaaattctttctccgtattaaacaccaaaacttaacatatagtttactttgtgttaaacaacaacagtatggccgggcgcggcagctcatgcctgtaatcccagcactttgggaggccgaggcaggcggatcacgaggtcaggagatcgagaccatcctggctaacacggtgaaaccccgtctctactaaaaatacaaaaaattagctgggtgtggtggcgggcgcctgtagtcccaactacttgggaggctgaggcaggagaatggcttgaacccgggaggcggagcttgcagtgagccaagatcgcaccactgcactccagcctggtcgacagcgagactccatctcaaaaaaaaaaaaaaaataccaggtctggtttttgaaattctttctccgtattaaacaccaaaacttaacatatagtttactttgtgttaaacaacaacagtatgttttaaagcaagtatgtctttatttgtaagcatattactgaaacgatcaaatgaacagaagtggataaacgtcgagtcacttggctgagaccatacgcatcttccgtactgcttgtattaggatgcaagattgaatgtgtcttttttttaaaaatgcagccttgtgttgcactctgaaataagtgatttaaaaagaaaaacatgatacagagatcccatcctgaccttggaggcttggataaagctgtggggagacagcctcatggtccagccaggctagtccgcctgcttcaggactctcaagatctccccaagactttcaggatcagctgctgttaatcaaacaagtgcttataaaatggaaattgggacaaaggaaatgttaaatttcctccctgcaaccaggcagatgagaaatatggaaataaggaaaagggaaaatgaagatatgacaaagttgatgaaaaggttgaaatagtgatttatacatgatgggcaatcaagtgccccttttgccctgttttttggagagggtgtatcattgcctcaatggtgcgtctgcctgcactgagggcattacacatggctgactcgacctccctgcctctcacactctgtgtattttgtgaagctccacaaacggggtcacgtcatccaggtgaggccaccaccggtacagaaacctctcggcaatggttcttagccagggggtgactttgacttcacccctcgcctccctctccagcagctcccacagctcctcctgggacaggtagaggatgcttttcgtttcactgggatccgggttcagagtgacgtttttcctcacaagcagaaggtaacaaatttcatgctctccccaaattctgtctgattttgccttgtggtgatagattgtcatgaacacaatgtcctctggagaaatctattgacagaaattggtgcagtgttaacaacgctaatgtaaaacacagaatttacagaaaaatagagaaaataaacacatttgttttcctcagaaaatgaa

SEQ ID NO: 139084 - DNA, 1907 bp, Homo sapiens
  Payload ID: 7256
  Gene Symbol: GTPBP6
  Gene Name: GTP binding protein 6 (putative)
  ENST ID: ENST00000326153
  CDS Start-End: 33-1583
ccccgccccaacgttcagcctccagacgcgccatgtgggccctgcgggccgccgtacgcccggggctgcggctctcccgcgtgggccgcggccgctcggctccgcgggcagccgcgccgtcctgccccgcgcgcgcgctagccgctgtcggccgcaggagccccgggaatctggaggggccgtggggcggagggcggggcctgcgggcggacggcggccgaagccgcacgggagacgacgaggaggagccggaagatgcggacgagaacgccgaggaggagctgctgcggggagagcctctgctgccggcggggacccagcgcgtgtgtctggttcaccctgacgtcaagtggggcccggggaagtcgcagatgactcgagccgagtggcaggtggcggaggccacagcgctggtgcacacgctggacggctggtccgtggtgcagacaatggtcgtgtccaccaaaacgccggacaggaagctcatctttggcaaagggaactttgagcacctgacagaaaagatccgagggtctccagacatcacgtgcgtcttcctgaacgtggagaggatggctgccccgaccaagaaagaactggaagccgcctggggcgtggaggtgtttgaccgcttcacggtcgtcctgcacatcttccgctgtaacgcccgcacgaaggaggcccggcttcaggtggccctggcggagatgccgctgcacaggtcgaacttgaaaagggacgtcgcccacctgtaccgaggagtcggctcgcgctacatcatggggtcaggagaatccttcatgcagctgcagcagcgtctcctgagagagaaggaggccaagatcaggaaggccttggacaggcttcgcaagaagaggcacctgctccgccggcagcggacgaggcgggagttccccgtgatctccgtggtggggtacaccaactgcggaaagaccacgctgatcaaggcactgacgggcgatgccgccatccagccacgggaccagctgtttgccacgctggacgtcacggcccacgcgggcacgctgccctcacgcatgaccgtcctgtacgtggacaccatcggcttcctctcccagctgccgcacggcctcatcgagtccttctccgccaccctggaagacgtggcccactcggatctcatcttgcacgtgagggacgtcagccaccccgaggcggagctccagaaatgcagcgttctgtccacgctgcgtggcctgcagctgcccgccccgctcctggactccatggtggaggttcacaacaaggtggacctcgtgcccgggtacagccccacggaaccgaacgtcgtgcccgtgtctgccctgcggggccacgggctccaggagctgaaagctgagctcgatgcggcggttttgaaggcgacggggagacagatcctcactctccgtgtgaggctcgcaggggcgcagctcagctggctgtataaggaggccacagttcaggaggtggacgtgatccctgaggacggggcggccgacgtgagggtcatcatcagcaactcagcctacggcaaattccggaagctctttccaggatgaacggacgcccacagaggcctgcggggtgggggcatcgctgcctggggagctgaggcgttaccgctgtgttgggggcagcttggtgtcaggtgcagcagggtcctccttgtctggttctgcacccgtctcgctcccagccatttgctgggatgaccgtgcaggccggtgacacggccgcacctgccccaaagcgggccgcccgagcgtccactccaagcctgagcatccacacaattccagtgggccctcggtgcctgctgtgaactgctttccctcggaatgtttccgtaacaggacattaaacctttgattttacttccgtga

SEQ ID NO: 139085 - DNA, 2208 bp, Homo sapiens
  Payload ID: 7257
  Gene Symbol: GEM
  Gene Name: GTP binding protein overexpressed in skeletal muscle
  Uniprot ID: P55040
  ENST ID: ENST00000297596
  CDS Start-End: 266-1156
ataaaccgcccggccgcggcggctgcaggcggcgggcaaggacggcgggcacagcgcagcactccccgctcgttggcccgggtatcccagcgcggacccacgcgatacgctgacgccccgacgccgatccggccgagccaagtaagggggacggcccgagacggagaagggagagagtgggagtttcccagcccgcagaactttcgaagttgagaaaagaacccctggaacgtgcgctcagcactgggattttctggactcaacgatgactctgaataatgtcaccatgcgccagggcactgtgggcatgcagccacagcagcagcgctggagcatcccagctgatggcaggcatctgatggtccagaaagagccccaccagtacagccaccgcaaccgccattctgctacccctgaggaccactgccgccgaagctggtcctctgactccacagactcagtcatctcctctgagtcagggaacacctactaccgagtggtgctcataggggagcagggggtgggcaagtccactctggccaacatctttgcaggtgtgcatgacagcatggacagcgactgcgaggtgctgggagaagatacatatgaacgaaccctgatggttgatggggaaagtgcaacgattatactcctggatatgtgggaaaataagggggaaaatgaatggctccatgaccactgcatgcaggtcggggacgcatacctgattgtctactcaatcacagaccgagcgagcttcgagaaggcatctgagctgcgaatccagctccgcagggcccggcagacagaggacattcccataattttggttggcaacaaaagtgacttagtgcggtgccgagaagtgtctgtatcagaagggagagcctgtgcagtggtgtttgactgcaagttcatcgagacctctgcagctgtccagcacaacgtgaaggagctgtttgagggcattgtgcgacaggtgcgccttcggcgggacagcaaggagaagaatgaacggcggctggcctaccagaaaaggaaggagagcatgcccaggaaagccaggcgcttctggggcaagatcgtggccaaaaacaacaagaatatggccttcaagctcaagtccaaatcctgccatgacctctctgtactctaggaacccagggtcacccagatgtccctttgatggccgttgttgaaggccattgggaccaataatctatattagattgaatacttaagttagatgtggtttcccccattgtagcagggagctagcgtattagccttgtgggcaacatgatgcatgggaaatgaaagatttttgtaaaaagtcagtatttatttccaggaaaagcctgaccttgctatttgaacacccaagactctttagaggatgtgtttggtgttcacatgtgtttcttctattttggatagtagagaagtaaagcttacaaagaatgcctagaacaagaacttttcatcattaaaaatttttcccagtgttctgatatgtgactttgaggccaatgagtcataaacaaatataagaaagctgtcaatgagtttcttcaaaggagggaaaactttctacgaatctaagatccatggagctagaattgtagaactaggctcatcagaatcgtgactattattgctccatcaaactgtgaaaagaaatgatgtggaccttgctggaaacaaaggcttagcaaacaatttttgttcaatgcccaccaagacatatagaattgggaactgatacatgtgtcccttataggctcaaaaattatatcttacaatttcttatttagggggaaattatttgaatcagattctatttagtcaaaccaccttttatgttttattatttttgaattcatggagccatcataaaaatatttttaaaatcagaattattgataccctgtagtgcaaaatgtcaatttttaatgtataatcagaagtctgaatttttataaaacatatagcataaaaacttccagtactttggttgacccttgtatgtcacagctctgctctatttattattattttgcaaaataaccattttaacatttgataaagcatatttatgaacatatttcttaataagaaaaatatccattttattaccattttctatctttttcaaaatatgcaagtttttacctatatgtcttataataaaagaaataaaatatttga

SEQ ID NO: 139086 - DNA, 2103 bp, Homo sapiens
  Payload ID: 7257
  Gene Symbol: GEM
  Gene Name: GTP binding protein overexpressed in skeletal muscle
  Uniprot ID: P55040
  ENST ID: ENST00000396194
  CDS Start-End: 156-1046
tggttataaaccgcccggccgcggcggctgcaggcggcgggcaaggacggcgggcacagcgcagcactccccgctcgttggcccgggtatcccagcgcggacccacgcgatacgctgacgccccgacgccgatccggccgagccaagactcaacgatgactctgaataatgtcaccatgcgccagggcactgtgggcatgcagccacagcagcagcgctggagcatcccagctgatggcaggcatctgatggtccagaaagagccccaccagtacagccaccgcaaccgccattctgctacccctgaggaccactgccgccgaagctggtcctctgactccacagactcagtcatctcctctgagtcagggaacacctactaccgagtggtgctcataggggagcagggggtgggcaagtccactctggccaacatctttgcaggtgtgcatgacagcatggacagcgactgcgaggtgctgggagaagatacatatgaacgaaccctgatggttgatggggaaagtgcaacgattatactcctggatatgtgggaaaataagggggaaaatgaatggctccatgaccactgcatgcaggtcggggacgcatacctgattgtctactcaatcacagaccgagcgagcttcgagaaggcatctgagctgcgaatccagctccgcagggcccggcagacagaggacattcccataattttggttggcaacaaaagtgacttagtgcggtgccgagaagtgtctgtatcagaagggagagcctgtgcagtggtgtttgactgcaagttcatcgagacctctgcagctgtccagcacaacgtgaaggagctgtttgagggcattgtgcgacaggtgcgccttcggcgggacagcaaggagaagaatgaacggcggctggcctaccagaaaaggaaggagagcatgcccaggaaagccaggcgcttctggggcaagatcgtggccaaaaacaacaagaatatggccttcaagctcaagtccaaatcctgccatgacctctctgtactctaggaacccagggtcacccagatgtccctttgatggccgttgttgaaggccattgggaccaataatctatattagattgaatacttaagttagatgtggtttcccccattgtagcagggagctagcgtattagccttgtgggcaacatgatgcatgggaaatgaaagatttttgtaaaaagtcagtatttatttccaggaaaagcctgaccttgctatttgaacacccaagactctttagaggatgtgtttggtgttcacatgtgtttcttctattttggatagtagagaagtaaagcttacaaagaatgcctagaacaagaacttttcatcattaaaaatttttcccagtgttctgatatgtgactttgaggccaatgagtcataaacaaatataagaaagctgtcaatgagtttcttcaaaggagggaaaactttctacgaatctaagatccatggagctagaattgtagaactaggctcatcagaatcgtgactattattgctccatcaaactgtgaaaagaaatgatgtggaccttgctggaaacaaaggcttagcaaacaatttttgttcaatgcccaccaagacatatagaattgggaactgatacatgtgtcccttataggctcaaaaattatatcttacaatttcttatttagggggaaattatttgaatcagattctatttagtcaaaccaccttttatgttttattatttttgaattcatggagccatcataaaaatatttttaaaatcagaattattgataccctgtagtgcaaaatgtcaatttttaatgtataatcagaagtctgaatttttataaaacatatagcataaaaacttccagtactttggttgacccttgtatgtcacagctctgctctatttattattattttgcaaaataaccattttaacatttgataaagcatatttatgaacatatttcttaataagaaaaatatccattttattaccattttctatctttttcaaaatatgcaagtttttacctatatgtcttataataaaagaaataaaatatttgaaaaaa

SEQ ID NO: 139087 - DNA, 363 bp, Homo sapiens
  Payload ID: 7257
  Gene Symbol: GEM
  Gene Name: GTP binding protein overexpressed in skeletal muscle
  ENST ID: ENST00000523433
  CDS Start-End: 83-363
gttaaccgtatttgttttcccatgcaaatgatagtctgcctgaggagctggttactgacagtgtgggcagcatgactcaacgatgactctgaataatgtcaccatgcgccagggcactgtgggcatgcagccacagcagcagcgctggagcatcccagctgatggcaggcatctgatggtccagaaagagccccaccagtacagccaccgcaaccgccattctgctacccctgaggaccactgccgccgaagctggtcctctgactccacagactcagtcatctcctctgagtcagggaacacctactaccgagtggtgctcataggggagcagggggtgggcaagtccactctggccaacat

SEQ ID NO: 139088 - DNA, 1977 bp, Homo sapiens
  Payload ID: 7258
  Gene Symbol: GCH1
  Gene Name: GTP cyclohydrolase 1
  Uniprot ID: P30793
  ENST ID: ENST00000395514
  CDS Start-End: 162-914
cctgtggccgctcccggctcggagtgtgatctaagcaggttgcgtaccttcctcaggtgactccggccacagcccattgtccgcggccaccggcggagtttagccgcagacctcgaagcgccccggggtccttcccgaacggcagcggctgcggcgggtccatggagaagggccctgtgcgggcaccggcggagaagccgcggggcgccaggtgcagcaatgggttccccgagcgggatccgccgcggcccgggcccagcaggccggcggagaagcccccgcggcccgaggccaagagcgcgcagcccgcggacggctggaagggcgagcggccccgcagcgaggaggataacgagctgaacctccctaacctggcagccgcctactcgtccatcctgagctcgctgggcgagaacccccagcggcaagggctgctcaagacgccctggagggcggcctcggccatgcagttcttcaccaagggctaccaggagaccatctcagatgtcctaaacgatgctatatttgatgaagatcatgatgagatggtgattgtgaaggacatagacatgttttccatgtgtgagcatcacttggttccatttgttggaaaggtccatattggttatcttcctaacaagcaagtccttggcctcagcaaacttgcgaggattgtagaaatctatagtagaagactacaagttcaggagcgccttacaaaacaaattgctgtagcaatcacggaagccttgcggcctgctggagtcggggtagtggttgaagcaacacacatgtgtatggtaatgcgaggtgtacagaaaatgaacagcaaaactgtgaccagcacaatgttgggtgtgttccgggaggatccaaagactcgggaagagttcctgactctcattaggagctgagcttcattcagtgtgtgtctgcagaaccatagcttccacgcacctgaacgagcacagaatgaactgacggtggaagacattatgagctgtgtccaacgttttaaccaaagcgtatcgtaccaacgatctgtgaaaatgcactggaagcttctggtcccggtttcctttgtggtctatgtgggtcttgtcctcattgtaactccgtatagatggtataggtattttaatcctggaagctgttgccttattaatgattatcttaaaatttcctccattggggcagcgtgggccaaattaaaacaaacaaaaccgcaactcctccacagaaacacaaacacagttattccatgaagtttagtatttggttgacatagtgctcttcaaattcatcccattaccctaaaagtaataactttgatgcttgctttaactttagtcccatctctgccactttgatgctatttgggttatgatggggcaagatggcagaggtattgggtttttttgtttttttccattcctctctacttctgtttcctagctttttctttctggagtttaagtacagtgatggttggcttgagtacctttttaaatctagcccagtataaacattagcctgcttaatatttagacatttataggtagaattctgagcactcaactcatgtttggcattttaaagtaaaaacaagtgtgacttcgaggaccaaagaaattgtcagctatacatttatctttatgaactcatttatattcctttttaatgactcgttgttctaacatttcctagaagtgttcttataaaggtctaatgtatccacaggctgttgtcttattagtaaatgcaaagtaatgactttgtctgttttactctagtctttagtacttcaaaattaccttttcatatccatgatcttgagtccatttgggggatttttaagaatttgatgtatttcaatacactgttcaaaattaaattgtttaattttatgtatgagtatgtatgttcctgaaggtggtcctatttaaattattaaactattgtaactttgttcttgtg

SEQ ID NO: 139089 - DNA, 2943 bp, Homo sapiens
  Payload ID: 7258
  Gene Symbol: GCH1
  Gene Name: GTP cyclohydrolase 1
  Uniprot ID: P30793
  ENST ID: ENST00000491895
  CDS Start-End: 190-942
aaaaaggaggcgcggccgggctttccagcctgtggccgctcccggctcggagtgtgatctaagcaggttgcgtaccttcctcaggtgactccggccacagcccattgtccgcggccaccggcggagtttagccgcagacctcgaagcgccccggggtccttcccgaacggcagcggctgcggcgggtccatggagaagggccctgtgcgggcaccggcggagaagccgcggggcgccaggtgcagcaatgggttccccgagcgggatccgccgcggcccgggcccagcaggccggcggagaagcccccgcggcccgaggccaagagcgcgcagcccgcggacggctggaagggcgagcggccccgcagcgaggaggataacgagctgaacctccctaacctggcagccgcctactcgtccatcctgagctcgctgggcgagaacccccagcggcaagggctgctcaagacgccctggagggcggcctcggccatgcagttcttcaccaagggctaccaggagaccatctcagatgtcctaaacgatgctatatttgatgaagatcatgatgagatggtgattgtgaaggacatagacatgttttccatgtgtgagcatcacttggttccatttgttggaaaggtccatattggttatcttcctaacaagcaagtccttggcctcagcaaacttgcgaggattgtagaaatctatagtagaagactacaagttcaggagcgccttacaaaacaaattgctgtagcaatcacggaagccttgcggcctgctggagtcggggtagtggttgaagcaacacacatgtgtatggtaatgcgaggtgtacagaaaatgaacagcaaaactgtgaccagcacaatgttgggtgtgttccgggaggatccaaagactcgggaagagttcctgactctcattaggagctgagcttcattcagtgtgtgtgcgttggttgccgatcgtactgccagtagcattgtctgtctgtccggtcttgtttgtacattccattttcaattgttacagatgtgaactttattccttgtcactaattatatttaaaattatttctaggaagtcaaataaatataataaagggttgagccctctactttcttcttgccacctttttgtggcaatattaaagtgaactgctaatagtgtaagtacgtgcacaaaaccactgccagataaccagaggggcctgggaagggagaagaattagtgtatttttttcaaatagtacagtaatttgcctcataagcataggagcattgggaatgagagggaactgtgcccagtatactgttttttttcttcctccaataaaagtggtgtagtgccgaaagtgctaaaatatttagtgcggtattgctctgtgaattcaagttcaacagacttcactttggtcatgtttattaaaccaccagtgacatttaaaaatatatttttagcagtcgtaatgttagtcaccaagggaaggtggtggaatgtctatgtttttgattttactgtgagttaaaaaggcacatttctaccttctattgtttttaaattcaagaatagggaattagttcctggtgttgtttacgagtgtattctcgtgtcaacatacagggatttagacatttaactctctgtgccttgataagaatatcatttagagtgtagatacttttgcctttttaaaaaagccattattttatgagacttagtactcacactgcaaataactagtcagctcagttttaactttataggtttattgagtttcctttgtgtgatccatgtagatgcctcaaaatgtttcttcttcttcttttttttaatcttataagatatttttctaagtatttccagaaacatttgagagtgcccatcattttcaggtctgcagaaccatagcttccacgcacctgaacgagcacagaatgaactgacggtggaagacattatgagctgtgtccaacgttttaaccaaagcgtatcgtaccaacgatctgtgaaaatgcactggaagcttctggtcccggtttcctttgtggtctatgtgggtcttgtcctcattgtaactccgtatagatggtataggtattttaatcctggaagctgttgccttattaatgattatcttaaaatttcctccattggggcagcgtgggccaaattaaaacaaacaaaaccgcaactcctccacagaaacacaaacacagttattccatgaagtttagtatttggttgacatagtgctcttcaaattcatcccattaccctaaaagtaataactttgatgcttgctttaactttagtcccatctctgccactttgatgctatttgggttatgatggggcaagatggcagaggtattgggtttttttgtttttttccattcctctctacttctgtttcctagctttttctttctggagtttaagtacagtgatggttggcttgagtacctttttaaatctagcccagtataaacattagcctgcttaatatttagacatttataggtagaattctgagcactcaactcatgtttggcattttaaagtaaaaacaagtgtgacttcgaggaccaaagaaattgtcagctatacatttatctttatgaactcatttatattcctttttaatgactcgttgttctaacatttcctagaagtgttcttataaaggtctaatgtatccacaggctgttgtcttattagtaaatgcaaagtaatgactttgtctgttttactctagtctttagtacttcaaaattaccttttcatatccatgatcttgagtccatttgggggatttttaagaatttgatgtatttcaatacactgttcaaaattaaattgtttaattttatgtatgagtatgtatgttcctgaaggtggtcctatttaaattattaaactattgtaactttg

SEQ ID NO: 139090 - DNA, 1897 bp, Homo sapiens
  Payload ID: 7258
  Gene Symbol: GCH1
  Gene Name: GTP cyclohydrolase 1
  Uniprot ID: P30793
  ENST ID: ENST00000543643
  CDS Start-End: 145-846
ctcggagtgtgatctaagcaggttgcgtaccttcctcaggtgactccggccacagcccattgtccgcggccaccggcggagtttagccgcagacctcgaagcgccccggggtccttcccgaacggcagcggctgcggcgggtccatggagaagggccctgtgcgggcaccggcggagaagccgcggggcgccaggtgcagcaatgggttccccgagcgggatccgccgcggcccgggcccagcaggccggcggagaagcccccgcggcccgaggccaagagcgcgcagcccgcggacggctggaagggcgagcggccccgcagcgaggaggataacgagctgaacctccctaacctggcagccgcctactcgtccatcctgagctcgctgggcgagaacccccagcggcaagggctgctcaagacgccctggagggcggcctcggccatgcagttcttcaccaagggctaccaggagaccatctcagatgtcctaaacgatgctatatttgatgaagatcatgatgagatggtgattgtgaaggacatagacatgttttccatgtgtgagcatcacttggttccatttgttggaaaggtccatattggttatcttcctaacaagcaagtccttggcctcagcaaacttgcgaggattgtagaaatctatagtagaagactacaagttcaggagcgccttacaaaacaaattgctgtagcaatcacggaagccttgcggcctgctggagtcggggtagtggttgaagcaacgaagtcaaataaatataataaagggttgagccctctactttcttcttgccacctttttgtggcaatattaaagtgaactgctaatagtgtctgcagaaccatagcttccacgcacctgaacgagcacagaatgaactgacggtggaagacattatgagctgtgtccaacgttttaaccaaagcgtatcgtaccaacgatctgtgaaaatgcactggaagcttctggtcccggtttcctttgtggtctatgtgggtcttgtcctcattgtaactccgtatagatggtataggtattttaatcctggaagctgttgccttattaatgattatcttaaaatttcctccattggggcagcgtgggccaaattaaaacaaacaaaaccgcaactcctccacagaaacacaaacacagttattccatgaagtttagtatttggttgacatagtgctcttcaaattcatcccattaccctaaaagtaataactttgatgcttgctttaactttagtcccatctctgccactttgatgctatttgggttatgatggggcaagatggcagaggtattgggtttttttgtttttttccattcctctctacttctgtttcctagctttttctttctggagtttaagtacagtgatggttggcttgagtacctttttaaatctagcccagtataaacattagcctgcttaatatttagacatttataggtagaattctgagcactcaactcatgtttggcattttaaagtaaaaacaagtgtgacttcgaggaccaaagaaattgtcagctatacatttatctttatgaactcatttatattcctttttaatgactcgttgttctaacatttcctagaagtgttcttataaaggtctaatgtatccacaggctgttgtcttattagtaaatgcaaagtaatgactttgtctgttttactctagtctttagtacttcaaaattaccttttcatatccatgatcttgagtccatttgggggatttttaagaatttgatgtatttcaatacactgttcaaaattaaattgtttaattttatgtatgagtatgtatgttcctgaaggtggtcctatttaaattattaaactattgtaactttg

SEQ ID NO: 139091 - DNA, 1805 bp, Homo sapiens
  Payload ID: 7258
  Gene Symbol: GCH1
  Gene Name: GTP cyclohydrolase 1
  Uniprot ID: P30793
  ENST ID: ENST00000536224
  CDS Start-End: 154-795
cgctcccggctcggagtgtgatctaagcaggttgcgtaccttcctcaggtgactccggccacagcccattgtccgcggccaccggcggagtttagccgcagacctcgaagcgccccggggtccttcccgaacggcagcggctgcggcgggtccatggagaagggccctgtgcgggcaccggcggagaagccgcggggcgccaggtgcagcaatgggttccccgagcgggatccgccgcggcccgggcccagcaggccggcggagaagcccccgcggcccgaggccaagagcgcgcagcccgcggacggctggaagggcgagcggccccgcagcgaggaggataacgagctgaacctccctaacctggcagccgcctactcgtccatcctgagctcgctgggcgagaacccccagcggcaagggctgctcaagacgccctggagggcggcctcggccatgcagttcttcaccaagggctaccaggagaccatctcagatgtcctaaacgatgctatatttgatgaagatcatgatgagatggtgattgtgaaggacatagacatgttttccatgtgtgagcatcacttggttccatttgttggaaaggtccatattggttatcttcctaacaagcaagtccttggcctcagcaaacttgcgaggattgtagaaatctatagtagaagactacaagttcaggagcgccttacaaaacaaattgctgtagcaatcacggaagccttgcggcctgctggagtcggggtagtggttgaagcaacgtctgcagaaccatagcttccacgcacctgaacgagcacagaatgaactgacggtggaagacattatgagctgtgtccaacgttttaaccaaagcgtatcgtaccaacgatctgtgaaaatgcactggaagcttctggtcccggtttcctttgtggtctatgtgggtcttgtcctcattgtaactccgtatagatggtataggtattttaatcctggaagctgttgccttattaatgattatcttaaaatttcctccattggggcagcgtgggccaaattaaaacaaacaaaaccgcaactcctccacagaaacacaaacacagttattccatgaagtttagtatttggttgacatagtgctcttcaaattcatcccattaccctaaaagtaataactttgatgcttgctttaactttagtcccatctctgccactttgatgctatttgggttatgatggggcaagatggcagaggtattgggtttttttgtttttttccattcctctctacttctgtttcctagctttttctttctggagtttaagtacagtgatggttggcttgagtacctttttaaatctagcccagtataaacattagcctgcttaatatttagacatttataggtagaattctgagcactcaactcatgtttggcattttaaagtaaaaacaagtgtgacttcgaggaccaaagaaattgtcagctatacatttatctttatgaactcatttatattcctttttaatgactcgttgttctaacatttcctagaagtgttcttataaaggtctaatgtatccacaggctgttgtcttattagtaaatgcaaagtaatgactttgtctgttttactctagtctttagtacttcaaaattaccttttcatatccatgatcttgagtccatttgggggatttttaagaatttgatgtatttcaatacactgttcaaaattaaattgtttaattttatgtatgagtatgtatgttcctgaaggtggtcctatttaaattattaaac

SEQ ID NO: 139092 - DNA, 2923 bp, Homo sapiens
  Payload ID: 7258
  Gene Symbol: GCH1
  Gene Name: GTP cyclohydrolase 1
  Uniprot ID: P30793
  ENST ID: ENST00000622544
  CDS Start-End: 162-914
cctgtggccgctcccggctcggagtgtgatctaagcaggttgcgtaccttcctcaggtgactccggccacagcccattgtccgcggccaccggcggagtttagccgcagacctcgaagcgccccggggtccttcccgaacggcagcggctgcggcgggtccatggagaagggccctgtgcgggcaccggcggagaagccgcggggcgccaggtgcagcaatgggttccccgagcgggatccgccgcggcccgggcccagcaggccggcggagaagcccccgcggcccgaggccaagagcgcgcagcccgcggacggctggaagggcgagcggccccgcagcgaggaggataacgagctgaacctccctaacctggcagccgcctactcgtccatcctgagctcgctgggcgagaacccccagcggcaagggctgctcaagacgccctggagggcggcctcggccatgcagttcttcaccaagggctaccaggagaccatctcagatgtcctaaacgatgctatatttgatgaagatcatgatgagatggtgattgtgaaggacatagacatgttttccatgtgtgagcatcacttggttccatttgttggaaaggtccatattggttatcttcctaacaagcaagtccttggcctcagcaaacttgcgaggattgtagaaatctatagtagaagactacaagttcaggagcgccttacaaaacaaattgctgtagcaatcacggaagccttgcggcctgctggagtcggggtagtggttgaagcaacacacatgtgtatggtaatgcgaggtgtacagaaaatgaacagcaaaactgtgaccagcacaatgttgggtgtgttccgggaggatccaaagactcgggaagagttcctgactctcattaggagctgagcttcattcagtgtgtgtgcgttggttgccgatcgtactgccagtagcattgtctgtctgtccggtcttgtttgtacattccattttcaattgttacagatgtgaactttattccttgtcactaattatatttaaaattatttctaggaagtcaaataaatataataaagggttgagccctctactttcttcttgccacctttttgtggcaatattaaagtgaactgctaatagtgtaagtacgtgcacaaaaccactgccagataaccagaggggcctgggaagggagaagaattagtgtatttttttcaaatagtacagtaatttgcctcataagcataggagcattgggaatgagagggaactgtgcccagtatactgttttttttcttcctccaataaaagtggtgtagtgccgaaagtgctaaaatatttagtgcggtattgctctgtgaattcaagttcaacagacttcactttggtcatgtttattaaaccaccagtgacatttaaaaatatatttttagcagtcgtaatgttagtcaccaagggaaggtggtggaatgtctatgtttttgattttactgtgagttaaaaaggcacatttctaccttctattgtttttaaattcaagaatagggaattagttcctggtgttgtttacgagtgtattctcgtgtcaacatacagggatttagacatttaactctctgtgccttgataagaatatcatttagagtgtagatacttttgcctttttaaaaaagccattattttatgagacttagtactcacactgcaaataactagtcagctcagttttaactttataggtttattgagtttcctttgtgtgatccatgtagatgcctcaaaatgtttcttcttcttcttttttttaatcttataagatatttttctaagtatttccagaaacatttgagagtgcccatcattttcaggtctgcagaaccatagcttccacgcacctgaacgagcacagaatgaactgacggtggaagacattatgagctgtgtccaacgttttaaccaaagcgtatcgtaccaacgatctgtgaaaatgcactggaagcttctggtcccggtttcctttgtggtctatgtgggtcttgtcctcattgtaactccgtatagatggtataggtattttaatcctggaagctgttgccttattaatgattatcttaaaatttcctccattggggcagcgtgggccaaattaaaacaaacaaaaccgcaactcctccacagaaacacaaacacagttattccatgaagtttagtatttggttgacatagtgctcttcaaattcatcccattaccctaaaagtaataactttgatgcttgctttaactttagtcccatctctgccactttgatgctatttgggttatgatggggcaagatggcagaggtattgggtttttttgtttttttccattcctctctacttctgtttcctagctttttctttctggagtttaagtacagtgatggttggcttgagtacctttttaaatctagcccagtataaacattagcctgcttaatatttagacatttataggtagaattctgagcactcaactcatgtttggcattttaaagtaaaaacaagtgtgacttcgaggaccaaagaaattgtcagctatacatttatctttatgaactcatttatattcctttttaatgactcgttgttctaacatttcctagaagtgttcttataaaggtctaatgtatccacaggctgttgtcttattagtaaatgcaaagtaatgactttgtctgttttactctagtctttagtacttcaaaattaccttttcatatccatgatcttgagtccatttgggggatttttaagaatttgatgtatttcaatacactgttcaaaattaaattgtttaattttatgtatgagtatgtatgttcctgaaggtggtcctatttaaattattaaactattgtaactttgttcttgtg

SEQ ID NO: 139093 - DNA, 777 bp, Homo sapiens
  Payload ID: 7259
  Gene Symbol: GCHFR
  Gene Name: GTP cyclohydrolase I feedback regulator
  Uniprot ID: P30047
  ENST ID: ENST00000260447
  CDS Start-End: 162-416
cacggcggtcacgggcaaggtgccccgggattgacgccgcctgtggccagagccggagtaacgggactcccagctgcgcgtcgcagtcccgacgcgagaagggctggagtcggcgtccagcctagagcccccggtgggagccaggccgggacgcgtgcaccatgccctacctgctcatcagcacccagatccgcatggaggtgggccccactatggtgggcgatgaacagtcggatccagagctgatgcagcatctgggggcttcaaagagaagagccttgggaaacaacttttatgaatactacgtcgatgaccctccccgcatagtcctggacaagctggaacgcaggggcttccgtgtgctgagcatgacgggggtgggccagacgctggtgtggtgtctgcacaaggagtgaccttctcatgctgatttgcagacggggcacccctgtggaggggctgctgtgggccctgacctccaagctcctgcctcaccgtctgccttgctcctctcttcccaaatcatcaccgccatgggcccagccccaaagggcagtgaatggccttctctgaaaccctgcgtcaagcagtgggagagggcagtgcccggtgccctggtgctcccagctgccctcctgcttcgggcctgggccgagggccttgtgtaggccatgttcctcgggcagctgccccgggccggagctgggcactccagcggccctggcgcgtggctcctgcatagctagcccaagccaataaagggctgtgatgagtggc

SEQ ID NO: 139094 - DNA, 785 bp, Homo sapiens
  Payload ID: 7259
  Gene Symbol: GCHFR
  Gene Name: GTP cyclohydrolase I feedback regulator
  ENST ID: ENST00000558467
  CDS Start-End: 223-426
ctagggagggcgcctacattgctcctcctgatcattgatgggctccaccccttcacagcttgtgctcagcccctaagaatccttgctactctctgtagcctttacctgaaccttactcagggctagcaggcaggggaggaaggacaggcaagaccttccacctcctcctggcagccagccaagcagccactgtggcttaccttgcaggaggtgggccccactatggtgggcgatgaacagtcggatccagagctgatgcagcatctgggggcttcaaagagaagagccttgggaaacaacttttatgaatactacgtcgatgaccctccccgcatagtcctggacaagctggaacgcaggggcttccgtgtgctgagcatgacgggggtgggccagacgctggtgtggtgtctgcacaaggagtgaccttctcatgctgatttgcagacggggcacccctgtggaggggctgctgtgggccctgacctccaagctcctgcctcaccgtctgccttgctcctctcttcccaaatcatcaccgccatgggcccagccccaaagggcagtgaatggccttctctgaaaccctgcgtcaagcagtgggagagggcagtgcccggtgccctggtgctcccagctgccctcctgcttcgggcctgggccgagggccttgtgtaggccatgttcctcgggcagctgccccgggccggagctgggcactccagcggccctggcgcgtggctcctgcatagctagcccaagccaataaagggctgtgatgagtg

SEQ ID NO: 139095 - DNA, 626 bp, Homo sapiens
  Payload ID: 7259
  Gene Symbol: GCHFR
  Gene Name: GTP cyclohydrolase I feedback regulator
  Uniprot ID: P30047
  ENST ID: ENST00000559445
  CDS Start-End: 55-276
agtcggcgtccagcctagagcccccggtgggagccaggccgggacgcgtgcaccatgccctacctgctcatcagcacccagatccgcatgtcggatccagagctgatgcagcatctgggggcttcaaagagaagagccttgggaaacaacttttatgaatactacgtcgatgaccctccccgcatagtcctggacaagctggaacgcaggggcttccgtgtgctgagcatgacgggggtgggccagacgctggtgtggtgtctgcacaaggagtgaccttctcatgctgatttgcagacggggcacccctgtggaggggctgctgtgggccctgacctccaagctcctgcctcaccgtctgccttgctcctctcttcccaaatcatcaccgccatgggcccagccccaaagggcagtgaatggccttctctgaaaccctgcgtcaagcagtgggagagggcagtgcccggtgccctggtgctcccagctgccctcctgcttcgggcctgggccgagggccttgtgtaggccatgttcctcgggcagctgccccgggccggagctgggcactccagcggccctggcgcgtggctcctgcatagctagcccaagccaataaagggctg

SEQ ID NO: 139096 - DNA, 572 bp, Homo sapiens
  Payload ID: 7259
  Gene Symbol: GCHFR
  Gene Name: GTP cyclohydrolase I feedback regulator
  ENST ID: ENST00000561160
  CDS Start-End: 78-212
agtcccgacgcgagaagggctggagtcggcgtccagcctagagcccccggtgggagccaggccgggacgcgtgcaccatgccctacctgctcatcagcacccagatccgcatggaggtgggccccactatggtgggcgatgaacagtcggatccagagctgatgcagcatctgggggcttcaaagagaagagccttgggaaacaacttgtaagtagcagcctccctcagtatcctctccctgccagcccctagacctgcctctgctccctttatacaacctccaagcccagggacagggcccagcatcagagccccctgcctgcatcctggggctctgttctccggaggagttggtcccatctgtagcctctccaacatcccccctctcccccacgaggcttgctctgaaagctttccacatccttactggaaccgcagaaacagagtccgttccctgggtctaggactccactagcagactgttccttgccctgccctctcctaagctggaccccatcaaggacagacaggcacagagagaaaggtttttgtcgtgaggatctgcatgagt

SEQ ID NO: 139097 - DNA, 695 bp, Homo sapiens
  Payload ID: 7259
  Gene Symbol: GCHFR
  Gene Name: GTP cyclohydrolase I feedback regulator
  ENST ID: ENST00000559932
  CDS Start-End: 199-402
attgccgcgaaggggcccgggtacgtgcgtcccggcaacagggcgacctccgggcgcttccggctcctgtcctacctgtcggcgggagagacccagggagccctggcctcacgcgcagcacctagtgccctgcacagagccgctccgcaggggaaaaaagggcgaataacctgagagaaagaggaggtgggccccactatggtgggcgatgaacagtcggatccagagctgatgcagcatctgggggcttcaaagagaagagccttgggaaacaacttttatgaatactacgtcgatgaccctccccgcatagtcctggacaagctggaacgcaggggcttccgtgtgctgagcatgacgggggtgggccagacgctggtgtggtgtctgcacaaggagtgaccttctcatgctgatttgcagacggggcacccctgtggaggggctgctgtgggccctgacctccaagctcctgcctcaccgtctgccttgctcctctcttcccaaatcatcaccgccatgggcccagccccaaagggcagtgaatggccttctctgaaaccctgcgtcaagcagtgggagagggcagtgcccggtgccctggtgctcccagctgccctcctgcttcgggcctgggccgagggccttgtgtaggccatgttcctcgggcagctgccccgggccggagctgggca

SEQ ID NO: 139098 - DNA, 412 bp, Homo sapiens
  Payload ID: 7259
  Gene Symbol: GCHFR
  Gene Name: GTP cyclohydrolase I feedback regulator
  ENST ID: ENST00000558670
  CDS Start-End: 59-100
ctggagtcggcgtccagcctagagcccccggtgggagccaggccgggacgcgtgcaccatgccctacctgctcatcagcacccagatccgcatgttatgaatactacgtcgatgaccctccccgcatagtcctggacaagctggaacgcaggggcttccgtgtgctgagcatgacgggggtgggccagacgctggtgtggtgtctgcacaaggagtgaccttctcatgctgatttgcagacggggcacccctgtggaggggctgctgtgggccctgacctccaagctcctgcctcaccgtctgccttgctcctctcttcccaaatcatcaccgccatgggcccagccccaaagggcagtgaatggccttctctgaaaccctgcgtcaagcagtgggagagggcagtgcccgg

SEQ ID NO: 139099 - DNA, 2803 bp, Homo sapiens
  Payload ID: 7260
  Gene Symbol: G3BP1
  Gene Name: GTPase activating protein (SH3 domain) binding protein 1
  Uniprot ID: Q13283
  ENST ID: ENST00000356245
  CDS Start-End: 144-1544
agcacgcgtgtgtgcggacgcagttgcgtgaggggtttgtactatcctcggtgctgtggtgcagagctagttcctctccagctcagccgcgtaggtttggacatatttgactcttttccccccaggttgaattgaccaaagcaatggtgatggagaagcctagtcccctgctggtcgggcgggaatttgtgagacagtattacacactgctgaaccaggccccagacatgctgcatagattttatggaaagaactcttcttatgtccatgggggattggattcaaatggaaagccagcagatgcagtctacggacagaaagaaatccacaggaaagtgatgtcacaaaacttcaccaactgccacaccaagattcgccatgttgatgctcatgccacgctaaatgatggtgtggtagtccaggtgatggggcttctctctaacaacaaccaggctttgaggagattcatgcaaacgtttgtccttgctcctgaggggtctgttgcaaataaattctatgttcacaatgatatcttcagataccaagatgaggtctttggtgggtttgtcactgagcctcaggaggagtctgaagaagaagtagaggaacctgaagaaagacagcaaacacctgaggtggtacctgatgattctggaactttctatgatcaggcagttgtcagtaatgacatggaagaacatttagaggagcctgttgctgaaccagagcctgatcctgaaccagaaccagaacaagaacctgtatctgaaatccaagaggaaaagcctgagccagtattagaagaaactgcccctgaggatgctcagaagagttcttctccagcacctgcagacatagctcagacagtacaggaagacttgaggacattttcttgggcatctgtgaccagtaagaatcttccacccagtggagctgttccagttactgggataccacctcatgttgttaaagtaccagcttcacagccccgtccagagtctaagcctgaatctcagattccaccacaaagacctcagcgggatcaaagagtgcgagaacaacgaataaatattcctccccaaaggggacccagaccaatccgtgaggctggtgagcaaggtgacattgaaccccgaagaatggtgagacaccctgacagtcaccaactcttcattggcaacctgcctcatgaagtggacaaatcagagcttaaagatttctttcaaagttatggaaacgtggtggagttgcgcattaacagtggtgggaaattacccaattttggttttgttgtgtttgatgattctgagcctgttcagaaagtccttagcaacaggcccatcatgttcagaggtgaggtccgtctgaatgtcgaagagaagaagactcgagctgccagggaaggcgaccgacgagataatcgccttcggggacctggaggccctcgaggtgggctgggtggtggaatgagaggccctccccgtggaggcatggtgcagaaaccaggatttggagtgggaagggggcttgcgccacggcagtgaatcttcatggatcttcatgcagccatacaaaccctggttccaacagaatggtgaattttcgacagcctttggtatcttggagtatgaccccagtctgttataaactgcttaagtttgtataattttactttttttgtgtgttaatggtgtgtgctccctctccctctcttccctttcctgacctttagtctttcacttccaattttgtggaatgatattttaggaataacggacttttaaagaagcaaaaaaaaagactgaatttccttgcttactttgcatatacagactggattttttttttttttttacagccatttccccaaaggaatgtcttgcatattactgacatttggtatgtttcattcattggaatatttcttattttctacgtgtttgaaaagcctgtaagaaatacaggatttgataatattttgaaggcaggaaaaacccaaattgtttcttctttgagagtcatgactaccttctggtgtggagaaattgccattggaaaatttgacaattttgattctcactggtatgtttaaaaactgaataaaaggaatagaatttttttttgataaaggatcacaaaacaattctaaaacctaactgtttttaccattgaaatttaaattgtgataataggttttaaatgtctagaatgcaactgataggcttttcttgaactgttagtttttttgaagtagttttttcatgtttaatttgtatttgtaaaaaaacaaaaagcaaaaaaattcccaaaacccagataacaaccagagcaaaactgttgtgccttctatttatctttgatttcagtcttggcaattgtttaaaaaaaaaatctagatttgttttattaggttcagagtatgtggggaattatagaatccctctttcatcactttgtgtatgtcttttgttaacatatttgttatgccttattctaaaattgagtctcaaactggaatgcctttgaagacagatgcttctatagaggttctttgacctaaatagttcagcatttgtatttttattctggtatctaatcagattcctaatcatagcccgtaagaaggaatgttactttaatattggactttgctcatgtgctcgtgtccgcatttttttttttcttaaaatcatagccatatggtaaattttctattttgttatggttctcttttattgatgggcatgcagtgggtgttacttggaaatggccaatttttattaaaatatttctggaagaaaat

SEQ ID NO: 139100 - DNA, 10240 bp, Homo sapiens
  Payload ID: 7260
  Gene Symbol: G3BP1
  Gene Name: GTPase activating protein (SH3 domain) binding protein 1
  Uniprot ID: Q13283
  ENST ID: ENST00000394123
  CDS Start-End: 146-1546
agggtgagtggcagttatatagaccggcggcggagcacgcgtgtgtgcggacgcagttgcgtgaggggtttgtactatcctcggtgctgtggtgcagagctagttcctctccagctcagccgcgtaggttgaattgaccaaagcaatggtgatggagaagcctagtcccctgctggtcgggcgggaatttgtgagacagtattacacactgctgaaccaggccccagacatgctgcatagattttatggaaagaactcttcttatgtccatgggggattggattcaaatggaaagccagcagatgcagtctacggacagaaagaaatccacaggaaagtgatgtcacaaaacttcaccaactgccacaccaagattcgccatgttgatgctcatgccacgctaaatgatggtgtggtagtccaggtgatggggcttctctctaacaacaaccaggctttgaggagattcatgcaaacgtttgtccttgctcctgaggggtctgttgcaaataaattctatgttcacaatgatatcttcagataccaagatgaggtctttggtgggtttgtcactgagcctcaggaggagtctgaagaagaagtagaggaacctgaagaaagacagcaaacacctgaggtggtacctgatgattctggaactttctatgatcaggcagttgtcagtaatgacatggaagaacatttagaggagcctgttgctgaaccagagcctgatcctgaaccagaaccagaacaagaacctgtatctgaaatccaagaggaaaagcctgagccagtattagaagaaactgcccctgaggatgctcagaagagttcttctccagcacctgcagacatagctcagacagtacaggaagacttgaggacattttcttgggcatctgtgaccagtaagaatcttccacccagtggagctgttccagttactgggataccacctcatgttgttaaagtaccagcttcacagccccgtccagagtctaagcctgaatctcagattccaccacaaagacctcagcgggatcaaagagtgcgagaacaacgaataaatattcctccccaaaggggacccagaccaatccgtgaggctggtgagcaaggtgacattgaaccccgaagaatggtgagacaccctgacagtcaccaactcttcattggcaacctgcctcatgaagtggacaaatcagagcttaaagatttctttcaaagttatggaaacgtggtggagttgcgcattaacagtggtgggaaattacccaattttggttttgttgtgtttgatgattctgagcctgttcagaaagtccttagcaacaggcccatcatgttcagaggtgaggtccgtctgaatgtcgaagagaagaagactcgagctgccagggaaggcgaccgacgagataatcgccttcggggacctggaggccctcgaggtgggctgggtggtggaatgagaggccctccccgtggaggcatggtgcagaaaccaggatttggagtgggaagggggcttgcgccacggcagtgaatcttcatggatcttcatgcagccatacaaaccctggttccaacagaatggtgaattttcgacagcctttggtatcttggagtatgaccccagtctgttataaactgcttaagtttgtataattttactttttttgtgtgttaatggtgtgtgctccctctccctctcttccctttcctgacctttagtctttcacttccaattttgtggaatgatattttaggaataacggacttttaaagaagcaaaaaaaaagactgaatttccttgcttactttgcatatacagactggattttttttttttttttacagccatttccccaaaggaatgtcttgcatattactgacatttggtatgtttcattcattggaatatttcttattttctacgtgtttgaaaagcctgtaagaaatacaggatttgataatattttgaaggcaggaaaaacccaaattgtttcttctttgagagtcatgactaccttctggtgtggagaaattgccattggaaaatttgacaattttgattctcactggtatgtttaaaaactgaataaaaggaatagaatttttttttgataaaggatcacaaaacaattctaaaacctaactgtttttaccattgaaatttaaattgtgataataggttttaaatgtctagaatgcaactgataggcttttcttgaactgttagtttttttgaagtagttttttcatgtttaatttgtatttgtaaaaaaacaaaaagcaaaaaaattcccaaaacccagataacaaccagagcaaaactgttgtgccttctatttatctttgatttcagtcttggcaattgtttaaaaaaaaaatctagatttgttttattaggttcagagtatgtggggaattatagaatccctctttcatcactttgtgtatgtcttttgttaacatatttgttatgccttattctaaaattgagtctcaaactggaatgcctttgaagacagatgcttctatagaggttctttgacctaaatagttcagcatttgtatttttattctggtatctaatcagattcctaatcatagcccgtaagaaggaatgttactttaatattggactttgctcatgtgctcgtgtccgcatttttttttttcttaaaatcatagccatatggtaaattttctattttgttatggttctcttttattgatgggcatgcagtgggtgttacttggaaatggccaatttttattaaaatatttctggaagaaaatttaatctggcaatatagactaatactcgtttcacatatgtgttatttgttgagtgctgtgtgtgagatgggtgaaggttttgtttacacgtgtgaaacaaacttttgtgtgattgtcattactaattgaagggcaaccaggttgtaaaattcagcgtatttattttcttaacagtattcatctttaggactgtcgtttgaggatagcataggaatatttggtttgcattactgagaaactctaggtttgctgtgatggttaagaccacagtgaagttggtattaccagtttggttccagttcctcaaatatttgaaaattggcagcatctcctttacataaacttaatgtaactgaatcacatggcttttttgtagggttaaagtaactttggtaaccacttttggcccagatcactgataataggaagaaatacaacttatacttttgtagcttatattaagcatgtggtgggtggaaagaaaagtttagtctgagtcactttggaaaaaaaaattactttgtggtaacttcaaggtcataaattatggatagcctagaaattatccttcatgagtgaatactaaattatacatttcaaaacagaagttcttcctacttggagacttaagggcattaactagatgcagcaatcctcagcttggtgttatcacatactagaggacatttggaaatgtgtgaaatttggaagggttgttggagagacatgcatctggcatttattgggtggggtctaaggataccaaatgttgtgtaaaaatgaagcaaccccattgagaacactgatagtccctattcctgtgggtgggtggagctgtgggattaggaaaactggaatgaagactcattcttttgaaactcagcctcagataaataacaaactaggaaatggaaatctgtttcaagaattgcagtaacatctactctaaggaattagtaatttcactttttattatttgtaccaaatgtatgtgtgtgttgtgtatgttggtgtaaatgtggagaggtggtagcaatacatactgatgctgcttgtaatttgttgcagggaattactgcacaatctcagaaaatagaaagcttccccagtgctttctgtcatcagagttgggatgattgtgaggttttgaatgatagtattggacctaagaaataggattagcatcatgatcagaactgttgagaatccttgtacaattatgtacattattgcatgtagagtaaacctgagagcttagagatgtatacgtttccactgctggaaaatcattataagttagggcaacattttctataggtggcagcagtaggagctcatcacattgaacattttcagattttaaaatgaaaattttcatccgtaggaatggcccaatgtatagttattagctactgagcttagaactcttgacccatgagattttttttttaaatttttatttttatagaggcaaggtcttgctatgttgtcaggctggtctcaagctcctggcctcatcagttctcctgccttccaagtagccggaactacaggtgtgcaccattgcacctggcctcatgagtattttagttagataagatttgtttggttcagtgggtcttagttttttaagacctgttaatttgtaattagacatcttgggccttaaactgtatttttgttttagtggtgaggttgggttttactttgtgtattccagcgttctcaactttgtcagatattgctagggaccagtgagatagataatccaaaaataataatttgactttggttgagtatgtcattaccacagtgttagttgaattgcactttaggttagaaaagttaattttcacatctgtgctgcgggttaggtgatattgtcctcagcacaatagatgaggaagaaactgaatcagaacagttaaatgacaggcttccaagtcatccatgtagcaaggagcacatttgcctcccaaactgatgctttttctctagaaccataatgcccccctaattacatttcagtagcatagaccgcaatgaacttcctactgtagggagacttgagtctggaatacattcagaacaaggttaacattacagttcttaatttcctttagggcaaacaagataattaaacttgggttttgtgagtctttttttgatttgcagattatatatggtaacacaataatggtggtttgtttttaagttttttctcatcaggtttgataatttaatgcaaacttcaaatctggatgtgaataataatatttttattatagtataatccaggtgagtttatagaatttgtgttttgtgcttataaactgtcaccttctgatacttttcttcatccctctatttgaaaaacccttgtagaatttaacgatttaatggaaaatgttgcactttatagaaggccattttagaacttacaggtaacctttttgaagagcttagatttgtagaccactgtttatgctgagtgacatttcttttaaatggttgcatttgtcaaatctataaagatgttttttatattgcagttttctttttgtgctacttaaaggaatctttgcaatgctgcatatagataattgttgacctttttagttcagcagtttttaaacttgaagtaacatcagcatttatttgaatatcaggttttagctaactgcctaatgtaccaaaaaaaaattagcaatgtcttatgtgggatgaggggttaagttaaagttgctgatcaagtaatggccgtgtggcacaagatgataactaagaatttctggttctaaggtagtaatgccttttgggatttatatttgtttaatgttgagattctggggaccataggtgggcctgtcaactcttaacagactatagtaaaggagagatggtggcacatgtgagataaaacttgtttatatttacattcttattagtggatagatatcacctcagtacaacactgaaattaaactgccttgttcatgctttcatgtctcaaatcaaggcctaaatgagtaaaaagatgattacagattacctaaaacccttaaccagttttggtttttgattatgcatatgtgttggcttgcaattaggtttttagtttctgtttatgtgacttgtttgaaaacattggattcgtcttctctccacagtttctacttgaacctagtagcttattttaattccctgtaagaggaaaataatatagggaatctgttcaactattcctttaataaatcatgtgacttggccaattacagaaattcctaagtgtagtattttgaaatgtggccagtgtcccagatttgtaaggtacagtgtgcatacagtgtgtcttaggatttttttaagtaaattaaggatgtttaccagaaattattgatttactgaaccaagtatttattttcagaagcccacttttggggaaggttgcctatatttttgatagtaattagatggaagattaaatcctgtttaacctggatagaaacagttttaactattgctgaagttaaaatcactttggggtggggtggggtggctcatgcctgtaatcccagtgctgtgggaggctgaggccagaggattgctcgaggccaggaatttgagaccagcttgggcaacatagcaagaccctgtctctacagataattgaaaagtgagccagatgtggtggcgcattcctatagtctccgtctctcaggaggctgaggcaggagattgcttgagcccaggagttggaggctgcagtgagttatgatcataccactgcactctaacctgggtgacagagtgagaccctgtctctaaaaaacaaaaaattagaaaacaacaaaaaccacttcggttactcactgtcctcatgctttgatgtcagttgttctcctaaattttaaaattttgttatgaagattggatgtacactgatttggccctttaaatgacattataccaagaagttggtataagggagtaggagatgagaaaactttttgaaaaatcatttggtgcatgctaaggtagcttgtaggacatgtggttttaaaaaattcatggattttgaagaaggatagggtggaagtaaaatttagctgatagcatagggatcatttgtgatttatatagaaaataattatatttttgagtgagaagcatcagacttaaatttttttcttctattttggttattaccaaaaggaacagagaaactctcagaattctttgaatcatagaatgttagtgctggaaaggactaggaagtgacttgtacaaccccttcattttacaaaggatcagagagaattggttagtagagtcccaaatctgcttttagaagtaatatggtgatcatcagtttagattcactgtaggaagggcagccctgttaaagtttgtcaggagaaaaagggaaggtatcactttttgtatgttcacccagttgcttctgtagttttcatacccctgttttctcaattttcttagaactgtctttaatggcccagctctaccagggcttgttgtctaaggacattaacttgtgctcccctcagggatgggtttactactagctgtcagaaagctattgggtatcctaatgtgttaatagctgaaactcagctgtaatttctcctaaatacttcagcattttgcattctgtacattgtggtgctttttccaccttgtattgttgtaactgtaagctcctagggggcagcaatttggtcttaggcgtgtaccctgtttagtgcctggcaatgccatgtttatatcaaggtcttaatattacttttgagttatttctcccactcttcatggaagtgatgctccagccttgctaaaacactgagggtcctcccgataagccaggcattgtgattccttggcttcaagtgccttctgtcttccccgaaggtccactgagatctacaatcccccctttcctctgatctcttgccatgtaagtaattttttaaaagatcagtacaagagctatattttttcctaagaaaaaatttcaacaggaatggggagtagccccgttttggggctgatctgtccagaatttggagtgaggaacaaatccattctcatctactttccacattttccctcttgtttgaggtcctgttccaaccttcatttctgaaactgttctagagcactttgtctttctcgtagttcataacttaccccttcagtctagaattagaattacattatctgttttactactttactagactgtaagctcctagaagataaggactagggagttcatctctgtattccaccagaaggtacagtgactcataactagagtctttagatgaaacttactgagttgaataacttaatatatttctgttttcattcccaagggaggccatgtctggagatagaccttgaatttaataaattttaggcactataccatttcagtggagaaaattgttgggaaatttggggggatggatatataagggggaggaagtcactggccagtttgaggtgcttccattggtctgggtaactagccatttcttcctgattgtgcctagtatatcccagacagtttgtttctatgcagaagaattttatatgaaattttcatttctttgcaaaaacttgttccttctttcagttcatgacatcatccatgctaaagtctgagtcatctgcttccatttttgttattccccacatccagtcttcagctaagtcctgtcagttctacctcaagtctttcccgtctttcttcctcacctatgtaatttcagtagtctctcagcttcacttaacctcttactccagcctactttatacacaatgttagattcatcttactgaaacatagttctgaccatgtattccatgtatgtgttctctctcccctattagactgtaagctccttatgggcaggatctgtgtctgagtcatctttgtatcttgcctagcacctatcaataaatacttcttgaatgaacaaatgaattctcatttctcgacataaagccttgtctaaagtgagatgttttccaggtcatacataggtttctccctggggtaattggaagttcttgcatataaagttggttaaatagtaataattatgagttaaccacagaaaatttcagaaaactttaatttttttccattggaatcagcatggatatgtgtatatggatggttcaataaatatacttttatatacatgtttcacagaaattttacattccatcttcaaactgcagaaatagattttttttttttacaagccaaaaaataactgccataacttttgtgacttcatgcaaaaaaaggggggaagagtaaggggcaaaagggaattagttgttcaaggttgagtgtccagtaagaagtaaaaatgttacattaaggaagcgattgcttaacacgctgcttaaggtggtagccagacaaatccttaactgcagcattaaggccataccaagtttatacatatatacaaagaaatttccatataaaagacatactatcacattttcttcttcataaggatgaggaactttgtaattctgacctgattttccaggccaattaattaaaatgtccccaggctgctttttagaagtatcttctactttggctagctgtcagagttgccgctatgtgagcttgtgacttctggtctggcgtgaaagtatgaatcatcttgaacctcttccatcatagcactatgttgctgagctaattcatgctgcccagctaagcacattttctacatccccaaagtatttggaatcacagcattgtaacttgtgattgtcttacctgtaacagactccacagtcatgctggcattgtgacctgaagaattacacagtgcccttcttagattctttggggttaaggtaacttcttgaataatgtactaatgaacgatagtgtttcaggaaacatgccctagctattggaagttcgtatctaacttttaccccttgtgtgtcatgatacatttaagttggtagctacatttttggaataaaggaaatgtaaaattatttgcagaataataacctgggatttgctcttctgcctaaacatcgaactagggaactttaaagacaaagggtgcatcttttgtgcaagtatctaagcgggcaaaatggggaaaacatgaagggcaagtcctttggggatgacttctaattaatgcagaagtcatttgctttggccaggttgggtgggactctgagattgcacactcttgccctgttggcagaaactagcccatcttaagttagtcaatgaatcctgagtcaaaatgaaaggttgctaaatctaagatcgagtgtataaataaaataaccccttcctccagtgactgtgcatttattttgtaataaactcattttggaatgttttagcaatgaa

SEQ ID NO: 139101 - DNA, 2700 bp, Homo sapiens
  Payload ID: 7260
  Gene Symbol: G3BP1
  Gene Name: GTPase activating protein (SH3 domain) binding protein 1
  Uniprot ID: Q13283
  ENST ID: ENST00000520177
  CDS Start-End: 133-501
gtgcggacgcagttgcgtgaggggtttgtactatcctcggtgctgtggtgcagagctagttcctctccagctcagccgcgtaggtttggacatatttgactcttttccccccaggttgaattgaccaaagcaatggtgatggagaagcctagtcccctgctggtcgggcgggaatttgtgagacagtattacacactgctgaaccaggccccagacatgctgcatagattttatggaaagaactcttcttatgtccatgggggattggattcaaatggaaagccagcagatgcagtctacggacagaaagaaatccacaggaaagtgatgtcacaaaacttcaccaactgccacaccaagattcgccatgttgatgctcatgccacgctaaatgatggtgtggtagtccaggtgatggggcttctctctaacaacaaccaggctttgaggagattcatgcaaacgtttgtccttgctcctgagagtctgaagaagaagtagaggaacctgaagaaagacagcaaacacctgaggtggtacctgatgattctggaactttctatgatcaggcagttgtcagtaatgacatggaagaacatttagaggagcctgttgctgaaccagagcctgatcctgaaccagaaccagaacaagaacctgtatctgaaatccaagaggaaaagcctgagccagtattagaagaaactgcccctgaggatgctcagaagagttcttctccagcacctgcagacatagctcagacagtacaggaagacttgaggacattttcttgggcatctgtgaccagtaagaatcttccacccagtggagctgttccagttactgggataccacctcatgttgttaaagtaccagcttcacagccccgtccagagtctaagcctgaatctcagattccaccacaaagacctcagcgggatcaaagagtgcgagaacaacgaataaatattcctccccaaaggggacccagaccaatccgtgaggctggtgagcaaggtgacattgaaccccgaagaatggtgagacaccctgacagtcaccaactcttcattggcaacctgcctcatgaagtggacaaatcagagcttaaagatttctttcaaagttatggaaacgtggtggagttgcgcattaacagtggtgggaaattacccaattttggttttgttgtgtttgatgattctgagcctgttcagaaagtccttagcaacaggcccatcatgttcagaggtgaggtccgtctgaatgtcgaagagaagaagactcgagctgccagggaaggcgaccgacgagataatcgccttcggggacctggaggccctcgaggtgggctgggtggtggaatgagaggccctccccgtggaggcatggtgcagaaaccaggatttggagtgggaagggggcttgcgccacggcagtgaatcttcatggatcttcatgcagccatacaaaccctggttccaacagaatggtgaattttcgacagcctttggtatcttggagtatgaccccagtctgttataaactgcttaagtttgtataattttactttttttgtgtgttaatggtgtgtgctccctctccctctcttccctttcctgacctttagtctttcacttccaattttgtggaatgatattttaggaataacggacttttaaagaagcaaaaaaaaagactgaatttccttgcttactttgcatatacagactggattttttttttttttttacagccatttccccaaaggaatgtcttgcatattactgacatttggtatgtttcattcattggaatatttcttattttctacgtgtttgaaaagcctgtaagaaatacaggatttgataatattttgaaggcaggaaaaacccaaattgtttcttctttgagagtcatgactaccttctggtgtggagaaattgccattggaaaatttgacaattttgattctcactggtatgtttaaaaactgaataaaaggaatagaatttttttttgataaaggatcacaaaacaattctaaaacctaactgtttttaccattgaaatttaaattgtgataataggttttaaatgtctagaatgcaactgataggcttttcttgaactgttagtttttttgaagtagttttttcatgtttaatttgtatttgtaaaaaaacaaaaagcaaaaaaattcccaaaacccagataacaaccagagcaaaactgttgtgccttctatttatctttgatttcagtcttggcaattgtttaaaaaaaaaatctagatttgttttattaggttcagagtatgtggggaattatagaatccctctttcatcactttgtgtatgtcttttgttaacatatttgttatgccttattctaaaattgagtctcaaactggaatgcctttgaagacagatgcttctatagaggttctttgacctaaatagttcagcatttgtatttttattctggtatctaatcagattcctaatcatagcccgtaagaaggaatgttactttaatattggactttgctcatgtgctcgtgtccgcatttttttttttcttaaaatcatagccatatggtaaattttctattttgttatggttctcttttattgatgggcatgcagtgggtgttacttggaaatggccaatttttattaaaatatttctggaagaaaa

SEQ ID NO: 139102 - DNA, 754 bp, Homo sapiens
  Payload ID: 7260
  Gene Symbol: G3BP1
  Gene Name: GTPase activating protein (SH3 domain) binding protein 1
  ENST ID: ENST00000520006
  CDS Start-End: 440-754
aacggcctcgcggggcaggagtaagccgcggccgccgcctgggccccagggcggtctctggggccaggggtcccgcgcccagcgtttcccgcccgccaccctctccgccacgcgcccgcggcaccttttcctcccctggccaagggatccagtcggttcggaccagaaggaggctttcgtttagggtgggggcagcactaaagtctgattggagtcttgcggtccgcgcgtcgcagaagcgccttcggttttgcagagagcaaagagggagcagcgagtgcacggagtggtagtaacaaccaatgttctttccacgccctcactgtgtgtccggcactgtgcggagccacttttctgcctttcatttgattcttgcagtgagctggcgaggtttggacatatttgactcttttccccccaggttgaattgaccaaagcaatggtgatggagaagcctagtcccctgctggtcgggcgggaatttgtgagacagtattacacactgctgaaccaggccccagacatgctgcatagattttatggaaagaactcttcttatgtccatgggggattggattcaaatggaaagccagcagatgcagtctacggacagaaagaaatccacaggaaagtgatgtcacaaaacttcaccaactgccacaccaagattcgccatgttgatgctcatgccacgctaaatgatggtgtggtagtccaggtgatggggcttctctctaacaacaaccaggctttg

SEQ ID NO: 139103 - DNA, 580 bp, Homo sapiens
  Payload ID: 7260
  Gene Symbol: G3BP1
  Gene Name: GTPase activating protein (SH3 domain) binding protein 1
  Uniprot ID: Q13283
  ENST ID: ENST00000522367
  CDS Start-End: 133-501
gtgcggacgcagttgcgtgaggggtttgtactatcctcggtgctgtggtgcagagctagttcctctccagctcagccgcgtaggtttggacatatttgactcttttccccccaggttgaattgaccaaagcaatggtgatggagaagcctagtcccctgctggtcgggcgggaatttgtgagacagtattacacactgctgaaccaggccccagacatgctgcatagattttatggaaagaactcttcttatgtccatgggggattggattcaaatggaaagccagcagatgcagtctacggacagaaagaaatccacaggaaagtgatgtcacaaaacttcaccaactgccacaccaagattcgccatgttgatgctcatgccacgctaaatgatggtgtggtagtccaggtgatggggcttctctctaacaacaaccaggctttgaggagattcatgcaaacgtttgtccttgctcctgagagtctgaagaagaagtagaggaacctgaagaaagacagcaaacacctgaggtggtacctgatgattctggaactttctatgatcaggcagttgtcag

SEQ ID NO: 139104 - DNA, 577 bp, Homo sapiens
  Payload ID: 7260
  Gene Symbol: G3BP1
  Gene Name: GTPase activating protein (SH3 domain) binding protein 1
  ENST ID: ENST00000507878
  CDS Start-End: 133-577
gtgcggacgcagttgcgtgaggggtttgtactatcctcggtgctgtggtgcagagctagttcctctccagctcagccgcgtaggtttggacatatttgactcttttccccccaggttgaattgaccaaagcaatggtgatggagaagcctagtcccctgctggtcgggcgggaatttgtgagacagtattacacactgctgaaccaggccccagacatgctgcatagcttgcatattggataccacatgattatcagattttatggaaagaactcttcttatgtccatgggggattggattcaaatggaaagccagcagatgcagtctacggacagaaagaaatccacaggaaagtgatgtcacaaaacttcaccaactgccacaccaagattcgccatgttgatgctcatgccacgctaaatgatggtgtggtagtccaggtgatggggcttctctctaacaacaaccaggctttgaggagattcatgcaaacgtttgtccttgctcctgaggggtctgttgcaaataaattctatgttcacaatgatatcttcagataccaagatgaggtctttg

SEQ ID NO: 139105 - DNA, 783 bp, Homo sapiens
  Payload ID: 7260
  Gene Symbol: G3BP1
  Gene Name: GTPase activating protein (SH3 domain) binding protein 1
  ENST ID: ENST00000522666
  CDS Start-End: 184-297
gcgcgtcgcagaagcgccttcggttttgcagagagcaaagagggagcagcgagtgcacggagtggtagtaacaaccaatgttctttccacgccctcactgtgtgtccggcactgtgcggagccacttttctgcctttcatttgattcttgcagtgagctggcgaggttgaattgaccaaagcaatggtgatggagaagcctagtcccctgctggtcgggcgggaatttgtgagacagtattacacactgctgaaccaggccccagacatgctgcataggaaatccacaggaaagtgatgtcacaaaacttcaccaactgccacaccaagattcgccatgttgatgctcatgccacgctaaatgatggtgtggtagtccaggtgatggggcttctctctaacaacaaccaggctttgaggagattcatgcaaacgtttgtccttgctcctgaggggtctgttgcaaataaattctatgttcacaatgatatcttcagataccaagatgaggtctttggtgggtttgtcactgagcctcaggaggagtctgaagaagaagtagaggaacctgaagaaagacagcaaacacctgaggtggtacctgatgattctggaactttctatgatcaggcagttgtcagtaatgacatggaagaacatttagaggagcctgttgctgaaccagagcctgatcctgaaccagaaccagaacaagaacctgtatctgaaatccaagaggaaaagcctgagccagtattagaagaaactgcccctgaggatgctc

SEQ ID NO: 139106 - DNA, 530 bp, Homo sapiens
  Payload ID: 7260
  Gene Symbol: G3BP1
  Gene Name: GTPase activating protein (SH3 domain) binding protein 1
  ENST ID: ENST00000520578
  CDS Start-End: 179-530
gcgcccgccaagaagcgcctggcggaagggcgcactctcaggccttccaccggcgaccttccggcgggagcctgcgggcggcgcaggaacgaccctccttcctctgccccgcagcagtgctgagtaatggtgagagcagcaaggcccttggccgccgcacgttgaattgaccaaagcaatggtgatggagaagcctagtcccctgctggtcgggcgggaatttgtgagacagtattacacactgctgaaccaggccccagacatgctgcatagattttatggaaagaactcttcttatgtccatgggggattggattcaaatggaaagccagcagatgcagtctacggacagaaagaaatccacaggaaagtgatgtcacaaaacttcaccaactgccacaccaagattcgccatgttgatgctcatgccacgctaaatgatggtgtggtagtccaggtgatggggcttctctctaacaacaaccaggctttgaggagattcatgcaaacgtttgtccttgctcctgagg

SEQ ID NO: 139107 - DNA, 558 bp, Homo sapiens
  Payload ID: 7260
  Gene Symbol: G3BP1
  Gene Name: GTPase activating protein (SH3 domain) binding protein 1
  ENST ID: ENST00000517947
  CDS Start-End: 102-215
gtgcggacgcagttgcgtgaggggtttgtactatcctcggtgctgtggtgcagagctagttcctctccagctcagccgcgtaggttgaattgaccaaagcaatggtgatggagaagcctagtcccctgctggtcgggcgggaatttgtgagacagtattacacactgctgaaccaggccccagacatgctgcataggaaatccacaggaaagtgatgtcacaaaacttcaccaactgccacaccaagattcgccatgttgatgctcatgccacgctaaatgatggtgtggtagtccaggtgatggggcttctctctaacaacaaccaggctttgaggagattcatgcaaacgtttgtccttgctcctgaggggtctgttgcaaataaattctatgttcacaatgatatcttcagataccaagatgaggtctttggtgggtttgtcactgagcctcaggaggagtctgaagaagaagtagaggaacctgaagaaagacagcaaacacctgaggtggtacctgatgattctggaactttctatgatcaggcagttgtcag

SEQ ID NO: 139108 - DNA, 1763 bp, Homo sapiens
  Payload ID: 7260
  Gene Symbol: G3BP1
  Gene Name: GTPase activating protein (SH3 domain) binding protein 1
  ENST ID: ENST00000522761
  CDS Start-End: 163-624
ttatatagaccggcggcggagcacgcgtgtgtgcggacgcagttgcgtgaggggtttgtactatcctcggtgctgtggtgcagagctagttcctctccagctcagccgcgtaggtttggacatatttgactcttttccccccaggttgaattgaccaaagcaatggtgatggagaagcctagtcccctgctggtcgggcgggaatttgtgagacagtattacacactgctgaaccaggccccagacatgctgcatagattttatggaaagaactcttcttatgtccatgggggattggattcaaatggaaagccagcagatgcagtctacggacagaaagaaatccacaggaaagtgatgtcacaaaacttcaccaactgccacaccaagattcgccatgttgatgctcatgccacgctaaatgatggtgtggtagtccaggtgatggggcttctctctaacaacaaccaggctttgaggagattcatgcaaacgtttgtccttgctcctgaggttcatcttgcactgttcctggcccagtccctattcttgaatcagctgttccttcaaggaggcctggttctttttagttatacttatgaaaggacgacaagtttatgttgaatgattgcatttgtgttttcttccggattggtctagactgaacaagagtctgaagaagaagtagaggaacctgaagaaagacagcaaacacctgaggtggtacctgatgattctggaactttctatgatcaggcagttgtcagtaatgacatggaagaacatttagaggagcctgttgctgaaccagagcctgatcctgaaccagaaccagaacaagaacctgtatctgaaatccaagaggaaaagcctgagccagtattagaagaaactgcccctgaggatgctcagaagagttcttctccagcacctgcagacatagctcagacagtacaggaagacttgaggacattttcttgggcatctgtgaccagtaagaatcttccacccagtggagctgttccagttactgggataccacctcatgttgttaaagtaccagcttcacagccccgtccagagtctaagcctgaatctcagattccaccacaaagacctcagcgggatcaaagagtgcgagaacaacgaataaatattcctccccaaaggggacccagaccaatccgtgaggctggtgagcaaggtgacattgaaccccgaagaatggtgagacaccctgacagtcaccaactcttcattggcaacctgcctcatgaagtggacaaatcagagcttaaagatttctttcaaagttatggaaacgtggtggagttgcgcattaacagtggtgggaaattacccaattttggttttgttgtgtttgatgattctgagcctgttcagaaagtccttagcaacaggcccatcatgttcagaggtgaggtccgtctgaatgtcgaagagaagaagactcgagctgccagggaaggcgaccgacgagataatcgccttcggggacctggaggccctcgaggtgggctgggtggtggaatgagaggccctccccgtggaggcatggtgcagaaaccaggatttggagtgggaagggggcttgcgccacggcagtgaatcttcatggatcttcatgcagccatacaaaccctggttccaacagaatggtgaattttcgacagcctttggtatcttggagtatgaccccagtctgttataaactgcttaagtttgtataattttactttttt

SEQ ID NO: 139109 - DNA, 535 bp, Homo sapiens
  Payload ID: 7260
  Gene Symbol: G3BP1
  Gene Name: GTPase activating protein (SH3 domain) binding protein 1
  ENST ID: ENST00000523519
  CDS Start-End: 218-535
acaaagggagcctcgccacacgcccgcggccgcctcgcagcgcccgccaagaagcgcctggcggaagggcgcactctcaggccttccaccggcgaccttccggcgggagcctgcgggcggcgcaggaacgaccctccttcctctgccccgcagcagtgctgagtaatggtttggacatatttgactcttttccccccaggttgaattgaccaaagcaatggtgatggagaagcctagtcccctgctggtcgggcgggaatttgtgagacagtattacacactgctgaaccaggccccagacatgctgcatagattttatggaaagaactcttcttatgtccatgggggattggattcaaatggaaagccagcagatgcagtctacggacagaaagaaatccacaggaaagtgatgtcacaaaacttcaccaactgccacaccaagattcgccatgttgatgctcatgccacgctaaatgatggtgtggtagtccaggtgatggggcttctctctaacaacaaccaggctttgagg

SEQ ID NO: 139110 - DNA, 114 bp, Homo sapiens
  Payload ID: 7260
  Gene Symbol: G3BP1
  Gene Name: GTPase activating protein (SH3 domain) binding protein 1
  ENST ID: ENST00000627077
  CDS Start-End: 1-114
atggtgatggagaagcctagtcccctgctggtcgggcgggaatttgtgagacagtattacacactgctgaaccaggccccagacatgctgcataggaaatccacaggaaagtga

SEQ ID NO: 139111 - DNA, 2609 bp, Homo sapiens
  Payload ID: 7261
  Gene Symbol: G3BP2
  Gene Name: GTPase activating protein (SH3 domain) binding protein 2
  Uniprot ID: Q9UN86
  ENST ID: ENST00000357854
  CDS Start-End: 219-1568
ccttgtcgcacgtcgcagcgcctggcgcccgggaagaggtggttgtgaggcagacgaactcgcggctctccggcttccgaggcttccgagttgtcggaggaagggggcggcgagcaataagaacccgccgcacccggtcctcagcgactcttctgacctccgcgcgacgtacccgccgccgccgttggctggagcatttgacattgtgcagcaaagaaatggttatggagaagcccagtccgctgcttgtagggcgggagtttgtgaggcaatattatactttgctgaataaagctccggaatatttacacaggttttatggcaggaattcttcctatgttcatggtggagtagatgctagtggaaagccccaggaagctgtttatggccaaaatgatatacaccacaaagtattatctctgaacttcagtgaatgtcatactaaaattcgtcatgtggatgctcatgcaaccttgagtgatggagtagttgtccaggtcatgggtttgctgtctaacagtggacaaccagaaagaaagtttatgcaaacctttgttctggctcctgaaggatctgttccaaataaattttatgttcacaatgatatgtttcgttatgaagatgaagtgtttggtgattctgagcctgaacttgatgaagaatcagaagatgaagtagaagaggaacaagaagaaagacaaccatctcctgaacctgtgcaagaaaatgctaacagtggttactatgaagctcaccctgtgactaatggcatagaggagcctttggaagaatcctctcatgaacctgaacctgagccagaatctgaaacaaagactgaagagctgaaaccacaagtggaggagaagaacttagaagaactagaggagaaatctactactcctcctccggcagaacctgtttctctgccacaagaaccaccaaagccaagagtcgaagctaaaccagaagttcaatctcagccacctcgtgtgcgtgaacaacgacctagagaacgacctggttttcctcctagaggaccaagaccaggcagaggagatatggaacagaatgactctgacaaccgtagaataattcgctatccagatagtcatcaactttttgttggtaacttgccacatgatattgatgaaaatgagctaaaggaattcttcatgagttttggaaacgttgtggaacttcgcatcaataccaagggtgttgggggaaagcttccaaattttggttttgtggtttttgatgactctgaaccagttcagagaatcttaattgcaaaaccgattatgtttcgaggggaagtacgtttaaatgtggaagagaaaaaaacaagagctgcaagagagcgagaaaccagaggtggtggtgatgatcgcagggatattaggcgcaatgatcgaggtcccggtggtccacgtggaattgtgggtggtggaatgatgcgtgatcgtgatggaagaggacctcctccaaggggtggcatggcacagaaacttggctctggaagaggaaccgggcaaatggagggccgcttcacaggacagcgtcgctgaagctccactgttggcaaagtcttggcagtggtacattattcatcgtgtttgcattcttgttaattttttttttggctttggaatgtgacacagcctttttgatcatttctttgatgtgaaaagcatctttggttatcagttaaattgaggtggacattatttccccaatttcacaacaggattcacattgttaatttataaatctagacttggagaattaaggactgagaaatgaccatatcttaaactatctacgacaaagtgaacttaaaaggacatgcccactgaattcaggtcctttgagtaaaaaaaaaatcttctgctgcacattttgtttaagtgttactgtttctgcctgttaatgctgggaacacaaatagtgcaatttgtgcaattggagaatcttgccttttttcttggctccccccaaaaatacaaaccaacagaaacttgttatgcactcatcaaaatgtactaatgggtactctgaactcattaacattgacatctgcaacaggaggcaacagggaaaaaatctcatcttcttttccagtagaaaatagtttgtgaaatgatgagggcattttatctgcttgctgtgaccagcgtgtgtacacataaaccttaacaagactacaagtatattccagaaggaaatcattttagttatgaactaaataataaaaattagaacttcaaatgcgatggtcttgactattagaccagatttagtagctccatatctaagatttttctacctgcccctcttcagtacagggatggctggctgctcaacacactcctcctccccttttttcctttctttaagctgtgtacagtgaaaattgtctttactgtatttttgttctctggtaatgtaataagcatgatggtgccttctattaatacatcattccagtcttgctggtaattttgtacagtatagtgtatgaattgctgtgctgcaaagccaaacagctgcaaaatgttgaaaaatcatcgaaatgtataaaaattgcagtatctttaaaatcagtaaaa

SEQ ID NO: 139112 - DNA, 4883 bp, Homo sapiens
  Payload ID: 7261
  Gene Symbol: G3BP2
  Gene Name: GTPase activating protein (SH3 domain) binding protein 2
  Uniprot ID: Q9UN86
  ENST ID: ENST00000359707
  CDS Start-End: 787-2235
taaagcccacgtcatgttcttcctttactgcagggcctcttaatggggcttaaaacctaggatgggttaagtaaacaatgtaggtgagtttagtgtgcaaacagctgaaatcaccggctgcattttaagctcgtctacagcagcaacctgcagacacctattcagagagattactaaattccctccttcccattaataaaaaggaccagaatatcagtctacaaaagacactgcgttgctgcgaaccagctctcgcttgcgcgatcaggaagaagggcggcaaggctggagcctcgggaccggagaaaggcagcctgcttgtgacgtcaaatcagcggactcttatcttggctttaggccggttccggttccccggctttccgggcgcgagcgtgtgcgagcgcggcagcgtactgcgcgtgctccgcagagggacacgggaaggttgggtccggctctggaggagatgcgtgattggctgacgctgtgctcgggggttccctggccctttcggcaggggtaaaacaataagagggggcggtggcaaagggggcgggacgtccgtggtccttgtcgcacgtcgcagcgcctggcgcccgggaagaggtggttgtgaggcagacgaactcgcggctctccggcttccgaggcttccgagttgtcggaggaagggggcggcgagcaataagaacccgccgcacccggtcctcagcgactcttctgacctccgcgcgacgtacccgccgccgccgttggctggagcatttgacattgtgcagcaaagaaatggttatggagaagcccagtccgctgcttgtagggcgggagtttgtgaggcaatattatactttgctgaataaagctccggaatatttacacaggttttatggcaggaattcttcctatgttcatggtggagtagatgctagtggaaagccccaggaagctgtttatggccaaaatgatatacaccacaaagtattatctctgaacttcagtgaatgtcatactaaaattcgtcatgtggatgctcatgcaaccttgagtgatggagtagttgtccaggtcatgggtttgctgtctaacagtggacaaccagaaagaaagtttatgcaaacctttgttctggctcctgaaggatctgttccaaataaattttatgttcacaatgatatgtttcgttatgaagatgaagtgtttggtgattctgagcctgaacttgatgaagaatcagaagatgaagtagaagaggaacaagaagaaagacaaccatctcctgaacctgtgcaagaaaatgctaacagtggttactatgaagctcaccctgtgactaatggcatagaggagcctttggaagaatcctctcatgaacctgaacctgagccagaatctgaaacaaagactgaagagctgaaaccacaagtggaggagaagaacttagaagaactagaggagaaatctactactcctcctccggcagaacctgtttctctgccacaagaaccaccaaaggctttctcctgggcttcagtgaccagtaaaaacctgcctcctagtggtactgtttcttcctctggaattccaccccatgttaaagcaccagtctcacagccaagagtcgaagctaaaccagaagttcaatctcagccacctcgtgtgcgtgaacaacgacctagagaacgacctggttttcctcctagaggaccaagaccaggcagaggagatatggaacagaatgactctgacaaccgtagaataattcgctatccagatagtcatcaactttttgttggtaacttgccacatgatattgatgaaaatgagctaaaggaattcttcatgagttttggaaacgttgtggaacttcgcatcaataccaagggtgttgggggaaagcttccaaattttggttttgtggtttttgatgactctgaaccagttcagagaatcttaattgcaaaaccgattatgtttcgaggggaagtacgtttaaatgtggaagagaaaaaaacaagagctgcaagagagcgagaaaccagaggtggtggtgatgatcgcagggatattaggcgcaatgatcgaggtcccggtggtccacgtggaattgtgggtggtggaatgatgcgtgatcgtgatggaagaggacctcctccaaggggtggcatggcacagaaacttggctctggaagaggaaccgggcaaatggagggccgcttcacaggacagcgtcgctgaagctccactgttggcaaagtcttggcagtggtacattattcatcgtgtttgcattcttgttaattttttttttggctttggaatgtgacacagcctttttgatcatttctttgatgtgaaaagcatctttggttatcagttaaattgaggtggacattatttccccaatttcacaacaggattcacattgttaatttataaatctagacttggagaattaaggactgagaaatgaccatatcttaaactatctacgacaaagtgaacttaaaaggacatgcccactgaattcaggtcctttgagtaaaaaaaaaatcttctgctgcacattttgtttaagtgttactgtttctgcctgttaatgctgggaacacaaatagtgcaatttgtgcaattggagaatcttgccttttttcttggctccccccaaaaatacaaaccaacagaaacttgttatgcactcatcaaaatgtactaatgggtactctgaactcattaacattgacatctgcaacaggaggcaacagggaaaaaatctcatcttcttttccagtagaaaatagtttgtgaaatgatgagggcattttatctgcttgctgtgaccagcgtgtgtacacataaaccttaacaagactacaagtatattccagaaggaaatcattttagttatgaactaaataataaaaattagaacttcaaatgcgatggtcttgactattagaccagatttagtagctccatatctaagatttttctacctgcccctcttcagtacagggatggctggctgctcaacacactcctcctccccttttttcctttctttaagctgtgtacagtgaaaattgtctttactgtatttttgttctctggtaatgtaataagcatgatggtgccttctattaatacatcattccagtcttgctggtaattttgtacagtatagtgtatgaattgctgtgctgcaaagccaaacagctgcaaaatgttgaaaaatcatcgaaatgtataaaaattgcagtatctttaaaatcagtaaaatggactagcatattatttatcttgttcttcagttaacaactttgtgttctctgtgggagggagggagtcctgtgtgtttgtggggagagggaaggaggaagtcagttatttgagtaagcctctagttgacttttctcttagcctgaatgtggacgttgaaacatatcacttcagggcttggaaaagtcagtcaacttgacgtacatttttagtgacattttaaaagcagtcagattctataaatggcaagtaagcctgaagtgaggatactgcaattttcggagaaaagaacagcagctctttaagtgtttgcattttctatttggggggcagggaactgtcattcattttgcacaattcttgaactgatgtcagcacccgagtggctcctgaatttaagtctgggacgacatcttttatttttacatgaatctttaaacaattctgtgagcaaagtttgtagctgctggattattgtctgtctttatagcaagttccagtaaaccacaagtatggcaaagcttatccaattttatgcttggagcagtcagtacataccagtttctgatgtttcaggcaggagtggggtaaataagtgtgaccacttaaagctgctcgttagcatggaagacttctccattctatctttgtaaaacagacaagatatgcacttgacatagtagcaaattggttctgaattatgcaactgtttgctatttagtaaactagcaaatgatgcatgtattttgtttttcatgtactgggcaatatgagtaaaatctgtccctttttccccctttgaatgaggtcttccatgtttgagggaaagtcttgcactattgcatatattttggggacacagattttcatagtttccatttttggggggcttaaggattttttttttttctgtttgaaacagttttatactttctgatatagtacttgaaattcttaccagaaaattactttggagttttgaagcctttattaatactacttttaaagaagcagttgttttattgtcaatgttttttttcccccaagcatattttcttgtatttctgtttccatatatatatatatatatataatttccaattcaggatattgccctgccatccatgaaaactgttctggcaccaaaagtaatgacaaatgttaagtgtaataatagaaaagtagagcaaagagccattcagcttcagtctttacataccatgaataaaacattaaaacatcatatggagaagtttacatggtgattgttcacctgcagtactgtggagttttaacattttgtcctcttttcagtgaaacagagtaaaaatattcatctaccattactgttatttgctgattttgttttattttttgatggtaatattctatccttatgacactattgcaaccaaattggctttaccatcttggctttagtaggtatagaagacaatggattaccatctttattgctgtaatgtgttaagcattatatgctagtagaatctagtttaattgtttcaggtggaaagtattctttgagtttccatattgaatgtgtttggactaaacaaacaataaactactgatgtctgcagcattta

SEQ ID NO: 139113 - DNA, 4217 bp, Homo sapiens
  Payload ID: 7261
  Gene Symbol: G3BP2
  Gene Name: GTPase activating protein (SH3 domain) binding protein 2
  Uniprot ID: Q9UN86
  ENST ID: ENST00000395719
  CDS Start-End: 121-1569
gagcccgggagccggaggtgtagcggcagagacattgttcttgccggctccctacggtgccgtgtgtgcgtgagagaagaccagtctttcctctagcatttgacattgtgcagcaaagaaatggttatggagaagcccagtccgctgcttgtagggcgggagtttgtgaggcaatattatactttgctgaataaagctccggaatatttacacaggttttatggcaggaattcttcctatgttcatggtggagtagatgctagtggaaagccccaggaagctgtttatggccaaaatgatatacaccacaaagtattatctctgaacttcagtgaatgtcatactaaaattcgtcatgtggatgctcatgcaaccttgagtgatggagtagttgtccaggtcatgggtttgctgtctaacagtggacaaccagaaagaaagtttatgcaaacctttgttctggctcctgaaggatctgttccaaataaattttatgttcacaatgatatgtttcgttatgaagatgaagtgtttggtgattctgagcctgaacttgatgaagaatcagaagatgaagtagaagaggaacaagaagaaagacaaccatctcctgaacctgtgcaagaaaatgctaacagtggttactatgaagctcaccctgtgactaatggcatagaggagcctttggaagaatcctctcatgaacctgaacctgagccagaatctgaaacaaagactgaagagctgaaaccacaagtggaggagaagaacttagaagaactagaggagaaatctactactcctcctccggcagaacctgtttctctgccacaagaaccaccaaaggctttctcctgggcttcagtgaccagtaaaaacctgcctcctagtggtactgtttcttcctctggaattccaccccatgttaaagcaccagtctcacagccaagagtcgaagctaaaccagaagttcaatctcagccacctcgtgtgcgtgaacaacgacctagagaacgacctggttttcctcctagaggaccaagaccaggcagaggagatatggaacagaatgactctgacaaccgtagaataattcgctatccagatagtcatcaactttttgttggtaacttgccacatgatattgatgaaaatgagctaaaggaattcttcatgagttttggaaacgttgtggaacttcgcatcaataccaagggtgttgggggaaagcttccaaattttggttttgtggtttttgatgactctgaaccagttcagagaatcttaattgcaaaaccgattatgtttcgaggggaagtacgtttaaatgtggaagagaaaaaaacaagagctgcaagagagcgagaaaccagaggtggtggtgatgatcgcagggatattaggcgcaatgatcgaggtcccggtggtccacgtggaattgtgggtggtggaatgatgcgtgatcgtgatggaagaggacctcctccaaggggtggcatggcacagaaacttggctctggaagaggaaccgggcaaatggagggccgcttcacaggacagcgtcgctgaagctccactgttggcaaagtcttggcagtggtacattattcatcgtgtttgcattcttgttaattttttttttggctttggaatgtgacacagcctttttgatcatttctttgatgtgaaaagcatctttggttatcagttaaattgaggtggacattatttccccaatttcacaacaggattcacattgttaatttataaatctagacttggagaattaaggactgagaaatgaccatatcttaaactatctacgacaaagtgaacttaaaaggacatgcccactgaattcaggtcctttgagtaaaaaaaaaatcttctgctgcacattttgtttaagtgttactgtttctgcctgttaatgctgggaacacaaatagtgcaatttgtgcaattggagaatcttgccttttttcttggctccccccaaaaatacaaaccaacagaaacttgttatgcactcatcaaaatgtactaatgggtactctgaactcattaacattgacatctgcaacaggaggcaacagggaaaaaatctcatcttcttttccagtagaaaatagtttgtgaaatgatgagggcattttatctgcttgctgtgaccagcgtgtgtacacataaaccttaacaagactacaagtatattccagaaggaaatcattttagttatgaactaaataataaaaattagaacttcaaatgcgatggtcttgactattagaccagatttagtagctccatatctaagatttttctacctgcccctcttcagtacagggatggctggctgctcaacacactcctcctccccttttttcctttctttaagctgtgtacagtgaaaattgtctttactgtatttttgttctctggtaatgtaataagcatgatggtgccttctattaatacatcattccagtcttgctggtaattttgtacagtatagtgtatgaattgctgtgctgcaaagccaaacagctgcaaaatgttgaaaaatcatcgaaatgtataaaaattgcagtatctttaaaatcagtaaaatggactagcatattatttatcttgttcttcagttaacaactttgtgttctctgtgggagggagggagtcctgtgtgtttgtggggagagggaaggaggaagtcagttatttgagtaagcctctagttgacttttctcttagcctgaatgtggacgttgaaacatatcacttcagggcttggaaaagtcagtcaacttgacgtacatttttagtgacattttaaaagcagtcagattctataaatggcaagtaagcctgaagtgaggatactgcaattttcggagaaaagaacagcagctctttaagtgtttgcattttctatttggggggcagggaactgtcattcattttgcacaattcttgaactgatgtcagcacccgagtggctcctgaatttaagtctgggacgacatcttttatttttacatgaatctttaaacaattctgtgagcaaagtttgtagctgctggattattgtctgtctttatagcaagttccagtaaaccacaagtatggcaaagcttatccaattttatgcttggagcagtcagtacataccagtttctgatgtttcaggcaggagtggggtaaataagtgtgaccacttaaagctgctcgttagcatggaagacttctccattctatctttgtaaaacagacaagatatgcacttgacatagtagcaaattggttctgaattatgcaactgtttgctatttagtaaactagcaaatgatgcatgtattttgtttttcatgtactgggcaatatgagtaaaatctgtccctttttccccctttgaatgaggtcttccatgtttgagggaaagtcttgcactattgcatatattttggggacacagattttcatagtttccatttttggggggcttaaggattttttttttttctgtttgaaacagttttatactttctgatatagtacttgaaattcttaccagaaaattactttggagttttgaagcctttattaatactacttttaaagaagcagttgttttattgtcaatgttttttttcccccaagcatattttcttgtatttctgtttccatatatatatatatatatataatttccaattcaggatattgccctgccatccatgaaaactgttctggcaccaaaagtaatgacaaatgttaagtgtaataatagaaaagtagagcaaagagccattcagcttcagtctttacataccatgaataaaacattaaaacatcatatggagaagtttacatggtgattgttcacctgcagtactgtggagttttaacattttgtcctcttttcagtgaaacagagtaaaaatattcatctaccattactgttatttgctgattttgttttattttttgatggtaatattctatccttatgacactattgcaaccaaattggctttaccatcttggctttagtaggtatagaagacaatggattaccatctttattgctgtaatgtgttaagcattatatgctagtagaatctagtttaattgtttcaggtggaaagtattctttgagtttccatattgaatgtgtttggactaaacaaacaataaactactgatgtctgcagcattta

SEQ ID NO: 139114 - DNA, 573 bp, Homo sapiens
  Payload ID: 7261
  Gene Symbol: G3BP2
  Gene Name: GTPase activating protein (SH3 domain) binding protein 2
  ENST ID: ENST00000511868
  CDS Start-End: 275-573
ctgcgcagaccccgcctcccaccgcaggggcacgcctcctacccccacccttcgcggattgatcctgctggccgcagccacccacgtggtggaagcccggccctgcaggctggagaggatttgattagactacgcgtttcgacttgcagggtgtttaatcgtcgccaagcgggacttactgcaagctatcaaatctgaggtcttattttgttgagtcgaaagtgaaattttcctttggccaacgtgacagcatttgacattgtgcagcaaagaaatggttatggagaagcccagtccgctgcttgtagggcgggagtttgtgaggcaatattatactttgctgaataaagctccggaatatttacacaggttttatggcaggaattcttcctatgttcatggtggagtagatgctagtggaaagccccaggaagctgtttatggccaaaatgatatacaccacaaagtattatctctgaacttcagtgaatgtcatactaaaattcgtcatgtggatgctcatgcaaccttgagtgatggagtagttgtccaggtcatgggtttgctgtctaa

SEQ ID NO: 139115 - DNA, 567 bp, Homo sapiens
  Payload ID: 7261
  Gene Symbol: G3BP2
  Gene Name: GTPase activating protein (SH3 domain) binding protein 2
  ENST ID: ENST00000507252
  CDS Start-End: 261-567
gacgcagatgcgaaagtggcggcctccgggcaccatttctgtgcacggaaacagaatccgggtttgaaggcagccgccgcttcgcttacccagttaggccgggcacggtggctcacgcctgtaatcccagcactttgggaggccgaggcgggcggatcatctgaggtcaggagttcgaggccagcctgaccaacatggagaaaccccgtctctactaaaaatacataattagccagcatttgacattgtgcagcaaagaaatggttatggagaagcccagtccgctgcttgtagggcgggagtttgtgaggcaatattatactttgctgaataaagctccggaatatttacacaggttttatggcaggaattcttcctatgttcatggtggagtagatgctagtggaaagccccaggaagctgtttatggccaaaatgatatacaccacaaagtattatctctgaacttcagtgaatgtcatactaaaattcgtcatgtggatgctcatgcaaccttgagtgatggagtagttgtccaggtcatgggtttgctgtctaacagtggac

SEQ ID NO: 139116 - DNA, 584 bp, Homo sapiens
  Payload ID: 7261
  Gene Symbol: G3BP2
  Gene Name: GTPase activating protein (SH3 domain) binding protein 2
  ENST ID: ENST00000507745
  CDS Start-End: 160-584
gacgcagatgcgaaagtggcggcctccgggcaccatttctgtgcacggaaacagaatccgggtttgaagatcttctttgtgaagctttcattcaatggtgtaccacaaaagattgaaggtcatttctttaaaaagcatttgacattgtgcagcaaagaaatggttatggagaagcccagtccgctgcttgtagggcgggagtttgtgaggcaatattatactttgctgaataaagctccggaatatttacacaggttttatggcaggaattcttcctatgttcatggtggagtagatgctagtggaaagccccaggaagctgtttatggccaaaatgatatacaccacaaagtattatctctgaacttcagtgaatgtcatactaaaattcgtcatgtggatgctcatgcaaccttgagtgatggagtagttgtccaggtcatgggtttgctgtctaacagtggacaaccagaaagaaagtttatgcaaacctttgttctggctcctgaaggatctgttccaaataaattttatgttcacaatgatatgtttcgttatgaagatgaagtgtttggtgattctga

SEQ ID NO: 139117 - DNA, 508 bp, Homo sapiens
  Payload ID: 7261
  Gene Symbol: G3BP2
  Gene Name: GTPase activating protein (SH3 domain) binding protein 2
  ENST ID: ENST00000499709
  CDS Start-End: 341-508
ggattgatcctgctggccgcagccacccacgtggtggaagcccggccctgcaggctggagaggatttgattagactacgcgtttcgacttgcagggtgtttaatcgtcgccaagcgggacttactgcaagctatcaaatctgaggtcttattttgttgagtcgaaagtgaaattttcctttggccaacgtgacagggctttgtttggtggtaaaaagggttactagacacccctcattccactgccactggagggcgcatttctcagctcttgctcttcaaacctgctgaaaggaattcctagatctaaacaccagcatttgacattgtgcagcaaagaaatggttatggagaagcccagtccgctgcttgtagggcgggagtttgtgaggcaatattatactttgctgaataaagctccggaatatttacacaggttttatggcaggaattcttcctatgttcatggtggagtagatgctagtggaaagccccaggaagctgtttat

SEQ ID NO: 139118 - DNA, 554 bp, Homo sapiens
  Payload ID: 7261
  Gene Symbol: G3BP2
  Gene Name: GTPase activating protein (SH3 domain) binding protein 2
  ENST ID: ENST00000508510
  CDS Start-End: 378-554
gtgtttaatcgtcgccaagcgggacttactgcaagctatcaaatctgaggtcttattttgttgagtcgaaagtgaaattttcctttggccaacgtgacagggctttgtttggtggtaaaaagggttactagacacccctcattccactgccactggagggcgcatttctcagctcttgctcttcaaacctgctgaaaggaattcctagatctaaacaccagtttccttcatgtccttatcgcttcctgtccaaatctactgaaaaccccttcggctgttacttctggatgtgatgtcgcagtctttagcccatcctgtctgctagtgccatctgaaatccttcctggaacttgcatttgacattgtgcagcaaagaaatggttatggagaagcccagtccgctgcttgtagggcgggagtttgtgaggcaatattatactttgctgaataaagctccggaatatttacacaggttttatggcaggaattcttcctatgttcatggtggagtagatgctagtggaaagccccaggaagctgtttatggccaaaat

SEQ ID NO: 139119 - DNA, 577 bp, Homo sapiens
  Payload ID: 7261
  Gene Symbol: G3BP2
  Gene Name: GTPase activating protein (SH3 domain) binding protein 2
  ENST ID: ENST00000511146
  CDS Start-End: 231-577
aaaagaggttgtgtcgacggaggcagaagcgacgcagatgcgaaagtggcggcctccgggcaccatttctgtgcacggaaacagaatccgggtttgaaggcagccgccgcttcgcttacccagtacctagtgttccgtcgtgtttgaccaacccccctctccctgccaccgcgggtttaatccgaacgtgttcggatactggaactcatttgacattgtgcagcaaagaaatggttatggagaagcccagtccgctgcttgtagggcgggagtttgtgaggcaatattatactttgctgaataaagctccggaatatttacacaggttttatggcaggaattcttcctatgttcatggtggagtagatgctagtggaaagccccaggaagctgtttatggccaaaatgatatacaccacaaagtattatctctgaacttcagtgaatgtcatactaaaattcgtcatgtggatgctcatgcaaccttgagtgatggagtagttgtccaggtcatgggtttgctgtctaacagtggacaaccagaaagaaagtttatgcaaacctttgttctggctcc

SEQ ID NO: 139120 - DNA, 559 bp, Homo sapiens
  Payload ID: 7261
  Gene Symbol: G3BP2
  Gene Name: GTPase activating protein (SH3 domain) binding protein 2
  ENST ID: ENST00000509561
  CDS Start-End: 327-559
cccacgtggtggaagcccggccctgcaggctggagaggatttgattagactacgcgtttcgacttgcagggtgtttaatcgtcgccaagcgggacttactgcaagctatcaaatctgaggtcttattttgttgagtcgaaagtgaaattttcctttggccaacgtgacagtttccttcatgtccttatcgcttcctgtccaaatctactgaaaaccccttcggctgttacttctggatgtgatgtcgcagtctttagcccatcctgtctgctagtgccatctgaaatccttcctggaacttgcatttgacattgtgcagcaaagaaatggttatggagaagcccagtccgctgcttgtagggcgggagtttgtgaggcaatattatactttgctgaataaagctccggaatatttacacaggttttatggcaggaattcttcctatgttcatggtggagtagatgctagtggaaagccccaggaagctgtttatggccaaaatgatatacaccacaaagtattatctctgaacttcagtgaatgtcatactaaaattcg

SEQ ID NO: 139121 - DNA, 1071 bp, Homo sapiens
  Payload ID: 7261
  Gene Symbol: G3BP2
  Gene Name: GTPase activating protein (SH3 domain) binding protein 2
  ENST ID: ENST00000503660
  CDS Start-End: 477-1071
attccattcgcgctccgcggcgcgaggcaatcgtccggtgtgtgagcccgggagccggaggtgtagcggcagagacattgttcttgccggctccctacggtgccgtgtgtgcgtgagagaagaccagtctttcctctaggttaggccgggcacggtggctcacgcctgtaatcccagcactttgggaggccgaggcgggcggatcatctgaggtcaggagttcgaggccagcctgaccaacatggagaaaccccgtctctactaaaaatacataattagccaggtgtggtggcgtatgcctgtaatcccagctactcgggaggctgaggcaggagaatcgcttgaacccgggaggcggaggttgcagtgagctgagattgcgccattgcactccagcctgggcaaggagagtgaaactccgtctcaaaaaaaaaaaaaaaaaattatttcagcatttgacattgtgcagcaaagaaatggttatggagaagcccagtccgctgcttgtagggcgggagtttgtgaggcaatattatactttgctgaataaagctccggaatatttacacaggttttatggcaggaattcttcctatgttcatggtggagtagatgctagtggaaagccccaggaagctgtttatggccaaaatgatatacaccacaaagtattatctctgaacttcagtgaatgtcatactaaaattcgtcatgtggatgctcatgcaaccttgagtgatggagtagttgtccaggtcatgggtttgctgtctaacagtggacaaccagaaagaaagtttatgcaaacctttgttctggctcctgaaggatctgttccaaataaattttatgttcacaatgatatgtttcgttatgaagatgaagtgtttggtgattctgagcctgaacttgatgaagaatcagaagatgaagtagaagaggaacaagaagaaagacaaccatctcctgaacctgtgcaagaaaatgctaacagtggttactatgaagctcaccctgtgactaatggcatagaggagcctttggaagaatcctctcatgaacctgaacctg

SEQ ID NO: 139122 - DNA, 560 bp, Homo sapiens
  Payload ID: 7261
  Gene Symbol: G3BP2
  Gene Name: GTPase activating protein (SH3 domain) binding protein 2
  ENST ID: ENST00000515457
  CDS Start-End: 229-560
gcagcgcctggcgcccgggaagaggtggttgtgaggcagacgaactcgcggctctccggcttccgaggcttccgagttgtcggaggaagggggcggcgagcaataagaacccgccgcacccggtcctcagcgactcttctgacctccgcgcgacgtacccgccgccgccgttggctggagttattcttgtgtttgctccctcagcatttgacattgtgcagcaaagaaatggttatggagaagcccagtccgctgcttgtagggcgggagtttgtgaggcaatattatactttgctgaataaagctccggaatatttacacaggttttatggcaggaattcttcctatgttcatggtggagtagatgctagtggaaagccccaggaagctgtttatggccaaaatgatatacaccacaaagtattatctctgaacttcagtgaatgtcatactaaaattcgtcatgtggatgctcatgcaaccttgagtgatggagtagttgtccaggtcatgggtttgctgtctaacagtggacaaccagaaagaaagtttatgcaaac

SEQ ID NO: 139123 - DNA, 514 bp, Homo sapiens
  Payload ID: 7261
  Gene Symbol: G3BP2
  Gene Name: GTPase activating protein (SH3 domain) binding protein 2
  ENST ID: ENST00000509100
  CDS Start-End: 140-514
ttggggatgaggtggcgaagtggggggggaggcacgcagcagctcccgaaggcgcgctgatggaagcttaatacaggaagtgtgggagcaggctttctggaggggatgttttaggcatttgacattgtgcagcaaagaaatggttatggagaagcccagtccgctgcttgtagggcgggagtttgtgaggcaatattatactttgctgaataaagctccggaatatttacacaggttttatggcaggaattcttcctatgttcatggtggagtagatgctagtggaaagccccaggaagctgtttatggccaaaatgatatacaccacaaagtattatctctgaacttcagtgaatgtcatactaaaattcgtcatgtggatgctcatgcaaccttgagtgatggagtagttgtccaggtcatgggtttgctgtctaacagtggacaaccagaaagaaagtttatgcaaacctttgttctggctcctgaaggatctgttccaaataaattttat

SEQ ID NO: 139124 - DNA, 338 bp, Homo sapiens
  Payload ID: 7261
  Gene Symbol: G3BP2
  Gene Name: GTPase activating protein (SH3 domain) binding protein 2
  ENST ID: ENST00000510902
  CDS Start-End: 1-72
catggtggagtagatgctagtggaaagccccaggaagctgtttatggccaaaataatcagaagatgaagtagaagaggaacaagaagaaagacaaccatctcctgaacctgtgcaagaaaatgctaacagtggttactatgaagctcaccctgtgactaatggcatagaggagcctttggaagaatcctctcatgaacctgaacctgagccagaatctgaaacaaagactgaagagctgaaaccacaagtggaggagaagaacttagaagaactagaggagaaatctactactcctcctccggcagaacctgtttctctgccacaagaaccaccaaag

SEQ ID NO: 139125 - DNA, 2667 bp, Homo sapiens
  Payload ID: 7262
  Gene Symbol: GAPVD1
  Gene Name: GTPase activating protein and VPS9 domains 1
  ENST ID: ENST00000265956
  CDS Start-End: 113-2002
ggaaaatcctcgtcttattgcctcctctttggttgctggagagaaacttaatcaggagaacacacaaagtgttatttacacagtttttacctccctgtatggcaattgcatcatgcaagaagatgaaagctacctccttcaggttttgcgatacttgattgaatttgaacttaaagaaagtgacaaccctaggcgacttttgaggagaggaacttgtgccttcagcatcttatttaaacttttttctgaaggactgttttctgccaaacttttcctcacagccactttacatgagccaattatgcaactgcttgttgaagatgaagatcacctggaaacagatccaaacaagctaattgagaggttctctccatctcagcaggaaaaactctttggagagaagggctcagatagattcaggcaaaaagttcaagaaatggtggagtccaatgaagcaaagctagtggctttggtgaacaaatttattggttatctcaaacagaacacatattgttttccacatagtttaaggtggatcgtgtctcagatgtacaaaaccctctcctgtgtagataggctggaagttggggaggtcagggcaatgtgtactgatctcctgttggcctgcttcatttgtcctgcagttgtcaatccagaacaatatggaataatttccgatgctcctattaatgaagtagcacgatttaatctgatgcaggtaggccgccttttgcagcagttagcaatgactggctctgaagagggagatccccgaacaaagagcagccttggaaagtttgacaaaagctgtgttgccgctttccttgatgttgtgattgggggccgtgcagtggagacccctccattgtcttccgtcaatcttctggaaggattgagcagaactgtggtttatataacctacagtcagcttattactctggtgaattttatgaagagtgtgatgtctggagatcaactgagagaagatagaatggctcttgacaatttattggcaaacctacccccggccaagccaggaaaaagtagcagtttagaaatgactccctacaatacacctcagctatctccagcaaccactccagcaaataaaaagaatcgattacctatagcaactcggagcagaagccgcaccaatatgctaatggacctacatatggaccatgaaggatcatctcaagaaaccattcaggaggtgcaaccagaagaggtgttggtcatttccttaggtacaggtccccagcttactccagggatgatgtcagaaaatgaggtcctaaacatgcagctttcggatggaggacaaggagatgtccctgttgatgaaaacaaactccatggtaaacctgataaaaccttgcgcttttccctctgcagtgataatctggaaggaatatctgaaggtccttcaaatcgctccaattcagtgtcctccctagacctagaaggagagtctgtgtcagaacttggagcaggaccttctggcagtaatggagttgaagctctacagctgttagaacatgagcaagctacaacacaggataaccttgatgataagctaaggaagtttgaaattcgtgacatgatgggattaacagatgatagggacatatcagaaacagtgagtgagacctggagtacagacgtcttgggaagtgactttgaccctaatattgatgaagatcgcttgcaagaaattgcaggtgctgcagcagagaacatgttaggcagtttgctgtgcctcccaggttcagggtcagtgcttcttgacccctgcactggttctaccatatcagagacaacaagtgaagcttggagtgtagaggtattgccaagtgactcagaggccccagacctaaagcaggaggagcgtctgcaagaactggagagcgttctggactgggtagcacatctgatgatacggatgtcagggaggtcagttcccgccccagcacaccaggcctcagtgttgtgtccggcataagtgcaacctctgaggatattcccaataagattgaagacctgagatctgagtgcagctctgattttgggggtaaagattctgtcactagtccagacatggatgaaataactcacggtgcccaccagctgacctctcctccttctcagtcagagtctctgctggccatgtttgatccactgtcttcacatgaaggggcttctgctgtggtaaggccaaaggttcactatgctaggccatcgcatccaccaccagatcccccaatcctggaaggagctgtgggaggaaatgaggccaggttgccaaactttggttcccatgttttaactccagctgaaatggaggcattcaagcaaaggcattcttaccctgagagactagttcgaagcaggagctctgatatagtatcttctgtccggagacccatgagtgaccccagctggaaccggcgtccaggaaatgaagagcgagaactccctccagctgcagccattggtgctacttctttggtggctgcacctcattcatcatcttcatccccgagtaaggactcctcaagaggagagactgaagaacgcaaagatagcgatgatgagaaatcagacaggaacagaccttggtggagaaaacgttttgtttcagccatgcctaaagctcctataccattt

SEQ ID NO: 139126 - DNA, 6003 bp, Homo sapiens
  Payload ID: 7262
  Gene Symbol: GAPVD1
  Gene Name: GTPase activating protein and VPS9 domains 1
  Uniprot ID: Q14C86
  ENST ID: ENST00000297933
  CDS Start-End: 248-4630
gtggcggtccgacagagtcctccgtgtcctcccccgcatgacccccttggggtaagtgtactggagagagttggttatacattctaggaatctcaaagggtctggctctgtcacccaggctggagtgcagtgacacgatctcagctcactgtaacctccgcctcccgggttcaagcgatcctcccatctgaccctcccaagtagctggcattcagtgatcagcctttgagcctttcccacattgaagatggtgaaactagatattcatactctggctcatcacctcaagcaggaacgcttatatgtaaactctgagaaacagctcattcagaggctcaatgcagatgtacttaagacagctgaaaagttgtatcgtacagcatggattgcgaagcaacagagaatcaatttggatcggcttatcataaccagtgctgaagcttcccctgctgaatgttgccaacatgccaaaattttggaagatacacaatttgttgatgggtataagcaattgggatttcaggagactgcttatggagaattcttgagtcgattgagggaaaatcctcgtcttattgcctcctctttggttgctggagagaaacttaatcaggagaacacacaaagtgttatttacacagtttttacctccctgtatggcaattgcatcatgcaagaagatgaaagctacctccttcaggttttgcgatacttgattgaatttgaacttaaagaaagtgacaaccctaggcgacttttgaggagaggaacttgtgccttcagcatcttatttaaacttttttctgaaggactgttttctgccaaacttttcctcacagccactttacatgagccaattatgcaactgcttgttgaagatgaagatcacctggaaacagatccaaacaagctaattgagaggttctctccatctcagcaggaaaaactctttggagagaagggctcagatagattcaggcaaaaagttcaagaaatggtggagtccaatgaagcaaagctagtggctttggtgaacaaatttattggttatctcaaacagaacacatattgttttccacatagtttaaggtggatcgtgtctcagatgtacaaaaccctctcctgtgtagataggctggaagttggggaggtcagggcaatgtgtactgatctcctgttggcctgcttcatttgtcctgcagttgtcaatccagaacaatatggaataatttccgatgctcctattaatgaagtagcacgatttaatctgatgcaggtaggccgccttttgcagcagttagcaatgactggctctgaagagggagatccccgaacaaagagcagccttggaaagtttgacaaaagctgtgttgccgctttccttgatgttgtgattgggggccgtgcagtggagacccctccattgtcttccgtcaatcttctggaaggattgagcagaactgtggtttatataacctacagtcagcttattactctggtgaattttatgaagagtgtgatgtctggagatcaactgagagaagatagaatggctcttgacaatttattggcaaacctacccccggccaagccaggaaaaagtagcagtttagaaatgactccctacaatacacctcagctatctccagcaaccactccagcaaataaaaagaatcgattacctatagcaactcggagcagaagccgcaccaatatgctaatggacctacatatggaccatgaaggatcatctcaagaaaccattcaggaggtgcaaccagaagaggtgttggtcatttccttaggtacaggtccccagcttactccagggatgatgtcagaaaatgaggtcctaaacatgcagctttcggatggaggacaaggagatgtccctgttgatgaaaacaaactccatggtaaacctgataaaaccttgcgcttttccctctgcagtgataatctggaaggaatatctgaaggtccttcaaatcgctccaattcagtgtcctccctagacctagaaggagagtctgtgtcagaacttggagcaggaccttctggcagtaatggagttgaagctctacagctgttagaacatgagcaagctacaacacaggataaccttgatgataagctaaggaagtttgaaattcgtgacatgatgggattaacagatgatagggacatatcagaaacagtgagtgagacctggagtacagacgtcttgggaagtgactttgaccctaatattgatgaagatcgcttgcaagaaattgcaggtgctgcagcagagaacatgttaggcagtttgctgtgcctcccaggttcagggtcagtgcttcttgacccctgcactggttctaccatatcagagacaacaagtgaagcttggagtgtagaggtattgccaagtgactcagaggccccagacctaaagcaggaggagcgtctgcaagaactggagagctgttctggactgggtagcacatctgatgatacggatgtcagggaggtcagttcccgccccagcacaccaggcctcagtgttgtgtccggcataagtgcaacctctgaggatattcccaataagattgaagacctgagatctgagtgcagctctgattttgggggtaaagattctgtcactagtccagacatggatgaaataactcacggtgcccaccagctgacctctcctccttctcagtcagagtctctgctggccatgtttgatccactgtcttcacatgaaggggcttctgctgtggtaaggccaaaggttcactatgctaggccatcgcatccaccaccagatcccccaatcctggaaggagctgtgggaggaaatgaggccaggttgccaaactttggttcccatgttttaactccagctgaaatggaggcattcaagcaaaggcattcttaccctgagagactagttcgaagcaggagctctgatatagtatcttctgtccggagacccatgagtgaccccagctggaaccggcgtccaggaaatgaagagcgagaactccctccagctgcagccattggtgctacttctttggtggctgcacctcattcatcatcttcatccccgagtaaggactcctcaagaggagagactgaagaacgcaaagatagcgatgatgagaaatcagacaggaacagaccttggtggagaaaacgttttgtttcagccatgcctaaagctcctataccatttagaaagaaagaaaaacaagaaaaagacaaagatgatctggggcctgacagattctcaacactcacagatgatcccagccctagactcagtgcacaagctcaggtggctgaggatattctggacaaatacaggaatgccattaaacggaccagccccagtgatggagcaatggcaaactatgaaagtacagaggttatgggtgatggtgaaagtgcacatgattctccccgtgacgaagcactgcagaacatctcggctgatgatctcccagactctgcaagccaagcagcccacccgcaggattcagctttctcttacagagatgcaaaaaagaaactgaggcttgctctttgctctgcggactctgttgccttcccagtgctgacccattcaacaaggaatggtttaccagaccacacagacccagaagacaatgaaattgtatgcttcttaaaagttcaaatagctgaagcaattaatttacaagataagaatctaatggctcaacttcaagaaacaatgcgctgtgtgtgccgttttgataataggacttgtaggaaactgctggcttcgattgctgaggactacagaaaaagagccccatatattgcttatctcactcgttgtcgacaaggactacagaccacacaggctcacctggaaaggctattgcaaagagttttgcgggacaaagaagtggccaatcgatactttaccactgtctgtgtgagattactgcttgagagcaaagaaaagaagatcagggaattcattcaagactttcagaaactcaccgcagctgacgataaaactgctcaggtagaagattttctgcagtttctttatggtgcaatggcccaggatgtcatatggcaaaacgcgagtgaagaacagcttcaagatgcacagctggccattgagcgaagcgtgatgaaccggattttcaagctcgccttctaccctaatcaagatggggacatacttcgcgaccaggttcttcatgaacatatccagagattgtctaaagtagtgactgcaaatcacagagctcttcagataccagaggtttatcttcgagaagcaccatggccatctgcacaatcagaaatcaggacaataagtgcttataaaaccccccgggacaaagtgcagtgcatcctgagaatgtgctctacgattatgaacctcctgagcctggccaatgaggactctgtccctggagcggatgactttgttcctgtgttggtgtttgtgttgataaaggcaaatccaccctgtttgctgtctactgtgcagtatatcagtagcttttatgctagctgtctgtctggagaggagtcctattggtggatgcagttcacagcagcagtagaattcattaaaaccatcgatgaccgaaagtgaccaagaccaaggcccaccaaggcagcagactgttaatcagacaaacagatctctgagaaggtgcatcagctgctttgaaggctgaagattgttttgtatgatactgcacagcatcaggcattttaaagcagatctttactaaacaggttaatgagctaacaagcaggttctctcgtctttgggctctttcctttctgagttgcatattctattttcttgtccccaagtagagactagtactacaaaaagggaccacatttttcaagtatttctaagtataaaaaacaaaacaaaaatctcttaggaaatgtctagacctccattcttggattccctttctttccttttattttaaaaaagaacagtacccctcttttaagatgctgtcttacattaatgagcatctaatggaaagaaggtatgagttgcactgaggattagaatagtggtgcgttagtggcattatctataaatacactcacctaaattgaaagctaagaaggaaatgtaaatataatatatatttatatttgatgtaatatggacatctgcagattctaataaacaaggactattgctgatagtaggctgtgacatactgtcttgtgaaatggtttccttgacaaaatttaagctgagcttaaaagcaaaaaacaaaaagtacacagaaatatttattaaaatgtaatacagtttattgaactttctaggtatggagtttgatggacagggctgcctttaatgagtgtgaaggtcactaagtcacttagacatctcaccgtggaagtttgtgagcctgcattaggagatagactgattaccatacatgacataaaaaggaacagtggatagctcatactttatggtggttcttctcctccgaaataatatactgcagaaatcccagacagagctccttacaaacctttaattgtaatatatttttgatgattattcacattgaatgcacagaccaagaattcagtgaatgtcattttttaaaaaactaatttgtattgtctgctctagtgatacaagttttactagtgataaactattttaatcaaccatactattcttatggaaaaaaatatctattttggcaggtttctgtgcctttatttccctcttctgaaaaaaagtctgtgttttcatagtttggtttgcattgtatatcaataattaatcaggaatgggttttggtgcctgaaaaattggccatggaggcacaccaaagcttcaagcacaagtcttgtacatgggccatcactgtctggtttcacttcgtgtgtttcctaaacacatttagctgcttttttaacaaactcagccccatacttgagtcccttgttgttgggagcatttccaggcat

SEQ ID NO: 139127 - DNA, 4320 bp, Homo sapiens
  Payload ID: 7262
  Gene Symbol: GAPVD1
  Gene Name: GTPase activating protein and VPS9 domains 1
  Uniprot ID: Q14C86
  ENST ID: ENST00000312123
  CDS Start-End: 1-4320
atggtgaaactagatattcatactctggctcatcacctcaagcaggaacgcttatatgtaaactctgagaaacagctcattcagaggctcaatgcagatgtacttaagacagctgaaaagttgtatcgtacagcatggattgcgaagcaacagagaatcaatttggatcggcttatcataaccagtgctgaagcttcccctgctgaatgttgccaacatgccaaaattttggaagatacacaatttgttgatgggtataagcaattgggatttcaggagactgcttatggagaattcttgagtcgattgagggaaaatcctcgtcttattgcctcctctttggttgctggagagaaacttaatcaggagaacacacaaagtgttatttacacagtttttacctccctgtatggcaattgcatcatgcaagaagatgaaagctacctccttcaggttttgcgatacttgattgaatttgaacttaaagaaagtgacaaccctaggcgacttttgaggagaggaacttgtgccttcagcatcttatttaaacttttttctgaaggactgttttctgccaaacttttcctcacagccactttacatgagccaattatgcaactgcttgttgaagatgaagatcacctggaaacagatccaaacaagctaattgagaggttctctccatctcagcaggaaaaactctttggagagaagggctcagatagattcaggcaaaaagttcaagaaatggtggagtccaatgaagcaaagctagtggctttggtgaacaaatttattggttatctcaaacagaacacatattgttttccacatagtttaaggtggatcgtgtctcagatgtacaaaaccctctcctgtgtagataggctggaagttggggaggtcagggcaatgtgtactgatctcctgttggcctgcttcatttgtcctgcagttgtcaatccagaacaatatggaataatttccgatgctcctattaatgaagtagcacgatttaatctgatgcaggtaggccgccttttgcagcagttagcaatgactggctctgaagagggagatccccgaacaaagagcagccttggaaagtttgacaaaagctgtgttgccgctttccttgatgttgtgattgggggccgtgcagtggagacccctccattgtcttccgtcaatcttctggaaggattgagcagaactgtggtttatataacctacagtcagcttattactctggtgaattttatgaagagtgtgatgtctggagatcaactgagagaagatagaatggctcttgacaatttattggcaaacctacccccggccaagccaggaaaaagtagcagtttagaaatgactccctacaatacacctcagctatctccagcaaccactccagcaaataaaaagaatcgattacctatagcaactcggagcagaagccgcaccaatatgctaatggacctacatatggaccatgaaggatcatctcaagaaaccattcaggaggtgcaaccagaagaggtgttggtcatttccttaggtacaggtccccagcttactccagggatgatgtcagaaaatgaggtcctaaacatgcagctttcggatggaggacaaggagatgtccctgttgatgaaaacaaactccatggtccttcaaatcgctccaattcagtgtcctccctagacctagaaggagagtctgtgtcagaacttggagcaggaccttctggcagtaatggagttgaagctctacagctgttagaacatgagcaagctacaacacaggataaccttgatgataagctaaggaagtttgaaattcgtgacatgatgggattaacagatgatagggacatatcagaaacagtgagtgagacctggagtacagacgtcttgggaagtgactttgaccctaatattgatgaagatcgcttgcaagaaattgcaggtgctgcagcagagaacatgttaggcagtttgctgtgcctcccaggttcagggtcagtgcttcttgacccctgcactggttctaccatatcagagacaacaagtgaagcttggagtgtagaggtattgccaagtgactcagaggccccagacctaaagcaggaggagcgtctgcaagaactggagagctgttctggactgggtagcacatctgatgatacggatgtcagggaggtcagttcccgccccagcacaccaggcctcagtgttgtgtccggcataagtgcaacctctgaggatattcccaataagattgaagacctgagatctgagtgcagctctgattttgggggtaaagattctgtcactagtccagacatggatgaaataactcacggtgcccaccagctgacctctcctccttctcagtcagagtctctgctggccatgtttgatccactgtcttcacatgaaggggcttctgctgtggtaaggccaaaggttcactatgctaggccatcgcatccaccaccagatcccccaatcctggaaggagctgtgggaggaaatgaggccaggttgccaaactttggttcccatgttttaactccagctgaaatggaggcattcaagcaaaggcattcttaccctgagagactagttcgaagcaggagctctgatatagtatcttctgtccggagacccatgagtgaccccagctggaaccggcgtccaggaaatgaagagcgagaactccctccagctgcagccattggtgctacttctttggtggctgcacctcattcatcatcttcatccccgagtaaggactcctcaagaggagagactgaagaacgcaaagatagcgatgatgagaaatcagacaggaacagaccttggtggagaaaacgttttgtttcagccatgcctaaagctcctataccatttagaaagaaagaaaaacaagaaaaagacaaagatgatctggggcctgacagattctcaacactcacagatgatcccagccctagactcagtgcacaagctcaggtggctgaggatattctggacaaatacaggaatgccattaaacggaccagccccagtgatggagcaatggcaaactatgaaagtacagaggttatgggtgatggtgaaagtgcacatgattctccccgtgacgaagcactgcagaacatctcggctgatgatctcccagactctgcaagccaagcagcccacccgcaggattcagctttctcttacagagatgcaaaaaagaaactgaggcttgctctttgctctgcggactctgttgccttcccagtgctgacccattcaacaaggaatggtttaccagaccacacagacccagaagacaatgaaattgtatgcttcttaaaagttcaaatagctgaagcaattaatttacaagataagaatctaatggctcaacttcaagaaacaatgcgctgtgtgtgccgttttgataataggacttgtaggaaactgctggcttcgattgctgaggactacagaaaaagagccccatatattgcttatctcactcgttgtcgacaaggactacagaccacacaggctcacctggaaaggctattgcaaagagttttgcgggacaaagaagtggccaatcgatactttaccactgtctgtgtgagattactgcttgagagcaaagaaaagaagatcagggaattcattcaagactttcagaaactcaccgcagctgacgataaaactgctcaggtagaagattttctgcagtttctttatggtgcaatggcccaggatgtcatatggcaaaacgcgagtgaagaacagcttcaagatgcacagctggccattgagcgaagcgtgatgaaccggattttcaagctcgccttctaccctaatcaagatggggacatacttcgcgaccaggttcttcatgaacatatccagagattgtctaaagtagtgactgcaaatcacagagctcttcagataccagaggtttatcttcgagaagcaccatggccatctgcacaatcagaaatcaggacaataagtgcttataaaaccccccgggacaaagtgcagtgcatcctgagaatgtgctctacgattatgaacctcctgagcctggccaatgaggactctgtccctggagcggatgactttgttcctgtgttggtgtttgtgttgataaaggcaaatccaccctgtttgctgtctactgtgcagtatatcagtagcttttatgctagctgtctgtctggagaggagtcctattggtggatgcagttcacagcagcagtagaattcattaaaaccatcgatgaccgaaagtga

SEQ ID NO: 139128 - DNA, 4747 bp, Homo sapiens
  Payload ID: 7262
  Gene Symbol: GAPVD1
  Gene Name: GTPase activating protein and VPS9 domains 1
  ENST ID: ENST00000394083
  CDS Start-End: 150-4388
cgagtggcgaaggtggcggcagcggcggcgggggcagtcaccggctagggcgacggctccgaggccgagtggcggtccgacagagtcctccgtgtcctcccccgcatgacccccttgtgatcagcctttgagcctttcccacattgaagatggtgaaactagatattcatactctggctcatcacctcaagcaggaacgcttatatgtaaactctgagaaacagctcattcagaggctcaatgcagatgtacttaagacagctgaaaagttgtatcgtacagcatggattgcgaagcaacagagaatcaatttggatcggcttatcataaccagtgctgaagcttcccctgctgaatgttgccaacatgccaaaattttggaagatacacaatttgttgatgggtataagcaattgggatttcaggagactgcttatggagaattcttgagtcgattgagggaaaatcctcgtcttattgcctcctctttggttgctggagagaaacttaatcaggagaacacacaaagtgttatttacacagtttttacctccctgtatggcaattgcatcatgcaagaagatgaaagctacctccttcaggttttgcgatacttgattgaatttgaacttaaagaaagtgacaaccctaggcgacttttgaggagaggaacttgtgccttcagcatcttatttaaacttttttctgaaggactgttttctgccaaacttttcctcacagccactttacatgagccaattatgcaactgcttgttgaagatgaagatcacctggaaacagatccaaacaagctaattgagaggttctctccatctcagcaggaaaaactctttggagagaagggctcagatagattcaggcaaaaagttcaagaaatggtggagtccaatgaagcaaagctagtggctttggtgaacaaatttattggttatctcaaacagaacacatattgttttccacatagtttaaggtggatcgtgtctcagatgtacaaaaccctctcctgtgtagataggctggaagttggggaggtcagggcaatgtgtactgatctcctgttggcctgcttcatttgtcctgcagttgtcaatccagaacaatatggaataatttccgatgctcctattaatgaagtagcacgatttaatctgatgcaggtaggccgccttttgcagcagttagcaatgactggctctgaagagggagatccccgaacaaagagcagccttggaaagtttgacaaaagctgtgttgccgctttccttgatgttgtgattgggggccgtgcagtggagacccctccattgtcttccgtcaatcttctggaaggattgagcagaactgtggtttatataacctacagtcagcttattactctggtgaattttatgaagagtgtgatgtctggagatcaactgagagaagatagaatggctcttgacaatttattggcaaacctacccccggccaagccaggaaaaagtagcagtttagaaatgactccctacaatacacctcagctatctccagcaaccactccagcaaataaaaagaatcgattacctatagcaactcggagcagaagccgcaccaatatgctaatggacctacatatggaccatgaaggatcatctcaagaaaccattcaggaggtgcaaccagaagaggtgttggtcatttccttaggtacaggtccccagcttactccagggatgatgtcagaaaatgaggtcctaaacatgcagctttcggatggaggacaaggagatgtccctgttgatgaaaacaaactccatggtccttcaaatcgctccaattcagtgtcctccctagacctagaaggagagtctgtgtcagaacttggagcaggaccttctggcagtaatggagttgaagctctacagctgttagaacatgagcaagctacaacacaggataaccttgatgataagctaaggaagtttgaaattcgtgacatgatgggattaacagatgatagggacatatcagaaacagtgagtgagacctggagtacagacgtcttgggaagtgactttgaccctaatattgatgaagatcgcttgcaagaaattgcaggtgctgcagcagagaacatgttaggcagtttgctgtgcctcccaggttcagggtcagtgcttcttgacccctgcactggttctaccatatcagagacaacaagtgaagcttggagtgtagaggtattgccaagtgactcagaggccccagacctaaagcaggaggagcgtctgcaagaactggagagctgttctggactgggtagcacatctgatgatacggatgtcagggaggtcagttcccgccccagcacaccaggcctcagtgttgtgtccggcataagtgcaacctctgaggatattcccaataagattgaagacctgagatctgagtgcagctctgattttgggggtaaagattctgtcactagtccagacatggatgaaataactcacggtgcccaccagctgacctctcctccttctcagtcagagtctctgctggccatgtttgatccactgtcttcacatgaaggggcttctgctgtggtaaggccaaaggttcactatgctaggccatcgcatccaccaccagatcccccaatcctggaaggagctgtgggaggaaatgaggccaggttgccaaactttggttcccatgttttaactccagctgaaatggaggcattcaagcaaaggcattcttaccctgagagactagttcgaagcaggagctctgatatagtatcttctgtccggagacccatgagtgaccccagctggaaccggcgtccaggaaatgaagagcgagaactccctccagctgcagccattggtgctacttctttggtggctgcacctcattcatcatcttcatccccgagtaaggactcctcaagaggagagactgaagaacgcaaagatagcgatgatgagaaatcagacaggaacagaccttggtggagaaaacgttttgtttcagccatgcctaaagatgatcccagccctagactcagtgcacaagctcaggtggctgaggatattctggacaaatacaggaatgccattaaacggaccagccccagtgatggagcaatggcaaactatgaaagtacagaggttatgggtgatggtgaaagtgcacatgattctccccgtgacgaagcactgcagaacatctcggctgatgatctcccagactctgcaagccaagcagcccacccgcaggattcagctttctcttacagagatgcaaaaaagaaactgaggcttgctctttgctctgcggactctgttgccttcccagtgctgacccattcaacaaggaatggtttaccagaccacacagacccagaagacaatgaaattgtatgcttcttaaaagttcaaatagctgaagcaattaatttacaagataagaatctaatggctcaacttcaagaaacaatgcgctgtgtgtgccgttttgataataggacttgtaggaaactgctggcttcgattgctgaggactacagaaaaagagccccatatattgcttatctcactcgttgtcgacaaggactacagaccacacaggctcacctggaaaggctattgcaaagagttttgcgggacaaagaagtggccaatcgatactttaccactgtctgtgtgagattactgcttgagagcaaagaaaagaagatcagggaattcattcaagactttcagaaactcaccgcagctgacgataaaactgctcaggtagaagattttctgcagtttctttatggtgcaatggcccaggatgtcatatggcaaaacgcgagtgaagaacagcttcaagatgcacagctggccattgagcgaagcgtgatgaaccggattttcaagctcgccttctaccctaatcaagatggggacatacttcgcgaccaggttcttcatgaacatatccagagattgtctaaagtagtgactgcaaatcacagagctcttcagataccagaggtttatcttcgagaagcaccatggccatctgcacaatcagaaatcaggacaataagtgcttataaaaccccccgggacaaagtgcagtgcatcctgagaatgtgctctacgattatgaacctcctgagcctggccaatgaggactctgtccctggagcggatgactttgttcctgtgttggtgtttgtgttgataaaggcaaatccaccctgtttgctgtctactgtgcagtatatcagtagcttttatgctagctgtctgtctggagaggagtcctattggtggatgcagttcacagcagcagtagaattcattaaaaccatcgatgaccgaaagtgaccaagaccaaggcccaccaaggcagcagactgttaatcagacaaacagatctctgagaaggtgcatcagctgctttgaaggctgaagattgttttgtatgatactgcacagcatcaggcattttaaagcagatctttactaaacaggttaatgagctaacaagcaggttctctcgtctttgggctctttcctttctgagttgcatattctattttcttgtccccaagtagagactagtactacaaaaagggaccacatttttcaagtatttctaagtataaaaaacaaaacaaaaatctcttaggaaatgtctagacctccattcttggattccctttctttccttttattttaaaaaa

SEQ ID NO: 139129 - DNA, 3190 bp, Homo sapiens
  Payload ID: 7262
  Gene Symbol: GAPVD1
  Gene Name: GTPase activating protein and VPS9 domains 1
  ENST ID: ENST00000394084
  CDS Start-End: 330-1823
gggaagccaacaggcgagtggcgaaggtggcggcagcggcggcgggggcagtcaccggctagggcgacggctccgaggccgagtggcggtccgacagagtcctccgtgtcctcccccgcatgacccccttggggtaagtgtactggagagagttggttatacattctaggaatctcaaagggtctggctctgtcacccaggctggagtgcagtgacacgatctcagctcactgtaacctccgcctcccgggttcaagcgatcctcccatctgaccctcccaagtagctggcattcagtgatcagcctttgagcctttcccacattgaagatggtgaaactagatattcatactctggctcatcacctcaagcaggaacgcttatatgtaaactctgagaaacagctcattcagaggctcaatgcagatgtacttaagacagctgaaaagttgtatcgtacagcatggattgcgaagcaacagagaatcaatttggatcggcttatcataaccagtgctgaagcttcccctgctgaatgttgccaacatgccaaaattttggaagatacacaatttgttgatgggtataagcaattgggatttcaggagactgcttatggagaattcttgagtcgattgagggaaaatcctcgtcttattgcctcctctttggttgctggagagaaacttaatcaggagaacacacaaagtgttatttacacagtttttacctccctgtatggcaattgcatcatgcaagaagatgaaagctacctccttcaggttttgcgatacttgattgaatttgaacttaaagaaagtgacaaccctaggcgacttttgaggagaggaacttgtgccttcagcatcttatttaaacttttttctgaaggactgttttctgccaaacttttcctcacagccactttacatgagccaattatgcaactgcttgttgaagatgaagatcacctggaaacagatccaaacaagctaattgagaggttctctccatctcagcaggaaaaactctttggagagaagggctcagatagattcaggcaaaaagttcaagaaatggtggagtccaatgaagcaaagctagtggctttggtgaacaaatttattggttatctcaaacagaacacatattgttttccacatagtttaaggtggatcgtgtctcagatgtacaaaaccctctcctgtgtagataggctggaagttggggaggtcagggcaatgtgtactgatctcctgttggcctgcttcatttgtcctgcagttgtcaatccagaacaatatggaataatttccgatgctcctattaatgaagtagcacgatttaatctgatgcaggtaggccgccttttgcagcagttagcaatgactggctctgaagagggagatccccgaacaaagagcagccttggaaagtttgacaaaagctgtgttgccgctttccttgatgttgtgattgggggccgtgcagtggagacccctccattgtcttccgtcaatcttctggaaggattgagcagaactgtggtttatataacctacagtcagcttattactctggtgaattttatgaagagtgtgatgtctggagatcaactgagagaagatagaatggctcttgacaatttattggcaaacctacccccggccaagccaggaaaaagtagcagtttagaaatgactccctacaatacacctcagctatctccagcaaccactccagcaaataaaaagaatcgattacctataggtaaagagaatttctcgtattggagctttctcttaaatctaatatttcattagcctttgttattgctgagtgttttggaacatatgtttaagtacttgggaaagtctttctcttcatgtttactgatggtatttcagtttttagaaatcgtatcagattagttaaggtttatcagtagtctttagctttgcctacatacttttcataattaattgaagtcatgctatccacagtatactttctttaaattttattgtcttttcttgaaaaaattttggaaatgttataagtagtcatctttaaaactatgtagccctcagcctggtgtggtggcacgtgcctgtggtccctgctacttgggaggctgagatggggagattgcttgagcctgggaggtcgaggctgcagtgaaccatgattgtgccactgcacttcagcctgggtgaccctgagtgagaccctatctcaaaaaaaaaaaaaattatgtagccccctcctttctacaaagttctaaataatataataaacaatattattttagaagtttccatcaataaagtggaaaataatagtattttctattattttcattaacaatcagtcttttatcaactgagctaagatatcttaatattacaaaatgaagcaaaagtttcattttattttttcaagtttgtttatttaagaattctatttaattaagccttatttgcttggttaacatttgctatctatctgtctataaaaaaattaattgagcatataccatgttccatactgtgggtaggcactttataaatgttgtttcatttaatccccacagaagtcctgtgagagtggatgtgtcttgcacatgaggcactgtgatagacactggatacaaagaccattaggacctgcccttactgtcaagttggctgttgatagtttagttagggagagcaagaagagactagtacccttcagcatactaagcgttctgaggagataaatatgagggttatggtgacacctaacttagccaaaatggtagtggtatcaggagaagatcttggagcaggtgaagtctgtttgcactttgtgatgaatgggagttagacaaagtaaacaagatgaggaaaaagtgtttaagccaggggaacaggagtattttagtgcctgcctatttataacgaggaactcagcaacacttagtgaacatagttctttttaatttatgcattttgaagagagggattttacttttaaacttctgtgagctaattttttaagaactgccagtttcttaaaattaatctaccttatatttaacgtaatgtggaattgtatcaacaggagtgtggcatcatactcttcaagtctttgtcttattgtatcaccccaaaatgtcagttttcaaaataaaaaatagaaaaagcga

SEQ ID NO: 139130 - DNA, 6737 bp, Homo sapiens
  Payload ID: 7262
  Gene Symbol: GAPVD1
  Gene Name: GTPase activating protein and VPS9 domains 1
  Uniprot ID: Q14C86
  ENST ID: ENST00000394104
  CDS Start-End: 37-4473
ttagtgatcagcctttgagcctttcccacattgaagatggtgaaactagatattcatactctggctcatcacctcaagcaggaacgcttatatgtaaactctgagaaacagctcattcagaggctcaatgcagatgtacttaagacagctgaaaagttgtatcgtacagcatggattgcgaagcaacagagaatcaatttggatcggcttatcataaccagtgctgaagcttcccctgctgaatgttgccaacatgccaaaattttggaagatacacaatttgttgatgggtataagcaattgggatttcaggagactgcttatggagaattcttgagtcgattgagggaaaatcctcgtcttattgcctcctctttggttgctggagagaaacttaatcaggagaacacacaaagtgttatttacacagtttttacctccctgtatggcaattgcatcatgcaagaagatgaaagctacctccttcaggttttgcgatacttgattgaatttgaacttaaagaaagtgacaaccctaggcgacttttgaggagaggaacttgtgccttcagcatcttatttaaacttttttctgaaggactgttttctgccaaacttttcctcacagccactttacatgagccaattatgcaactgcttgttgaagatgaagatcacctggaaacagatccaaacaagctaattgagaggttctctccatctcagcaggaaaaactctttggagagaagggctcagatagattcaggcaaaaagttcaagaaatggtggagtccaatgaagcaaagctagtggctttggtgaacaaatttattggttatctcaaacagaacacatattgttttccacatagtttaaggtggatcgtgtctcagatgtacaaaaccctctcctgtgtagataggctggaagttggggaggtcagggcaatgtgtactgatctcctgttggcctgcttcatttgtcctgcagttgtcaatccagaacaatatggaataatttccgatgctcctattaatgaagtagcacgatttaatctgatgcaggtaggccgccttttgcagcagttagcaatgactggctctgaagagggagatccccgaacaaagagcagccttggaaagtttgacaaaagctgtgttgccgctttccttgatgttgtgattgggggccgtgcagtggagacccctccattgtcttccgtcaatcttctggaaggattgagcagaactgtggtttatataacctacagtcagcttattactctggtgaattttatgaagagtgtgatgtctggagatcaactgagagaagatagaatggctcttgacaatttattggcaaacctacccccggccaagccaggaaaaagtagcagtttagaaatgactccctacaatacacctcagctatctccagcaaccactccagcaaataaaaagaatcgattacctatagcaactcggagcagaagccgcaccaatatgctaatggacctacatatggaccatgaaggatcatctcaagaaaccattcaggaggtgcaaccagaagaggtgttggtcatttccttaggtacaggtccccagcttactccagggatgatgtcagaaaatgaggtcctaaacatgcagctttcggatggaggacaaggagatgtccctgttgatgaaaacaaactccatggtaaacctgataaaaccttgcgcttttccctctgcagtgataatctggaaggaatatctgaaggtccttcaaatcgctccaattcagtgtcctccctagacctagaaggagagtctgtgtcagaacttggagcaggaccttctggcagtaatggagttgaagctctacagctgttagaacatgagcaagctacaacacaggataaccttgatgataagctaaggaagtttgaaattcgtgacatgatgggattaacagatgatagggacatatcagaaacagtgagtgagacctggagtacagacgtcttgggaagtgactttgaccctaatattgatgaagatcgcttgcaagaaattgcaggtgctgcagcagagaacatgttaggcagtttgctgtgcctcccaggttcagggtcagtgcttcttgacccctgcactggttctaccatatcagagacaacaagtgaagcttggagtgtagaggtattgccaagtgactcagaggccccagacctaaagcaggaggagcgtctgcaagaactggagagctgttctggactgggtagcacatctgatgatacggatgtcagggaggtcagttcccgccccagcacaccaggcctcagtgttgtgtccggcataagtgcaacctctgaggatattcccaataagattgaagacctgagatctgagtgcagctctgattttgggggtaaagattctgtcactagtccagacatggatgaaataactcacggtgcccaccagctgacctctcctccttctcagtcagagtctctgctggccatgtttgatccactgtcttcacatgaaggggcttctgctgtggtaaggccaaaggttcactatgctaggccatcgcatccaccaccagatcccccaatcctggaaggagctgtgggaggaaatgaggccaggttgccaaactttggttcccatgttttaactccagctgaaatggaggcattcaagcaaaggcattcttaccctgagagactagttcgaagcaggagctctgatatagtatcttctgtccggagacccatgagtgaccccagctggaaccggcgtccaggaaatgaagagcgagaactccctccagctgcagccattggtgctacttctttggtggctgcacctcattcatcatcttcatccccgagtaaggactcctcaagaggagagactgaagaacgcaaagatagcgatgatgagaaatcagacaggaacagaccttggtggagaaaacgttttgtttcagccatgcctaaagctcctataccatttagaaagaaagaaaaacaagaaaaagacaaagatgatctggggcctgacagattctcaacactcacagatgatcccagccctagactcagtgcacaagctcaggtggctgaggatattctggacaaatacaggaatgccattaaacggaccagccccagtgatggagcaatggcaaactatgaaagtacaggtgataatcatgacagagatttgagtagtaaacttttatatcatagtgataaagaggttatgggtgatggtgaaagtgcacatgattctccccgtgacgaagcactgcagaacatctcggctgatgatctcccagactctgcaagccaagcagcccacccgcaggattcagctttctcttacagagatgcaaaaaagaaactgaggcttgctctttgctctgcggactctgttgccttcccagtgctgacccattcaacaaggaatggtttaccagaccacacagacccagaagacaatgaaattgtatgcttcttaaaagttcaaatagctgaagcaattaatttacaagataagaatctaatggctcaacttcaagaaacaatgcgctgtgtgtgccgttttgataataggacttgtaggaaactgctggcttcgattgctgaggactacagaaaaagagccccatatattgcttatctcactcgttgtcgacaaggactacagaccacacaggctcacctggaaaggctattgcaaagagttttgcgggacaaagaagtggccaatcgatactttaccactgtctgtgtgagattactgcttgagagcaaagaaaagaagatcagggaattcattcaagactttcagaaactcaccgcagctgacgataaaactgctcaggtagaagattttctgcagtttctttatggtgcaatggcccaggatgtcatatggcaaaacgcgagtgaagaacagcttcaagatgcacagctggccattgagcgaagcgtgatgaaccggattttcaagctcgccttctaccctaatcaagatggggacatacttcgcgaccaggttcttcatgaacatatccagagattgtctaaagtagtgactgcaaatcacagagctcttcagataccagaggtttatcttcgagaagcaccatggccatctgcacaatcagaaatcaggacaataagtgcttataaaaccccccgggacaaagtgcagtgcatcctgagaatgtgctctacgattatgaacctcctgagcctggccaatgaggactctgtccctggagcggatgactttgttcctgtgttggtgtttgtgttgataaaggcaaatccaccctgtttgctgtctactgtgcagtatatcagtagcttttatgctagctgtctgtctggagaggagtcctattggtggatgcagttcacagcagcagtagaattcattaaaaccatcgatgaccgaaagtgaccaagaccaaggcccaccaaggcagcagactgttaatcagacaaacagatctctgagaaggtgcatcagctgctttgaaggctgaagattgttttgtatgatactgcacagcatcaggcattttaaagcagatctttactaaacaggttaatgagctaacaagcaggttctctcgtctttgggctctttcctttctgagttgcatattctattttcttgtccccaagtagagactagtactacaaaaagggaccacatttttcaagtatttctaagtataaaaaacaaaacaaaaatctcttaggaaatgtctagacctccattcttggattccctttctttccttttattttaaaaaagaacagtacccctcttttaagatgctgtcttacattaatgagcatctaatggaaagaaggtatgagttgcactgaggattagaatagtggtgcgttagtggcattatctataaatacactcacctaaattgaaagctaagaaggaaatgtaaatataatatatatttatatttgatgtaatatggacatctgcagattctaataaacaaggactattgctgatagtaggctgtgacatactgtcttgtgaaatggtttccttgacaaaatttaagctgagcttaaaagcaaaaaacaaaaagtacacagaaatatttattaaaatgtaatacagtttattgaactttctaggtatggagtttgatggacagggctgcctttaatgagtgtgaaggtcactaagtcacttagacatctcaccgtggaagtttgtgagcctgcattaggagatagactgattaccatacatgacataaaaaggaacagtggatagctcatactttatggtggttcttctcctccgaaataatatactgcagaaatcccagacagagctccttacaaacctttaattgtaatatatttttgatgattattcacattgaatgcacagaccaagaattcagtgaatgtcattttttaaaaaactaatttgtattgtctgctctagtgatacaagttttactagtgataaactattttaatcaaccatactattcttatggaaaaaaatatctattttggcaggtttctgtgcctttatttccctcttctgaaaaaaagtctgtgttttcatagtttggtttgcattgtatatcaataattaatcaggaatgggttttggtgcctgaaaaattggccatggaggcacaccaaagcttcaagcacaagtcttgtacatgggccatcactgtctggtttcacttcgtgtgtttcctaaacacatttagctgcttttttaacaaactcagccccatacttgagtcccttgttgttgggagcatttccaggcatcttttaagggaactgtgacaaacagcctcgggcagatgaacacggaggctctctgttgtctgtctctgagatctttgtgtctgggaatgcctaaagattttatttttttttctttgtttttattttattttattttatttttttgagacagagtctcaccctgttgcccaggctggagtgcaatggtgcgatcttggctcactgcaacctccacctcccagttcaagtgattcccctgcctcagcctcgcgagtagctaggactacaggcgcatgtcaccaagcccggctaatttttgtatttttagtagaaacggggtttcaccatgttggccaggatgatcctcaatctcctgacctcgtgatccacccgccttggcctcccaaagtgcgggattacaagcgtgaaccaccctgcccagccagaaactagattttctttatgcctccaccccttcttattcatttactttacaataccaaaataacaaattgcataggagtgtgggatgtggtttctgccttctagagagagatcagaattaaactagtactatgaaatgtccttttgaatgttaggtcaagaaatccatgtacagagtcgtgcacttcattggctgtaactgtcaaacttgccttgtattagaagttaaatcccatcgtaaatacatcacgaggccagctgtgtgatttctgagacctagatgagagtccatttacttcagcctttgattcagtaaatgttaagcagcagaagacttcgaatggttgaaattcattgttacaggatttaactcataaaccaatgagagattttttttttctctgcaatggttgctaagtctattccatgttaacactgtggaaataaatatgaagatgtggacattgc

SEQ ID NO: 139131 - DNA, 5207 bp, Homo sapiens
  Payload ID: 7262
  Gene Symbol: GAPVD1
  Gene Name: GTPase activating protein and VPS9 domains 1
  Uniprot ID: Q14C86
  ENST ID: ENST00000394105
  CDS Start-End: 161-4624
aagccaacaggcgagtggcgaaggtggcggcagcggcggcgggggcagtcaccggctagggcgacggctccgaggccgagtggcggtccgacagagtcctccgtgtcctcccccgcatgacccccttgtgatcagcctttgagcctttcccacattgaagatggtgaaactagatattcatactctggctcatcacctcaagcaggaacgcttatatgtaaactctgagaaacagctcattcagaggctcaatgcagatgtacttaagacagctgaaaagttgtatcgtacagcatggattgcgaagcaacagagaatcaatttggatcggcttatcataaccagtgctgaagcttcccctgctgaatgttgccaacatgccaaaattttggaagatacacaatttgttgatgggtataagcaattgggatttcaggagactgcttatggagaattcttgagtcgattgagggaaaatcctcgtcttattgcctcctctttggttgctggagagaaacttaatcaggagaacacacaaagtgttatttacacagtttttacctccctgtatggcaattgcatcatgcaagaagatgaaagctacctccttcaggttttgcgatacttgattgaatttgaacttaaagaaagtgacaaccctaggcgacttttgaggagaggaacttgtgccttcagcatcttatttaaacttttttctgaaggactgttttctgccaaacttttcctcacagccactttacatgagccaattatgcaactgcttgttgaagatgaagatcacctggaaacagatccaaacaagctaattgagaggttctctccatctcagcaggaaaaactctttggagagaagggctcagatagattcaggcaaaaagttcaagaaatggtggagtccaatgaagcaaagctagtggctttggtgaacaaatttattggttatctcaaacagaacacatattgttttccacatagtttaaggtggatcgtgtctcagatgtacaaaaccctctcctgtgtagataggctggaagttggggaggtcagggcaatgtgtactgatctcctgttggcctgcttcatttgtcctgcagttgtcaatccagaacaatatggaataatttccgatgctcctattaatgaagtagcacgatttaatctgatgcaggtaggccgccttttgcagcagttagcaatgactggctctgaagagggagatccccgaacaaagagcagccttggaaagtttgacaaaagctgtgttgccgctttccttgatgttgtgattgggggccgtgcagtggagacccctccattgtcttccgtcaatcttctggaaggattgagcagaactgtggtttatataacctacagtcagcttattactctggtgaattttatgaagagtgtgatgtctggagatcaactgagagaagatagaatggctcttgacaatttattggcaaacctacccccggccaagccaggaaaaagtagcagtttagaaatgactccctacaatacacctcagctatctccagcaaccactccagcaaataaaaagaatcgattacctatagcaactcggagcagaagccgcaccaatatgctaatggacctacatatggaccatgaaggatcatctcaagaaaccattcaggaggtgcaaccagaagaggtgttggtcatttccttaggtacaggtccccagcttactccagggatgatgtcagaaaatgaggtcctaaacatgcagctttcggatggaggacaaggagatgtccctgttgatgaaaacaaactccatggtaaacctgataaaaccttgcgcttttccctctgcagtgataatctggaaggaatatctgaaggtccttcaaatcgctccaattcagtgtcctccctagacctagaaggagagtctgtgtcagaacttggagcaggaccttctggcagtaatggagttgaagctctacagctgttagaacatgagcaagctacaacacaggataaccttgatgataagctaaggaagtttgaaattcgtgacatgatgggattaacagatgatagggacatatcagaaacagtgagtgagacctggagtacagacgtcttgggaagtgactttgaccctaatattgatgaagatcgcttgcaagaaattgcaggtgctgcagcagagaacatgttaggcagtttgctgtgcctcccaggttcagggtcagtgcttcttgacccctgcactggttctaccatatcagagacaacaagtgaagcttggagtgtagaggtattgccaagtgactcagaggccccagacctaaagcaggaggagcgtctgcaagaactggagagctgttctggactgggtagcacatctgatgatacggatgtcagggaggtcagttcccgccccagcacaccaggcctcagtgttgtgtccggcataagtgcaacctctgaggatattcccaataagattgaagacctgagatctgagtgcagctctgattttgggggtaaagattctgtcactagtccagacatggatgaaataactcacgattttctttatatacttcagccaaaacaacattttcaacacattgaagcagaagcagacatgagaatccagctgtcttctagtgcccaccagctgacctctcctccttctcagtcagagtctctgctggccatgtttgatccactgtcttcacatgaaggggcttctgctgtggtaaggccaaaggttcactatgctaggccatcgcatccaccaccagatcccccaatcctggaaggagctgtgggaggaaatgaggccaggttgccaaactttggttcccatgttttaactccagctgaaatggaggcattcaagcaaaggcattcttaccctgagagactagttcgaagcaggagctctgatatagtatcttctgtccggagacccatgagtgaccccagctggaaccggcgtccaggaaatgaagagcgagaactccctccagctgcagccattggtgctacttctttggtggctgcacctcattcatcatcttcatccccgagtaaggactcctcaagaggagagactgaagaacgcaaagatagcgatgatgagaaatcagacaggaacagaccttggtggagaaaacgttttgtttcagccatgcctaaagctcctataccatttagaaagaaagaaaaacaagaaaaagacaaagatgatctggggcctgacagattctcaacactcacagatgatcccagccctagactcagtgcacaagctcaggtggctgaggatattctggacaaatacaggaatgccattaaacggaccagccccagtgatggagcaatggcaaactatgaaagtacagaggttatgggtgatggtgaaagtgcacatgattctccccgtgacgaagcactgcagaacatctcggctgatgatctcccagactctgcaagccaagcagcccacccgcaggattcagctttctcttacagagatgcaaaaaagaaactgaggcttgctctttgctctgcggactctgttgccttcccagtgctgacccattcaacaaggaatggtttaccagaccacacagacccagaagacaatgaaattgtatgcttcttaaaagttcaaatagctgaagcaattaatttacaagataagaatctaatggctcaacttcaagaaacaatgcgctgtgtgtgccgttttgataataggacttgtaggaaactgctggcttcgattgctgaggactacagaaaaagagccccatatattgcttatctcactcgttgtcgacaaggactacagaccacacaggctcacctggaaaggctattgcaaagagttttgcgggacaaagaagtggccaatcgatactttaccactgtctgtgtgagattactgcttgagagcaaagaaaagaagatcagggaattcattcaagactttcagaaactcaccgcagctgacgataaaactgctcaggtagaagattttctgcagtttctttatggtgcaatggcccaggatgtcatatggcaaaacgcgagtgaagaacagcttcaagatgcacagctggccattgagcgaagcgtgatgaaccggattttcaagctcgccttctaccctaatcaagatggggacatacttcgcgaccaggttcttcatgaacatatccagagattgtctaaagtagtgactgcaaatcacagagctcttcagataccagaggtttatcttcgagaagcaccatggccatctgcacaatcagaaatcaggacaataagtgcttataaaaccccccgggacaaagtgcagtgcatcctgagaatgtgctctacgattatgaacctcctgagcctggccaatgaggactctgtccctggagcggatgactttgttcctgtgttggtgtttgtgttgataaaggcaaatccaccctgtttgctgtctactgtgcagtatatcagtagcttttatgctagctgtctgtctggagaggagtcctattggtggatgcagttcacagcagcagtagaattcattaaaaccatcgatgaccgaaagtgaccaagaccaaggcccaccaaggcagcagactgttaatcagacaaacagatctctgagaaggtgcatcagctgctttgaaggctgaagattgttttgtatgatactgcacagcatcaggcattttaaagcagatctttactaaacaggttaatgagctaacaagcaggttctctcgtctttgggctctttcctttctgagttgcatattctattttcttgtccccaagtagagactagtactacaaaaagggaccacatttttcaagtatttctaagtataaaaaacaaaacaaaaatctcttaggaaatgtctagacctccattcttggattccctttctttccttttattttaaaaaagaacagtacccctcttttaagatgctgtcttacattaatgagcatctaatggaaagaaggtatgagttgcactgaggattagaatagtggtgcgttagtggcattatctataaatacactcacctaaattgaaagctaagaaggaaatgtaaatataatatatatttatatttgatgtaatatggacatctgcagattctaataaacaaggactattgctgata

SEQ ID NO: 139132 - DNA, 2490 bp, Homo sapiens
  Payload ID: 7262
  Gene Symbol: GAPVD1
  Gene Name: GTPase activating protein and VPS9 domains 1
  ENST ID: ENST00000436712
  CDS Start-End: 1-2490
tttgaggagaggaacttgtgccttcagcatcttatttaaacttttttctgaaggactgttttctgccaaacttttcctcacagccactttacatgagccaattatgcaactgcttgttgaagatgaagatcacctggaaacagatccaaacaagctaattgagaggttctctccatctcagcaggaaaaactctttggagagaagggctcagatagattcaggcaaaaagttcaagaaatggtggagtccaatgaagcaaagctagtggctttggtgaacaaatttattggttatctcaaacagaacacatattgttttccacatagtttaaggtggatcgtgtctcagatgtacaaaaccctctcctgtgtagataggctggaagttggggaggtcagggcaatgtgtactgatctcctgttggcctgcttcatttgtcctgcagttgtcaatccagaacaatatggaataatttccgatgctcctattaatgaagtagcacgatttaatctgatgcaggtaggccgccttttgcagcagttagcaatgactggctctgaagagggagatccccgaacaaagagcagccttggaaagtttgacaaaagctgtgttgccgctttccttgatgttgtgattgggggccgtgcagtggagacccctccattgtcttccgtcaatcttctggaaggattgagcagaactgtggtttatataacctacagtcagcttattactctggtgaattttatgaagagtgtgatgtctggagatcaactgagagaagatagaatggctcttgacaatttattggcaaacctacccccggccaagccaggaaaaagtagcagtttagaaatgactccctacaatacacctcagctatctccagcaaccactccagcaaataaaaagaatcgattacctataggacaacagttagcagccatcactgcctgggattcctcagctaccaatattacctctcatattacagtagtaaccccgtttgcaactcggagcagaagccgcaccaatatgctaatggacctacatatggaccatgaaggatcatctcaagaaaccattcaggaggtgcaaccagaagaggtgttggtcatttccttaggtacaggtccccagcttactccagggatgatgtcagaaaatgaggtcctaaacatgcagctttcggatggaggacaaggagatgtccctgttgatgaaaacaaactccatggtccttcaaatcgctccaattcagtgtcctccctagacctagaaggagagtctgtgtcagaacttggagcaggaccttctggcagtaatggagttgaagctctacagctgttagaacatgagcaagctacaacacaggataaccttgatgataagctaaggaagtttgaaattcgtgacatgatgggattaacagatgatagggacatatcagaaacagtgagtgagacctggagtacagacgtcttgggaagtgactttgaccctaatattgatgaagatcgcttgcaagaaattgcaggtgctgcagcagagaacatgttaggcagtttgctgtgcctcccaggttcagggtcagtgcttcttgacccctgcactggttctaccatatcagagacaacaagtgaagcttggagtgtagaggtattgccaagtgactcagaggccccagacctaaagcaggaggagcgtctgcaagaactggagagctgttctggactgggtagcacatctgatgatacggatgtcagggaggtcagttcccgccccagcacaccaggcctcagtgttgtgtccggcataagtgcaacctctgaggatattcccaataagattgaagacctgagatctgagtgcagctctgattttgggggtaaagattctgtcactagtccagacatggatgaaataactcacggtgcccaccagctgacctctcctccttctcagtcagagtctctgctggccatgtttgatccactgtcttcacatgaaggggcttctgctgtggtaaggccaaaggttcactatgctaggccatcgcatccaccaccagatcccccaatcctggaaggagctgtgggaggaaatgaggccaggttgccaaactttggttcccatgttttaactccagctgaaatggaggcattcaagcaaaggcattcttaccctgagagactagttcgaagcaggagctctgatatagtatcttctgtccggagacccatgagtgaccccagctggaaccggcgtccaggaaatgaagagcgagaactccctccagctgcagccattggtgctacttctttggtggctgcacctcattcatcatcttcatccccgagtaaggactcctcaagaggagagactgaagaacgcaaagatagcgatgatgagaaatcagacaggaacagaccttggtggagaaaacgttttgtttcagccatgcctaaagctcctataccatttag

SEQ ID NO: 139133 - DNA, 2512 bp, Homo sapiens
  Payload ID: 7262
  Gene Symbol: GAPVD1
  Gene Name: GTPase activating protein and VPS9 domains 1
  ENST ID: ENST00000431329
  CDS Start-End: 1-2512
gcaattgcatcatgcaagaagatgaaagctacctccttcaggttttgcgatacttgattgaatttgaacttaaagaaagtgacaaccctaggcgacttttgaggagaggaacttgtgccttcagcatcttatttaaacttttttctgaaggactgttttctgccaaacttttcctcacagccactttacatgagccaattatgcaactgcttgttgaagatgaagatcacctggaaacagatccaaacaagctaattgagaggttctctccatctcagcaggaaaaactctttggagagaagggctcagatagattcaggcaaaaagttcaagaaatggtggagtccaatgaagcaaagctagtggctttggtgaacaaatttattggttatctcaaacagaacacatattgttttccacatagtttaaggtggatcgtgtctcagatgtacaaaaccctctcctgtgtagataggctggaagttggggaggtcagggcaatgtgtactgatctcctgttggcctgcttcatttgtcctgcagttgtcaatccagaacaatatggaataatttccgatgctcctattaatgaagtagcacgatttaatctgatgcaggtaggccgccttttgcagcagttagcaatgactggctctgaagagggagatccccgaacaaagagcagccttggaaagtttgacaaaagctgtgttgccgctttccttgatgttgtgattgggggccgtgcagtggagacccctccattgtcttccgtcaatcttctggaaggattgagcagaactgtggtttatataacctacagtcagcttattactctggtgaattttatgaagagtgtgatgtctggagatcaactgagagaagatagaatggctcttgacaatttattggcaaacctacccccggccaagccaggaaaaagtagcagtttagaaatgactccctacaatacacctcagctatctccagcaaccactccagcaaataaaaagaatcgattacctatagcaactcggagcagaagccgcaccaatatgctaatggacctacatatggaccatgaaggatcatctcaagaaaccattcaggaggtgcaaccagaagaggtgttggtcatttccttaggtacaggtccccagcttactccagggatgatgtcagaaaatgaggtcctaaacatgcagctttcggatggaggacaaggagatgtccctgttgatgaaaacaaactccatggtaaacctgataaaaccttgcgcttttccctctgcagtgataatctggaaggaatatctgaaggtccttcaaatcgctccaattcagtgtcctccctagacctagaaggagagtctgtgtcagaacttggagcaggaccttctggcagtaatggagttgaagctctacagctgttagaacatgagcaagctacaacacaggataaccttgatgataagctaaggaagtttgaaattcgtgacatgatgggattaacagatgatagggacatatcagaaacagtgagtgagacctggagtacagacgtcttgggaagtgactttgaccctaatattgatgaagatcgcttgcaagaaattgcaggtgctgcagcagagaacatgttaggcagtttgctgtgcctcccaggttcagggtcagtgcttcttgacccctgcactggttctaccatatcagagacaacaagtgaagcttggagtgtagaggtattgccaagtgactcagaggccccagacctaaagcaggaggagcgtctgcaagaactggagagctgttctggactgggtagcacatctgatgatacggatgtcagggaggtcagttcccgccccagcacaccaggcctcagtgttgtgtccggcataagtgcaacctctgaggatattcccaataagattgaagacctgagatctgagtgcagctctgattttgggggtaaagattctgtcactagtccagacatggatgaaataactcacggggcttctgctgtggtaaggccaaaggttcactatgctaggccatcgcatccaccaccagatcccccaatcctggaaggagctgtgggaggaaatgaggccaggttgccaaactttggttcccatgttttaactccagctgaaatggaggcattcaagcaaaggcattcttaccctgagagactagttcgaagcaggagctctgatatagtatcttctgtccggagacccatgagtgaccccagctggaaccggcgtccaggaaatgaagagcgagaactccctccagctgcagccattggtgctacttctttggtggctgcacctcattcatcatcttcatccccgagtaaggactcctcaagaggagagactgaagaacgcaaagatagcgatgatgagaaatcagacaggaacagaccttggtggagaaaacgttttgtttcagccatgcctaaagctcctataccatttagaaagaaagaaaaacaagaaaa

SEQ ID NO: 139134 - DNA, 3163 bp, Homo sapiens
  Payload ID: 7262
  Gene Symbol: GAPVD1
  Gene Name: GTPase activating protein and VPS9 domains 1
  ENST ID: ENST00000467750
  CDS Start-End: 199-3163
gtggcggtccgacagagtcctccgtgtcctcccccgcatgacccccttgggtctggctctgtcacccaggctggagtgcagtgacacgatctcagctcactgtaacctccgcctcccgggttcaagcgatcctcccatctgaccctcccaagtagctggcattcagtgatcagcctttgagcctttcccacattgaagatggtgaaactagatattcatactctggctcatcacctcaagcaggaacgcttatatgtaaactctgagaaacagctcattcagaggctcaatgcagatgtacttaagacagctgaaaagttgtatcgtacagcatggattgcgaagcaacagagaatcaatttggatcggcttatcataaccagtgctgaagcttcccctgctgaatgttgccaacatgccaaaattttggaagatacacaatttgttgatgggtataagcaattgggatttcaggagactgcttatggagaattcttgagtcgattgagggaaaatcctcgtcttattgcctcctctttggttgctggagagaaacttaatcaggagaacacacaaagtgttatttacacagtttttacctccctgtatggcaattgcatcatgcaagaagatgaaagctacctccttcaggttttgcgatacttgattgaatttgaacttaaagaaagtgacaaccctaggcgacttttgaggagaggaacttgtgccttcagcatcttatttaaacttttttctgaaggactgttttctgccaaacttttcctcacagccactttacatgagccaattatgcaactgcttgttgaagatgaagatcacctggaaacagatccaaacaagctaattgagaggttctctccatctcagcaggaaaaactctttggagagaagggctcagatagattcaggcaaaaagttcaagaaatggtggagtccaatgaagcaaagctagtggctttggtgaacaaatttattggttatctcaaacagaacacatattgttttccacatagtttaaggtggatcgtgtctcagatgtacaaaaccctctcctgtgtagataggctggaagttggggaggtcagggcaatgtgtactgatctcctgttggcctgcttcatttgtcctgcagttgtcaatccagaacaatatggaataatttccgatgctcctattaatgaagtagcacgatttaatctgatgcaggtaggccgccttttgcagcagttagcaatgactggctctgaagagggagatccccgaacaaagagcagccttggaaagtttgacaaaagctgtgttgccgctttccttgatgttgtgattgggggccgtgcagtggagacccctccattgtcttccgtcaatcttctggaaggattgagcagaactgtggtttatataacctacagtcagcttattactctggtgaattttatgaagagtgtgatgtctggagatcaactgagagaagatagaatggctcttgacaatttattggcaaacctacccccggccaagccaggaaaaagtagcagtttagaaatgactccctacaatacacctcagctatctccagcaaccactccagcaaataaaaagaatcgattacctatagcaactcggagcagaagccgcaccaatatgctaatggacctacatatggaccatgaaggatcatctcaagaaaccattcaggaggtgcaaccagaagaggtgttggtcatttccttaggtacaggtccccagcttactccagggatgatgtcagaaaatgaggtcctaaacatgcagctttcggatggaggacaaggagatgtccctgttgatgaaaacaaactccatggtaaacctgataaaaccttgcgcttttccctctgcagtgataatctggaaggaatatctgaaggtccttcaaatcgctccaattcagtgtcctccctagacctagaaggagagtctgtgtcagaacttggagcaggaccttctggcagtaatggagttgaagctctacagctgttagaacatgagcaagctacaacacaggataaccttgatgataagctaaggaagtttgaaattcgtgacatgatgggattaacagatgatagggacatatcagaaacagtgagtgagacctggagtacagacgtcttgggaagtgactttgaccctaatattgatgaagatcgcttgcaagaaattgcaggtgctgcagcagagaacatgttaggcagtttgctgtgcctcccaggttcagggtcagtgcttcttgacccctgcactggttctaccatatcagagacaacaagtgaagcttggagtgtagaggtattgccaagtgactcagaggccccagacctaaagcaggaggagcgtctgcaagaactggagagctgttctggactgggtagcacatctgatgatacggatgtcagggaggtcagttcccgccccagcacaccaggcctcagtgttgtgtccggcataagtgcaacctctgaggatattcccaataagattgaagacctgagatctgagtgcagctctgattttgggggtaaagattctgtcactagtccagacatggatgaaataactcacggtgcccaccagctgacctctcctccttctcagtcagagtctctgctggccatgtttgatccactgtcttcacatgaaggggcttctgctgtggtaaggccaaaggttcactatgctaggccatcgcatccaccaccagatcccccaatcctggaaggagctgtgggaggaaatgaggccaggttgccaaactttggttcccatgttttaactccagctgaaatggaggcattcaagcaaaggcattcttaccctgagagactagttcgaagcaggagctctgatatagtatcttctgtccggagacccatgagtgaccccagctggaaccggcgtccaggaaatgaagagcgagaactccctccagctgcagccattggtgctacttctttggtggctgcacctcattcatcatcttcatccccgagtaaggactcctcaagaggagagactgaagaacgcaaagatagcgatgatgagaaatcagacaggaacagaccttggtggagaaaacgttttgtttcagccatgcctaaag

SEQ ID NO: 139135 - DNA, 582 bp, Homo sapiens
  Payload ID: 7262
  Gene Symbol: GAPVD1
  Gene Name: GTPase activating protein and VPS9 domains 1
  ENST ID: ENST00000461379
  CDS Start-End: 232-582
agcgccgctgcaggacgcagggaagccaacaggcgagtggcgaaggtggcggcagcggcggcgggggcagtcaccggctagggcgacggctccgaggccgagtggcggtccgacagagtcctccgtgtcctcccccgcatgacccccttggggtaagtgtactggagagagttggttatacattctaggaatctcaaagtgatcagcctttgagcctttcccacattgaagatggtgaaactagatattcatactctggctcatcacctcaagcaggaacgcttatatgtaaactctgagaaacagctcattcagaggctcaatgcagatgtacttaagacagctgaaaagttgtatcgtacagcatggattgcgaagcaacagagaatcaatttggatcggcttatcataaccagtgctgaagcttcccctgctgaatgttgccaacatgccaaaattttggaagatacacaatttgttgatgggtataagcaattgggatttcaggagactgcttatggagaattcttgagtcgattgagggaaaatcctcgtcttattgcctcctctttggttgctgga

SEQ ID NO: 139136 - DNA, 5309 bp, Homo sapiens
  Payload ID: 7262
  Gene Symbol: GAPVD1
  Gene Name: GTPase activating protein and VPS9 domains 1
  Uniprot ID: Q14C86
  ENST ID: ENST00000495955
  CDS Start-End: 291-4727
cggcgggggcagtcaccggctagggcgacggctccgaggccgagtggcggtccgacagagtcctccgtgtcctcccccgcatgacccccttggggtaagtgtactggagagagttggttatacattctaggaatctcaaagggtctggctctgtcacccaggctggagtgcagtgacacgatctcagctcactgtaacctccgcctcccgggttcaagcgatcctcccatctgaccctcccaagtagctggcattcagtgatcagcctttgagcctttcccacattgaagatggtgaaactagatattcatactctggctcatcacctcaagcaggaacgcttatatgtaaactctgagaaacagctcattcagaggctcaatgcagatgtacttaagacagctgaaaagttgtatcgtacagcatggattgcgaagcaacagagaatcaatttggatcggcttatcataaccagtgctgaagcttcccctgctgaatgttgccaacatgccaaaattttggaagatacacaatttgttgatgggtataagcaattgggatttcaggagactgcttatggagaattcttgagtcgattgagggaaaatcctcgtcttattgcctcctctttggttgctggagagaaacttaatcaggagaacacacaaagtgttatttacacagtttttacctccctgtatggcaattgcatcatgcaagaagatgaaagctacctccttcaggttttgcgatacttgattgaatttgaacttaaagaaagtgacaaccctaggcgacttttgaggagaggaacttgtgccttcagcatcttatttaaacttttttctgaaggactgttttctgccaaacttttcctcacagccactttacatgagccaattatgcaactgcttgttgaagatgaagatcacctggaaacagatccaaacaagctaattgagaggttctctccatctcagcaggaaaaactctttggagagaagggctcagatagattcaggcaaaaagttcaagaaatggtggagtccaatgaagcaaagctagtggctttggtgaacaaatttattggttatctcaaacagaacacatattgttttccacatagtttaaggtggatcgtgtctcagatgtacaaaaccctctcctgtgtagataggctggaagttggggaggtcagggcaatgtgtactgatctcctgttggcctgcttcatttgtcctgcagttgtcaatccagaacaatatggaataatttccgatgctcctattaatgaagtagcacgatttaatctgatgcaggtaggccgccttttgcagcagttagcaatgactggctctgaagagggagatccccgaacaaagagcagccttggaaagtttgacaaaagctgtgttgccgctttccttgatgttgtgattgggggccgtgcagtggagacccctccattgtcttccgtcaatcttctggaaggattgagcagaactgtggtttatataacctacagtcagcttattactctggtgaattttatgaagagtgtgatgtctggagatcaactgagagaagatagaatggctcttgacaatttattggcaaacctacccccggccaagccaggaaaaagtagcagtttagaaatgactccctacaatacacctcagctatctccagcaaccactccagcaaataaaaagaatcgattacctatagcaactcggagcagaagccgcaccaatatgctaatggacctacatatggaccatgaaggatcatctcaagaaaccattcaggaggtgcaaccagaagaggtgttggtcatttccttaggtacaggtccccagcttactccagggatgatgtcagaaaatgaggtcctaaacatgcagctttcggatggaggacaaggagatgtccctgttgatgaaaacaaactccatggtaaacctgataaaaccttgcgcttttccctctgcagtgataatctggaaggaatatctgaaggtccttcaaatcgctccaattcagtgtcctccctagacctagaaggagagtctgtgtcagaacttggagcaggaccttctggcagtaatggagttgaagctctacagctgttagaacatgagcaagctacaacacaggataaccttgatgataagctaaggaagtttgaaattcgtgacatgatgggattaacagatgatagggacatatcagaaacagtgagtgagacctggagtacagacgtcttgggaagtgactttgaccctaatattgatgaagatcgcttgcaagaaattgcaggtgctgcagcagagaacatgttaggcagtttgctgtgcctcccaggttcagggtcagtgcttcttgacccctgcactggttctaccatatcagagacaacaagtgaagcttggagtgtagaggtattgccaagtgactcagaggccccagacctaaagcaggaggagcgtctgcaagaactggagagctgttctggactgggtagcacatctgatgatacggatgtcagggaggtcagttcccgccccagcacaccaggcctcagtgttgtgtccggcataagtgcaacctctgaggatattcccaataagattgaagacctgagatctgagtgcagctctgattttgggggtaaagattctgtcactagtccagacatggatgaaataactcacggtgcccaccagctgacctctcctccttctcagtcagagtctctgctggccatgtttgatccactgtcttcacatgaaggggcttctgctgtggtaaggccaaaggttcactatgctaggccatcgcatccaccaccagatcccccaatcctggaaggagctgtgggaggaaatgaggccaggttgccaaactttggttcccatgttttaactccagctgaaatggaggcattcaagcaaaggcattcttaccctgagagactagttcgaagcaggagctctgatatagtatcttctgtccggagacccatgagtgaccccagctggaaccggcgtccaggaaatgaagagcgagaactccctccagctgcagccattggtgctacttctttggtggctgcacctcattcatcatcttcatccccgagtaaggactcctcaagaggagagactgaagaacgcaaagatagcgatgatgagaaatcagacaggaacagaccttggtggagaaaacgttttgtttcagccatgcctaaagctcctataccatttagaaagaaagaaaaacaagaaaaagacaaagatgatctggggcctgacagattctcaacactcacagatgatcccagccctagactcagtgcacaagctcaggtggctgaggatattctggacaaatacaggaatgccattaaacggaccagccccagtgatggagcaatggcaaactatgaaagtacaggtgataatcatgacagagatttgagtagtaaacttttatatcatagtgataaagaggttatgggtgatggtgaaagtgcacatgattctccccgtgacgaagcactgcagaacatctcggctgatgatctcccagactctgcaagccaagcagcccacccgcaggattcagctttctcttacagagatgcaaaaaagaaactgaggcttgctctttgctctgcggactctgttgccttcccagtgctgacccattcaacaaggaatggtttaccagaccacacagacccagaagacaatgaaattgtatgcttcttaaaagttcaaatagctgaagcaattaatttacaagataagaatctaatggctcaacttcaagaaacaatgcgctgtgtgtgccgttttgataataggacttgtaggaaactgctggcttcgattgctgaggactacagaaaaagagccccatatattgcttatctcactcgttgtcgacaaggactacagaccacacaggctcacctggaaaggctattgcaaagagttttgcgggacaaagaagtggccaatcgatactttaccactgtctgtgtgagattactgcttgagagcaaagaaaagaagatcagggaattcattcaagactttcagaaactcaccgcagctgacgataaaactgctcaggtagaagattttctgcagtttctttatggtgcaatggcccaggatgtcatatggcaaaacgcgagtgaagaacagcttcaagatgcacagctggccattgagcgaagcgtgatgaaccggattttcaagctcgccttctaccctaatcaagatggggacatacttcgcgaccaggttcttcatgaacatatccagagattgtctaaagtagtgactgcaaatcacagagctcttcagataccagaggtttatcttcgagaagcaccatggccatctgcacaatcagaaatcaggacaataagtgcttataaaaccccccgggacaaagtgcagtgcatcctgagaatgtgctctacgattatgaacctcctgagcctggccaatgaggactctgtccctggagcggatgactttgttcctgtgttggtgtttgtgttgataaaggcaaatccaccctgtttgctgtctactgtgcagtatatcagtagcttttatgctagctgtctgtctggagaggagtcctattggtggatgcagttcacagcagcagtagaattcattaaaaccatcgatgaccgaaagtgaccaagaccaaggcccaccaaggcagcagactgttaatcagacaaacagatctctgagaaggtgcatcagctgctttgaaggctgaagattgttttgtatgatactgcacagcatcaggcattttaaagcagatctttactaaacaggttaatgagctaacaagcaggttctctcgtctttgggctctttcctttctgagttgcatattctattttcttgtccccaagtagagactagtactacaaaaagggaccacatttttcaagtatttctaagtataaaaaacaaaacaaaaatctcttaggaaatgtctagacctccattcttggattccctttctttccttttattttaaaaaagaacagtacccctcttttaagatgctgtcttacattaatgagcatctaatggaaagaaggtatgagttgcactgaggattagaatagtggtgcgttagtggcattatctataaatacactcacctaaattgaaagctaagaaggaaatgtaaatataatatatatttatatttgatgtaatatggacatctgcagattctaataaacaaggactattgctgat

SEQ ID NO: 139137 - DNA, 8923 bp, Homo sapiens
  Payload ID: 7262
  Gene Symbol: GAPVD1
  Gene Name: GTPase activating protein and VPS9 domains 1
  Uniprot ID: Q14C86
  ENST ID: ENST00000470056
  CDS Start-End: 161-4462
aagccaacaggcgagtggcgaaggtggcggcagcggcggcgggggcagtcaccggctagggcgacggctccgaggccgagtggcggtccgacagagtcctccgtgtcctcccccgcatgacccccttgtgatcagcctttgagcctttcccacattgaagatggtgaaactagatattcatactctggctcatcacctcaagcaggaacgcttatatgtaaactctgagaaacagctcattcagaggctcaatgcagatgtacttaagacagctgaaaagttgtatcgtacagcatggattgcgaagcaacagagaatcaatttggatcggcttatcataaccagtgctgaagcttcccctgctgaatgttgccaacatgccaaaattttggaagatacacaatttgttgatgggtataagcaattgggatttcaggagactgcttatggagaattcttgagtcgattgagggaaaatcctcgtcttattgcctcctctttggttgctggagagaaacttaatcaggagaacacacaaagtgttatttacacagtttttacctccctgtatggcaattgcatcatgcaagaagatgaaagctacctccttcaggttttgcgatacttgattgaatttgaacttaaagaaagtgacaaccctaggcgacttttgaggagaggaacttgtgccttcagcatcttatttaaacttttttctgaaggactgttttctgccaaacttttcctcacagccactttacatgagccaattatgcaactgcttgttgaagatgaagatcacctggaaacagatccaaacaagctaattgagaggttctctccatctcagcaggaaaaactctttggagagaagggctcagatagattcaggcaaaaagttcaagaaatggtggagtccaatgaagcaaagctagtggctttggtgaacaaatttattggttatctcaaacagaacacatattgttttccacatagtttaaggtggatcgtgtctcagatgtacaaaaccctctcctgtgtagataggctggaagttggggaggtcagggcaatgtgtactgatctcctgttggcctgcttcatttgtcctgcagttgtcaatccagaacaatatggaataatttccgatgctcctattaatgaagtagcacgatttaatctgatgcaggtaggccgccttttgcagcagttagcaatgactggctctgaagagggagatccccgaacaaagagcagccttggaaagtttgacaaaagctgtgttgccgctttccttgatgttgtgattgggggccgtgcagtggagacccctccattgtcttccgtcaatcttctggaaggattgagcagaactgtggtttatataacctacagtcagcttattactctggtgaattttatgaagagtgtgatgtctggagatcaactgagagaagatagaatggctcttgacaatttattggcaaacctacccccggccaagccaggaaaaagtagcagtttagaaatgactccctacaatacacctcagctatctccagcaaccactccagcaaataaaaagaatcgattacctatagcaactcggagcagaagccgcaccaatatgctaatggacctacatatggaccatgaaggatcatctcaagaaaccattcaggaggtgcaaccagaagaggtgttggtcatttccttaggtacaggtccccagcttactccagggatgatgtcagaaaatgaggtcctaaacatgcagctttcggatggaggacaaggagatgtccctgttgatgaaaacaaactccatggtaaacctgataaaaccttgcgcttttccctctgcagtgataatctggaaggaatatctgaaggtccttcaaatcgctccaattcagtgtcctccctagacctagaaggagagtctgtgtcagaacttggagcaggaccttctggcagtaatggagttgaagctctacagctgttagaacatgagcaagctacaacacaggataaccttgatgataagctaaggaagtttgaaattcgtgacatgatgggattaacagatgatagggacatatcagaaacagtgagtgagacctggagtacagacgtcttgggaagtgactttgaccctaatattgatgaagatcgcttgcaagaaattgcaggtgctgcagcagagaacatgttaggcagtttgctgtgcctcccaggttcagggtcagtgcttcttgacccctgcactggttctaccatatcagagacaacaagtgaagcttggagtgtagaggtattgccaagtgactcagaggccccagacctaaagcaggaggagcgtctgcaagaactggagagctgttctggactgggtagcacatctgatgatacggatgtcagggaggtcagttcccgccccagcacaccaggcctcagtgttgtgtccggcataagtgcaacctctgaggatattcccaataagattgaagacctgagatctgagtgcagctctgattttgggggtaaagattctgtcactagtccagacatggatgaaataactcacggtgcccaccagctgacctctcctccttctcagtcagagtctctgctggccatgtttgatccactgtcttcacatgaaggggcttctgctgtggtaaggccaaaggttcactatgctaggccatcgcatccaccaccagatcccccaatcctggaaggagctgtgggaggaaatgaggccaggttgccaaactttggttcccatgttttaactccagctgaaatggaggcattcaagcaaaggcattcttaccctgagagactagttcgaagcaggagctctgatatagtatcttctgtccggagacccatgagtgaccccagctggaaccggcgtccaggaaatgaagagcgagaactccctccagctgcagccattggtgctacttctttggtggctgcacctcattcatcatcttcatccccgagtaaggactcctcaagaggagagactgaagaacgcaaagatagcgatgatgagaaatcagacaggaacagaccttggtggagaaaacgttttgtttcagccatgcctaaagatgatcccagccctagactcagtgcacaagctcaggtggctgaggatattctggacaaatacaggaatgccattaaacggaccagccccagtgatggagcaatggcaaactatgaaagtacagaggttatgggtgatggtgaaagtgcacatgattctccccgtgacgaagcactgcagaacatctcggctgatgatctcccagactctgcaagccaagcagcccacccgcaggattcagctttctcttacagagatgcaaaaaagaaactgaggcttgctctttgctctgcggactctgttgccttcccagtgctgacccattcaacaaggaatggtttaccagaccacacagacccagaagacaatgaaattgtatgcttcttaaaagttcaaatagctgaagcaattaatttacaagataagaatctaatggctcaacttcaagaaacaatgcgctgtgtgtgccgttttgataataggacttgtaggaaactgctggcttcgattgctgaggactacagaaaaagagccccatatattgcttatctcactcgttgtcgacaaggactacagaccacacaggctcacctggaaaggctattgcaaagagttttgcgggacaaagaagtggccaatcgatactttaccactgtctgtgtgagattactgcttgagagcaaagaaaagaagatcagggaattcattcaagactttcagaaactcaccgcagctgacgataaaactgctcaggtagaagattttctgcagtttctttatggtgcaatggcccaggatgtcatatggcaaaacgcgagtgaagaacagcttcaagatgcacagctggccattgagcgaagcgtgatgaaccggattttcaagctcgccttctaccctaatcaagatggggacatacttcgcgaccaggttcttcatgaacatatccagagattgtctaaagtagtgactgcaaatcacagagctcttcagataccagaggtttatcttcgagaagcaccatggccatctgcacaatcagaaatcaggacaataagtgcttataaaaccccccgggacaaagtgcagtgcatcctgagaatgtgctctacgattatgaacctcctgagcctggccaatgaggactctgtccctggagcggatgactttgttcctgtgttggtgtttgtgttgataaaggcaaatccaccctgtttgctgtctactgtgcagtatatcagtagcttttatgctagctgtctgtctggagaggagtcctattggtggatgcagttcacagcagcagtagaattcattaaaaccatcgatgaccgaaagtgaccaagaccaaggcccaccaaggcagcagactgttaatcagacaaacagatctctgagaaggtgcatcagctgctttgaaggctgaagattgttttgtatgatactgcacagcatcaggcattttaaagcagatctttactaaacaggttaatgagctaacaagcaggttctctcgtctttgggctctttcctttctgagttgcatattctattttcttgtccccaagtagagactagtactacaaaaagggaccacatttttcaagtatttctaagtataaaaaacaaaacaaaaatctcttaggaaatgtctagacctccattcttggattccctttctttccttttattttaaaaaagaacagtacccctcttttaagatgctgtcttacattaatgagcatctaatggaaagaaggtatgagttgcactgaggattagaatagtggtgcgttagtggcattatctataaatacactcacctaaattgaaagctaagaaggaaatgtaaatataatatatatttatatttgatgtaatatggacatctgcagattctaataaacaaggactattgctgatagtaggctgtgacatactgtcttgtgaaatggtttccttgacaaaatttaagctgagcttaaaagcaaaaaacaaaaagtacacagaaatatttattaaaatgtaatacagtttattgaactttctaggtatggagtttgatggacagggctgcctttaatgagtgtgaaggtcactaagtcacttagacatctcaccgtggaagtttgtgagcctgcattaggagatagactgattaccatacatgacataaaaaggaacagtggatagctcatactttatggtggttcttctcctccgaaataatatactgcagaaatcccagacagagctccttacaaacctttaattgtaatatatttttgatgattattcacattgaatgcacagaccaagaattcagtgaatgtcattttttaaaaaactaatttgtattgtctgctctagtgatacaagttttactagtgataaactattttaatcaaccatactattcttatggaaaaaaatatctattttggcaggtttctgtgcctttatttccctcttctgaaaaaaagtctgtgttttcatagtttggtttgcattgtatatcaataattaatcaggaatgggttttggtgcctgaaaaattggccatggaggcacaccaaagcttcaagcacaagtcttgtacatgggccatcactgtctggtttcacttcgtgtgtttcctaaacacatttagctgcttttttaacaaactcagccccatacttgagtcccttgttgttgggagcatttccaggcatcttttaagggaactgtgacaaacagcctcgggcagatgaacacggaggctctctgttgtctgtctctgagatctttgtgtctgggaatgcctaaagattttatttttttttctttgtttttattttattttattttatttttttgagacagagtctcaccctgttgcccaggctggagtgcaatggtgcgatcttggctcactgcaacctccacctcccagttcaagtgattcccctgcctcagcctcgcgagtagctaggactacaggcgcatgtcaccaagcccggctaatttttgtatttttagtagaaacggggtttcaccatgttggccaggatgatcctcaatctcctgacctcgtgatccacccgccttggcctcccaaagtgcgggattacaagcgtgaaccaccctgcccagccagaaactagattttctttatgcctccaccccttcttattcatttactttacaataccaaaataacaaattgcataggagtgtgggatgtggtttctgccttctagagagagatcagaattaaactagtactatgaaatgtccttttgaatgttaggtcaagaaatccatgtacagagtcgtgcacttcattggctgtaactgtcaaacttgccttgtattagaagttaaatcccatcgtaaatacatcacgaggccagctgtgtgatttctgagacctagatgagagtccatttacttcagcctttgattcagtaaatgttaagcagcagaagacttcgaatggttgaaattcattgttacaggatttaactcataaaccaatgagagattttttttttctctgcaatggttgctaagtctattccatgttaacactgtggaaataaatatgaagatgtggacattgcatcggggctcttttctgtggaagagaaggtggtgggattggggtgaagggctacactggaggcaggagatagggctgtgctgtgttggagccggggctgagggtagaccccccagagatttgacatctgtgacacctgtgaaatgggttcgggtgctcatgactccatagctggcggaggagcacagcacagctgttgcaggggcagctaaggtttcctctgaaaatctgtcaggagcaaggactactttggcattaaccatcactgtttgatttcttgacaggtatgtgagatggggagtgatttgatttttttttttttttttaatagaaaagaggaatagttgttccccaaatgtttcttcctccactgccttccagtactttctttacatgaaagattagtgtaaaagtacaaaatcagcccaggaaacattcagcagccactagttactacatagaatttataaagtggatgttaaatggagagagagttggctcaggtcccctgaaatcttgtaggattaacttctctgaggaaaagaaaaatcaggtttgcattttgtattaatattctgcttttagaagtaatagaaatacaagttgaagattgtctttacttacaaaattatattttaattttttttgagacatagtcttgctctgtcacccagtctggagtgcagtgctgtgatctcggctcactgtaaccaccatctcccagtctctagtgattctcatggctcagcctccctggttgctcagattacaagtgtatgccaccacacccagctaatttttgtattttttgtagagacagggtttcgccatgttggccaggctggtctcgaactcctggcctcaagtgatccgcctacctcggcttcccaaagtgctgggattataggcgtgagccaccgtgcccaaccacaaaattatatgtatatatatttaaacgtgtcaaacattttgctttctttctccattttaggtaaaatctcagccacagtaattgctttcttctgctttttctttataaaaacctgcttatgaaggccttctgatacagatagttaaatcgctgtagtaggaggctcaggttttctaagggattgcaaatgtgctgcatggtttttctattcctatgtcctggaagcctttgtttaaagtgggctttacaaatgtgtccctgaggtgcgtgagcaagagaacaatctcagccccaatacgggggctgtgttcttgccgtaagaatctgtagctgactggtgtgctgaacccgggcactctttttcctattgtttgccatggaaatttccactttggaccgagtaaggtcaactaggtgttttaaaattgtttttctcctatgtgattgggtgtgaagagggaaagtaggaatacactcagaattattactggattgcataaaagtgatagaagtgtagtggggttcacttcctcaattggtgcttcctagatttttctctcccatctcttcctgctttgtttctttaaagaaaaggctgttgtctctctttttaaatatttaagtctagtgagtttattttgtacgcaattgctttaattttaagggaagtaaatctgaaactatcttgaagcccaaaggatttttagtaagtggattaacagtgatgaggtatttgcgattactttaaatgccaaaatgcttgagaactttgccaggttaaaaattacttaatatattttagaatgtaggttagaaagtagtaggacaaggaatagctttattactcttgagaacacttggataaatgaaaatatagtttgcttccgtgttaagttgtggttgagctatggagtgaccctggagctgccgcatcccacaggcctgagctcagcaagggttcaattcaagagagatgacgtctccacttggataatggcagacagtgtgggtagcggccatgcactaggggaattcacctctgtcaaattaatactctcctgtctactggattcttcttgtgcttcacctggattaaaaagctgtactgcctcttttgaaacagataaaacctttctataagtctcaattaatgagcttgcacaatcttgtatatgtacaggaaacccctcctgtctcctaatgtgattagtactgtaaaatattctataaaactgattaaaaggggagagcagtttgattcacaggg

SEQ ID NO: 139138 - DNA, 3720 bp, Homo sapiens
  Payload ID: 7262
  Gene Symbol: GAPVD1
  Gene Name: GTPase activating protein and VPS9 domains 1
  ENST ID: ENST00000497580
  CDS Start-End: 199-2469
gcgctggcgtggcggcagcgccgctgcaggacgcagggaagccaacaggcgagtggcgaaggtggcggcagcggcggcgggggcagtcaccggctagggcgacggctccgaggccgagtggcggtccgacagagtcctccgtgtcctcccccgcatgacccccttgtgatcagcctttgagcctttcccacattgaagatggtgaaactagatattcatactctggctcatcacctcaagcaggaacgcttatatgtaaactctgagaaacagctcattcagaggctcaatgcagatgtacttaagacagctgaaaagttgtatcgtacagcatggattgcgaagcaacagagaatcaatttggatcggcttatcataaccagtgctgaagcttcccctgctgaatgttgccaacatgccaaaattttggaagatacacaatttgttgatgggtataagcaattgggatttcaggagactgcttatggagaattcttgagtcgattgagggaaaatcctcgtcttattgcctcctctttggttgctggagagaaacttaatcaggagaacacacaaagtgttatttacacagtttttacctccctgtatggcaattgcatcatgcaagaagatgaaagctacctccttcaggttttgcgatacttgattgaatttgaacttaaagaaagtgacaaccctaggcgacttttgaggagaggaacttgtgccttcagcatcttatttaaacttttttctgaaggactgttttctgccaaacttttcctcacagccactttacatgagccaattatgcaactgcttgttgaagatgaagatcacctggaaacagatccaaacaagctaattgagaggttctctccatctcagcaggaaaaactctttggagagaagggctcagatagattcaggcaaaaagttcaagaaatggtggagtccaatgaagcaaagctagtggctttggtgaacaaatttattggttatctcaaacagaacacatattgttttccacatagtttaaggtggatcgtgtctcagatgtacaaaaccctctcctgtgtagataggctggaagttggggaggtcagggcaatgtgtactgatctcctgttggcctgcttcatttgtcctgcagttgtcaatccagaacaatatggaataatttccgatgctcctattaatgaagtagcacgatttaatctgatgcaggtaggccgccttttgcagcagttagcaatgactggctctgaagagggagatccccgaacaaagagcagccttggaaagtttgacaaaagctgtgttgccgctttccttgatgttgtgattgggggccgtgcagtggagacccctccattgtcttccgtcaatcttctggaaggattgagcagaactgtggtttatataacctacagtcagcttattactctggtgaattttatgaagagtgtgatgtctggagatcaactgagagaagatagaatggctcttgacaatttattggcaaacctacccccggccaagccaggaaaaagtagcagtttagaaatgactccctacaatacacctcagctatctccagcaaccactccagcaaataaaaagaatcgattacctatagcaactcggagcagaagccgcaccaatatgctaatggacctacatatggaccatgaaggatcatctcaagaaaccattcaggaggtgcaaccagaagaggtgttggtcatttccttaggtacaggtccccagcttactccagggatgatgtcagaaaatgaggtcctaaacatgcagctttcggatggaggacaaggagatgtccctgttgatgaaaacaaactccatggtaaacctgataaaaccttgcgcttttccctctgcagtgataatctggaaggaatatctgaaggtccttcaaatcgctccaattcagtgtcctccctagacctagaaggagagtctgtgtcagaacttggagcaggaccttctggcagtaatggagttgaagctctacagctgttagaacatgagcaagctacaacacaggataaccttgatgataagctaaggaagtttgaaattcgtgacatgatgggattaacagatgatagggacatatcagaaacagtgagtgagacctggagtacagacgtcttgggaagtgactttgaccctaatattgatgaagatcgcttgcaagaaattgcaggtgctgcagcagagaacatgttaggcagtttgctgtgcctcccaggttcagggtcagtgcttcttgacccctgcactggttctaccatatcagagacaacaagtgaagcttggagtgtagaggtattgccaagtgactcagaggccccagacctaaagcaggaggagcgtctgcaagaactggagagctgttctggactgggtagcacatctgatgatacggatgtcagggaggcataagtgcaacctctgaggatattcccaataagattgaagacctgagatctgagtgcagctctgattttgggggtaaagattctgtcactagtccagacatggatgaaataactcacggtgcccaccagctgacctctcctccttctcagtcagagtctctgctggccatgtttgatccactgtcttcacatgaaggggcttctgctgtggtaaggccaaaggttcactatgctaggccatcgcatccaccaccagatcccccaatcctggaaggagctgtgggaggaaatgaggccaggttgccaaactttggttcccatgttttaactccagctgaaatggaggcattcaagcaaaggcattcttaccctgagagactagttcgaagcaggagctctgatatagtatcttctgtccggagacccatgagtgaccccagctggaaccggcgtccaggaaatgaagagcgagaactccctccagctgcagccattggtgctacttctttggtggctgcacctcattcatcatcttcatccccgagtaaggactcctcaagaggagagactgaagaacgcaaagatagcgatgatgagaaatcagacaggaacagaccttggtggagaaaacgttttgtttcagccatgcctaaaggtaattttataaaatattagaacgctgtattagcaataagaagcaaagccccagaatctctttcagagagccaatgtctcaactcctctgtaagacttgctgggcttaagtttctagctactttgagggtgtagaaagtggttccactcagatgaatgctaaggcagagctttagaaatgttcttgttctttgcaggaagtgatagtggtttcataaatggaagtcatgcctgtcactattgtttaaatatcatataccattgaagttaaacatatagaggacttctgacatatatattgctattaattattgcaggaaaatgggacgttattggtaattaaacattgaaaactcatcctttacattcctggaataagttgaagctttttatgtctatgttcattgagaatgtttatactgtaaatatcagtgagtgtttattttggaaggtagctgtataaaattgtttacttttttggtgaacagcctggcatcatttgagttggcaaaagcatctcttcctgaaagaagagagcatccaggagtaaagctagaaacttattccaaaggcctcttctcagcacggtggcactcaggaa

SEQ ID NO: 139139 - DNA, 3143 bp, Homo sapiens
  Payload ID: 7263
  Gene Symbol: GARNL3
  Gene Name: GTPase activating Rap/RanGAP domain-like 3
  ENST ID: ENST00000373386
  CDS Start-End: 10-2418
ataatactgatgaagcatttttgttccagctctgtctcggaagacctaggctgtagacgtggggatttcagtaggaaacattatggatctgtggagctgcttatttccagtgatgctgatggagccatccaaagggctggaagattcagagtggaaaatggctcttcagatgagaatgcaactgccctgcctggtacttggcgaagaacagacgtgcacttagagaacccagaataccacaccagatggtatttcaaatattttttaggacaagtccatcagaactacattggaaacgatgccgagaagagccctttcttcttgtccgtgaccctttctgaccaaaacaatcaacgtgtccctcaataccgtgcaattctttggagaaaaacaggtacccagaaaatatgccttccctacagtcccacaaaaactctttctgtgaagtccatcttaagtgccatgaatctggacaaatttgagaaaggccccagggaaatttttcatcctgaaatacaaaaggacttgctggttcttgaagaacaagagggctctgtgaatttcaagtttggggttctttttgccaaagatgggcagctcactgatgatgagatgttcagcaatgaaattggaagcgagccttttcaaaaatttttaaatcttctgggtgacacaatcactctaaagggctggacgggctaccgtggcggtctggataccaaaaatgataccacagggatacattcagtttatactgtgtaccaagggcatgagatcatgtttcatgtttccaccatgttgccatattccaaagagaacaaacagcaggtggaaaggaaacgccacattggaaacgatatcgtcaccattgtgttccaagaaggagaggaatcttctcctgcctttaagccttccatgatccgctcccactttacacatatttttgccttagtgagatacaatcaacaaaatgacaattacaggctgaaaatattttcagaagagagcgtaccactctttggccctcccttgccaactccaccagtgtttacagaccaccaggaattcagggactttttgctagtgaaattaattaatggtgaaaaagccactttggaaaccccaacatttgcccagaaacgtcggcgtaccctggatatgttgattagatctttacaccaggatttgatgccagatttgcataagaacatgcttaatagacgatcttttagtgatgtcttaccagagtcacccaagtcagcgcggaagaaagaggaggcccgccaggcggagtttgttagaatagggcaggcactaaaactgaaatccattgtgagaggggatgctccatcaagcttggcagcttcagggatctgtaaaaaagagccgtgggagccccagtgtttctgcagtaatttccctcatgaagccgtgtgtgcagatccctggggccaggccttgctggtttccactgatgctggcgtcttgctagtggatgatgaccttccatcagtgcccgtgtttgacagaactctgccagtgaagcaaatgcatgtgcttgagaccctggaccttctggttctcagagcagacaaaggaaaagatgctcgcctctttgtcttcaggctaagtgctctgcaaaagggccttgaggggaagcaggctgggaagagcaggtctgactgcagagaaaacaagttggagaaaacaaaaggctgccacctgtatgctattaacactcaccacagcagagagctgaggattgtggttgcaattcggaataaactgcttctgatcacaagaaaacacaacaagccaagcggggtcaccagcacctcattgttatctcccctgtctgagtcacctgttgaagaattccagtacatcagggagatctgtctgtctgactctcccatggtgatgaccttagtggatgggccagctgaagagagtgacaatctcatctgtgtggcttatcgacaccaatttgatgtggtgaatgagagcacaggagaagccttcaggctgcaccacgtggaggccaacagggttaattttgttgcagctattgatgtgtacgaagatggagaagctggtttgctgttgtgttacaactacagttgcatctataaaaaggtttgcccctttaatggtggctcttttttggttcaaccttctgcgtcagatttccagttctgttggaaccaggctccctatgcaattgtctgtgctttcccgtatctcctggccttcaccaccgactccatggagatccgcctggtggtgaacgggaacctggtccacactgcagtcgtgccgcagctgcagctggtggcctccagggtgaaattcaatcaaaaaatctgtacaagattccacttagaaacctcgtgggcagaagcatcgaacgacctctgaagtcacccttagtctccaaggtcatcaccccacccactcccatcagtgtgggccttgctgccattccagtcacgcactccttgtccctgtctcgcatggagatcaaagaaatagcaagcaggacccgcagggaactactgggcctctcggatgaaggtggacccaagtcagaaggagcgccaaaggccaaatcaaaaccccggaagcggttagaagaaagccaaggaggccccaagccaggggcagtgaggtcatctagcagtgacaggatcccatcaggctccttggaaagtgcttctacttccgaagccaaccctgaggggcactcagccagctctgaccaggaccctgtggcagacagagagggcagcccggtctccggcagcagccccttccagctcacggctttctccgatgaagacattatagacttgaagtaacagagttgaatctcatttgccatctttagttttcttatggaggtttatactctttaaacagttctgatgtaatttctcaacaaaatgtggcttttagcctgtcagtgatctattggaccaaaccttctgcacactcggccagttccctctccaatgtccggtgccatctttcctgacctttgtttctttctgttcaggaaccatcagtccccttgtaataaaggtggtagatttcattgaggttttagattgaaactttgaataaatcaaaaatactcattctta

SEQ ID NO: 139140 - DNA, 3800 bp, Homo sapiens
  Payload ID: 7263
  Gene Symbol: GARNL3
  Gene Name: GTPase activating Rap/RanGAP domain-like 3
  Uniprot ID: Q5VVW2
  ENST ID: ENST00000373387
  CDS Start-End: 353-3394
atatttgggacaaagagctctcttaaatgaaagataattgcaagatccggttcagcagctttgtcccttgcctcaagtttactgcagggcttctctcctctctggttatacagaaatgaaattataaaccaccagtaaccttggaaatttcaatcgattccaaatgactaaatatttaattgaatcattgcctatacttccagggatgactctggcgtttgctttttattgagggctccatgaaagccaggctctgcaatggctgctggggactgtgtctgttgcaaggaggctcccctgcagtgaggagccggggcactgcaagtctgttccatagcagccctttttgcaaatggtagttgatttttgcagaaggtttgtggccagatcgctatgtataatactgatgaagcatttttgttccagctctgtctcggaagacctaggctgtagacgtggggatttcagtaggaaacattatggatctgtggagctgcttatttccagtgatgctgatggagccatccaaagggctggaagattcagagtggaaaatggctcttcagatgagaatgcaactgccctgcctggtacttggcgaagaacagacgtgcacttagagaacccagaataccacaccagatggtatttcaaatattttttaggacaagtccatcagaactacattggaaacgatgccgagaagagccctttcttcttgtccgtgaccctttctgaccaaaacaatcaacgtgtccctcaataccgtgcaattctttggagaaaaacaggtacccagaaaatatgccttccctacagtcccacaaaaactctttctgtgaagtccatcttaagtgccatgaatctggacaaatttgagaaaggccccagggaaatttttcatcctgaaatacaaaaggacttgctggttcttgaagaacaagagggctctgtgaatttcaagtttggggttctttttgccaaagatgggcagctcactgatgatgagatgttcagcaatgaaattggaagcgagccttttcaaaaatttttaaatcttctgggtgacacaatcactctaaagggctggacgggctaccgtggcggtctggataccaaaaatgataccacagggatacattcagtttatactgtgtaccaagggcatgagatcatgtttcatgtttccaccatgttgccatattccaaagagaacaaacagcaggtggaaaggaaacgccacattggaaacgatatcgtcaccattgtgttccaagaaggagaggaatcttctcctgcctttaagccttccatgatccgctcccactttacacatatttttgccttagtgagatacaatcaacaaaatgacaattacaggctgaaaatattttcagaagagagcgtaccactctttggccctcccttgccaactccaccagtgtttacagaccaccaggaattcagggactttttgctagtgaaattaattaatggtgaaaaagccactttggaaaccccaacatttgcccagaaacgtcggcgtaccctggatatgttgattagatctttacaccaggatttgatgccagatttgcataagaacatgcttaatagacgatcttttagtgatgtcttaccagagtcacccaagtcagcgcggaagaaagaggaggcccgccaggcggagtttgttagaatagggcaggcactaaaactgaaatccattgtgagaggggatgctccatcaagcttggcagcttcagggatctgtaaaaaagagccgtgggagccccagtgtttctgcagtaatttccctcatgaagccgtgtgtgcagatccctggggccaggccttgctggtttccactgatgctggcgtcttgctagtggatgatgaccttccatcagtgcccgtgtttgacagaactctgccagtgaagcaaatgcatgtgcttgagaccctggaccttctggttctcagagcagacaaaggaaaagatgctcgcctctttgtcttcaggctaagtgctctgcaaaagggccttgaggggaagcaggctgggaagagcaggtctgactgcagagaaaacaagttggagaaaacaaaaggctgccacctgtatgctattaacactcaccacagcagagagctgaggattgtggttgcaattcggaataaactgcttctgatcacaagaaaacacaacaagccaagcggggtcaccagcacctcattgttatctcccctgtctgagtcacctgttgaagaattccagtacatcagggagatctgtctgtctgactctcccatggtgatgaccttagtggatgggccagctgaagagagtgacaatctcatctgtgtggcttatcgacaccaatttgatgtggtgaatgagagcacaggagaagccttcaggctgcaccacgtggaggccaacagggttaattttgttgcagctattgatgtgtacgaagatggagaagctggtttgctgttgtgttacaactacagttgcatctataaaaaggtttgcccctttaatggtggctcttttttggttcaaccttctgcgtcagatttccagttctgttggaaccaggctccctatgcaattgtctgtgctttcccgtatctcctggccttcaccaccgactccatggagatccgcctggtggtgaacgggaacctggtccacactgcagtcgtgccgcagctgcagctggtggcctccaggtcggatatatacttcacagcaactgcagctgtgaatgaggtctcatctggaggcagctccaagggggccagtgcccgaaattctcctcagacacccccgggccgagatactccagtatttccttcttccctgggggaaggtgaaattcaatcaaaaaatctgtacaagattccacttagaaacctcgtgggcagaagcatcgaacgacctctgaagtcacccttagtctccaaggtcatcaccccacccactcccatcagtgtgggccttgctgccattccagtcacgcactccttgtccctgtctcgcatggagatcaaagaaatagcaagcaggacccgcagggaactactgggcctctcggatgaaggtggacccaagtcagaaggagcgccaaaggccaaatcaaaaccccggaagcggttagaagaaagccaaggaggccccaagccaggggcagtgaggtcatctagcagtgacaggatcccatcaggctccttggaaagtgcttctacttccgaagccaaccctgaggggcactcagccagctctgaccaggaccctgtggcagacagagagggcagcccggtctccggcagcagccccttccagctcacggctttctccgatgaagacattatagacttgaagtaacagagttgaatctcatttgccatctttagttttcttatggaggtttatactctttaaacagttctgatgtaatttctcaacaaaatgtggcttttagcctgtcagtgatctattggaccaaaccttctgcacactcggccagttccctctccaatgtccggtgccatctttcctgacctttgtttctttctgttcaggaaccatcagtccccttgtaataaaggtggtagatttcattgaggttttagattgaaactttgaataaatcaaaaatactcattcttatttactgcaaccttctcatattttatatacttagatggaaaattattttttcattacagttttgatttatgtcacataatgtgtttcttttataaagaaaagtcgttgctttttaacttta

SEQ ID NO: 139141 - DNA, 536 bp, Homo sapiens
  Payload ID: 7263
  Gene Symbol: GARNL3
  Gene Name: GTPase activating Rap/RanGAP domain-like 3
  ENST ID: ENST00000453030
  CDS Start-End: 95-241
aggaggtgctgaggcgaggagaggccgaactccaagggacgacgctcgcggaagcagaggtttggggacagctgcccagcctccaggcccactgatggacccgttaacgaaggtgccttgtgggagtcagatagcacaaaccattctatggaaagcaaagtcgtctctctccttcggcatccagccccttcagacatggccaacgaaagaccctgaactagagtcccaggtcaacctgtaacttatttccagtgatgctgatggagccatccaaagggctggaagattcagagtggaaaatggctcttcagatgagaatgcaactgccctgcctggtacttggcgaagaacagacgtgcacttagagaacccagaataccacaccagatggtatttcaaatattttttaggacaagtccatcagaactacattggaaacgatgccgagaagagccctttcttcttgtccgtgaccctttctgaccaaaacaatcaacgtgtccctcaataccgtgcaattctttggagaaaaacag

SEQ ID NO: 139142 - DNA, 3599 bp, Homo sapiens
  Payload ID: 7263
  Gene Symbol: GARNL3
  Gene Name: GTPase activating Rap/RanGAP domain-like 3
  Uniprot ID: Q5VVW2
  ENST ID: ENST00000435213
  CDS Start-End: 331-3306
actagaagcaagaatgtagcctgggtaatatctggaacactttcaaactgcatgcattgatgtgttgcccattttcagctaagagagggaggactacaaaaggttaaatttctcatataagattaattcagccatctctgtgaaatggtggaagcagaatgccattagactctctaatctcatttctctcatgctgtctttcttggagcctgtcaaacagtgtcctggcagagagtcagttctctggttgctaaacatcagagtcagtctctttctgcatgtgccaagagggctgtaatttagaaaatgcaacctaccttttaaggaaggatgaaaagctctgtctcggaagacctaggctgtagacgtggggatttcagtaggaaacattatggatctgtggagctgcttatttccagtgatgctgatggagccatccaaagggctggaagattcagagtggaaaatggctcttcagatgagaatgcaactgccctgcctggtacttggcgaagaacagacgtgcacttagagaacccagaataccacaccagatggtatttcaaatattttttaggacaagtccatcagaactacattggaaacgatgccgagaagagccctttcttcttgtccgtgaccctttctgaccaaaacaatcaacgtgtccctcaataccgtgcaattctttggagaaaaacaggtacccagaaaatatgccttccctacagtcccacaaaaactctttctgtgaagtccatcttaagtgccatgaatctggacaaatttgagaaaggccccagggaaatttttcatcctgaaatacaaaaggacttgctggttcttgaagaacaagagggctctgtgaatttcaagtttggggttctttttgccaaagatgggcagctcactgatgatgagatgttcagcaatgaaattggaagcgagccttttcaaaaatttttaaatcttctgggtgacacaatcactctaaagggctggacgggctaccgtggcggtctggataccaaaaatgataccacagggatacattcagtttatactgtgtaccaagggcatgagatcatgtttcatgtttccaccatgttgccatattccaaagagaacaaacagcaggtggaaaggaaacgccacattggaaacgatatcgtcaccattgtgttccaagaaggagaggaatcttctcctgcctttaagccttccatgatccgctcccactttacacatatttttgccttagtgagatacaatcaacaaaatgacaattacaggctgaaaatattttcagaagagagcgtaccactctttggccctcccttgccaactccaccagtgtttacagaccaccaggaattcagggactttttgctagtgaaattaattaatggtgaaaaagccactttggaaaccccaacatttgcccagaaacgtcggcgtaccctggatatgttgattagatctttacaccaggatttgatgccagatttgcataagaacatgcttaatagacgatcttttagtgatgtcttaccagagtcacccaagtcagcgcggaagaaagaggaggcccgccaggcggagtttgttagaatagggcaggcactaaaactgaaatccattgtgagaggggatgctccatcaagcttggcagcttcagggatctgtaaaaaagagccgtgggagccccagtgtttctgcagtaatttccctcatgaagccgtgtgtgcagatccctggggccaggccttgctggtttccactgatgctggcgtcttgctagtggatgatgaccttccatcagtgcccgtgtttgacagaactctgccagtgaagcaaatgcatgtgcttgagaccctggaccttctggttctcagagcagacaaaggaaaagatgctcgcctctttgtcttcaggctaagtgctctgcaaaagggccttgaggggaagcaggctgggaagagcaggtctgactgcagagaaaacaagttggagaaaacaaaaggctgccacctgtatgctattaacactcaccacagcagagagctgaggattgtggttgcaattcggaataaactgcttctgatcacaagaaaacacaacaagccaagcggggtcaccagcacctcattgttatctcccctgtctgagtcacctgttgaagaattccagtacatcagggagatctgtctgtctgactctcccatggtgatgaccttagtggatgggccagctgaagagagtgacaatctcatctgtgtggcttatcgacaccaatttgatgtggtgaatgagagcacaggagaagccttcaggctgcaccacgtggaggccaacagggttaattttgttgcagctattgatgtgtacgaagatggagaagctggtttgctgttgtgttacaactacagttgcatctataaaaaggtttgcccctttaatggtggctcttttttggttcaaccttctgcgtcagatttccagttctgttggaaccaggctccctatgcaattgtctgtgctttcccgtatctcctggccttcaccaccgactccatggagatccgcctggtggtgaacgggaacctggtccacactgcagtcgtgccgcagctgcagctggtggcctccaggtcggatatatacttcacagcaactgcagctgtgaatgaggtctcatctggaggcagctccaagggggccagtgcccgaaattctcctcagacacccccgggccgagatactccagtatttccttcttccctgggggaaggtgaaattcaatcaaaaaatctgtacaagattccacttagaaacctcgtgggcagaagcatcgaacgacctctgaagtcacccttagtctccaaggtcatcaccccacccactcccatcagtgtgggccttgctgccattccagtcacgcactccttgtccctgtctcgcatggagatcaaagaaatagcaagcaggacccgcagggaactactgggcctctcggatgaaggtggacccaagtcagaaggagcgccaaaggccaaatcaaaaccccggaagcggttagaagaaagccaaggaggccccaagccaggggcagtgaggtcatctagcagtgacaggatcccatcaggctccttggaaagtgcttctacttccgaagccaaccctgaggggcactcagccagctctgaccaggaccctgtggcagacagagagggcagcccggtctccggcagcagccccttccagctcacggctttctccgatgaagacattatagacttgaagtaacagagttgaatctcatttgccatctttagttttcttatggaggtttatactctttaaacagttctgatgtaatttctcaacaaaatgtggcttttagcctgtcagtgatctattggaccaaaccttctgcacactcggccagttccctctccaatgtccggtgccatctttcctgacctttgtttctttctgttcaggaaccatcagtccccttgtaataaaggtggtagatttcattgaggttttagattgaaactttgaataaatcaaaaatactcattcttatttactgc

SEQ ID NO: 139143 - DNA, 653 bp, Homo sapiens
  Payload ID: 7263
  Gene Symbol: GARNL3
  Gene Name: GTPase activating Rap/RanGAP domain-like 3
  ENST ID: ENST00000441134
  CDS Start-End: 78-224
agaagagggcggcgctgcggcgcagggggtgcagcttcgagagcccaaggacagctgcccagcctccaggcccactgatggacccgttaacgaaggtgccttgtgggagtcagatagcacaaaccattctatggaaagcaaagtcgtctctctccttcggcatccagccccttcagacatggccaacgaaagaccctgaactagagtcccaggtcaacctgtaactctgtctcggaagacctaggctgtagacgtggggatttcagtaggaaacattatggatctgtggagctgcttatttccagtgatgctgatggagccatccaaagggctggaagattcagagtggaaaatggctcttcagatgagaatgcaactgccctgcctggtacttggcgaagaacagacgtgcacttagagaacccagaataccacaccagatggtatttcaaatattttttaggacaagtccatcagaactacattggaaacgatgccgagaagagccctttcttcttgtccgtgaccctttctgaccaaaacaatcaacgtgtccctcaataccgtgcaattctttggagaaaaacaggtacccagaaaatatgccttccctacagtcccacaaaaactctttctgtgaagtccatcttaag

SEQ ID NO: 139144 - DNA, 694 bp, Homo sapiens
  Payload ID: 7263
  Gene Symbol: GARNL3
  Gene Name: GTPase activating Rap/RanGAP domain-like 3
  ENST ID: ENST00000429629
  CDS Start-End: 129-395
aggcggggctcctgggggcggagccatacctgtgggcgggacatgggaaaggagggcccgaggggcggagctacaatagaaagggccaggaggtgctgaggacagctgcccagcctccaggcccactgatggacccgttaacgaaggtgccttgtgggagtcagatagcacaaaccattctatggaaagcaaagtcgtctctctccttcggcatccagccccttcagacatggccaacgaaagaccctgaactagagtcccaggtcaacctcttatttccagtgatgctgatggagccatccaaagggctggaagattcagagtggaaaatggctcttcagatgagaatgcaactgccctgcctggtacttggcgaagaacagacgtgcacttagagaacccagaataccacaccagatggtatttcaaatattttttaggacaagtccatcagaactacattggaaacgatgccgagaagagccctttcttcttgtccgtgaccctttctgaccaaaacaatcaacgtgtccctcaataccgtgcaattctttggagaaaaacaggtacccagaaaatatgccttccctacagtcccacaaaaactctttctgtgaagtccatcttaagtgccatgaatctggacaaatttgagaaaggccccagggaaatttttcatcctgaaatacaaaag

SEQ ID NO: 139145 - DNA, 905 bp, Homo sapiens
  Payload ID: 7263
  Gene Symbol: GARNL3
  Gene Name: GTPase activating Rap/RanGAP domain-like 3
  ENST ID: ENST00000439286
  CDS Start-End: 103-905
tacctcccccttgatgggtggcgggatcccggagccaacgcagaccggacgtcggaacgccgctttagccccgggacagctgcccagcctccaggcccactgatggacccgttaacgaaggtgccttgtgggagtcagatagcacaaaccattctatggaaagcaaagtcgtctctctccttcggcatccagccccttcagacatggccaacgaaagaccctgaactagagtcccaggtcaacctctctgtctcggaagacctaggctgtagacgtggggatttcagtaggaaacattatggatctgtggagctgcttatttccagtgatgctgatggagccatccaaagggctggaagattcagagtggaaaatggctcttcagatgagaatgcaactgccctgcctggtacttggcgaagaacagacgtgcacttagagaacccagaataccacaccagatggtatttcaaatattttttaggacaagtccatcagaactacattggaaacgatgccgagaagagccctttcttcttgtccgtgaccctttctgaccaaaacaatcaacgtgtccctcaataccgtgcaattctttggagaaaaacaggtacccagaaaatatgccttccctacagtcccacaaaaactctttctgtgaagtccatcttaagtgccatgaatctggacaaatttgagaaaggccccagggaaatttttcatcctgaaatacaaaaggacttgctggttcttgaagaacaagagggctctgtgaatttcaagtttggggttctttttgccaaagatgggcagctcactgatgatgagatgttcagcaatgaaattggaagcgagccttttcaaaaatttttaaatcttctgggtgacacaatcactctaaaggg

SEQ ID NO: 139146 - DNA, 667 bp, Homo sapiens
  Payload ID: 7263
  Gene Symbol: GARNL3
  Gene Name: GTPase activating Rap/RanGAP domain-like 3
  ENST ID: ENST00000444677
  CDS Start-End: 250-667
agagcagaactgagcaggcggtggagctgggtctggtccgggcacggagtgggggcttcgaagggaaaaggcggggctcctgggggcggagccatacctgtgggcgggacatgggaaaggagggcccgaggggcggagctacaatagaaagggccaggaggtgctgaggcgaggagaggccgaactccaagggacgacgctcgcggaagcagaggtttggggacagctgcccagcctccaggcccactgatggacccgttaacgaaggtgccttgtgggagtcagatagcacaaaccattctatggaaagcaaagtcgtctctctccttcggcatccagccccttcagacatggccaacgaaagaccctgaactagagtcccaggtcaacctctctgtctcggaagacctaggctgtagacgtggggatttcagtaggaaacattatggatctgtggagctgcttatttccagtgatgctgatggagccatccaaagggctggaagattcagagtggaaaatggctcttcagatgagaatgcaactgccctgcctggtacttggcgaagaacagacgtgcacttagagaacccagaataccacaccagatggtatttcaaatattttttaggacaagtccatcagaactacattggaaacgatgccg

SEQ ID NO: 139147 - DNA, 831 bp, Homo sapiens
  Payload ID: 7263
  Gene Symbol: GARNL3
  Gene Name: GTPase activating Rap/RanGAP domain-like 3
  ENST ID: ENST00000425970
  CDS Start-End: 331-831
actagaagcaagaatgtagcctgggtaatatctggaacactttcaaactgcatgcattgatgtgttgcccattttcagctaagagagggaggactacaaaaggttaaatttctcatataagattaattcagccatctctgtgaaatggtggaagcagaatgccattagactctctaatctcatttctctcatgctgtctttcttggagcctgtcaaacagtgtcctggcagagagtcagttctctggttgctaaacatcagagtcagtctctttctgcatgtgccaagagggctgtaatttagaaaatgcaacctaccttttaaggaaggatgaaaagctctgtctcggaagacctaggctgtagacgtggggatttcagtaggaaacattatggatctgtggagctgcttatttccagtgatgctgatggagccatccaaagggctggaagattcagagtggaaaatggctcttcagatgagaatgcaactgccctgcctggtacttggcgaagaacagacgtgcacttagagaacccagaataccacaccagatggtatttcaaatattttttaggacaagtccatcagaactacattggaaacgatgccgagaagagccctttcttcttgtccgtgaccctttctgaccaaaacaatcaacgtgtccctcaataccgtgcaattctttggagaaaaacaggtacccagaaaatatgccttccctacagtcccacaaaaactctttctgtgaagtccatcttaagtgccatgaatctggacaaatttgagaaaggccccagggaaatttttcatcctgaaatacaaaag

SEQ ID NO: 139148 - DNA, 523 bp, Homo sapiens
  Payload ID: 7263
  Gene Symbol: GARNL3
  Gene Name: GTPase activating Rap/RanGAP domain-like 3
  ENST ID: ENST00000446764
  CDS Start-End: 194-523
gcgcgagccgagcggccggccgaggcccgagcccacccgagtgcgcccgagcccgcggcccccgcccggggcgatggaaccggagcccggcggggtggccgctgcgctcctgcggcagaagagggcggcgctgcggcgcagggggtgcagcttcgagagcccaaggacagctgcccagcctccaggcccactgatggacccgttaacgaaggtgccttgtgggagtcagatagcacaaaccattctatggaaagcaaagtcgtctctctccttcggcatccagccccttcagacatggccaacgaaagaccctgaactagagtcccaggtcaacctctctgtctcggaagacctaggctgtagacgtggggatttcagtaggaaacattatggatctgtggagctgcttatttccagtgatgctgatggagccatccaaagggctggaagattcagagtggaaaatggctcttcagatgagaatgcaactgccctgcctggtacttggcgaagaacagacgtg

SEQ ID NO: 139149 - DNA, 569 bp, Homo sapiens
  Payload ID: 7263
  Gene Symbol: GARNL3
  Gene Name: GTPase activating Rap/RanGAP domain-like 3
  ENST ID: ENST00000460176
  CDS Start-End: 1-245
tgatgccagatttgcataagaacatgcttaatagacgatcttttagtgatgtcttaccagagtcacccaagtcagcgcggaagaaagaggaggcccgccaggcggagtttgttagaatagggcaggcactaaaactgaaatccattgtgagaggggatgctccatcaagcttggcagcttcagggatctgtaaaaaagagatgaccttccatcagtgcccgtgtttgacagaactctgccagtgaagcaaatgcatgtgcttgagaccctggaccttctggttctcagagcagacaaaggaaaagatgctcgcctctttgtcttcaggctaagtgctctgcaaaagggccttgaggggaagcaggctgggaagagcaggtctgactgcagagaaaacaagttggagaaaacaaaaggctgccacctgtatgctattaacactcaccacagcagagagctgaggattgtggttgcaattcggaataaactgcttctgatcacaagaaaacacaacaagccaagcggggtcaccagcacctcattgttatctcccctgtctgagtcacctg

SEQ ID NO: 139150 - DNA, 4420 bp, Homo sapiens
  Payload ID: 7264
  Gene Symbol: GIMAP1
  Gene Name: GTPase, IMAP family member 1
  Uniprot ID: Q8WWP7
  ENST ID: ENST00000307194
  CDS Start-End: 141-1061
agcttcctgatttctgaagtctgagtgatttcctccgtgtgccgagaggaaacagccttctgcactcacagccgaagggaaagcagcaggttggggcttcttgtggccaacttcagagcctgtcaccaggaaaggtaagcatgggaggaaggaagatggcgacagatgaagaaaatgtctatggtttagaagagaacgctcagtcccggcaggagtccacgcggaggctcatccttgttgggagaacaggggccgggaagagcgccactgggaacagcatcctgggccagagacggttcttctccaggctgggggccacgtctgtgaccagggcctgcaccacgggcagccgcaggtgggacaagtgccacgtggaagtcgtggacactccggacattttcagctcccaagtgtccaagacagatcctggctgtgaggagagaggtcactgctacctgctctcggcccccggaccccacgcgctgctcctggtgacccagttgggtcggttcaccgcccaggaccagcaggcggtgaggcaggtgagggacatgttcggggaggacgtcctaaaatggatggtcatcgtcttcaccaggaaggaggacctggccgggggctccctgcacgattacgtgagcaacacagagaaccgggccttgcgcgagctggtggccgagtgcgggggccgggtctgtgcctttgataaccgggccaccggccgggagcaggaagcccaggtggagcagctgctggggatggtcgagggcttggtgctggagcacaagggcgcccattactccaacgaggtgtatgagctggcgcaggtgctgcgctgggcaggccctgaggagcggctccggcgggtggcggagcgcgtggcagccagggtgcagaggaggccatggggcgcctggctgtcggcccggctgtggaagtggctgaagtcccccaggagctggaggctgggcctggccctgctgctggggggcgcgctcctgttctgggtgctgctccacaggcggtggtcggaggccgttgcggaggtcgggcctgactgacagcgcaggtcctaaaactgaaggcaacttggttaagggaggctgaattcttggagctgaagggaaaacttcattccaacggaaggaatcctgtagtttcaggcatagttttaatgacacagaaaactttgctgcatcacctttgcaactttgccaaagctcagagttcactttttaagtttttaactcattttaaatgatgtgtatgcagagttttaaaataaattcgtctaacaataacttcctttggtagttttggtagtctaatgtcaagtagcttgtagtggggacaaacgcatggcacagggaaaacaagtgccattattttcgagctttttaaaaaatttagactgcccctccttgataattttctagttcttatacatgggtagataggttcctttgtgatccttgtagacttttagcatcaataaaagaaatgtgggggttacacacgtgaatgttacttctgagacatcagtttatagtacaatgatttactaccaaaaagatgaatgtaactgtactgttacaaagtggaaaataacagtttccacttttctagaacatattatggttcatggcattccaaaatgaagtaagggccgggcgaggtggctcacgcctgtaatcccaacactttgggaggtcgaggcaggtggatcacctgaggtcaggagttcgagaccagcctgaccaacatggcgaaaccccatctctactaaaaatacaaaaattagccaggcgtgatagcactcgcctgtaatcccagccattcaggaggctgaggcgggagaatcacttgatgcagtgagccgagatcgtgccactgcactccaggctgggtgacaaagcaagaatctgtctcaaaaaaaaaaaaagaaaagaaaagaaaaagaaaaagagtaggatattgggaaaataacatataatatcttctatatggttattcatatttttatcacacacacacacacacacacacacacacacagtctgtatctcgagctcctctctggttatggagaagaggcagagcaccaggtgcataggctgagactgcagacacctgagcatcctatgctgtgaggcgaaagcatccggttttttcgggatgggcctgtccaggaaggttctcgaatgccacgtgattagaaaatttgccgctgactggttgtgcgaatcaaacaataggatttccttatttctatttctgagcataatgagaaccctttaagggaactcattgtctttaaatcagccagcctctagtgaggtcatggagacatgggaagcaggtattcacattagctctattcaagaggaagaggaggagggagtgtgcgcaggcgccctagggtcttccccagcacacgttgggaagaaggggtctgcaagcatgcgcacaattgccagctcaggctaaggactgcaggaggttccaggtgggttgcgggcttcgggcaggctatggtgaggggtcctgagggccttggtgaccgctgcagggagttggactttttgaagcgtggctcaagaaaaacccatgtttaattcctgcctttcgcttcctcagcagcctttctgggcccaggcaggggcctcgagccagggaaggatcctttgatgaccagaggggacagcagggagggcacagcgtggtcgtccacggtcacttgcgcacgagccagtgctgctgctggtgttagacaacaacttttatcaaagtggtttaatgtacagcagcaacaaagctgctttgtggagcagggctcccaataggcagtgtgcccagagtagcagctcggaagcagtactgcaatcacatttatacccactttcaactatatgcaaatttaggggtggattatgccaaaatttctagaaaaaaggtcgtaacttccaggtcgtgggattgttgctatggaaaggagccaaaacttccagctgttgccttagcaatggtaacctgacgtggcactggtgagtgtgttttatggagagactctttcacctcttccctttcagcttgtcttcagtgtggtctggagcccaatccccacctccagagtctagtcctgcctcctacctcagtaataaaaagtagtagtatatggttaattgtcaaatacatttgcaaagtgtaatcaaagatacattaccaatctgaatctcaaaatgtgctatcatctttgaatttgaataatgtattattaaagaagttacagttttcctttacattcaataacatttctttagtggttttctttttcagatactttgattatgatcttttttttttcatctttgtatccccgttatacaacccagtgcctggcatagaaagtgggatcaacaaatgtttggaaaatgaattgtaaagttgactttcctgtacctttttaatattagatttctagctaccagacttttgaccattttctaaattttctaccatagataacagaaaattctttcgcgcaagcatgtcattgtattaatgatattctcctgccctaaggaaatttacttcccttcaagcacagggtcccccaaattactgtatttccacccctttcagcttattttatccttttctcctgctacagaacagttggcattcaccattcccttcggtaaagtctttttttaggctgtggcttaaaggttgctttttcccccatagctcaaggttaggccttgtgacctcacttatgtaatttgagtgatttgatagcacaaatcaattttatacttaaattacagcataaaacagcactgcctcctgttggaaaaacttgcttgctaattttaaccagacacagtaaaaatactgtccaatacctcaaaaattgtgtaaatatatatccatttcaattgtcccccttcctctcctctccttttatctcttggaagataaaaatgtatgggtcctgtgctgataatgtttctgttcatatttctatgccctggtacctggatcagcttttgttctacacaaaaagacttgtatctggcttatttctgaaagctagtgttggccatgatgaacttttagagcaaaagatttcaggcagagtacattcttacatattcttacacaatcaatattcagttccagcccgcacagtagccctagcaaatgccagtgctccttccagagattcacctatggattcagtaccccagaagagaatttctgtaaattcttggggaagctatagctagactatggctcaacactcatttttcccccatgattcttaatctaacagtggcaatgttggcctcttcttaggcaactagattcggttcttgcttattctgccaataaaatactttattgagatgcttacaaa

SEQ ID NO: 139151 - DNA, 1449 bp, Homo sapiens
  Payload ID: 7265
  Gene Symbol: GIMAP2
  Gene Name: GTPase, IMAP family member 2
  Uniprot ID: Q9UG22
  ENST ID: ENST00000223293
  CDS Start-End: 95-1108
gttttactttctttttctcttggagctgagctataagacaacaggactgaacagggagccaactgtttctttgaacagtaaatcaggaacaccaatggaccaaaatgaacacagtcactggggaccacatgcaaagggccaatgtgccagcagatctgagctgagaatcatcctggtgggcaaaacaggaactggcaaaagtgctgcagggaacagcatcctcaggaagcaagcatttgaatcgaagctgggttcccagaccttgactaagacttgcagcaaaagtcagggaagctggggaaatagagagattgtcattattgacacaccagatatgttttcttggaaggaccactgtgaagctctgtacaaagaggtgcagaggtgctacttgctgtctgcaccaggaccccatgtgctgctcctggtgactcagctgggccgctatacctcacaggaccagcaggctgcacagagggtgaaggagatctttggagaggatgccatgggacacacaattgtcctctttacccacaaggaagacctcaatggtggctccctgatggattacatgcacgactcagataacaaagccctaagcaagctggtggcagcatgtggtgggcgaatctgtgcctttaataaccgtgctgaagggagcaatcaggatgaccaagtgaaggaactaatggactgtattgaggatctgttgatggagaaaaatggtgatcactataccaatgggttgtacagcctaatacagaggtctaaatgtggacctgtgggatcagatgaaagagtaaaggaattcaaacagagccttataaagtacatggaaactcaaagaagttacacagccttggctgaagcaaactgcctaaaaggagccttaatcaaaacacaactgtgtgttttattttgtattcagttgtttctcagattgataattctgtggctttgcatactgcacagcatgtgcaatttgttttgttgcttactctttagtatgtgcaatttattctgcagtttgctgtttattatacccaaaaagttaatgatatttttgagaacagttattagactagaacgcaagactcctaggttatagttacagatcccagttattatttactcactatcatttagtgggtgaatcacagtaatttccctgtaaaatgtggtacctgaagtcatatttgagattctatgaaatgtttaaatctgaacatcactccaattattaatgaaccaaatcatacgataagttactgtttgcattgaaatataatatcaaagccttttgaaatctgtaaacataaaattcctctcattttcaaatatctaaagccagttttatgttcctaaaatctcattttcttctttctagtactactatttctactgaatataatgaaaatggcaataaaataatattacataaactgtaaa

SEQ ID NO: 139152 - DNA, 309 bp, Homo sapiens
  Payload ID: 7265
  Gene Symbol: GIMAP2
  Gene Name: GTPase, IMAP family member 2
  ENST ID: ENST00000474605
  CDS Start-End: 68-199
gagctataagacaacaggactgaacagggagccaactgtttctttgaacagtaaatcaggaacaccaatggaccaaaatgaacacagtcactggggcgagaggaaggttaaacgtgcaatttggctgcctctaagcaagctccagcgcggtgtatcaggagctgcttggctgctgttttcagaatatagaaatgtgtaatgtaatgcctgcttccttttaagtacaagtgtccattgcatgtctactgtgaggccataatttcactggcctacagaaaataagattaaatgtccataaattttggccaa

SEQ ID NO: 139153 - DNA, 2060 bp, Homo sapiens
  Payload ID: 7266
  Gene Symbol: GIMAP4
  Gene Name: GTPase, IMAP family member 4
  Uniprot ID: Q9NUV9
  ENST ID: ENST00000255945
  CDS Start-End: 176-1165
aaagttctattagagctgctggatgatcaggtgggcaggtcccttgcacaagtaaatctggacagctcctcccctcacttcctctcttctcctgtttctcaacatcctggcttagtattgtgtgcaaaatcagagaggggtgcaagatcctgatttttcaggagttcaagcgacaatggcagcccaatacggcagtatgagcttcaaccccagcacaccaggggccagttatgggcctggaaggcaagagcccagaaattcccaattgagaattgtgttagtgggtaaaaccggagcaggaaaaagtgcaacaggaaacagcatccttggccggaaagtgtttcattctggcactgcagcaaaatccattaccaagaagtgtgagaaacgcagcagctcatggaaggaaacagaacttgtcgtagttgacacaccaggcattttcgacacagaggtgcccaatgctgaaacgtccaaggagattattcgctgcattcttctgacctccccagggcctcatgctctgcttctggtggttccactgggccgttacactgaggaagagcacaaagccacagagaagatcctgaaaatgtttggagagagggctagaagtttcatgattctcatattcacccggaaagatgacttaggtgacaccaatttgcatgactacttaagggaagctccagaagacattcaagacttgatggacattttcggtgaccgctactgtgcgttaaacaacaaggcaacaggcgctgagcaggaggcccagagggcacagttgctgggcctgatccagcgcgtggtgagggagaacaaggaaggctgctacactaataggatgtaccaaagggcggaggaggagatccagaagcaaacacaagcaatgcaagaactccacagagtggagctggagagagagaaagcgcggataagagaggagtatgaagagaaaatcagaaagctggaagataaagtggagcaggaaaagagaaagaagcaaatggagaagaaactagcagaacaggaggctcactatgctgtaaggcagcaaagggcaagaacggaagtggagagtaaggatgggatacttgaattaatcatgacagcgttacagattgcttcctttattttgttacgtctgttcgcggaagattaaacttaatgaaaatctgtttgtattttctgcatattctctggcaaccttgccccatacttacttatttagcatagtcgagtgctctagtttctgtctctcaggcactcgtaactaaggaccaccattggccattggtagatgtttgattgacttaacaagagagggacaaattttcaatttgtgaaactccaaagcagaaagtattggtgcttgctaccttgtgaattcttccttagacatgcagagaaaatgtatgcaagagaccaaaaagatggctccaagctatgtcatgttacctgtaataaaatcttttcttctagattctttctatgttggcagataatctccccttgtagcttccactcacttattcttgcattcagagtcacaatgatcatcttacccatgtggtttttgagaaagaaagatcaattctttgtttgcagtaggtaatcttagagatggagatgattgtagaattattcctagatgagtgtcaatttatttaattccattgtcatataaggagtcaaattgtttcttatcatttgttcattgaagaacagagacctgtctggaaaatcgatctctacaaattcaattaaataatgatccccaaatgctgaaaaagtgaaatacagcaattcaacagataatagagcaatgtttagtatattcagctgtatctgtagaaactctttgacgaacctcaatttaaccaatttgatgaatacccagttctcttcttttctagagaaagatagttgcaacctcacctccctcactcaacactttgaatacttattgtttggcaggtcatccacacacttctgcccccactgcattgaattttttgcttatgttgtttataataaaacttttcaattatctcata

SEQ ID NO: 139154 - DNA, 552 bp, Homo sapiens
  Payload ID: 7266
  Gene Symbol: GIMAP4
  Gene Name: GTPase, IMAP family member 4
  ENST ID: ENST00000479232
  CDS Start-End: 100-552
aggtaagggaataggggtgtgtgtggtgggggtcgggacgaatgtgcgattttggtgaggagggacctgtatcttaaatcgtctggagttcaagcgacaatggcagcccaatacggcagtatgagcttcaaccccagcacaccaggggccagttatggtgagagggcattcagtgctccccagaccaggctgcagggagggcctggaaggcaagagcccagaaattcccaattgagaattgtgttagtgggtaaaaccggagcaggaaaaagtgcaacaggaaacagcatccttggccggaaagtgtttcattctggcactgcagcaaaatccattaccaagaagtgtgagaaacgcagcagctcatggaaggaaacagaacttgtcgtagttgacacaccaggcattttcgacacagaggtgcccaatgctgaaacgtccaaggagattattcgctgcattcttctgacctccccagggcctcatgctctgcttctggtggttccactgggccgttacactgaggaagagcacaaagccacagagaagatc

SEQ ID NO: 139155 - DNA, 1569 bp, Homo sapiens
  Payload ID: 7266
  Gene Symbol: GIMAP4
  Gene Name: GTPase, IMAP family member 4
  ENST ID: ENST00000461940
  CDS Start-End: 84-1115
tgtttctcaacatcctggcttagtattgtgtgcaaaatcagagaggggtgcaagatcctgatttttcaggagttcaagcgacaatggcagcccaatacggcagtatgagcttcaaccccagcacaccaggggccagttatggtgagagggcattcagtgctccccagaccaggctgcagggagggcctggaaggcaagagcccagaaattcccaattgagaattgtgttagtgggtaaaaccggagcaggaaaaagtgcaacaggaaacagcatccttggccggaaagtgtttcattctggcactgcagcaaaatccattaccaagaagtgtgagaaacgcagcagctcatggaaggaaacagaacttgtcgtagttgacacaccaggcattttcgacacagaggtgcccaatgctgaaacgtccaaggagattattcgctgcattcttctgacctccccagggcctcatgctctgcttctggtggttccactgggccgttacactgaggaagagcacaaagccacagagaagatcctgaaaatgtttggagagagggctagaagtttcatgattctcatattcacccggaaagatgacttaggtgacaccaatttgcatgactacttaagggaagctccagaagacattcaagacttgatggacattttcggtgaccgctactgtgcgttaaacaacaaggcaacaggcgctgagcaggaggcccagagggcacagttgctgggcctgatccagcgcgtggtgagggagaacaaggaaggctgctacactaataggatgtaccaaagggcggaggaggagatccagaagcaaacacaagcaatgcaagaactccacagagtggagctggagagagagaaagcgcggataagagaggagtatgaagagaaaatcagaaagctggaagataaagtggagcaggaaaagagaaagaagcaaatggagaagaaactagcagaacaggaggctcactatgctgtaaggcagcaaagggcaagaacggaagtggagagtaaggatgggatacttgaattaatcatgacagcgttacagattgcttcctttattttgttacgtctgttcgcggaagattaaacttaatgaaaatctgtttgtattttctgcatattctctggcaaccttgccccatacttacttatttagcatagtcgagtgctctagtttctgtctctcaggcactcgtaactaaggaccaccattggccattggtagatgtttgattgacttaacaagagagggacaaattttcaatttgtgaaactccaaagcagaaagtattggtgcttgctaccttgtgaattcttccttagacatgcagagaaaatgtatgcaagagaccaaaaagatggctccaagctatgtcatgttacctgtaataaaatcttttcttctagattctttctatgttggcagataatctccccttgtagcttccactcacttattcttgcattcagagtcacaatgatcatcttacccatgtggtttttgagaaagaaagatcaattctttgtttgcagtaggtaat

SEQ ID NO: 139156 - DNA, 2291 bp, Homo sapiens
  Payload ID: 7267
  Gene Symbol: GIMAP5
  Gene Name: GTPase, IMAP family member 5
  Uniprot ID: Q96F15
  ENST ID: ENST00000358647
  CDS Start-End: 368-1291
atgacaggaagtgacccgttaaggaagcagcacatcgctgcattcggctggttttcagggtcttgttcccaatcagtttccagccaacaccagggtgtcctagtccgcagaggtgtgggggacacactccataatctctacttttctttttgtgcagctgagtcatggagctttcagccccagcacatggctcctccttaactgcgtctgctcaacctccctcagccctgtgaacagcatccccgcacacagacgcagagcaggactctctctgctgccacttcaccttcctgagagaggaccagcggccagagcctcagtgactgccaccctggaggacagggcacaacaaccgtttctggagagaatgggaggattccagaggggcaaatatggaactatggctgaaggtagatcagaagataacttgtctgcaacaccaccggcattgaggattatcctagtgggcaaaacaggctgcgggaaaagtgccacagggaacagcatccttggccagcccgtgtttgagtccaagctgagggcccagtcagtgaccaggacgtgccaggtgaaaacaggaacatggaacgggaggaaagtcctggtggttgacacgccctccatctttgagtcacaggccgatacccaagagctgtacaagaacatcggggactgctacctgctctctgccccggggccccacgtcctgcttctggtgatccagctggggcgtttcactgctcaggacacagtggccatcaggaaggtgaaagaggtctttgggacaggggccatgagacatgtggtcatcctcttcacccacaaagaggacttagggggccaggccctggatgactatgtagcaaacacggacaactgcagcctgaaagacctggtgcgggagtgtgagagaaggtactgtgccttcaacaactggggctctgtggaggagcagaggcagcagcaggcagagctcctggctgtgattgagaggctggggagggagcgagagggctccttccacagcaatgacctcttcttggatgcccagctgctccaaagaactggagctggggcctgccaggaagactacaggcagtaccaggccaaagtggaatggcaggtggagaagcacaagcaagagctgagggagaacgagagtaactgggcatacaaggcgctcctcagagtcaaacacttgatgcttttgcattatgagatttttgtttttctattgttgtgcagcatactttttttcattatttttctgttcatctttcattacatttaaatctctggaccctggagcacttctaatgtatcaccccatggagtcattgttctaataatcaccaattcagactcagatcctcgtggtctatggagcatgctgcttgctgtctgtgcagctcccatttccccttcttcctgatagacttggagctgtgtgcctccactccaaggctgcctgcctgctgtaaacactattccactctgtctgccaacaactgcttcaggaatgggcctgagatcccatgcaggtccctgagaagtgagtaaaagtccgcagaggtggggatggaagatctctccttagatagaacctgtcttcctccctggcattgtggggtctgggcgtgacactgggactctcagcagctttgtgctgccaacctgagattgaaggcagtgcctcagagcagcacagagagttggggccccctgagccctgagccaccagccctgcagcctgccctatctccgcatttccagttgtattagccaatagatttcctacttatttaagctatttgagctccgggtctcttctacctgcattctaaaacattcaaagtaataaaaatttctccacattcctttttatcctttaaatctgttggaacttcccagtccacatgcttcctttgagcaagtggcatctagaataaaggaacagggttggcttttcttgttcctaaaattaggaagaacctcctgctcctactgaagtgcctgccacatagtggacattccctgaactctgagtaaagcaaaacactttcagatggatggattgcattgacgaatgggagtgggagagggtcaaggaaatggggtgccctgtacgcagggctttctctgtgctttcttctcagtttggccaggggcccaaaagaaacacagctcacatttcaatgctctgcaaggaatcactttggcaaatgttcacacatgagaaaggttaagcaaactctttctccttctccactgtaaaatgtccttggatcaac

SEQ ID NO: 139157 - DNA, 1835 bp, Homo sapiens
  Payload ID: 7267
  Gene Symbol: GIMAP5
  Gene Name: GTPase, IMAP family member 5
  ENST ID: ENST00000498181
  CDS Start-End: 329-1252
gaggaggagggagtgtgcgcaggcgccctagggtcttccccagcacacgttgggaagaaggggtctgcaagcatgcgcacaattgccagctcaggctaaggactgcaggaggttccagctgagtcatggagctttcagccccagcacatggctcctccttaactgcgtctgctcaacctccctcagccctgtgaacagcatccccgcacacagacgcagagcaggactctctctgctgccacttcaccttcctgagagaggaccagcggccagagcctcagtgactgccaccctggaggacagggcacaacaaccgtttctggagagaatgggaggattccagaggggcaaatatggaactatggctgaaggtagatcagaagataacttgtctgcaacaccaccggcattgaggattatcctagtgggcaaaacaggctgcgggaaaagtgccacagggaacagcatccttggccagcccgtgtttgagtccaagctgagggcccagtcagtgaccaggacgtgccaggtgaaaacaggaacatggaacgggaggaaagtcctggtggttgacacgccctccatctttgagtcacaggccgatacccaagagctgtacaagaacatcggggactgctacctgctctctgccccggggccccacgtcctgcttctggtgatccagctggggcgtttcactgctcaggacacagtggccatcaggaaggtgaaagaggtctttgggacaggggccatgagacatgtggtcatcctcttcacccacaaagaggacttagggggccaggccctggatgactatgtagcaaacacggacaactgcagcctgaaagacctggtgcgggagtgtgagagaaggtactgtgccttcaacaactggggctctgtggaggagcagaggcagcagcaggcagagctcctggctgtgattgagaggctggggagggagcgagagggctccttccacagcaatgacctcttcttggatgcccagctgctccaaagaactggagctggggcctgccaggaagactacaggcagtaccaggccaaagtggaatggcaggtggagaagcacaagcaagagctgagggagaacgagagtaactgggcatacaaggcgctcctcagagtcaaacacttgatgcttttgcattatgagatttttgtttttctattgttgtgcagcatactttttttcattatttttctgttcatctttcattacatttaaatctctggaccctggagcacttctaatgtatcaccccatggagtcattgttctaataatcaccaattcagactcagatcctcgtggtctatggagcatgctgcttgctgtctgtgcagctcccatttccccttcttcctgatagacttggagctgtgtgcctccactccaaggctgcctgcctgctgtaaacactattccactctgtctgccaacaactgcttcaggaatgggcctgagatcccatgcaggtccctgagaagtgagtaaaagtccgcagaggtggggatggaagatctctccttagatagaacctgtcttcctccctggcattgtggggtctgggcgtgacactgggactctcagcagctttgtgctgccaacctgagattgaaggcagtgcctcagagcagcacagagagttggggccccctgagccctgagccaccagccctgcagcctgccctatctccgcatttccagttgtattagccaatagatttcctacttatttaagctatttgagctccgggtctcttctacctgcattctaaaacattcaaagtaataaaaatttctccaca

SEQ ID NO: 139158 - DNA, 3440 bp, Homo sapiens
  Payload ID: 7268
  Gene Symbol: GIMAP6
  Gene Name: GTPase, IMAP family member 6
  Uniprot ID: Q6P9H5
  ENST ID: ENST00000328902
  CDS Start-End: 218-1096
acttcctgttcctccatctccagcggacactgctctttcaagggcaggtctccagcccagctctctgaaaacattttgctgaaaatataagcaaacatcggccttgtcctccttgtgttcatacactgtggaagcttttctctgcctcctccgtgagagtgcgtggccgggagaccagaaacgtggtcctttctcttgcctgtgagctggtgcagagatggaggaagaagaatatgaacaaattccccaggagaatcccccagaagagctgtcccaggatcctgtgctggagctgtcaggaggtctaagggagaaagaacagaagaccccaaggagactgaggctcattctcatggggaaaacagggagtgggaagagtgcaacaggaaacagcatcctcggcagggacgtcttcgagtctaaactcagcaccagacccgtgaccaagacctcccagagacggagccgagagtgggctgggaaggagcttgaggtgattgacacacccaacattctgtccccccaggtctcgccagaggtggcagacgctatctgccaagccatcgtcttatccgccccagggccccacgccgtgctcctggtgacacaactgggccggttcacggatgaggatcagcaggtggtcaggcgcctgcaggaggtctttggagtgggggttctgggtcacaccatcctggtgttcacccggaaggaagacctggctggcggctccctggaagactatgtgcgagagaccaacaaccaggcccttgcctggctggatgtgacccttgcacggcgccattgcggcttcaacaacagggcacagggggaggagcaggaggcccaactgcgagagctcatggagaaagttgaagccattatgtgggaaaacgaaggagattattacagcaacaaggcttaccaatatacccagcaaaactttcggctgaaagaactacaggaaaggcaagtaagccagggccaaggctctgaggacgtgcctggtgaggagtcttggctggaaggactgtcccagatccagaaggaatctgaggaagcccacagatgcctgctggggaaggctgacctttgagcctgtgctggacttgagccaaggacaccatcagcctttgcacccccctgtgtccagccctctgtttctctttccatcccatggagtgcttcccagtctccaggtcatgacgtctggtgtaggaagaggggcatggggcttgaggacagggtccagcatgcccagatcacattccagttccttcattccttcttccagaacatctgggtcctccctcctctgtgccccaacagcacgctgtcttcctattggaccttctatctcattgcattgcctttcatgagttacttgtctatactctgatagaaccaaagtttcttgagggcaggcctgtatcttttacttctgtgtaacttccacagcttttgactgcattggagtcatgcagtcacgtttggtgcggcaactccatgcaagctgttgaccagatgacttctcatctctccccacaccatgatggtttaaggtgcctgttgtgtctggtggctggaacatggcagtggtgctgagacatggggagggttggagactgggtggggagggttggagactgggctgggaggagagcaagcaggaacagggatggaggcaggaggagcagcccttttattcactcttgagctgtaacaaacaagccccgttggaacttcctagtgggaatgatgggagaagtttggggcagggtatccaagaagtcagactgtggtcaagtaggtggtcccttgccctggctacagaacatggaagcccctagggatgcaagtggacttgggcagaggaggtcacaccaccccaccaaggtagacttagattagagatgacttgcatctgttacttcccctttttccatgggtttcatggcccctcatgatatttgccttctgctcctagaaggcacagactactttcaacctgcctcgcccttcactgccacccctcccttctcccttgataatgggagcatgtggatggggtgtctgcgtgtgcaaacgggttccctagcaaagtatttgtgggggtccaatgcaaggaggcagggaagaaagggggcctgcaaaggaagcagtagagtgacttaaacatcttgcgaggcagcctgcctggtttatgggagaactctgaagcccatgatgttttcctggaaggctgttcctacagacggggtttataagtactgatactggacaggatgagaagggagtaggatgtcatcctgtctcaggcctcggataggaagctgcctgccagcaagaggagactgatgtgccccgggtgcaccccacctcctttgaggtccaagatgctcctggggagttgaccgacatttgggaagataataggaggcattggggaaactgctccccaatatattcctcttttcctttcttcaagctgcgtagcagggggcctttagctagtttctcccgagaggggcgggaagtacagctggtggagacagtgctgggagatgatcagaaatctcagggcacagcctcaggtctacctggacactcatccactgttggagatgctcaacagctagacacagatgctcacagccgacctgtggcctcttgctctgaagccatcccccatcttccctagacacagcagacatctgagaaagcttcagcatttctcttgctaacagattcagaaaagtgtctcaaagcagagcacagagttatttggtgtttgctgaagacagcctttgtgccacaatcacttattaaataagcgatcaatttcccattgaactgaacatgcaacatttatcatacattcagttctcattcacactccttaagatttggtcagaatttttatttctgttcatgtcttctacttttctactcctgtatgaataaaatattgatttgattacagtggctttgactataatgtgggagccaatttttgcctcagtcttcatttttatatttaccttgttattctcaggcatttttttcttctatgtgagagttaaaatcattctgtaatttccccccaaaatcatattggtattctagttggcaatgtcttacatttatgttaagtttgagggaattggtagttcaagtataagttaattaaggccattttatttctaagtgaacagacttgaaactccagagctactgaagtaaaagttagaatcatttgcattttcattcagataggagataattttgtaaattttgatgctattattttaactctattagcttaagtaatgtcataatagaaaacacaagcatttgaccaaatgagatccattcagcgactaactggcaaggcactcaaaacatgtcattcattaaatgttgtttttatttacctcaaa

SEQ ID NO: 139159 - DNA, 876 bp, Homo sapiens
  Payload ID: 7268
  Gene Symbol: GIMAP6
  Gene Name: GTPase, IMAP family member 6
  Uniprot ID: Q6P9H5
  ENST ID: ENST00000493969
  CDS Start-End: 179-367
aagggcaggtctccagcccagctctctgaaaacattttgctgaaaatataagcaaacatcggccttgtcctccttgtgttcatacactgtggaagcttttctctgcctcctccgtgagagtgcgtggccgggagaccagaaacgtggtcctttctcttgcctgtgagctggtgcagagatggaggaagaagaatatgaacaaattccccaggagaatcccccagaagagctgtcccaggatcctgtgctggagctgtcaggaggtctcgccagaggtggcagacgctatctgccaagccatcgtcttatccgccccagggccccacgccgtgctcctggtgacacaactgggccggttcacggatgaggatcagcaggtggtcaggcgcctgcaggaggtctttggagtgggggttctgggtcacaccatcctggtgttcacccggaaggaagacctggctggcggctccctggaagactatgtgcgagagaccaacaaccaggcccttgcctggctggatgtgacccttgcacggcgccattgcggcttcaacaacagggcacagggggaggagcaggaggcccaactgcgagagctcatggagaaagttgaagccattatgtgggaaaacgaaggagattattacagcaacaaggcttaccaatatacccagcaaaactttcggctgaaagaactacaggaaaggcaagtaagccagggccaaggctctgaggacgtgcctggtgaggagtcttggctggaaggactgtcccagatccagaaggaatctgaggaagcccacagatgcctgctggggaaggctgacctttgagcctgtgctggacttgagccaaggacaccatcagcctttgcac

SEQ ID NO: 139160 - DNA, 3910 bp, Homo sapiens
  Payload ID: 7268
  Gene Symbol: GIMAP6
  Gene Name: GTPase, IMAP family member 6
  ENST ID: ENST00000618759
  CDS Start-End: 481-1569
gagacaatgactgtttgccccaatactgaggcatagaagttccctggggaagaggtggggttcagaaaagagagatcagggaaagtcactcctcctgacacaaatctttctgaggcatctgcctctttttaagctctgagttctagttatcctggctcaggataaaaataatcccaccactggtatcctccctttttctacttccgaggctgcaaagtgcaacagcagactcttctgactcaggaaggccggtgctcctacccacttcctgttcctccatctccagcggacactgctctttcaagggcaggtctccagcccagctctctgaaaacattttgctgaaaatataagcaaacatcggccttgtcctccttgtgttcatacactgtggaagcttttctctgcctcctccgtgagagtgcgtggccgggagaccagaaacgtggtcctttctcttgcctgtgagctggtgcagagatggaggaagaagaatatgaacaaattccccaggagaatcccccagaagagctgtcccaggatcctgtgctggagctgtcaggaggctctgctcttgcactgggagagaacgttcagccccaccttcaaggatgtgggcccagaatggtggcccagcgctggtttcagggcagatgttggtcttttacaatctgcccctgcagtctgggggtacacccagaggctcctggtgatgacaagatggggtacatgggcccttaccccagttccctctgctttctttggatatttctaggtctaagggagaaagaacagaagaccccaaggagactgaggctcattctcatggggaaaacagggagtgggaagagtgcaacaggaaacagcatcctcggcagggacgtcttcgagtctaaactcagcaccagacccgtgaccaagacctcccagagacggagccgagagtgggctgggaaggagcttgaggtgattgacacacccaacattctgtccccccaggtctcgccagaggtggcagacgctatctgccaagccatcgtcttatccgccccagggccccacgccgtgctcctggtgacacaactgggccggttcacggatgaggatcagcaggtggtcaggcgcctgcaggaggtctttggagtgggggttctgggtcacaccatcctggtgttcacccggaaggaagacctggctggcggctccctggaagactatgtgcgagagaccaacaaccaggcccttgcctggctggatgtgacccttgcacggcgccattgcggcttcaacaacagggcacagggggaggagcaggaggcccaactgcgagagctcatggagaaagttgaagccattatgtgggaaaacgaaggagattattacagcaacaaggcttaccaatatacccagcaaaactttcggctgaaagaactacaggaaaggcaagtaagccagggccaaggctctgaggacgtgcctggtgaggagtcttggctggaaggactgtcccagatccagaaggaatctgaggaagcccacagatgcctgctggggaaggctgacctttgagcctgtgctggacttgagccaaggacaccatcagcctttgcacccccctgtgtccagccctctgtttctctttccatcccatggagtgcttcccagtctccaggtcatgacgtctggtgtaggaagaggggcatggggcttgaggacagggtccagcatgcccagatcacattccagttccttcattccttcttccagaacatctgggtcctccctcctctgtgccccaacagcacgctgtcttcctattggaccttctatctcattgcattgcctttcatgagttacttgtctatactctgatagaaccaaagtttcttgagggcaggcctgtatcttttacttctgtgtaacttccacagcttttgactgcattggagtcatgcagtcacgtttggtgcggcaactccatgcaagctgttgaccagatgacttctcatctctccccacaccatgatggtttaaggtgcctgttgtgtctggtggctggaacatggcagtggtgctgagacatggggagggttggagactgggtggggagggttggagactgggctgggaggagagcaagcaggaacagggatggaggcaggaggagcagcccttttattcactcttgagctgtaacaaacaagccccgttggaacttcctagtgggaatgatgggagaagtttggggcagggtatccaagaagtcagactgtggtcaagtaggtggtcccttgccctggctacagaacatggaagcccctagggatgcaagtggacttgggcagaggaggtcacaccaccccaccaaggtagacttagattagagatgacttgcatctgttacttcccctttttccatgggtttcatggcccctcatgatatttgccttctgctcctagaaggcacagactactttcaacctgcctcgcccttcactgccacccctcccttctcccttgataatgggagcatgtggatggggtgtctgcgtgtgcaaacgggttccctagcaaagtatttgtgggggtccaatgcaaggaggcagggaagaaagggggcctgcaaaggaagcagtagagtgacttaaacatcttgcgaggcagcctgcctggtttatgggagaactctgaagcccatgatgttttcctggaaggctgttcctacagacggggtttataagtactgatactggacaggatgagaagggagtaggatgtcatcctgtctcaggcctcggataggaagctgcctgccagcaagaggagactgatgtgccccgggtgcaccccacctcctttgaggtccaagatgctcctggggagttgaccgacatttgggaagataataggaggcattggggaaactgctccccaatatattcctcttttcctttcttcaagctgcgtagcagggggcctttagctagtttctcccgagaggggcgggaagtacagctggtggagacagtgctgggagatgatcagaaatctcagggcacagcctcaggtctacctggacactcatccactgttggagatgctcaacagctagacacagatgctcacagccgacctgtggcctcttgctctgaagccatcccccatcttccctagacacagcagacatctgagaaagcttcagcatttctcttgctaacagattcagaaaagtgtctcaaagcagagcacagagttatttggtgtttgctgaagacagcctttgtgccacaatcacttattaaataagcgatcaatttcccattgaactgaacatgcaacatttatcatacattcagttctcattcacactccttaagatttggtcagaatttttatttctgttcatgtcttctacttttctactcctgtatgaataaaatattgatttgattacagtggctttgactataatgtgggagccaatttttgcctcagtcttcatttttatatttaccttgttattctcaggcatttttttcttctatgtgagagttaaaatcattctgtaatttccccccaaaatcatattggtattctagttggcaatgtcttacatttatgttaagtttgagggaattggtagttcaagtataagttaattaaggccattttatttctaagtgaacagacttgaaactccagagctactgaagtaaaagttagaatcatttgcattttcattcagataggagataattttgtaaattttgatgctattattttaactctattagcttaagtaatgtcataatagaaaacacaagcatttgaccaaatgagatccattcagcgactaactggcaaggcactcaaaacatgtcattcattaaatgttgtttttatttacctc

SEQ ID NO: 139161 - DNA, 1256 bp, Homo sapiens
  Payload ID: 7269
  Gene Symbol: GIMAP7
  Gene Name: GTPase, IMAP family member 7
  Uniprot ID: Q8NHV1
  ENST ID: ENST00000313543
  CDS Start-End: 158-1060
ctgactgagaggttttggtggcggtacagacacttttaactcacagtaaaagcaaaagcaacagctcaagcagcctccttggagaaaacctgaaaattcaacttgttcaagagaaggtcttgtacgtgcctaagttctagagcctcctgacgtgagcatggctgagagtgaggaccgctccctgaggatcgttctggtagggaaaactggaagtgggaaaagtgcaacagcgaacaccatccttggagaggaaatctttgattctagaattgctgcccaagctgttaccaagaactgtcaaaaagcatcccgggaatggcaggggagagaccttcttgttgtagacactccagggctctttgacaccaaggagagcctggacaccacctgcaaggaaatcagccgctgcatcatctcctcctgcccagggccccatgctattgtcctagttctgctgctgggccgctacacagaggaggagcagaaaaccgttgcattgatcaaggctgtctttgggaagtcagccatgaagcacatggtcatcttgttcactcgcaaagaagagttggagggccagagcttccatgacttcatagcagatgcggatgtgggcctaaaaagcatcgtcaaggagtgcgggaaccgctgctgtgcctttagcaacagcaagaaaaccagtaaggcagagaaggaaagtcaagtgcaggagttggtggagctgatagagaaaatggtgcagtgcaacgaaggggcttacttttctgatgacatatacaaggacacagaggaaaggctgaaacaacgggaagaggttttgaggaaaatctacactgaccaattaaatgaagaaattaaactagtagaagaggataagcataaatcagaggaagaaaaggagaaagaaattaaattactaaaattaaaatatgatgaaaaaataaaaaatataagggaagaagctgagagaaatatatttaaagatgtttttaataggatttggaagatgctttcagaaatatggcataggtttttgtcgaaatgtaagttttattcttcctaatttactgtgatttgttaatggatgaattgtattttgcaaagatagttagagaaatacctccttccccttagctttattaaggtatcattgataaataaaaataaaatatgtttaatgtatataatgtgatttttaaatatatatatatatatacacacattgtgaaataatgaaataaaggtaattaacacatcta

SEQ ID NO: 139162 - DNA, 4184 bp, Homo sapiens
  Payload ID: 7270
  Gene Symbol: GIMAP8
  Gene Name: GTPase, IMAP family member 8
  Uniprot ID: Q8ND71
  ENST ID: ENST00000307271
  CDS Start-End: 575-2572
ggctttgctcagagcttgtagcggcgccacaatctctgtcctctcaggaacaggaactggcttgacgtccttttcctgccctatccaagcccctgttcttgcagcccttctgaagctcagcctggcaccggccccggcgccccagcccctggccaagcctctgctgtcatttctcctccctcctctcagtctgcagctgcgggacgggccgggctcctcagtttctgctgtgttgtgaccccacgaggcgctcagcacccagggaaggcgcgtgtgtccccgatgctggctcctccctgagccccgacggctctcgaggttctgagcctgtggcctgcacagggaacttcctctccgactgcatttatgcctctgtggatgtgaaggctatttctagaaatctcttcctttgcagaaacacccgaaaccctcctgccaggaagaccagggcctgggaagagggtcgctctccggccattctcccctcaccctcctcaccttcctcacatcctgtgccctgggggaccagcagctgcttccacccagaacaagcgggagcctgtgtcaggaaagcatgtcagagcagagctgccagatgtccgaactgcggctcctcctcctgggaaaatgccgctcgggaaaaagtgccacaggaaatgccattctgggcaaacatgtgttcaagtccaagttcagtgatcagacagtgatcaaaatgtgccagagagagagttgggtcctgagagaaaggaaggttgtggtaattgacacccctgaccttttctcctcaatagcttgtgctgaagacaagcaacgcaacatccaacactgcttggagctctctgctcccagcctccatgctctgctcttggtaattgccatcggccatttcacaagggaggatgaggaaacagccaagggcatccaacaagtgtttggagctgaagccaggaggcacatcattattgtcttcactcggaaggatgatttgggggatgacttgctgcaagatttcattgaaaaaaacaaacctctcaagcagttggttcaagactatgagggccgatactgcattttcaacaacaagaccaatagtaaggatgagcagatcacccaggtgttggagctccttcgcaaggttgagtctttggtgaatacgaacggaggaccctatcatgtgaacttcaaaactgaaggcagcaggtttcaagattgtgtgaatgaagctgcatctcaagagggagacaagccacagggcccaagggaaaggcagctgcagtccacaggacccgagcagaatccggggacatcagaactgacagtcctccttgtggggaaacgcggtgctggaaaaagtgcagcaggaaacagcattctggggaggcaggcctttcagaccggatttagtgagcagtcagtaacccagagcttcttgtctgagagcagaagctggagaaaaaagaaagtttcgatcattgatgctccggacatctcatctttaaagaacattgactcagaagttagaaaacacatctgtacaggcccccatgccttcctgctggtgacaccactgggcttttacactaagaatgatgaggcagtgctgagcaccatccaaaacaattttggagaaaaattctttgagtacatgatcatacttcttaccaggaaagaagatttaggggatcaggatctagatacgttcttaagaaacagcaataaagctctctatggtctcatccagaagtgtaaaaacagatatagtgccttcaactaccgggcaacaggagaagaagagcaaaggcaggcggacgagctcctggaaaaaattgagagcatggtgcatcagaatgggaacaagcattgtgttttcagagaaaaagaaaccctgaacattgtccttgtggggagaagcgggactgggaagagtgcgaccgggaactctatcctggggagcctcgtcttcacctctcggctccgggcccagccagtcaccaagaccagccagagtggcaggaggacatgggacggacaggaggtggtggttgtggacactccttccttcaaccagatgctggatgtcgaaaaggacccatcccggttagaagaggaggtcaagcgctgtttgtcctgctgtgaaaaaggggacacattttttgtcctggtgttccagctgggacgattcactgaagaggacaaaacagctgtggcgaaactggaggccatctttggagcagactttacgaaatacgcgattatgctgttcacccggaaggaagacctaggggcggggaatttggaagacttcatgaagaactcagataacaaagcccttcggcgcatttttaaaaagtgtgggcggcgagtttgtgcttttaacaacaaagaaacaggccaggcccaggaaacccaggtgaaagctcttttaacaaaggtcaatgatctgagaaaagaaagtgggtggtccgggtatccccatacacaggagaacgtcagcaaactaattaaaaatgtccaggaaatgtcccaagccgaaaaactccttaaaaatttaataggtattttacaataggtagccgaagtgcctggggtctcttcaattagagacaccctcaggttggggggaggggcggggcatggtacaacctgtgggaagggaagcgggttcatggctttgagggcctgagaggcaaatgcatcccgccttgtgatgtatcagctatttgtagataaataaattgcaggtgggggcgaatagtagggtattataaaggagaaagaagatacaaggtggggaaatctggaaaaagatttcagacattaggctgataataagtggtagaatcaagtcacaagaatcacctcacttgtgtaggtaggttggaatcaggatagacactgtgatcaaggctgaggccacctgggatgagaatatagatagtcgtacaacaacccaggggatccagatacatgagaccagggcagcgttcagcacactcctgggcatggcggaagcaggaagcagactccagagggcctccctgttgtccagggccgttggctccctgagctctcctgtctcctttgggatgcgacttagggctagagtgttcttttcttcacacgttagccattccttacggctcttcacgttccacgcctagatgtgaagtgggacatagtcttccattgctggctgtccctgaggaaacagacatgagtcttggaggttctgaatgattttattgctaattatcacagtgacatagactagaacagaaattagaagcatagtaagattgccaaaatcagagaatcttgcaaagttctgtaattctaagtgttgttctagatttcctctagagaaggttattagaatctccattgcgtttctctttctccttctctttcccttgaggttaggaaacaggttaaaactcagagaactccaataataatggtttaaaaacatcaggggcttcctgtatctcctgtcaggaagccgaggaataagcaggctggggctggtgggcgtcaacatcccagttttgttctatctttctgtcccacctgcactgggatgtggcttctacactcgaatttgcttcttggtttcaagacagtggtgttctttccatagctgagcagattattttgagaggtgggtgatatgtgagagagaaatctggaaccttcttctgggtagatacaggataagatagatacagggtaaaatgttgagcactttgtacatgctttgagagcataatctttgtcatctgtttttttcccctagacaatatcaggttaccgtcaacattaatccatttaaaaggacatggactgttgccattaatacttttggattccatataacccttaacacaataacttctagaaaatgtgtgtgccgtagacacaaagaagggaacaatagacaccagggtatacttgagggtggagggtggcaggagggtgaagattgaaaagctgcctattgcgtgttatgctggtttcctgggtgacaaaattacctgtacaccacacccctgtgacacacaacttactcatgtaacaaacctgtgcatgtaccccttgaacctgaaataaaaattggaaagtaaaaaaaagtgtgtaaatatatttagttgaatcaaataataaagatgaatcattatgaattc

SEQ ID NO: 139163 - DNA, 7531 bp, Homo sapiens
  Payload ID: 7271
  Gene Symbol: GTPBP10
  Gene Name: GTP-binding protein 10 (putative)
  Uniprot ID: A4D1E9
  ENST ID: ENST00000222511
  CDS Start-End: 67-1230
aaaaaggccgcgctgtactgcggcttgtgccgcttccgcaagaaggtttcctggcctgttgcagccatggtgcattgcagttgcgtgttgttcagaaagtatggaaatttcatcgataagctaagactcttcaccaggggaggatccggtggaatgggttatcctcgtttaggtggagaaggtggaaaaggtggtgatgtctgggttgtagcccagaacagaatgactttaaaacaacttaaagacaggtatcctcggaaacggtttgtggctggagtaggagcaaacagcaaaattagtgcactgaaaggctccaaaggaaaagactgtgaaatccctgtgcctgtgggtatttcagtaactgatgaaaatggtaaaattataggagaactcaataaagaaaatgacagaattttggtagctcaaggaggtcttggtggtaaattacttacaaatttcttaccattgaaaggccagaaacgaataattcaccttgatctaaaacttatagctgatgtaggcctagtaggattcccaaatgctggaaaatcctctttgctaagttgtgtttctcatgcaaaacctgcaattgcagattacgcatttacaacattaaagcctgaacttggaaagataatgtacagtgatttcaaacagatatcagtagctgatcttccgggtttaatagaaggagcacatatgaacaaaggaatgggccacaaattcctcaagcatatagaaagaactagacaactactttttgttgttgatatttctggatttcagctttcttctcacactcaatacaggacagcttttgaaaccataatactgcttacaaaagagttggaattgtacaaagaggaacttcagacaaaacctgcactcttggcagttaataaaatggacttgccagatgcccaagataagttccatgaattgatgagccagctccagaatcctaaagattttctgcatttatttgaaaaaaacatgattccagagaggactgtagagttccaacatatcatccccatatctgcagttactggagaaggaatcgaagaattaaagaattgtataagaaagtcactggatgaacaggccaaccaggaaaatgatgcacttcataagaaacagttgcttaatttgtggatttctgatacaatgtcttctactgagccaccatcaaagcatgctgttactacttccaaaatggatataatttaaatatattaaaaatggtattgatggaacagtatttaatgcttaaaaacaaggaaatcctttcatctgtgacaacctggaggacatgttaagtaaaataagccaggcttagaaagacaaatgctgcataatctcactgtggaatcttaagttgaactcatagaaggagagaatagaatggtggttatcaagggctggtggggcagtggaggattgaggagatattggtcaaaatttacaaaatttcagttagacaaggcaactgagttcaagagatctgttgtacagcttggtgactgtaattaacaacaatgtattttgaaagtcactgagtaaattttaagtggtttttccaaaaaagcacataaggtaatgcacgttaattagctatattgagccattccacaatgtatagatatttcaaaacatgttacacatgataaatccagtttttctacgtcattttttaaaattatatttaatttttttattttgaaagttttttcacagatcttttttttagtattattaccttctgatatatgtgtcattattgaagaaccataccttttaaagttattattttgtaattaagtatgtcaacagtaaaaaataaccagtggccaggcatggtggctcatgcctgtaatcccagcacttttcggaggccgaggagggcagatcacttgaggtcaggagttcaagaccagcctggccaacatggcgaaaccccgtctctactaaaaatataaaaaattagccaggcatagtggcgcatgcctgttgtagccccagctactcaagaggctgaggcaggagaattgcttgaacgcgggaggtggaggatacaatgaacccgaggtcgcgccactgcacttcagcctgggtgacagagctagactccatctcaaaaaaaaaaaagagctaaaaaattacattttacaagtttatggccagcccacctgtaataacattctctgatattcctttacttaggatgtccctattgagatcattttttaaatttatgtggaaggattctctagattattattagaatgagcaattcagttttgtttgtttttgagcctgtcttgtacctggttgcactaaatatataatagttatcttttgtggagaccttaaaaccctaaatttgaatacatgttcaatgatagtaaagatatgacagaaactagaagatagctgtttatgatttgagcttttggaaaattttcgtttcttgaatgtaatagtattttttcctgaattggaggagactgatctatattgtttcatttttcttttgtcctagtctatttcactttcttttgtcataatctatttaatttcccactttcttattttagtaaagagagaataaatagcaagtgcaggccaggcatggtggtgcaggccagacatagcggtacatgcctgtaatcctagcactttgggatgccaaggcgggaggattgcttgagcccaggagttcatgcctgagcaacatagcaagaccctggctctctataaaacagaaaacgcaaactttaatattatcaacaatcaatatattataagagattgcaatttctaagtttctacctgagtgtttcacaaatacaaactggacattttccctttaaatgagttttattataaaatgtacatattgattgtaaaaacaaaaaattcaaatagtacaaaagcatataagtaactaataaaagctccctttctgcattaggcccctcagttcttcccagggaaaatgattaatagtttacattcttgcagaaattttttatgtataaatttttacccaaatgaattcattatataaattttttccaacttagtgtttttttacataatagtagcaagttaaaaaattgtacttcaggccaggcacggtgggtcacgcctgttaatctcagcactttgggaggctgaggcaggaagaccacttgaggtcaggagttcaagaccagcctggccaacatggtgaaaacccatctctactaaaatacaaaaatcagctgggcatggtggcgcatgtctgtaatcccagctactcgggaggctgaggcaggagaatcgcttgaacccgggaggcggaggttgcagtgagctgagattgcgccattgcactccagcctggaggacaagagggagacttcctctcaaaaaacaaaatattgtacttcaaaaaattattcttcaatgctatttttaaattactagaaattattttggaatttaatgttgcatacagcctgagatatggctgttcaccctttggtaaagtattaaagaaaaataatgcattgttctcagcttaaatttttttctgatttgacaacatgagtgatgttttcccagtattatttcaattatatttgttttattttctgttcctcactcctacctctcattccagtccccaaactggcttttcttttatttcttttttcttcattgctgatgtatttattgagcaatgtcctgtatcaggcactgtccaaggtgctgtatgtgccatgttgaagagaacagacaggacctactgtccttgtatatcttgcctttgataacagaaactgcaggggattggaatagcctctttacaagaaaagaataagagtgaggaaaagcgtttggaatttatagtgatcacagtgaccaggttttgtattgggtatgttttacatttgtaacttcagtgctatttttttttaagctccattgttttctaaatgtaaacaagtatcaatgtaaggacagtttcatcaggtgaatatcagaagtactgacaccataatctcattttgcactgtggcaaagggtagtagatgtgtgttcaggattatttgctctgtcagtagtgcccagggtgccactccatgactaaccgaaacattttattatgtgactcactaagatgttcaattcattagtattttctggttactcaaagtgtactctatgtacctttttttgacctttgatttttattctgatggagaagatcagattccttttttatcttataaaaaataattttgaaacaaagacttattttgaagtaagtcttttaacattatctcagatgcattttattttgtccttaagtaagacttttcatttttacctttcaaaatgcaattttcaaaatatatgcttttttgaaacacttattatgttactgaataaccagagtattaaattcaatgtacagcaaatttttacaaagtcccagtagttcttgcagagctttctataatatcagatttatttaccatcatgaaatatgtttatacagtattaagtatattgtactatgaagttggacctgcacactgaaaaattccaaaatacctattatgttgtgctttttgtgatatatattcatattattatttgtcataacaaggtgaacttttttaaaatggtaaacatgtattagttacataatcaggaaaaaagtcatcttttataatgagaaaaattaggtcaaggatatttcaggttttatccaattagatttcttgtaaagttatgtgttttcttttatctcagtgcttatttgctttgcaaggatgaaggttagagattcctttcagtagttaatgaaagctacagacttgtcttgccgaaaaatgtacataaacacataaactattttccaagcagtttcacagtgtttgcaaagttcagattgaaaacccagttttacaaatcccatctacaaatttgcattgtcattaagatatattaaaaataatttttcaaagcaacagcacagatgcactttaaaactgtagcttaaaaataaaaattagtaatataacttgtgtaaacctacacaaaagataaaagatatcttattgcaaaaatagggcaacattttgttttaaagaccaaatagtgaattgaatttaatgcatatctttaaatccttaatagtatctcaaatctggtttaaatctgtctctccttaacggaatagaaagtgaaacaaatccagaaatcttgttcgagtacatggtctgtgctagtaatcatatctaaagtggtaatgttaccatatgctgggtactgggctgagtaaatcacatattttaacttatttaaacactgcactgtattgcctgctagcgatgtcatttttttaaagttggatggtgaatacatgagttgttttttaaactcttttgggagcctaaaaaatttgaatttttttttttccccccccagacggagtctcgctctcttgccaggctggagtgcagtgacattatcttggctcactgcagcctctgattccctggttcaagcaattctcctgcctcagcctcccgagtagctgggattacaggcatccaccaccacgtccagctaatttttgtatttttagtagagacggggtttcaccatgttggccaggatgggaaaattttttaaaagacatttattaaaaaaaaatgtctatgccttatcaaagtttataactcaagaattaatgagataaacagtggacaaaaagtgttggcagataacatgcataattttaattaaaagttaagcagtgaaaaataaacatctttttttcttaaagagatatttcatatctgttctatttgtttagttttatttattctttttagagacagggtctctctgtggagtgcagtggcatgattatagccctctgcggcctcaatcttcagggcttaagttatcctcctgcctcatcctcccaagtagctaggactacaagtgtgtgccaccatacctggctaatttttaaaaactattttgtagagacagggtcttactatgttgcccagagtggtcttgaactcccatcctcatggaatcctcccacttcagtctctgaaagtgctaggattataggcatgagccatttatgcccagccagttttcttttttctaattgaagcttggcaagcagagggaaatgtattagggaaatagctttagttttgagtgggtgtcagtagccagctgaagaaaaagcaaaatgaaataggtagtagaaatgagaaagggagagagggaagaagaaaaaaatggatgttggaaagttgttgcatgtctctctggatagctcagaagtatcagttgtggttattgcctcacttggcttttgtaagcatgaaaaagccagggacaatttcaactaccatttctgaccatcatcaaccacaaattttaggcaatttgttagaattttttttaaatgttcttaatagttgttgggtacctgggagatttcagagaaagtaatcacctttgtatatattattaatgtgtttataatagaaattaaattctttgggatgtacaggtaagataagctatgtgaagcatagctgttatccaagtcgtgtgcctttgaaatacttggaatttgaagaacaggacatgcagcttatgttataattaatttgcgagcaatatatggcatgatagtattttcttatctaaattctgagtgcattgaaagtttaaagcaaaggacaaaagcttcctttgttcatggcccatattccagtatatttttctgaaactgccaatattttctgatcggtactttcatttttctagttggttaccaaatactgttattggtattatttctatataaaaggctttaagaagactatagtataattttcttaagaaaaaagacatgattataagctaaaatatgccttcggttttgtgtgctacaaattgagggagattgagaatattttaaatcaagggcagacattgagtaaaagcttatgactttggatggatttgaaacatgattaaatgacagagtaaataaaagcccctagtcaagtgaattctaatgggggaaataagaggactatataaaaattgaacctctgttttgaaaacaaatctttccaggaagtggtaccactctggggtcaagagaaattgtaagaacaataaaatgagcacacatgaccttcctttcctataaaaatatgaagcagaaaactcccccatgatttcctcatgttgcttagaatagtgtgtatttcagaacttttccatttaatatttttggaccacagttgactgaaactgaggatgggaggaagggatgcttaaaaccttggatagtaccaaaccctatatatattatgtttttttctatatatacacagctatgataaagttcataaattaggcacagtaagagattaaaaatattaaattgggccaattaatatattgtaataaaagctatgttaatgtggtc

SEQ ID NO: 139164 - DNA, 1740 bp, Homo sapiens
  Payload ID: 7271
  Gene Symbol: GTPBP10
  Gene Name: GTP-binding protein 10 (putative)
  Uniprot ID: A4D1E9
  ENST ID: ENST00000257659
  CDS Start-End: 78-1004
ggggatgacgtaaaaaggccgcgctgtactgcggcttgtgccgcttccgcaagaaggtttcctggcctgttgcagccatggtgcattgcagttgcgtgttgttcagaaagtatggaaatttcatcgataagctaagactcttcaccaggggaggatccggtggaatgggttatcctcgtttaggtggagaaggtggaaaaggtggtgatgtctgggttgtagcccagaacagaatgactttaaaacaacttaaagacaggtatcctcggaaacggtttgtggctggagtaggagcaaacagcaaattcccaaatgctggaaaatcctctttgctaagttgtgtttctcatgcaaaacctgcaattgcagattacgcatttacaacattaaagcctgaacttggaaagataatgtacagtgatttcaaacagatatcagtagctgatcttccgggtttaatagaaggagcacatatgaacaaaggaatgggccacaaattcctcaagcatatagaaagaactagacaactactttttgttgttgatatttctggatttcagctttcttctcacactcaatacaggacagcttttgaaaccataatactgcttacaaaagagttggaattgtacaaagaggaacttcagacaaaacctgcactcttggcagttaataaaatggacttgccagatgcccaagataagttccatgaattgatgagccagctccagaatcctaaagattttctgcatttatttgaaaaaaacatgattccagagaggactgtagagttccaacatatcatccccatatctgcagttactggagaaggaatcgaagaattaaagaattgtataagaaagtcactggatgaacaggccaaccaggaaaatgatgcacttcataagaaacagttgcttaatttgtggatttctgatacaatgtcttctactgagccaccatcaaagcatgctgttactacttccaaaatggatataatttaaatatattaaaaatggtattgatggaacagtatttaatgcttaaaaacaaggaaatcctttcatctgtgacaacctggaggacatgttaagtaaaataagccaggcttagaaagacaaatgctgcataatctcactgtggaatcttaagttgaactcatagaaggagagaatagaatggtggttatcaagggctggtggggcagtggaggattgaggagatattggtcaaaatttacaaaatttcagttagacaaggcaactgagttcaagagatctgttgtacagcttggtgactgtaattaacaacaatgtattttgaaagtcactgagtaaattttaagtggtttttccaaaaaagcacataaggtaatgcacgttaattagctatattgagccattccacaatgtatagatatttcaaaacatgttacacatgataaatccagtttttctacgtcattttttaaaattatatttaatttttttattttgaaagttttttcacagatcttttttttagtattattaccttctgatatatgtgtcattattgaagaaccataccttttaaagttattattttgtaattaagtatgtcaacagtaaaaaataaccagtggccaggcatggtggctcatgcctgtaatcccagcacttttcggaggccgaggagggcagatcacttgaggtcaggagttcaagaccagcctggccaacatggcgaaaccccgtctct

SEQ ID NO: 139165 - DNA, 6913 bp, Homo sapiens
  Payload ID: 7271
  Gene Symbol: GTPBP10
  Gene Name: GTP-binding protein 10 (putative)
  Uniprot ID: A4D1E9
  ENST ID: ENST00000380058
  CDS Start-End: 36-386
gcttccgcaagaaggtttcctggcctgttgcagccatggtgcattgcagttgcgtgttgttcagaaagtatggaaatttcatcgataagctaagactcttcaccaggggaggatccggtggaatgggttatcctcgtttaggtggagaaggtggaaaaggtggtgatgtctgggttgtagcccagaacagaatgactttaaaacaacttaaagacaggtatcctcggaaacggtttgtggctggagtaggagcaaacagcaaaattagtgcactgaaaggctccaaaggaaaagactgtgaaatccctgtgcctgtgggtatttcagtaactgatgaaaatggtaaaattatagattcccaaatgctggaaaatcctctttgctaagttgtgtttctcatgcaaaacctgcaattgcagattacgcatttacaacattaaagcctgaacttggaaagataatgtacagtgatttcaaacagatatcagtagctgatcttccgggtttaatagaaggagcacatatgaacaaaggaatgggccacaaattcctcaagcatatagaaagaactagacaactactttttgttgttgatatttctggatttcagctttcttctcacactcaatacaggacagcttttgaaaccataatactgcttacaaaagagttggaattgtacaaagaggaacttcagacaaaacctgcactcttggcagttaataaaatggacttgccagatgcccaagataagttccatgaattgatgagccagctccagaatcctaaagattttctgcatttatttgaaaaaaacatgattccagagaggactgtagagttccaacatatcatccccatatctgcagttactggagaaggaatcgaagaattaaagaattgtataagaaagtcactggatgaacaggccaaccaggaaaatgatgcacttcataagaaacagttgcttaatttgtggatttctgatacaatgtcttctactgagccaccatcaaagcatgctgttactacttccaaaatggatataatttaaatatattaaaaatggtattgatggaacagtatttaatgcttaaaaacaaggaaatcctttcatctgtgacaacctggaggacatgttaagtaaaataagccaggcttagaaagacaaatgctgcataatctcactgtggaatcttaagttgaactcatagaaggagagaatagaatggtggttatcaagggctggtggggcagtggaggattgaggagatattggtcaaaatttacaaaatttcagttagacaaggcaactgagttcaagagatctgttgtacagcttggtgactgtaattaacaacaatgtattttgaaagtcactgagtaaattttaagtggtttttccaaaaaagcacataaggtaatgcacgttaattagctatattgagccattccacaatgtatagatatttcaaaacatgttacacatgataaatccagtttttctacgtcattttttaaaattatatttaatttttttattttgaaagttttttcacagatcttttttttagtattattaccttctgatatatgtgtcattattgaagaaccataccttttaaagttattattttgtaattaagtatgtcaacagtaaaaaataaccagtggccaggcatggtggctcatgcctgtaatcccagcacttttcggaggccgaggagggcagatcacttgaggtcaggagttcaagaccagcctggccaacatggcgaaaccccgtctctactaaaaatataaaaaattagccaggcatagtggcgcatgcctgttgtagccccagctactcaagaggctgaggcaggagaattgcttgaacgcgggaggtggaggatacaatgaacccgaggtcgcgccactgcacttcagcctgggtgacagagctagactccatctcaaaaaaaaaaaagagctaaaaaattacattttacaagtttatggccagcccacctgtaataacattctctgatattcctttacttaggatgtccctattgagatcattttttaaatttatgtggaaggattctctagattattattagaatgagcaattcagttttgtttgtttttgagcctgtcttgtacctggttgcactaaatatataatagttatcttttgtggagaccttaaaaccctaaatttgaatacatgttcaatgatagtaaagatatgacagaaactagaagatagctgtttatgatttgagcttttggaaaattttcgtttcttgaatgtaatagtattttttcctgaattggaggagactgatctatattgtttcatttttcttttgtcctagtctatttcactttcttttgtcataatctatttaatttcccactttcttattttagtaaagagagaataaatagcaagtgcaggccaggcatggtggtgcaggccagacatagcggtacatgcctgtaatcctagcactttgggatgccaaggcgggaggattgcttgagcccaggagttcatgcctgagcaacatagcaagaccctggctctctataaaacagaaaacgcaaactttaatattatcaacaatcaatatattataagagattgcaatttctaagtttctacctgagtgtttcacaaatacaaactggacattttccctttaaatgagttttattataaaatgtacatattgattgtaaaaacaaaaaattcaaatagtacaaaagcatataagtaactaataaaagctccctttctgcattaggcccctcagttcttcccagggaaaatgattaatagtttacattcttgcagaaattttttatgtataaatttttacccaaatgaattcattatataaattttttccaacttagtgtttttttacataatagtagcaagttaaaaaattgtacttcaggccaggcacggtgggtcacgcctgttaatctcagcactttgggaggctgaggcaggaagaccacttgaggtcaggagttcaagaccagcctggccaacatggtgaaaacccatctctactaaaatacaaaaatcagctgggcatggtggcgcatgtctgtaatcccagctactcgggaggctgaggcaggagaatcgcttgaacccgggaggcggaggttgcagtgagctgagattgcgccattgcactccagcctggaggacaagagggagacttcctctcaaaaaacaaaatattgtacttcaaaaaattattcttcaatgctatttttaaattactagaaattattttggaatttaatgttgcatacagcctgagatatggctgttcaccctttggtaaagtattaaagaaaaataatgcattgttctcagcttaaatttttttctgatttgacaacatgagtgatgttttcccagtattatttcaattatatttgttttattttctgttcctcactcctacctctcattccagtccccaaactggcttttcttttatttcttttttcttcattgctgatgtatttattgagcaatgtcctgtatcaggcactgtccaaggtgctgtatgtgccatgttgaagagaacagacaggacctactgtccttgtatatcttgcctttgataacagaaactgcaggggattggaatagcctctttacaagaaaagaataagagtgaggaaaagcgtttggaatttatagtgatcacagtgaccaggttttgtattgggtatgttttacatttgtaacttcagtgctatttttttttaagctccattgttttctaaatgtaaacaagtatcaatgtaaggacagtttcatcaggtgaatatcagaagtactgacaccataatctcattttgcactgtggcaaagggtagtagatgtgtgttcaggattatttgctctgtcagtagtgcccagggtgccactccatgactaaccgaaacattttattatgtgactcactaagatgttcaattcattagtattttctggttactcaaagtgtactctatgtacctttttttgacctttgatttttattctgatggagaagatcagattccttttttatcttataaaaaataattttgaaacaaagacttattttgaagtaagtcttttaacattatctcagatgcattttattttgtccttaagtaagacttttcatttttacctttcaaaatgcaattttcaaaatatatgcttttttgaaacacttattatgttactgaataaccagagtattaaattcaatgtacagcaaatttttacaaagtcccagtagttcttgcagagctttctataatatcagatttatttaccatcatgaaatatgtttatacagtattaagtatattgtactatgaagttggacctgcacactgaaaaattccaaaatacctattatgttgtgctttttgtgatatatattcatattattatttgtcataacaaggtgaacttttttaaaatggtaaacatgtattagttacataatcaggaaaaaagtcatcttttataatgagaaaaattaggtcaaggatatttcaggttttatccaattagatttcttgtaaagttatgtgttttcttttatctcagtgcttatttgctttgcaaggatgaaggttagagattcctttcagtagttaatgaaagctacagacttgtcttgccgaaaaatgtacataaacacataaactattttccaagcagtttcacagtgtttgcaaagttcagattgaaaacccagttttacaaatcccatctacaaatttgcattgtcattaagatatattaaaaataatttttcaaagcaacagcacagatgcactttaaaactgtagcttaaaaataaaaattagtaatataacttgtgtaaacctacacaaaagataaaagatatcttattgcaaaaatagggcaacattttgttttaaagaccaaatagtgaattgaatttaatgcatatctttaaatccttaatagtatctcaaatctggtttaaatctgtctctccttaacggaatagaaagtgaaacaaatccagaaatcttgttcgagtacatggtctgtgctagtaatcatatctaaagtggtaatgttaccatatgctgggtactgggctgagtaaatcacatattttaacttatttaaacactgcactgtattgcctgctagcgatgtcatttttttaaagttggatggtgaatacatgagttgttttttaaactcttttgggagcctaaaaaatttgaatttttttttttccccccccagacggagtctcgctctcttgccaggctggagtgcagtgacattatcttggctcactgcagcctctgattccctggttcaagcaattctcctgcctcagcctcccgagtagctgggattacaggcatccaccaccacgtccagctaatttttgtatttttagtagagacggggtttcaccatgttggccaggatgggaaaattttttaaaagacatttattaaaaaaaaatgtctatgccttatcaaagtttataactcaagaattaatgagataaacagtggacaaaaagtgttggcagataacatgcataattttaattaaaagttaagcagtgaaaaataaacatctttttttcttaaagagatatttcatatctgttctatttgtttagttttatttattctttttagagacagggtctctctgtggagtgcagtggcatgattatagccctctgcggcctcaatcttcagggcttaagttatcctcctgcctcatcctcccaagtagctaggactacaagtgtgtgccaccatacctggctaatttttaaaaactattttgtagagacagggtcttactatgttgcccagagtggtcttgaactcccatcctcatggaatcctcccacttcagtctctgaaagtgctaggattataggcatgagccatttatgcccagccagttttcttttttctaattgaagcttggcaagcagagggaaatgtattagggaaatagctttagttttgagtgggtgtcagtagccagctgaagaaaaagcaaaatgaaataggtagtagaaatgagaaagggagagagggaagaagaaaaaaatggatgttggaaagttgttgcatgtctctctggatagctcagaagtatcagttgtggttattgcctcacttggcttttgtaagcatgaaaaagccagggacaatttcaactaccatttctgaccatcatcaaccacaaattttaggcaatttgttagaattttttttaaatgttcttaatagttgttgggtacctgggagatttcagagaaagtaatcacctttgtatatattattaatgtgtttataatagaaattaaattctttgggatgtacaggtaagataagctatgtgaagcatagctgttatccaagtcgtgtgcctttgaaatacttggaatttgaagaacaggacatgcagcttatgttataattaatttgcgagcaatatatggcatgatagtattttcttatctaaattctgagtgcattgaaagtttaaagcaaaggacaaaagcttcctttgttcatggcccatattccagtatatttttctgaaactgccaatattttctgatcggtactttcatttttctagttggttaccaaatactgttattggtattatttctatataaaaggctttaagaagactatagtataattttcttaagaaaaaagacatgattataagctaaaatatgccttcggttttgtgtgctacaaattgagggagattgagaatattttaaatcaagggcagacattgagtaaaagcttatgactttggatggatttgaaacatgattaaatgacagagtaaataaaa

SEQ ID NO: 139166 - DNA, 856 bp, Homo sapiens
  Payload ID: 7271
  Gene Symbol: GTPBP10
  Gene Name: GTP-binding protein 10 (putative)
  ENST ID: ENST00000450619
  CDS Start-End: 149-856
tccagggaaatcaagagatggagaaattggcccaccaaccactttggtggtaaaagaggagagtttcctttgtgattggcccgcgctcctaaatttgcccaagtaaaatctacatgagtgtttcccacgacttggaggtggattgcatatgaggacagtctcactctgtcacccagactggagtgcattggcatcatcatggcttactgcagcctcaacctcctgggctcagtatggaaatttcatcgataagctaagactcttcaccaggggaggatccggtggaatgggttatcctcgtttaggtggagaaggtggaaaaggtggtgatgtctgggttgtagcccagaacagaatgactttaaaacaacttaaagacaggtatcctcggaaacggtttgtggctggagtaggagcaaacagcaaaattagtgcactgaaaggctccaaaggaaaagactgtgaaatccctgtgcctgtgggtatttcagtaactgatgaaaatggtaaaattataggagaactcaataaagaaaatgacagaattttggtagctcaaggaggtcttggtggtaaattacttacaaatttcttaccattgaaaggccagaaacgaataattcaccttgatctaaaacttatagctgatgtaggcctagtaggattcccaaatgctggaaaatcctctttgctaagttgtgtttctcatgcaaaacctgcaattgcagattacgcatttacaacattaaagcctgaacttggaaagataatgtacagtgatttcaaacagatatcagtagctgatcttccgggtttaatagaaggagcacatatgaacaaaggaatgggccacaaa

SEQ ID NO: 139167 - DNA, 778 bp, Homo sapiens
  Payload ID: 7271
  Gene Symbol: GTPBP10
  Gene Name: GTP-binding protein 10 (putative)
  ENST ID: ENST00000426366
  CDS Start-End: 149-778
tccagggaaatcaagagatggagaaattggcccaccaaccactttggtggtaaaagaggagagtttcctttgtgattggcccgcgctcctaaatttgcccaagtaaaatctacatgagtgtttcccacgacttggaggtggattgcatatgaggtatggaaatttcatcgataagctaagactcttcaccaggggaggatccggtggaatgggttatcctcgtttaggtggagaaggtggaaaaggtggtgatgtctgggttgtagcccagaacagaatgactttaaaacaacttaaagacaggtatcctcggaaacggtttgtggctggagtaggagcaaacagcaaaattagtgcactgaaaggctccaaaggaaaagactgtgaaatccctgtgcctgtgggtatttcagtaactgatgaaaatggtaaaattataggagaactcaataaagaaaatgacagaattttggtagctcaaggaggtcttggtggtaaattacttacaaatttcttaccattgaaaggccagaaacgaataattcaccttgatctaaaacttatagctgatgtaggcctagtaggattcccaaatgctggaaaatcctctttgctaagttgtgtttctcatgcaaaacctgcaattgcagattacgcatttacaacattaaagcctgaacttggaaagataatgtacagtgatttcaaacagatatcagtagctgatcttccgggtttaatagaaggagcacatatgaacaaaggaatgggccacaaa

SEQ ID NO: 139168 - DNA, 636 bp, Homo sapiens
  Payload ID: 7271
  Gene Symbol: GTPBP10
  Gene Name: GTP-binding protein 10 (putative)
  ENST ID: ENST00000453512
  CDS Start-End: 149-472
tccagggaaatcaagagatggagaaattggcccaccaaccactttggtggtaaaagaggagagtttcctttgtgattggcccgcgctcctaaatttgcccaagtaaaatctacatgagtgtttcccacgacttggaggtggattgcatatgaggtatggaaatttcatcgataagctaagactcttcaccaggggaggatccggtggaatgggttatcctcgtttaggtggagaaggtggaaaaggtggtgatgtctgggttgtagcccagaacagaatgactttaaaacaacttaaagacaggtatcctcggaaacggtttgtggctggagtaggagcaaacagcaaaattagtgcactgaaaggctccaaaggaaaagactgtgaaatccctgtgcctgtgggtatttcagtaactgatgaaaatggtaaaattatagattcccaaatgctggaaaatcctctttgctaagttgtgtttctcatgcaaaacctgcaattgcagattacgcatttacaacattaaagcctgaacttggaaagataatgtacagtgatttcaaacagatatcagtagctgatcttccgggtttaatagaaggagcacatatgaacaaaggaatgggccacaaattc

SEQ ID NO: 139169 - DNA, 686 bp, Homo sapiens
  Payload ID: 7271
  Gene Symbol: GTPBP10
  Gene Name: GTP-binding protein 10 (putative)
  ENST ID: ENST00000421719
  CDS Start-End: 149-361
tccagggaaatcaagagatggagaaattggcccaccaaccactttggtggtaaaagaggagagtttcctttgtgattggcccgcgctcctaaatttgcccaagtaaaatctacatgagtgtttcccacgacttggaggtggattgcatatgaggtatggaaatttcatcgataagctaagactcttcaccaggggaggatccggtggaatgggttatcctcgtttaggtggagaaggtggaaaaggtggtgatgtctgggttgtagcccagaacagaatgactttaaaacaacttaaagacaggtatcctcggaaacggtttgtggctggagtaggagcaaacagcaagagaactcaataaagaaaatgacagaattttggtagctcaaggaggtcttggtggtaaattacttacaaatttcttaccattgaaaggccagaaacgaataattcaccttgatctaaaacttatagctgatgtaggcctagtaggattcccaaatgctggaaaatcctctttgctaagttgtgtttctcatgcaaaacctgcaattgcagattacgcatttacaacattaaagcctgaacttggaaagataatgtacagtgatttcaaacagatatcagtagctgatcttccgggtttaatagaaggagcacatatgaacaaaggaatgggccacaaa

SEQ ID NO: 139170 - DNA, 775 bp, Homo sapiens
  Payload ID: 7271
  Gene Symbol: GTPBP10
  Gene Name: GTP-binding protein 10 (putative)
  ENST ID: ENST00000417207
  CDS Start-End: 48-775
gcggcttgtgccgcttccgcaagaaggtttcctggcctgttgcagccatggtgcattgcagttgcgtgttgttcagaaagtatggaaatttcatcgataagctaagactcttcaccaggggaggatccggtggaatgggttatcctcgtttaggtggagaaggtggaaaaggtggtgatgtctgggttgtagcccagaacagaatgactttaaaacaacttaaagacaggtatcctcggaaacggtttgtggctggagtaggagcaaacagcaaaattagtgcactgaaaggctccaaaggaaaagactgtgaaatccctgtgcctgtgggtatttcagtaactgatgaaaatggtaaaattatagttacaacattaaagcctgaacttggaaagataatgtacagtgatttcaaacagatatcagtagctgatcttccgggtttaatagaaggagcacatatgaacaaaggaatgggccacaaattcctcaagcatatagaaagaactagacaactactttttgttgttgatatttctggatttcagctttcttctcacactcaatacaggacagcttttgaaaccataatactgcttacaaaagagttggaattgtacaaagaggaacttcagacaaaacctgcactcttggcagttaataaaatggacttgccagatgcccaagataagttccatgaattgatgagccagctccagaatcctaaagattttctgcatttatttgaaaaaaacatgattccagagaggactgt

SEQ ID NO: 139171 - DNA, 545 bp, Homo sapiens
  Payload ID: 7271
  Gene Symbol: GTPBP10
  Gene Name: GTP-binding protein 10 (putative)
  ENST ID: ENST00000439832
  CDS Start-End: 13-252
cctgttgcagccatggtgcattgcagttgcgtgttgttcagaaagtatggaaatttcatcgataagctaagactcttcaccaggggaggatccggtggaatgggttatcctcgtttaggtggagaaggtggaaaaggtggtgatgtctgggttgtagcccagaacagaatgactttaaaacaacttaaagacaggtatcctcggaaacggtttgtggctggagtaggagcaaacagcaagagaactcaataaagaaaatgacagaattttggtagctcaaggaggtcttggtggtaaattacttacaaatttcttaccattgaaaggccagaaacgaataattcaccttgatctaaaacttatagctgatgtaggcctagtaggttacaacattaaagcctgaacttggaaagataatgtacagtgatttcaaacagatatcagtagctgatcttccgggtttaatagaaggagcacatatgaacaaaggaatgggccacaaattcctcaagcatatagaaagaactagacaactactttttgtt

SEQ ID NO: 139172 - DNA, 679 bp, Homo sapiens
  Payload ID: 7272
  Gene Symbol: GTPBP8
  Gene Name: GTP-binding protein 8 (putative)
  Uniprot ID: Q8N3Z3
  ENST ID: ENST00000295864
  CDS Start-End: 14-379
ctgggaagggagaatggcggcgcccgggctgcggctgggagcgggaagactctttgaaatgcctgcggtgctagagcgactgagccgctataatagcacgtcccaagcttttgctgaggtgctgcggctgccgaagcagcagctgaggaagctgctgtacccgctgcaggaagtagagcggttcctcgccccctacgggaggcaagaccttcacctgcgtatctttgacccaagcccggaggacatagccagggcggacaacatcttcacggccactgaacggaaccgcatcgactacgtcagctccgccgtccgtatcgaccacgccccggaccttccgcggccagagcttgaagagaacatttttattagtggatagcgttgttggaattcaaaaaacagacaatattgccatagaaatgtgtgaagaatttgcattaccttatgtgattgtattaacaaaaattgacaaatcttccaagggacatcttttaaaacaagtgcttcagatccagaaatttgttaacatgaaaactcaaggatgttttcctcagttgtttcctgtaagtgctgtgaccttttctggaatccacctgttgagatgctttatagccagtgtaacaggaagtcttgactaatggttcccggtttagctgaagattcaaaaaaaaaaaaaaaa

SEQ ID NO: 139173 - DNA, 1787 bp, Homo sapiens
  Payload ID: 7272
  Gene Symbol: GTPBP8
  Gene Name: GTP-binding protein 8 (putative)
  Uniprot ID: Q8N3Z3
  ENST ID: ENST00000383677
  CDS Start-End: 16-771
ttctgggaagggagaatggcggcgcccgggctgcggctgggagcgggaagactctttgaaatgcctgcggtgctagagcgactgagccgctataatagcacgtcccaagcttttgctgaggtgctgcggctgccgaagcagcagctgaggaagctgctgtacccgctgcaggaagtagagcggttcctcgccccctacgggaggcaagaccttcacctgcgtatctttgacccaagcccggaggacatagccagggcggacaacatcttcacggccactgaacggaaccgcatcgactacgtcagctccgccgtccgtatcgaccacgccccggaccttccgcggccagagggacacacaaagaaaatgaattttttcaaagttggaaaacattttacagtggtggacatgccaggttatggctttagagcacctgaagattttgttgacatggtagagacctatctaaaagaacgaaggaacttgaagagaacatttttattagtggatagcgttgttggaattcaaaaaacagacaatattgccatagaaatgtgtgaagaatttgcattaccttatgtgattgtattaacaaaaattgacaaatcttccaagggacatcttttaaaacaagtgcttcagatccagaaatttgttaacatgaaaactcaaggatgttttcctcagttgtttcctgtaagtgctgtgaccttttctggaatccacctgttgagatgctttatagccagtgtaacaggaagtcttgactaatggttcccggtttagctgaagattcaaaaaaaaaaaaaaaagctttatgctaactggagttaaatacctagaagaatttcaacattgttttaaatgttgtgcatctgtaacttcaggaggatcacttgagctttaaaacctgtgccttctcgaaacaagaatttgtgcctgaggtgaaaaaagtttgtaagttattgaattatggtgttcattagaacagctactagctgattcccctattttaacaaactgacaagagcacatccataaaatgaaaacctgttacaactatgtacagaagggtttgacgttttattgggcttttgtcttttaaagaatatgtctactatgggtattttttttttaaatgttaaaatgggctaggtaaaagggggctgcttttctgttaagcatcgataggtaagttgatggataaaagttactatgtaagcctatttttttgagtccttatttgaatattgaaaacattcttgataaaatgtgttagtccatgttggaaacaaccgaaagaacagaattcaagttctagttctgatgtttattatatatgttggatcttgggcaacttacttgatttctcggaaattcatttgttactgtaaacgtgaaagctattaagattcaaatgaatggttttacagcaggtaacatgtgagaagacagctacatatttgtaaagccaaaccaacaaagaaatatagcaaaattcacaggtagatttattacaagaaatgtcctttcatgggggaagtaacattttcactagtgaaaaagcaaaaaacaaaaatagctttaagtgagaaaactaatttgtaaagggcaagagaaaaaagctgatgggacagtttagactgctacatttaagattcagaatggaaaaataaagcctttgaactaaagttaatagagaagatttttgtgaaggtgccactaacctattcatgtaagtggcttaggttttcaaagtgaagcttaatattaaaaggttatagctg

SEQ ID NO: 139174 - DNA, 1360 bp, Homo sapiens
  Payload ID: 7272
  Gene Symbol: GTPBP8
  Gene Name: GTP-binding protein 8 (putative)
  Uniprot ID: Q8N3Z3
  ENST ID: ENST00000383678
  CDS Start-End: 83-937
gcgtcgcggcagcgggaagtcacgcacgcgcaacccaggccacaggagtaaaatctctctgcccgtcttctgggaagggagaatggcggcgcccgggctgcggctgggagcgggaagactctttgaaatgcctgcggtgctagagcgactgagccgctataatagcacgtcccaagcttttgctgaggtgctgcggctgccgaagcagcagctgaggaagctgctgtacccgctgcaggaagtagagcggttcctcgccccctacgggaggcaagaccttcacctgcgtatctttgacccaagcccggaggacatagccagggcggacaacatcttcacggccactgaacggaaccgcatcgactacgtcagctccgccgtccgtatcgaccacgccccggaccttccgcggccagaggtgtgttttataggcagaagcaatgttggaaaatcatctctaatcaaggctttattttcactggcccctgaggttgaagtcagagtctccaaaaaaccaggacacacaaagaaaatgaattttttcaaagttggaaaacattttacagtggtggacatgccaggttatggctttagagcacctgaagattttgttgacatggtagagacctatctaaaagaacgaaggaacttgaagagaacatttttattagtggatagcgttgttggaattcaaaaaacagacaatattgccatagaaatgtgtgaagaatttgcattaccttatgtgattgtattaacaaaaattgacaaatcttccaagggacatcttttaaaacaagtgcttcagatccagaaatttgttaacatgaaaactcaaggatgttttcctcagttgtttcctgtaagtgctgtgaccttttctggaatccacctgttgagatgctttatagccagtgtaacaggaagtcttgactaatggttcccggtttagctgaagattcaaaaaaaaaaaaaaaagctttatgctaactggagttaaatacctagaagaatttcaacattgttttaaatgttgtgcatctgtaacttcaggaggatcacttgagctttaaaacctgtgccttctcgaaacaagaatttgtgcctgaggtgaaaaaagtttgtaagttattgaattatggtgttcattagaacagctactagctgattcccctattttaacaaactgacaagagcacatccataaaatgaaaacctgttacaactatgtacagaagggtttgacgttttattgggcttttgtcttttaaagaatatgtctactatgggtattttttttttaaatgttaaaatgggctaggtaaaagggggctgcttttctgttaagcatcgataggta

SEQ ID NO: 139175 - DNA, 686 bp, Homo sapiens
  Payload ID: 7272
  Gene Symbol: GTPBP8
  Gene Name: GTP-binding protein 8 (putative)
  ENST ID: ENST00000467752
  CDS Start-End: 139-660
tttgcggttgtattttctagctttatgttggcgcatatattattttaactcaataggcatatgtcgatgctccctgtacgtggggatacccgagaaacccattgttaagtacaaaatgcagtcaatacccataaacccatggtgtgttttataggcagaagcaatgttggaaaatcatctctaatcaaggctttattttcactggcccctgaggttgaagtcagagtctccaaaaaaccaggacacacaaagaaaatgaattttttcaaagttggaaaacattttacagtggtggacatgccaggttatggctttagagcacctgaagattttgttgacatggtagagacctatctaaaagaacgaaggaacttgaagagaacatttttattagtggatagcgttgttggaattcaaaaaacagacaatattgccatagaaatgtgtgaagaatttgcattaccttatgtgattgtattaacaaaaattgacaaatcttccaagggacatcttttaaaacaagtgcttcagatccagaaatttgttaacatgaaaactcaaggatgttttcctcagttgtttcctgtaagtgctgtgaccttttctggaatccacctgttgagatgctttatagccagtgtaacaggaagtcttgactaatggttcccggtttagctgaagattca

SEQ ID NO: 139176 - DNA, 715 bp, Homo sapiens
  Payload ID: 7272
  Gene Symbol: GTPBP8
  Gene Name: GTP-binding protein 8 (putative)
  ENST ID: ENST00000488781
  CDS Start-End: 37-456
cccgggctgcggctgggagcgggaagactctttgaaatgcctgcggtgctagagcgactgagccgctataatagcacgtcccaagcttttgctgaggtgctgcggctgccgaagcagcagctgaggaagctgctgtacccgctgcaggaagtagagcggttcctcgccccctacgggaggcaagaccttcacctgcgtatctttgacccaagcccggaggacatagccagggcggacaacatcttcacggccactgaacggaaccgcatcgactacgtcagctccgccgtccgtatcgaccacgccccggaccttccgcggccagaggtgtgttttataggcagaagcaatgttggaaaatcatctctaatcaaggctttattttcactggcccctgaggttgaagtcagagtctccaaaaaaccacttgaagagaacatttttattagtggatagcgttgttggaattcaaaaaacagacaatattgccatagaaatgtgtgaagaatttgcattaccttatgtgattgtattaacaaaaattgacaaatcttccaagggacatcttttaaaacaagtgcttcagatccagaaatttgttaacatgaaaactcaaggatgttttcctcagttgtttcctgtaagtgctgtgaccttttctggaatccacctgttgagatgctttatagccagtgtaacaggaagtcttgactaa

SEQ ID NO: 139177 - DNA, 1518 bp, Homo sapiens
  Payload ID: 7272
  Gene Symbol: GTPBP8
  Gene Name: GTP-binding protein 8 (putative)
  ENST ID: ENST00000473129
  CDS Start-End: 1089-1493
aaaaatcgttaagtcgacccactgtaagcagagactgcctgtatacagcttaaattattttggaatgaatatagaagacttcaaaatgctttaaaagcttttcaaacccaaattaagcattcaaaaaattaactctccttttttcttctatttaacttaagtagggaaaacatgccagacaaattagacagaatttagacagtgaagaataggaaacgaataatagtttcacaaatgagatggtccttatcaataagtaactttcgcctaatctaaatttcctatcgtgcaaaaataataatctctagatggcaataatgtggaaaaatttttataacaacgtttattagtgaaatttcatgagtgagcattcttgcatgtcctacaatttattgatattctgttctaagtctgctaaaaggcatctcaactctccatatgtatttacactaagtgcaccattgcccagagatatttcgtctaaatatatgtggaactatagtcaggattcaaagagtacctcaattatttaatgattttgagacagccattgcttttttatttaagcttctaaattactggacttttttgtaattcgtttttaaaattcagttttatctacatattagcattagatttgctctggcagagcatttaaaatttttgcaggactcagatcaattaattttgaagaactgaccagaattttccaggataggatccctggcccctgcccactaaatgtcccccaattgtcttgataaccaaaaatgcccttaaaatctccaaaatgtccctcaaggggcagtacggccgtcatttagaacaactgattggcattgtaccccctcccccaataccatgttcaaaagcagagccatgtgtattaatggttattatcgagaatattctgttgttttccacactacagaggagacaagcttaattggaacaagagaggtcaagggaaaagagtgtgttttataggcagaagcaatgttggaaaatcatctctaatcaaggctttattttcactggcccctgaggttgaagtcagagtctccaaaaaaccaggacacacaaagaaaatgaattttttcaaagttggaaaacattttacagtggtggacatgccaggttatggctttagagcacctgaagattttgttgacatggtagagacctatctaaaagaacgaaggaacttgaagagaacatttttattagtggatagcgttgttggaattcaaaaaacagacaatattgccatagaaatgtgtgaagaatttgcattaccttatgtgattgtattaacaaaaattgacaaatcttccaagggacatcttttaaaacaagtgcttcagatccagaaatttgttaacatgaaaactcaaggatgttttcctcagttgtttcctgtaagtgctgtgaccttttctggaatccacctgttgagatgctttatagccagtgtaacaggaagtcttgactaatggttcccggtttagctgaagattc

SEQ ID NO: 139178 - DNA, 1635 bp, Homo sapiens
  Payload ID: 7272
  Gene Symbol: GTPBP8
  Gene Name: GTP-binding protein 8 (putative)
  Uniprot ID: Q8N3Z3
  ENST ID: ENST00000485330
  CDS Start-End: 10-765
gaagggagaatggcggcgcccgggctgcggctgggagcgggaagactctttgaaatgcctgcggtgctagagcgactgagccgctataatagcacgtcccaagcttttgctgaggtgctgcggctgccgaagcagcagctgaggaagctgctgtacccgctgcaggaagtagagcggttcctcgccccctacgggaggcaagaccttcacctgcgtatctttgacccaagcccggaggacatagccagggcggacaacatcttcacggccactgaacggaaccgcatcgactacgtcagctccgccgtccgtatcgaccacgccccggaccttccgcggccagagggacacacaaagaaaatgaattttttcaaagttggaaaacattttacagtggtggacatgccaggttatggctttagagcacctgaagattttgttgacatggtagagacctatctaaaagaacgaaggaacttgaagagaacatttttattagtggatagcgttgttggaattcaaaaaacagacaatattgccatagaaatgtgtgaagaatttgcattaccttatgtgattgtattaacaaaaattgacaaatcttccaagggacatcttttaaaacaagtgcttcagatccagaaatttgttaacatgaaaactcaaggatgttttcctcagttgtttcctgtaagtgctgtgaccttttctggaatccacctgttgagatgctttatagccagtgtaacaggaagtcttgactaatggttcccggtttagctgaagattcaaaaaaaaaaaaaaaagctttatgctaactggagttaaatacctagaagaatttcaacattgttttaaatgttgtgcatctgtaacttcaggaggatcacttgagctttaaaacctgtgccttctcgaaacaagaatttgtgcctgaggtgaaaaaagtttatggagtctcactctgtcgcccaggctgcagtgcagtggcgtgatctcggctcactgcaagctccacctcctgggttcacaccattctcctgcctcagccttccaagcagctgggactacaggcacccgccaccacgccaggctaattttttgtatttttagtagagacggggtttcaccgtgtttgccaggatggtctcgatctggaccttgtgatccgcccacctcggcctcccaaagtgctgggattacaggcatgagccaccgcgcctggccgacaacatgatttttaatagtgaaactattaaaacaagatagaaaattattaactactaaatttcaacagtctataaagtaccacagagatgaggaaaacgattggctttaatcactgaacaaatatattctttgattagatgaagcttgttcttatgttcctctgcatcttctctctttctcccttctctctcttgggttttttttctcttttgaaccgcagttcacttactatgttttccaagtgctttaccatctgggtttgtcaatacctccctcaaaggatggtgtccagacttgaaaactgaaaaagataggagctgaccctaaagaatttaaggattgttccctccattattcttgaaaaccgctgttaaaacagaatccataaccttggttcaatttcta

SEQ ID NO: 139179 - DNA, 964 bp, Homo sapiens
  Payload ID: 7272
  Gene Symbol: GTPBP8
  Gene Name: GTP-binding protein 8 (putative)
  ENST ID: ENST00000618381
  CDS Start-End: 16-939
ttctgggaagggagaatggcggcgcccgggctgcggctgggagcgggaagactctttgaaatgcctgcggtgctagagcgactgagccgctataatagcacgtcccaagcttttgctgaggtgctgcggctgccgaagcagcagctgaggaagctgctgtacccgctgcaggaagtagagcggttcctcgccccctacgggaggcaagaccttcacctgcgtatctttgacccaagcccggaggacatagccagggcggacaacatcttcacggccactgaacggaaccgcatcgactacgtcagctccgccgtccgtatcgaccacgccccggaccttccgcggccagaggtgagaggcgattctacggttcacctgcgcgccggcgtcacagcgctaccgcttcctggccgtccggctcgcggtgtgttttataggcagagcaatgttggaaaatcatctctaatcaagctttattttcactggcccctgaggttgaagtcagagtctccaaaaaaccaggacacacaagaaaatgaatttttcaaagttggaaaacattttacagtggtggacatgccaggttatggctttagagcacctgaagattttgttgacatggtagagacctatctaaaagaacgaaggaacttgaagagaacatttttattagtggatagcgttgttggaattcaaaaaacagacaatattgccatagaaatgtgtgaagaatttgcattaccttatgtgattgtattaacaaaaattgacaaatcttccaagggacatcttttaaaacaagtgcttcagatccagaaatttgttaacatgaaaactcaaggatgttttcctcagttgtttcctgtaagtgctgtgaccttttctggaatccacctgttgagatgctttatagccagtgtaacaggaagtcttgactaatggttcccggtttagctgaagattc

SEQ ID NO: 139180 - DNA, 1378 bp, Homo sapiens
  Payload ID: 7272
  Gene Symbol: GTPBP8
  Gene Name: GTP-binding protein 8 (putative)
  ENST ID: ENST00000619116
  CDS Start-End: 1-924
atggcggcgcccgggctgcggctgggagcgggaagactctttgaaatgcctgcggtgctagagcgactgagccgctataatagcacgtcccaagcttttgctgaggtgctgcggctgccgaagcagcagctgaggaagctgctgtacccgctgcaggaagtagagcggttcctcgccccctacgggaggcaagaccttcacctgcgtatctttgacccaagcccggaggacatagccagggcggacaacatcttcacggccactgaacggaaccgcatcgactacgtcagctccgccgtccgtatcgaccacgccccggaccttccgcggccagaggtgagaggcgattctacggttcacctgcgcgccggcgtcacagcgctaaccttccctggccgtccggctcgcggtgtgttttataggcagagcaatgttggaaaatcatctctaatcaagctttattttcactggcccctgaggttgaagtcagagtctccaaaaaaccaacacacaaagaaaatgaattttttcaaagttggaaaacattttacagtggtggacatgccaggttatggctttagagcacctgaagattttgttgacatggtagagacctatctaaaagaacgaaggaacttgaagagaacatttttattagtggatagcgttgttggaattcaaaaaacagacaatattgccatagaaatgtgtgaagaatttgcattaccttatgtgattgtattaacaaaaattgacaaatcttccaagggacatcttttaaaacaagtgcttcagatccagaaatttgttaacatgaaaactcaaggatgttttcctcagttgtttcctgtaagtgctgtgaccttttctggaatccacctgttgagatgctttatagccagtgtaacaggaagtcttgactaatggttcccggtttagctgaagattcaaaaaaaaaaaaaaaagctttatgctaactggagttaaatacctagaagaatttcaacattgttttaaatgttgtgcatctgtaacttcaggaggatcacttgagctttaaaacctgtgccttctcgaaacaagaatttgtgcctgaggtgaaaaaagtttgtaagttattgaattatggtgttcattagaacagctactagctgattcccctattttaacaaactgacaagagcacatccataaaatgaaaacctgttacaactatgtacagaagggtttgacgttttattgggcttttgtcttttaaagaatatgtctactatgggtattttttttttaaatgttaaaatgggctaggtaaaagggggctgcttttctgttaagcatcgataggtaagttgatggataaaagttactatgtaagcct

SEQ ID NO: 139181 - DNA, 1193 bp, Homo sapiens
  Payload ID: 7273
  Gene Symbol:
  Gene Name: GU182339.12
  ENST ID: ENST00000620545
  CDS Start-End: 37-951
ctaggggtgcggccgcctgtctgctccggcaccaccatgtcgctcatggtcatcagcatggcatgtgttgggttcttctggctgcagggggcctggccacatgagggattccgcagaaaaccttccctcctggcccacccaggtcgcctggtgaaatcagaagagacagtcatcctgcaatgttggtcagatgtcatgtttgagcacttccttctgcacagagaggggacgtttaacgacactttgcgcctcattggagagcacattgatggggtctccaaggccaacttctccatcggtcgcatgaggcaagacctggcagggacctacagatgctacggttctgttcctcactccccctatcagttttcagctcccagtgaccctctggacatcgtgatcacaggtctatatgagaaaccttctctctcagcccagccgggccccacggttctggcaggagagagcgtgaccttgtcctgcagctcctggagctcctatgacatgtaccatctatccacggagggggaggcccatgaacgtaggttctctgcagggcccaaggtcaacggaacattccaggccgactttcctctgggccctgccacccaaggaggaacctacagatgcttcggctctttccatgactctccctacgagtggtcaaagtcaagtgacccactgcttgtttctgtcacaggaaacccttcaaatagttggccttcacccactgaaccaagctccaaaaccggtaaccccagacacctacacgttctgattgggacctcagtggtcaaactccctttcaccatcctcctcttctttctccttcatcgctggtgctccaacaaaaaaaatgcatctgtaatggaccaagggcctgcggggaacagaacagtgaacagggaggattctgatgaacaggaccatcaggaggtgtcatacgcataattggatcactgtgttttcacacagagaaaaatcactcccccttctcagaggcccaagacacccccaacagataccagcatgtacatagaacttccaaatgctgagtccagatccaaagctgtcttctgtccacgagcaccacagtcaggccttgaggggatcttctagggagacaacagccctgtctcaaaaccgggttgccagctcccatgtaccagcagctggaatctgaaggcatcagt

SEQ ID NO: 139182 - DNA, 1244 bp, Homo sapiens
  Payload ID: 7274
  Gene Symbol:
  Gene Name: GU182343.1
  ENST ID: ENST00000612095
  CDS Start-End: 1-880
aggagtccacagaaaaccttccctcctggcccacccaggtctcctggtgaaatcgggagagacggtcatcctgcaatgttggtcagatgtcaggtttgagcgcttccttctgcacagagaggggatcactgaggaccccttgcgcctcattggacagctccacgatgcgggttcccaggtcaactattccatgggtcccatgacacctgcccttgcagggacctacagatgctttggttctgtcactcacttaccctatgagttgtcggctcccagtgaccctctggacatcgtggtcgtaggtctatatgggaaaccttctctctcagcccagccgggccccacggttcaggcaggagagaatgtgaccttgtcctgcagctcccggagcttgtttgacatttaccatctatccagggaggcagaggccggtgaacttaggctcactgcggtgctgagggtcaatggaacattccaggccaacttccctctgggccctgtgacccacggagggaactacagatgcttcggctctttccgtgccctgccccacgcgtggtcagacccgagtgacccactgcccgtttctgtcacaggtaactccagacacctgcacgttctgattgggacctcagtggtcatcatcccctttgctatcctcctcttctttctccttcatcgctggtgtcccaacaaaaagaatgctgttgtaatggaccaagagcctgcagggaacagaacagtgaacagggaggactctgatgatcaagaccctcaggaggtgacatacgcacagttgaatcactgcgttttcacacagagaaaaatcactcgcccttctcagaggcccaagacacccccaacagataccagcgtgtaacacggaacttccaaatgctgagcgcagatccaaagttgtcttctgtccaccagcaccacagtcaggccttgatgggatcttctagggagacaacagccctgtctcaaaaccgggttgccagctcccatgtaccagcagctggaatctgaaggcgtgagtcttcatcttagggcatcgctcctcctcacgccacaaatctggtgcctctctcttgcttacaaatgtctaggtccccactgcctgctggaaagaaaacacactcctttgcttagcccacaattctccatttcacttgacccctgcccacctctccaacctaactggcttacttcctagtctacttgaggctgcgatcacactgagg

SEQ ID NO: 139183 - DNA, 1193 bp, Homo sapiens; identical to SEQ ID NO: 139181
  Payload ID: 7275
  Gene Symbol:
  Gene Name: GU182347.12
  ENST ID: ENST00000618755
  CDS Start-End: 37-951

SEQ ID NO: 139184 - DNA, 1294 bp, Homo sapiens
  Payload ID: 7276
  Gene Symbol:
  Gene Name: GU182353.5
  ENST ID: ENST00000622568
  CDS Start-End: 2-988
catgtcgctcatggtcgtcagcatggcgtgtgttgggttcttcttgctgcagggggcctggccacatgagggtggtcaggacaagcccttcctctctgcctggcccagccctgtggtgtctgaaggagaacatgtggctcttcagtgtcgctctcgtcttgggtttaacgaattcagtctgtccaaagaagacggggtgcctgtccctgagctctacaacagagtattccgaaacaccgttttcataggccctgtgaccccagcacatgcagggacctacagatgtcggggttcacacccacacttcctcactgggtggtcagcacccagcaaccccctggtgatcatggtcacaggagtccacagaaaaccttccctcctggcccacccaggtcccctggtgaaatcagaagagacagtcatcctgcaatgttggtcagatgtcatgtttgagcacttccttctgcacagagaggggaagtttaatgacactttgcgcctcactggagagctccatgatggggtctccaaggccaacttctccatcggtcgcatgacgcaagaccttgcagggacctacagatgctacggttctgttcctcattccccctatcagttgtcagctcccagtgaccctctggacatcgtgattacaggtctatgtgggaaaccttctctctcagcccagccgcgccccatggttaaggcaggagagagcgtgaccttgtcctgcagctcccggagctcctatgacatctaccatctatcaagggagggggaggctcatgaacttaggttccctgcagtgcccaaggtcaatggaaccttccaggccaactttcctctgggccctgccacccacggagggacctacagatgcttcggctctttccgtgactctccctacgagtggtcagaccttagtgacccactgcttgtttctgtcacagattctatgaaggagaaaggaaaagatgtgatactgtaattttgctccatttgtctaaaatgagtaggctgcaactcctcttgaagtgataccttttctagctcttgttggaggtgtctcaggactcattacttcggggaacctgcaactgtgtcagtctggggaaactgcaaatattcttgtcttacatttgtctccagccaattgtgatggactccagtgacctgcaattgctgttattgcaggtaaaatgtacctgagtcaggccacagttctcctggactatgagcccctggccatgttcctgaggcaattctgttcatctaaatataataataataacac

SEQ ID NO: 139185 - DNA, 1294 bp, Homo sapiens
  Payload ID: 7277
  Gene Symbol:
  Gene Name: GU182355.5
  ENST ID: ENST00000611199
  CDS Start-End: 2-988
catgtcgctcatggtcgtcagcatggcgtgtgttgggttcttcttgctgcagggggcctggccacatgagggtggtcaggacaagcccttcctctctgcctggcccagccctgtggtgtctgaaggagaacatgtggctcttcagtgtcgctctcgtcttgggtttaacgaattcagtctgtccaaagaagacgggatgcctgtccctgagctctacaacagagtattccgaaacaccgttttcataggccctgtgaccccagcacatgcagggacctacagatgtcggggttcacacccacacttcctcactgggtggtcagcacccagcaaccccctggtgatcatggtcacaggagtccacagaaaaccttccctcctggcccacccaggtcccctggtgaaatcagaagagacagtcatcctgcaatgttggtcagatgtcatgtttgagcacttccttctgcacagagaggggaagtttaatgacactttgcgcctcactggagagctccatgatggggtctccaaggccaacttctccatcggtcgcatgacgcaagaccttgcagggacctacagatgctacggttctgttcctcattccccctatcagttgtcagctcccagtgaccctctggacatcgtgattacaggtctatgtgggaaaccttctctctcagcccagccgcgccccatggttaaggcaggagagagcgtgaccttgtcctgcagctcccggagctcctatgacatctaccatctatcaagggagggggaggctcatgaacttaggttccctgcagtgcccaaggtcaatggaaccttccaggccaactttcctctgggccctgccacccacggagggacctacagatgcttcggctctttccgtgactctccctacgagtggtcagaccttagtgacccactgcttgtttctgtcacagattctatgaaggagaaaggaaaagatgtgatactgtaattttgctccatttgtctaaaatgagtaggctgcaactcctcttgaagtgataccttttctagctcttgttggaggtgtctcaggactcattacttcggggaacctgcaactgtgtcagtctggggaaactgcaaatattcttgtcttacatttgtctccagccaattgtgatggactccagtgacctgcaattgctgttattgcaggtaaaatgtacctgagtcaggccacagttctcctggactatgagcccctggccatgttcctgaggcaattctgttcatctaaatataataataataacac

SEQ ID NO: 139186 - DNA, 1704 bp, Homo sapiens
  Payload ID: 7278
  Gene Symbol:
  Gene Name: GU182357.6
  ENST ID: ENST00000619479
  CDS Start-End: 57-1253
ctgtgcgctgctgagctgagctaggggtgcggccgcctgtctgctccggcaccaccatgtcgctcatggtcatcagcaaggcgtgtgttgcgttcttcttgctgcagggggcctggccacatgagggtggtcaggacaagcccttgctttctacctggcccagccttgtggtgcctccagaacatgtgactcttcggtgtcactctaatcttgggtttaacaacttcagtctgtacaaggatgatggggtgcctgtccctgagctctacaacagaatattctggaaaagccttttcatgggccctgtgaccccgtcacacacagggacctatagatgccggggttcacacacacactcccccagtggggggtcggcacccagcaaccccctggtgatcgtggtcacaggattccgcagaaaaccttccctcctggcccacccaggtcccctggtgaaatcagaagagacagtcatcctgcaatgttggtcagatgtcatgtttgagcacttccttctgcacagagaggggacgtttaaccacactttgcgcctcattggagagcacattgatggggtctccaagggcaacttctccatcggtcgcatgacacaagacctggcagggacctacagatgctacggttctgttactcactccccctatcagttgtcagcgcccagtgaccctctggacatcgtgatcacaggtctatatgagaaaccttctctctcagcccagccgggccccacggttctggcaggagagagcgtgaccttgtcctgcagctcccggagctcctatgacatgtaccatctatccagggaaggggaggcccatgaacgtaggctccctgcagggaccaaggtcaacggaacattccaggccgactttcctctggaccctgccacccacggagggacctacagatgcttcggctctttccgtgactctccatacgagtggtcaaagtcaagtgacccactgcttgtttctgtcacaggaaactcttcaaatagttggccttcacccactgaaccaagctccgaaaccggtaaccccagacacctacacgttctgattgggacctcagtggtcaaactccctttcaccatcctcctcttctttctccttcatcgctggtgctccaacaaaaaaaatgcatctgtaatggaccaagggcctgcggggaacagaacagtgaacagggaggattctgatgaacaggaccatcaggaggtgtcatacgcataattggatcactgtgttttcacacagagaaaaatcactcccccttctcagaggcccaagacacccccagcagataccagcatgtacatagaacttccaaatgctgagtccagatccaaagctgtcttctgtccacgagcaccacagtcaggccttgaggggatcttctagggagacaacagccctgtctcaaaaccgggttgccagctcccatgtaccagcagctggaatctgaaggcatcagtcttcatcttaggggatcgctcttcctcacaccacgaatctgaacatgcctctctcttgcttacaaatgtctaaggtccccactgcctgctggagagaaaacacactcctttgcttagcccacaattctccatttcacttgacccctgcccacctctccaacctaactggcttacttcctagtctacttgaggctgcaatcacactgagg

SEQ ID NO: 139187 - DNA, 1601 bp, Homo sapiens
  Payload ID: 7278
  Gene Symbol:
  Gene Name: GU182357.6
  ENST ID: ENST00000622741
  CDS Start-End: 39-1088
gagctggggcgcggctgcctgtctgcaccggcagcaccatgtcgctcatggtcgtcagcatggcgtgtgttgggttcttcttgctgcagggggcctggacacatgagggattccgcagaaaaccttccctcctggcccacccaggtcccctggtgaaatcagaagagacagtcatcctgcaatgttggtcagatgtcatgtttgagcacttccttctgcacagagaggggacgtttaaccacactttgcgcctcattggagagcacattgatggggtctccaagggcaacttctccatcggtcgcatgacacaagacctggcagggacctacagatgctacggttctgttactcactccccctatcagttgtcagcgcccagtgaccctctggacatcgtgatcacaggtctatatgagaaaccttctctctcagcccagccgggccccacggttctggcaggagagagcgtgaccttgtcctgcagctcccggagctcctatgacatgtaccatctatccagggaaggggaggcccatgaacgtaggctccctgcagggaccaaggtcaacggaacattccaggccgactttcctctggaccctgccacccacggagggacctacagatgcttcggctctttccgtgactctccatacgagtggtcaaagtcaagtgacccactgcttgtttctgtcacaggaaacccttcaaatagttggccttcacccactgaaccaagctccaaaaccggtaacccaagacacctgcacgttctgattgggacctcagtggtcatcatcctcttcatcctcctcgtcttctttctccttcatcgctggtgctccaacaagaaaaatgctgctgtaatggaccaagagcctgcagggaacagaacagcgaatagcgaggactctgatgaacaagaccctcaggaggtgacatacgtacagttggatcactgcgttttcacacagagaaaaatcactcgcccttctcagaggcccaagacacccccaacagataccagagtgtacacggaacttccaaatgctgagtccagatccaaagttgtctcctgcccatgagcaccacagtcaggccttgaggggatcttctagggagacaacagccctgtctcaaaaccgggttgccagctcccatgtaccagcagctggaatctgaaggcgtgagtctgcatcttagggcatcgctcttcctcacaccacaaatctgaacgtgcctctctcttgcttacaaatgtctaaggtccccactgcctgctggagagaaaacacactcctttgcttagcccacaattctccatttcacttgacccctgcccacctctccaaccttactggcttacttcctagtctacttgaggctgcaatcacactgaggaactcacagttccaaacatacaagaggctccctcttaacacggcacttagacacgtcctgttccaccttccctcatgctgttccacctcccctcagagtatctttcagccttctgtcagcagtaaaacttatatattttttaaaataatttcaatgtagttttccctccttcaaataaacatgtctgccctcatggt

SEQ ID NO: 139188 - DNA, 1053 bp, Homo sapiens
  Payload ID: 7279
  Gene Symbol: GAMT
  Gene Name: guanidinoacetate N-methyltransferase
  Uniprot ID: Q14353
  ENST ID: ENST00000252288
  CDS Start-End: 68-778
caagcccctgcagggagcgggcccgggcggcgcgcgatcgaggtcgggtcgccgtccagcctgcagcatgagcgcccccagcgcgacccccatcttcgcgcccggcgagaactgcagccccgcgtggggggcggcgcccgcggcctacgacgcagcggacacgcacctgcgcatcctgggcaagccggtgatggagcgctgggagaccccctatatgcacgcgctggccgccgccgcctcctccaaagggggccgggtcctggaggtgggctttggcatggccatcgcagcgtcaaaggtgcaggaggcgcccattgatgagcattggatcatcgagtgcaatgacggcgtcttccagcggctccgggactgggccccacggcagacacacaaggtcatccccttgaaaggcctgtgggaggatgtggcacccaccctgcctgacggtcactttgatgggatcctgtacgacacgtacccactctcggaggagacctggcacacacaccagttcaacttcatcaagaaccacgcctttcgcctgctgaagccggggggcgtcctcacctactgcaacctcacctcctggggggagctgatgaagtccaagtactcagacatcaccatcatgtttgaggagacgcaggtgcccgcgctgctggaggccggcttccggagggagaacatccgtacggaggtgatggcgctggtcccaccggccgactgccgctactacgccttcccacagatgatcacgcccctggtgaccaaaggctgagcccccaccccggcccggccacacccatgccctcctccgtgccttcctggccgggagtccagggtgtcgcaccagccctgggctgatcccagctgtgtgtcaccagaagctttcccggcttctctgtgaggggtcccaccagcccagggctgatcccagctgtgtgtcaccagcagctttcccagcttctctgtgagggtcactgctgcccactgcagggtccctgaggtgaagtaaacgccggcgctgggcttggccagtcggcagtgagcgtg

SEQ ID NO: 139189 - DNA, 1327 bp, Homo sapiens
  Payload ID: 7279
  Gene Symbol: GAMT
  Gene Name: guanidinoacetate N-methyltransferase
  Uniprot ID: Q14353
  ENST ID: ENST00000447102
  CDS Start-End: 95-904
gggcctgttggacccgcccccggcccacaagcccctgcagggagcgggcccgggcggcgcgcgatcgaggtcgggtcgccgtccagcctgcagcatgagcgcccccagcgcgacccccatcttcgcgcccggcgagaactgcagccccgcgtggggggcggcgcccgcggcctacgacgcagcggacacgcacctgcgcatcctgggcaagccggtgatggagcgctgggagaccccctatatgcacgcgctggccgccgccgcctcctccaaagggggccgggtcctggaggtgggctttggcatggccatcgcagcgtcaaaggtgcaggaggcgcccattgatgagcattggatcatcgagtgcaatgacggcgtcttccagcggctccgggactgggccccacggcagacacacaaggtcatccccttgaaaggcctgtgggaggatgtggcacccaccctgcctgacggtcactttgatgggatcctgtacgacacgtacccactctcggaggagacctggcacacacaccagttcaacttcatcaagaaccacgcctttcgcctgctgaagccggggggcgtcctcacctactgcaacctcacctcctggggggagctgatgaagtccaagtactcagacatcaccatcatgtttgaggtgcgcccacctgaagttccccatgggtctccaggaagtgaccttggatgggggtgggaaggggctgctggagccaccttgctacctggggagggtcccttcctgaccccctgggtgggctggactgtgctggttcatttagaaatcaaagtcctttgcctggcgcagtggctgccaggagcagtggctcaggtctataatcccagcactgtggaaggccgaggtgggcagattgcttgagcctaggagttcaagaccagcctgggctacagagcaagacctcatctttcctaaaaaaaaaaaatacaaaaaactagctgggcgtggtggcgtgtgcctgtactcccagctacttgggaggctgaggtaggaggattgcttgggccccaggggcagaggttgcagtgagcccagatcgaaccactgcactccagcctgggtaacagagccagaccctgtctcaagaaaaaagaaagaaagaaagaaagaaagaaaatttaaaaaaaaaatggaaatcaggctgggcgtggtggctcacacctgtgatcccggcacttcggaaggccaaggcgggtggatcacttgagcccaggagtttgagcctagcctggccaacatggcagaatcccatctctactaaaaatacaaaagttagccaggcgt

SEQ ID NO: 139190 - DNA, 403 bp, Homo sapiens
  Payload ID: 7279
  Gene Symbol: GAMT
  Gene Name: guanidinoacetate N-methyltransferase
  ENST ID: ENST00000591788
  CDS Start-End: 1-327
cagacacacaaggtcatccccttgaaaggcctgtgggaggatgtggcacccaccctgcctgacggtcactttgatgggatcctgtacgacacgtacccactctcggaggagacctggcacacacaccagttcaacttcatcaagaaccacgcctttcgcctgctgaagccggggggcgtcctcacctactgcaacctcacctcctggggggagctgatgaagtccaagtactcagacatcaccatcatgtttgagtggctgccaggagcagtggctcaggtctataatcccagcactgtggaaggccgaggtgggcagattgcttgagcctaggagttcaagaccagcctgggctacagagcaagacctcatctttcctaaaaaaaaaaaatacaaaaaacta

SEQ ID NO: 139191 - DNA, 2074 bp, Homo sapiens
  Payload ID: 7280
  Gene Symbol: GDA
  Gene Name: guanine deaminase
  Uniprot ID: Q9Y2T3
  ENST ID: ENST00000238018
  CDS Start-End: 210-1625
agaaaaatcctattggcattgaggaggtagggagccagcccctgggcgcggcctgcagggtaccggcaaccgcccgggtaagcgggggcaggacaaggccggagcctgtgtccgcccggcagccgcccgcagctgcagagagtcccgctgcgtctccgccgcgtgcgccctcctcgaccagcagacccgcgctgcgctccgccgctgacatgtgtgccgctcagatgccgcccctggcgcacatcttccgagggacgttcgtccactccacctggacctgccccatggaggtgctgcgggatcacctcctcggcgtgagcgacagcggcaaaatagtgtttttagaagaagcatctcaacaggaaaaactggccaaagaatggtgcttcaagccgtgtgaaataagagaactgagccaccatgagttcttcatgcctgggctggttgatacacacatccatgcctctcagtattcctttgctggaagtagcatagacctgccactcttggagtggctgaccaagtacacatttcctgcagaacacagattccagaacatcgactttgcagaagaagtatataccagagttgtcaggagaacactaaagaatggaacaaccacagcttgttactttgcaacaattcacactgactcatctctgctccttgccgacattacagataaatttggacagcgggcatttgtgggcaaagtttgcatggatttgaatgacacttttccagaatacaaggagaccactgaggaatcgatcaaggaaactgagagatttgtgtcagaaatgctccaaaagaactattctagagtgaagcccatagtgacaccacgtttttccctctcctgctctgagactttgatgggtgaactgggcaacattgctaaaacccgtgatttgcacattcagagccatataagtgaaaatcgtgatgaagttgaagctgtgaaaaacttataccccagttataaaaactacacatctgtgtatgataaaaacaatcttttgacaaataagacagtgatggcacacggctgctacctctctgcagaagaactgaacgtattccatgaacgaggagcatccatcgcacactgtcccaattctaatttatcgctcagcagtggatttctaaatgtgctagaagtcctgaaacatgaagtcaagatagggctgggtacagacgtggctggtggctattcatattccatgcttgatgcaatcagaagagcagtgatggtttccaatatccttttaattaataaggtaaatgagaaaagcctcaccctcaaagaagtcttcagactagctactcttggaggaagccaagccctggggctggatggtgagattggaaactttgaagtgggcaaggaatttgatgccatcctgatcaaccccaaagcatccgactctcccattgacctgttttatggggacttttttggtgatatttctgaggctgttatccagaagttcctctatctaggagatgatcgaaatattgaagaggtttatgtgggcggaaagcaggtggttccgttttccagctcagtgaaagaaacaattcacttaccagcctcctcaccccatcctccaccatttccttaatgttccatggtattttcaacggaatacactttgaaagacctgagtgtgaaagactgagagttgaggagttactttgtggatcttgtccaaatttagtgaaatgtggaagtcaaccagaccaatgatggaattaaatgtaaattccaagagggctttcacagtccacagggttcaaatgacttgggtaacagaagttattcttagcttacctgttatgtgacagtgatttacctgtccatttccaacccaaaagcctgtcagaaagcattctttagagaaaaccactttacatttgttgttaaactcctgatcgctactcttaagaatatacatgtatgtattcataggaacattttttctcaatatttgtatgattcgcttactgttattgtgctgagtgagctcctgtgtgcttcagacaaaaataaatgagactttgtgtttacgtt

SEQ ID NO: 139192 - DNA, 5340 bp, Homo sapiens
  Payload ID: 7280
  Gene Symbol: GDA
  Gene Name: guanine deaminase
  Uniprot ID: Q9Y2T3
  ENST ID: ENST00000358399
  CDS Start-End: 94-1458
cggcagccgcccgcagctgcagagagtcccgctgcgtctccgccgcgtgcgccctcctcgaccagcagacccgcgctgcgctccgccgctgacatgtgtgccgctcagatgccgcccctggcgcacatcttccgagggacgttcgtccactccacctggacctgccccatggaggtgctgcgggatcacctcctcggcgtgagcgacagcggcaaaatagtgtttttagaagaagcatctcaacaggaaaaactggccaaagaatggtgcttcaagccgtgtgaaataagagaactgagccaccatgagttcttcatgcctgggctggttgatacacacatccatgcctctcagtattcctttgctggaagtagcatagacctgccactcttggagtggctgaccaagtacacatttcctgcagaacacagattccagaacatcgactttgcagaagaagtatataccagagttgtcaggagaacactaaagaatggaacaaccacagcttgttactttgcaacaattcacactgactcatctctgctccttgccgacattacagataaatttggacagcgggcatttgtgggcaaagtttgcatggatttgaatgacacttttccagaatacaaggagaccactgaggaatcgatcaaggaaactgagagatttgtgtcagaaatgctccaaaagaactattctagagtgaagcccatagtgacaccacgtttttccctctcctgctctgagactttgatgggtgaactgggcaacattgctaaaacccgtgatttgcacattcagagccatataagtgaaaatcgtgatgaagttgaagctgtgaaaaacttataccccagttataaaaactacacatctgtgtatgataaaaacaatcttttgacaaataagacagtgatggcacacggctgctacctctctgcagaagaactgaacgtattccatgaacgaggagcatccatcgcacactgtcccaattctaatttatcgctcagcagtggatttctaaatgtgctagaagtcctgaaacatgaagtcaagatagggctgggtacagacgtggctggtggctattcatattccatgcttgatgcaatcagaagagcagtgatggtttccaatatccttttaattaataaggtaaatgagaaaagcctcaccctcaaagaagtcttcagactagctactcttggaggaagccaagccctggggctggatggtgagattggaaactttgaagtgggcaaggaatttgatgccatcctgatcaaccccaaagcatccgactctcccattgacctgttttatggggacttttttggtgatatttctgaggctgttatccagaagttcctctatctaggagatgatcgaaatattgaagaggtttatgtgggcggaaagcaggtggttccgttttccagctcagtgtaagaccctcgggcgtctacaaagttctcctgggattagcgtggttctgcatctcccttgtgcccaggtggagttagaaagtcaaaaaatagtaccttgttcttgggatgactatccctttctgtgtctagttacagtattcacttgacaaatagttcgaaggaagttgcactaattctcaactctggttgagagggttcataaatttcatgaaaatatctccctttggagctgctcagacttactttaagctcaaacagaagggaatgctattactggtggtgttcctacggtaagacttaagcaaagcctttttcatatttgaaaatgtggaaagaaaagatgttcctaaaaggttagatattttgagctaataattgcaaaaattagaagactgaaaatggacccatgagagtatatttttatgagggagcaaaagttagactgagaacaaacgttagaaaatcacttcagattgtgtttgaaaattatatactgagcatactaatttaaaaagagaacttgttgaaatttaaaacgtgtttctaggttgaccttgtgttttagaaatttgcacttaatggaatttgcatttcagagatgtgttagtgttgtgctttgccttctttggcgatgaatgtcagaaattgaatgccacatgctttcataatatagttttgtgcttcaaagtgtttgacagaagttgggtattaaagatttaaagtctcttaggaatattattcatgtaactccatggcataaatagttgtatttttgtgtactttaaaatcaacttataactgtgagatgttattgcttccattttattagaagagaaacaaattccatgctttatggaatttatgtagactggagtcttcgtgaactggggcaaatgctggcatccaggagccgccaatactaacaggacaggttccattgccatggcctattccacccaaacaatatgttgtagtttctggaaattccatactcagatatcagtctgctagaactttaaaatgaaggacaaatcctgttaaagaaatattgttaaaaatctttaaaccctgtgtattgaaagcactctattttctaattttatccagttttctgtttaactccttataatgtttaggatattaaaattttaggataatgaagagtacataatgtcctacttaatatttatgttaataggacttaattcttactagacatctaggaacattacaaagcaaagactatttttatgcttccataacctagaattaaaaccaaattatgaccttatgataaatctttaagtattggtgtgaatgttatttaaattctatatttttcttatttaattacaaatactataaatgagcaaggaaaaggaatagactttcttaatatattataacactcattcctagagcttaggggtgactctttaatattaccttatagtagaaactttatgtaatatagctaactccgtatttacagaacaaaaaaacacagttccccctcctgtagtataaattttattttcacatacttagctaatttagcagtaattggcccagttttttccctaatagaaatacttttagatttgattatgtatacatgacacctaaagagggaacaaaagttagttttatttttttaataaacaacagagtttgttttgtgagataagtatcttagtaaacccaatttccagtcttagtctgtatttccaatatttctaattcctgagccacgtcaaagatgccttgccaaatttctccccatttctctacggggctagcaaaaatcttcagctttatcactcaacccctgccaaaggaacttgattacatggtgtctaaccaaatgagcaggcttaggaatttagatgagatgtgtaagattcacttacaggcagtagctgcttctagcatttgcaagatcctacacttttaccttctttaagggtgtacattttgatgttgaacatcagttttcatgtagacttaggactcatgtgcagtaaatataaataagtgtagcatcagaagcagtaggaatggccgtatacaaccatcctgttaaacatttaaatttagctctgatagtgtgttaagacctgaatatctttcctagtaaaaataggatgtgttgaaatatttatatgtactttgatctctccacatcacttataacttatgtgttttatttctccaagtgcggtgttcctgaatgttatgtatgcttttttttctgtaccacaggcattatctatacctggggccagattttctgcactttgaaatgttgcctttgcctaatgtaggttgactttctgaattgtggagaggcacttttccaagccaatcttatttgtcactttttgttttaatatcttgctctctgacaggaaagaaacaattcacttaccagcctcctcaccccatcctccaccatttccttaatgttccatggtattttcaacggaatacactttgaaaggtaaaaacaattcaaaagtatcgattatcataaattcacaaaatatttttgcaaccagaacacaaaagcaggctagtcagctaaggtaaatttcattttcaaacgagagggaaacatgggaagtaaaagattaggatgtgaaaggttgtcctaaacagaccaaggagactgttccctaatttattctcttggctggttctctcattgaattatcagaccccaagaggagatattggaacaggctcccttcatgccaagggtctttctaagttaatactgtgagcattgagcccccattaaaactcttttttacttcagaaagaattttacaggttaaagggaaagaaatggtgggaaactctccccgtaatgcttagccaactttaaagtgtacccttcaatatccccattggcaactgcagctgagatcttagagaggaaatataaccggtgtgagatctagcaatgcattttgaatcttcactccctaccaggctcttcctatttttaatctcttcacctcagaactagacatatggagagctttaaaggcaagctggaaggcacattgtatcaattctaccttgtgctatacgtaggagagatccaaaatttggatgcttctggagactcttagacatcttttcattgttgtccatttttaaagttgatgattgctggaaacattcacacgcttaaaagcaatggtgtgagttattaatgggtaaactaagaagtgttataggcaatgacttgaaatggtttttaaattgtatggattgttaagaattgttgaaaaaaaattttttttttttggacagcttcaaggagatgttagcaatttcagatatactagccagtttaggtatgactttggaagtgcagaaacagaaggatactgttagaaaatcctaacattggtctccgtgcatgtgttcacacctggtctcactgcctttccttcccacagacctgagtgtgaaagactgagagttgaggagttactttgtggatcttgtccaaatttagtgaaatgtggaagtcaaccagaccaatgatggaattaaatgtaaattccaagagggctttcacagtccacagggttcaaatgacttgggtaacagaagttattcttagcttacctgttatgtgacagtgatttacctgtccatttccaacccaaaagcctgtcagaaagcattctttagagaaaaccactttacatttgttgttaaactcctgatcgctactcttaagaatatacatgtatgtattcataggaacattttttctcaatatttgtatgattcgcttactgttattgtgctgagtgagctcctgtgtgcttcagacaaaaataaatgagactttgtgtttacgtta

SEQ ID NO: 139193 - DNA, 1771 bp, Homo sapiens
  Payload ID: 7280
  Gene Symbol: GDA
  Gene Name: guanine deaminase
  ENST ID: ENST00000376986
  CDS Start-End: 230-1411
agcctgtgtccgcccggcagccgcccgcagctgcagagagtcccgctgcgtctccgccgcgtgcgccctcctcgaccagcagacccgcgctgcgctccgccgctgacatgtgtgccgctcagatgccgcccctggcgcacatcttccgagggacgttcgtccactccacctggacctgccccatggaggtgctgcgggatcacctcctcggcgtgagcgacagcggcaaatgtttttagaagaagcatctcaacaggaaaaactggccaaagaatggtgcttcaagccgtgtgaaataagagaactgagccaccatgagttcttcatgcctgggctggttgatacacacatccatgcctctcagtattcctttgctggaagtagcatagacctgccactcttggagtggctgaccaagtacacatttcctgcagaacacagattccagaacatcgactttgcagaagaagtatataccagagttgtcaggagaacactaaagaatggaacaaccacagcttgttactttgcaacaattcacactgactcatctctgctccttgccgacattacagataaatttggacagcgggcatttgtgggcaaagtttgcatggatttgaatgacacttttccagaatacaaggagaccactgaggaatcgatcaaggaaactgagagatttgtgtcagaaatgctccaaaagaacagccatataagtgaaaatcgtgatgaagttgaagctgtgaaaaacttataccccagttataaaaactacacatctgtgtatgataaaaacaatcttttgacaaataagacagtgatggcacacggctgctacctctctgcagaagaactgaacgtattccatgaacgaggagcatccatcgcacactgtcccaattctaatttatcgctcagcagtggatttctaaatgtgctagaagtcctgaaacatgaagtcaagatagggctgggtacagacgtggctggtggctattcatattccatgcttgatgcaatcagaagagcagtgatggtttccaatatccttttaattaataaggtaaatgagaaaagcctcaccctcaaagaagtcttcagactagctactcttggaggaagccaagccctggggctggatggtgagattggaaactttgaagtgggcaaggaatttgatgccatcctgatcaaccccaaagcatccgactctcccattgacctgttttatggggacttttttggtgatatttctgaggctgttatccagaagttcctctatctaggagatgatcgaaatattgaagaggtttatgtgggcggaaagcaggtggttccgttttccagctcagtgaaagaaacaattcacttaccagcctcctcaccccatcctccaccatttccttaatgttccatggtattttcaacggaatacactttgaaagttctcagaataactgtagaatgtgctggaaatggaacattctcagataaggaggaactggccagatcaaactaagctgtgttcccatccctcctgaaacaggatcttatggtgctttagcccaggacgtcaagtatcccctaggtatgaaacccagagtggagcatgctttgaaggtccctcagctacatgcagactagactgcatgtagctgactctaactgccctgggaaactatcctgagctttgacagacctgccatgaatcttaagcttttattgtcccttgctgcctatctgtgaggaataaagttgcttcacttac

SEQ ID NO: 139194 - DNA, 990 bp, Homo sapiens
  Payload ID: 7280
  Gene Symbol: GDA
  Gene Name: guanine deaminase
  ENST ID: ENST00000436438
  CDS Start-End: 1-540
gaacgaggagcatccatcgcacactgtcccaattctaatttatcgctcagcagtggatttctaaatgtgctagaagtcctgaaacatgaagtcaagatagggctgggtacagacgtggctggtggctattcatattccatgcttgatgcaatcagaagagcagtgatggtttccaatatccttttaattaataaggtaaatgagaaaagcctcaccctcaaagaagtcttcagactagctactcttggaggaagccaagccctggggctggatggtgagattggaaactttgaagtgggcaaggaatttgatgccatcctgatcaaccccaaagcatccgactctcccattgacctgttttatggggacttttttggtgatatttctgaggctgttatccagaagttcctctatctaggagatgatcgaaatattgaagaggtttatgtgggcggaaagcaggtggttccgttttccagctcagtgaaagaaacaattcacttaccagcctcctcaccccatcctccaccatttccttaatgttccatggtattttcaacggaatacactttgaaagacctgagtgtgaaagactgagagttgaggagttactttgtggatcttgtccaaatttagtgaaatgtggaagtcaaccagaccaatgatggaattaaatgtaaattccaagagggctttcacagtccacagggttcaaatgacttgggtaacagaagttattcttagcttacctgttatgtgacagtgatttacctgtccatttccaacccaaaagcctgtcagaaagcattctttagagaaaaccactttacatttgttgttaaactcctgatcgctactcttaagaatatacatgtatgtattcataggaacattttttctcaatatttgtatgattcgcttactgttattgtgctgagtgagctcctgtgtgcttcagacaaaaataaatgagactttgtgtttacgtta

SEQ ID NO: 139195 - DNA, 694 bp, Homo sapiens
  Payload ID: 7280
  Gene Symbol: GDA
  Gene Name: guanine deaminase
  ENST ID: ENST00000414671
  CDS Start-End: 109-694
cagcttgttactttgcaacaattcacactgactcatctctgctccttgccgacattacagataaatttggacagcgggcatttgtgggcaaagtttgcatggatttgaatgacacttttccagaatacaaggagaccactgaggaatcgatcaaggaaactgagagactgtcactctgtcacccaggctggagtgcaatggcgcgatctcagctcactgaaacctccacctcctgtgttcaagagattctcctgcctcagcctcccgagtagctgggattacagatttgtgtcagaaatgctccaaaagaactattctagagtgaagcccatagtgacaccacgtttttccctctcctgctctgagactttgatgggtgaactgggcaacattgctaaaacccgtgatttgcacattcagagccatataagtgaaaatcgtgatgaagttgaagctgtgaaaaacttataccccagttataaaaactacacatctgtgtatgataaaaacaatcttttgacaaataagacagtgatggcacacggctgctacctctctgcagaagaactgaacgtattccatgaacgaggagcatccatcgcacactgtcccaattctaatttatcgctcagcagtggatttctaaatgtgctagaagtcctgaaacatgaagtcaagatagggctgggtacag

SEQ ID NO: 139196 - DNA, 888 bp, Homo sapiens
  Payload ID: 7280
  Gene Symbol: GDA
  Gene Name: guanine deaminase
  ENST ID: ENST00000489618
  CDS Start-End: 1-530
acggctgctacctctctgcagaagaactgaacgtattccatgaacgaggagcatccatcgcacactgtcccaattctaatttatcgctcagcagtggatttctaaatgtgctagaagtcctgaaacatgaagtcaagatagggctgggtacagacgtggctggtggctattcatattccatgcttgatgcaatcagaagagcagtgatggtttccaatatccttttaattaataaggtaaatgagaaaagcctcaccctcaaagaagtcttcagactagctactcttggaggaagccaagccctggggctggatggtgagattggaaactttgaagtgggcaaggaatttgatgccatcctgatcaaccccaaagcatccgactctcccattgacctgttttatggggacttttttggtgatatttctgaggctgttatccagaagttcctctatctaggagatgatcgaaatattgaagaggtttatgtgggcggaaagcaggtggttccgttttccagctcagtgtaagaccctcgggcgtctacaaagttctcctgggattagcgtggttctgcatctcccttgtgcccaggaaagaaacaattcacttaccagcctcctcaccccatcctccaccatttccttaatgttccatggtattttcaacggaatacactttgaaaggctgatcttgatatcctggtctcaagtgatcctcccacctcagcattctaaagtgctaggattacagacatgagctactgcacccagccaattggaggccttgccccagcaggtggggaaggaaatgccagccaagttcccaccacatgcagaaacctgagagggtgaaccctacccatcaacacctggagaccttttcctg

SEQ ID NO: 139197 - DNA, 2019 bp, Homo sapiens
  Payload ID: 7280
  Gene Symbol: GDA
  Gene Name: guanine deaminase
  Uniprot ID: Q9Y2T3
  ENST ID: ENST00000475764
  CDS Start-End: 86-1450
gcccgcagctgcagagagtcccgctgcgtctccgccgcgtgcgccctcctcgaccagcagacccgcgctgcgctccgccgctgacatgtgtgccgctcagatgccgcccctggcgcacatcttccgagggacgttcgtccactccacctggacctgccccatggaggtgctgcgggatcacctcctcggcgtgagcgacagcggcaaaatagtgtttttagaagaagcatctcaacaggaaaaactggccaaagaatggtgcttcaagccgtgtgaaataagagaactgagccaccatgagttcttcatgcctgggctggttgatacacacatccatgcctctcagtattcctttgctggaagtagcatagacctgccactcttggagtggctgaccaagtacacatttcctgcagaacacagattccagaacatcgactttgcagaagaagtatataccagagttgtcaggagaacactaaagaatggaacaaccacagcttgttactttgcaacaattcacactgactcatctctgctccttgccgacattacagataaatttggacagcgggcatttgtgggcaaagtttgcatggatttgaatgacacttttccagaatacaaggagaccactgaggaatcgatcaaggaaactgagagatttgtgtcagaaatgctccaaaagaactattctagagtgaagcccatagtgacaccacgtttttccctctcctgctctgagactttgatgggtgaactgggcaacattgctaaaacccgtgatttgcacattcagagccatataagtgaaaatcgtgatgaagttgaagctgtgaaaaacttataccccagttataaaaactacacatctgtgtatgataaaaacaatcttttgacaaataagacagtgatggcacacggctgctacctctctgcagaagaactgaacgtattccatgaacgaggagcatccatcgcacactgtcccaattctaatttatcgctcagcagtggatttctaaatgtgctagaagtcctgaaacatgaagtcaagatagggctgggtacagacgtggctggtggctattcatattccatgcttgatgcaatcagaagagcagtgatggtttccaatatccttttaattaataaggtaaatgagaaaagcctcaccctcaaagaagtcttcagactagctactcttggaggaagccaagccctggggctggatggtgagattggaaactttgaagtgggcaaggaatttgatgccatcctgatcaaccccaaagcatccgactctcccattgacctgttttatggggacttttttggtgatatttctgaggctgttatccagaagttcctctatctaggagatgatcgaaatattgaagaggtttatgtgggcggaaagcaggtggttccgttttccagctcagtgtaagaccctcgggcgtctacaaagttctcctgggattagcgtggttctgcatctcccttgtgcccaggaaagaaacaattcacttaccagcctcctcaccccatcctccaccatttccttaatgttccatggtattttcaacggaatacactttgaaagacctgagtgtgaaagactgagagttgaggagttactttgtggatcttgtccaaatttagtgaaatgtggaagtcaaccagaccaatgatggaattaaatgtaaattccaagagggctttcacagtccacagggttcaaatgacttgggtaacagaagttattcttagcttacctgttatgtgacagtgatttacctgtccatttccaacccaaaagcctgtcagaaagcattctttagagaaaaccactttacatttgttgttaaactcctgatcgctactcttaagaatatacatgtatgtattcataggaacattttttctcaatatttgtatgattcgcttactgttattgtgctgagtgagctcctgtgtgcttcagacaaaaataaatgagactttgtgtttacgtta

SEQ ID NO: 139198 - DNA, 5362 bp, Homo sapiens
  Payload ID: 7280
  Gene Symbol: GDA
  Gene Name: guanine deaminase
  Uniprot ID: Q9Y2T3
  ENST ID: ENST00000545168
  CDS Start-End: 339-1481
attctcccgcctcagtctcctgagtagccgggactacaggcacccgctacaacgcccggctaattttttttgtatttccccttccttctttgctttcaaaatccaggcttaggggtacaaaaacctatattgtctgagacaggaagcactccgaagtttgaagaagagggcagcagcccaactcagaagaactggactccccagcactataaggagagagggtggtggttccaccagagatagtgtttttagaagaagcatctcaacaggaaaaactggccaaagaatggtgcttcaagccgtgtgaaataagagaactgagccaccatgagttcttcatgcctgggctggttgatacacacatccatgcctctcagtattcctttgctggaagtagcatagacctgccactcttggagtggctgaccaagtacacatttcctgcagaacacagattccagaacatcgactttgcagaagaagtatataccagagttgtcaggagaacactaaagaatggaacaaccacagcttgttactttgcaacaattcacactgactcatctctgctccttgccgacattacagataaatttggacagcgggcatttgtgggcaaagtttgcatggatttgaatgacacttttccagaatacaaggagaccactgaggaatcgatcaaggaaactgagagatttgtgtcagaaatgctccaaaagaactattctagagtgaagcccatagtgacaccacgtttttccctctcctgctctgagactttgatgggtgaactgggcaacattgctaaaacccgtgatttgcacattcagagccatataagtgaaaatcgtgatgaagttgaagctgtgaaaaacttataccccagttataaaaactacacatctgtgtatgataaaaacaatcttttgacaaataagacagtgatggcacacggctgctacctctctgcagaagaactgaacgtattccatgaacgaggagcatccatcgcacactgtcccaattctaatttatcgctcagcagtggatttctaaatgtgctagaagtcctgaaacatgaagtcaagatagggctgggtacagacgtggctggtggctattcatattccatgcttgatgcaatcagaagagcagtgatggtttccaatatccttttaattaataaggtaaatgagaaaagcctcaccctcaaagaagtcttcagactagctactcttggaggaagccaagccctggggctggatggtgagattggaaactttgaagtgggcaaggaatttgatgccatcctgatcaaccccaaagcatccgactctcccattgacctgttttatggggacttttttggtgatatttctgaggctgttatccagaagttcctctatctaggagatgatcgaaatattgaagaggtttatgtgggcggaaagcaggtggttccgttttccagctcagtgtaagaccctcgggcgtctacaaagttctcctgggattagcgtggttctgcatctcccttgtgcccaggtggagttagaaagtcaaaaaatagtaccttgttcttgggatgactatccctttctgtgtctagttacagtattcacttgacaaatagttcgaaggaagttgcactaattctcaactctggttgagagggttcataaatttcatgaaaatatctccctttggagctgctcagacttactttaagctcaaacagaagggaatgctattactggtggtgttcctacggtaagacttaagcaaagcctttttcatatttgaaaatgtggaaagaaaagatgttcctaaaaggttagatattttgagctaataattgcaaaaattagaagactgaaaatggacccatgagagtatatttttatgagggagcaaaagttagactgagaacaaacgttagaaaatcacttcagattgtgtttgaaaattatatactgagcatactaatttaaaaagagaacttgttgaaatttaaaacgtgtttctaggttgaccttgtgttttagaaatttgcacttaatggaatttgcatttcagagatgtgttagtgttgtgctttgccttctttggcgatgaatgtcagaaattgaatgccacatgctttcataatatagttttgtgcttcaaagtgtttgacagaagttgggtattaaagatttaaagtctcttaggaatattattcatgtaactccatggcataaatagttgtatttttgtgtactttaaaatcaacttataactgtgagatgttattgcttccattttattagaagagaaacaaattccatgctttatggaatttatgtagactggagtcttcgtgaactggggcaaatgctggcatccaggagccgccaatactaacaggacaggttccattgccatggcctattccacccaaacaatatgttgtagtttctggaaattccatactcagatatcagtctgctagaactttaaaatgaaggacaaatcctgttaaagaaatattgttaaaaatctttaaaccctgtgtattgaaagcactctattttctaattttatccagttttctgtttaactccttataatgtttaggatattaaaattttaggataatgaagagtacataatgtcctacttaatatttatgttaataggacttaattcttactagacatctaggaacattacaaagcaaagactatttttatgcttccataacctagaattaaaaccaaattatgaccttatgataaatctttaagtattggtgtgaatgttatttaaattctatatttttcttatttaattacaaatactataaatgagcaaggaaaaggaatagactttcttaatatattataacactcattcctagagcttaggggtgactctttaatattaccttatagtagaaactttatgtaatatagctaactccgtatttacagaacaaaaaaacacagttccccctcctgtagtataaattttattttcacatacttagctaatttagcagtaattggcccagttttttccctaatagaaatacttttagatttgattatgtatacatgacacctaaagagggaacaaaagttagttttatttttttaataaacaacagagtttgttttgtgagataagtatcttagtaaacccaatttccagtcttagtctgtatttccaatatttctaattcctgagccacgtcaaagatgccttgccaaatttctccccatttctctacggggctagcaaaaatcttcagctttatcactcaacccctgccaaaggaacttgattacatggtgtctaaccaaatgagcaggcttaggaatttagatgagatgtgtaagattcacttacaggcagtagctgcttctagcatttgcaagatcctacacttttaccttctttaagggtgtacattttgatgttgaacatcagttttcatgtagacttaggactcatgtgcagtaaatataaataagtgtagcatcagaagcagtaggaatggccgtatacaaccatcctgttaaacatttaaatttagctctgatagtgtgttaagacctgaatatctttcctagtaaaaataggatgtgttgaaatatttatatgtactttgatctctccacatcacttataacttatgtgttttatttctccaagtgcggtgttcctgaatgttatgtatgcttttttttctgtaccacaggcattatctatacctggggccagattttctgcactttgaaatgttgcctttgcctaatgtaggttgactttctgaattgtggagaggcacttttccaagccaatcttatttgtcactttttgttttaatatcttgctctctgacaggaaagaaacaattcacttaccagcctcctcaccccatcctccaccatttccttaatgttccatggtattttcaacggaatacactttgaaaggtaaaaacaattcaaaagtatcgattatcataaattcacaaaatatttttgcaaccagaacacaaaagcaggctagtcagctaaggtaaatttcattttcaaacgagagggaaacatgggaagtaaaagattaggatgtgaaaggttgtcctaaacagaccaaggagactgttccctaatttattctcttggctggttctctcattgaattatcagaccccaagaggagatattggaacaggctcccttcatgccaagggtctttctaagttaatactgtgagcattgagcccccattaaaactcttttttacttcagaaagaattttacaggttaaagggaaagaaatggtgggaaactctccccgtaatgcttagccaactttaaagtgtacccttcaatatccccattggcaactgcagctgagatcttagagaggaaatataaccggtgtgagatctagcaatgcattttgaatcttcactccctaccaggctcttcctatttttaatctcttcacctcagaactagacatatggagagctttaaaggcaagctggaaggcacattgtatcaattctaccttgtgctatacgtaggagagatccaaaatttggatgcttctggagactcttagacatcttttcattgttgtccatttttaaagttgatgattgctggaaacattcacacgcttaaaagcaatggtgtgagttattaatgggtaaactaagaagtgttataggcaatgacttgaaatggtttttaaattgtatggattgttaagaattgttgaaaaaaaattttttttttttggacagcttcaaggagatgttagcaatttcagatatactagccagtttaggtatgactttggaagtgcagaaacagaaggatactgttagaaaatcctaacattggtctccgtgcatgtgttcacacctggtctcactgcctttccttcccacagacctgagtgtgaaagactgagagttgaggagttactttgtggatcttgtccaaatttagtgaaatgtggaagtcaaccagaccaatgatggaattaaatgtaaattccaagagggctttcacagtccacagggttcaaatgacttgggtaacagaagttattcttagcttacctgttatgtgacagtgatttacctgtccatttccaacccaaaagcctgtcagaaagcattctttagagaaaaccactttacatttgttgttaaactcctgatcgctactcttaagaatatacatgtatgtattcataggaacattttttctcaatatttgtatgattcgcttactgttattgtgctgagtgagctcctgtgtgcttcagacaaaaataaatgagactttgtgtttacgtt

SEQ ID NO: 139199 - DNA, 2024 bp, Homo sapiens
  Payload ID: 7281
  Gene Symbol: GMPS
  Gene Name: guanine monophosphate synthase
  Uniprot ID: P49915
  ENST ID: ENST00000295920
  CDS Start-End: 222-2006
agcgtgcgcgctgctggtcttctctcccgcggcgctggggcccgcgctccgctgctgttgctccattcggcgcttttctggcggctggctcctctccgctgccggctgctcctcgaccaggcctccttctcaacctcagcccgcggcgccgacccttccggcaccctcccgccccgtctcgtactgtcgccgtcaccgccgcggctccggccctggccccgatggctctgtgcaacggagactccaagatgatgaataaggtatttggaggtactgtgcacaaaaaaagtgtcagagaagatggagttttcaacattagtgtggataatacatgttcattattcaggggccttcagaaggaagaagttgttttgcttacacatggagatagtgtagacaaagtagctgatggattcaaggttgtggcacgttctggaaacatagtagcaggcatagcaaatgaatctaaaaagttatatggagcacagttccaccctgaagttggccttacagaaaatggaaaagtaatactgaagaatttcctttatgatatagctggatgcagtggaaccttcaccgtgcagaacagagaacttgagtgtattcgagagatcaaagagagagtaggcacgtcaaaagttttggttttactcagtggtggagtagactcaacagtttgtacagctttgctaaatcgtgctttgaaccaagaacaagtcattgctgtgcacattgataatggctttatgagaaaacgagaaagccagtctgttgaagaggccctcaaaaagcttggaattcaggtcaaagtgataaatgctgctcattctttctacaatggaacaacaaccctaccaatatcagatgaagatagaaccccacggaaaagaattagcaaaacgttaaatatgaccacaagtcctgaagagaaaagaaaaatcattggggatacttttgttaagattgccaatgaagtaattggagaaatgaacttgaaaccagaggaggttttccttgcccaaggtactttacggcctgatctaattgaaagtgcatcccttgttgcaagtggcaaagctgaactcatcaaaacccatcacaatgacacagagctcatcagaaagttgagagaggagggaaaagtaatagaacctctgaaagattttcataaagatgaagtgagaattttgggcagagaacttggacttccagaagagttagtttccaggcatccatttccaggtcctggcctggcaatcagagtaatatgtgctgaagaaccttatatttgtaaggactttcctgaaaccaacaatattttgaaaatagtagctgatttttctgcaagtgttaaaaagccacataccctattacagagagtcaaagcctgcacaacagaagaggatcaggagaagctgatgcaaattaccagtctgcattcactgaatgccttcttgctgccaattaaaactgtaggtgtgcagggtgactgtcgttcctacagttacgtgtgtggaatctccagtaaagatgaacctgactgggaatcacttatttttctggctaggcttatacctcgcatgtgtcacaacgttaacagagttgtttatatatttggcccaccagttaaagaacctcctacagatgttactcccactttcttgacaacaggggtgctcagtactttacgccaagctgattttgaggcccataacattctcagggagtctgggtatgctgggaaaatcagccagatgccggtgattttgacaccattacattttgatcgggacccacttcaaaagcagccttcatgccagagatctgtggttattcgaacctttattactagtgacttcatgactggtatacctgcaacacctggcaatgagatccctgtagaggtggtattaaagatggtcactgagattaagaagattcctggtatttctcgaattatgtatgacttaacatcaaagcccccaggaactactgagtgggagtaataaacttcttgttctatt

SEQ ID NO: 139200 - DNA, 8751 bp, Homo sapiens
  Payload ID: 7281
  Gene Symbol: GMPS
  Gene Name: guanine monophosphate synthase
  Uniprot ID: P49915
  ENST ID: ENST00000496455
  CDS Start-End: 336-2417
gagggccggccggtttggcggcggctgcggagggtatctgaggctcggctgccaagccgaacgggctctggctcctcccagtggccggccggggcggaagcaggaggcgggggcagcgtgcgcgctgctggtcttctctcccgcggcgctggggcccgcgctccgctgctgttgctccattcggcgcttttctggcggctggctcctctccgctgccggctgctcctcgaccaggcctccttctcaacctcagcccgcggcgccgacccttccggcaccctcccgccccgtctcgtactgtcgccgtcaccgccgcggctccggccctggccccgatggctctgtgcaacggagactccaagctggagaatgctggaggagaccttaaggatggccaccaccactatgaaggagctgttgtcattctggatgctggtgctcagtacgggaaagtcatagaccgaagagtgagggaactgttcgtgcagtctgaaattttccccttggaaacaccagcatttgctataaaggaacaaggattccgtgctattatcatctctggaggacctaattctgtgtatgctgaagatgctccctggtttgatccagcaatattcactattggcaagcctgttcttggaatttgctatggtatgcagatgatgaataaggtatttggaggtactgtgcacaaaaaaagtgtcagagaagatggagttttcaacattagtgtggataatacatgttcattattcaggggccttcagaaggaagaagttgttttgcttacacatggagatagtgtagacaaagtagctgatggattcaaggttgtggcacgttctggaaacatagtagcaggcatagcaaatgaatctaaaaagttatatggagcacagttccaccctgaagttggccttacagaaaatggaaaagtaatactgaagaatttcctttatgatatagctggatgcagtggaaccttcaccgtgcagaacagagaacttgagtgtattcgagagatcaaagagagagtaggcacgtcaaaagttttggttttactcagtggtggagtagactcaacagtttgtacagctttgctaaatcgtgctttgaaccaagaacaagtcattgctgtgcacattgataatggctttatgagaaaacgagaaagccagtctgttgaagaggccctcaaaaagcttggaattcaggtcaaagtgataaatgctgctcattctttctacaatggaacaacaaccctaccaatatcagatgaagatagaaccccacggaaaagaattagcaaaacgttaaatatgaccacaagtcctgaagagaaaagaaaaatcattggggatacttttgttaagattgccaatgaagtaattggagaaatgaacttgaaaccagaggaggttttccttgcccaaggtactttacggcctgatctaattgaaagtgcatcccttgttgcaagtggcaaagctgaactcatcaaaacccatcacaatgacacagagctcatcagaaagttgagagaggagggaaaagtaatagaacctctgaaagattttcataaagatgaagtgagaattttgggcagagaacttggacttccagaagagttagtttccaggcatccatttccaggtcctggcctggcaatcagagtaatatgtgctgaagaaccttatatttgtaaggactttcctgaaaccaacaatattttgaaaatagtagctgatttttctgcaagtgttaaaaagccacataccctattacagagagtcaaagcctgcacaacagaagaggatcaggagaagctgatgcaaattaccagtctgcattcactgaatgccttcttgctgccaattaaaactgtaggtgtgcagggtgactgtcgttcctacagttacgtgtgtggaatctccagtaaagatgaacctgactgggaatcacttatttttctggctaggcttatacctcgcatgtgtcacaacgttaacagagttgtttatatatttggcccaccagttaaagaacctcctacagatgttactcccactttcttgacaacaggggtgctcagtactttacgccaagctgattttgaggcccataacattctcagggagtctgggtatgctgggaaaatcagccagatgccggtgattttgacaccattacattttgatcgggacccacttcaaaagcagccttcatgccagagatctgtggttattcgaacctttattactagtgacttcatgactggtatacctgcaacacctggcaatgagatccctgtagaggtggtattaaagatggtcactgagattaagaagattcctggtatttctcgaattatgtatgacttaacatcaaagcccccaggaactactgagtgggagtaataaacttcttgttctattaaagtaccgtgtgcagtttaaattgattagaaatcattcccattattgacatgcagtactgtgaaaagagttactggagcagctacatcacatctgagttctccacagcaaaaatctacggcttaagagctgagttggggataaccaaaagggactgaagagtttgtacgggtaaataatcaaagcaccattgcctacactcagacagattgatactgcttttgcctttgcctcacttattctttatgtataaattcactgttgatgtctctgtgaatatgtatgaaggtgggtgaatttgggggtaattatgggcttctgtctccttaccagtttctaagaactgttagaaacgcccattatttaccagtgttacttactacttatatatactttttggagaatcagttttcttataagtaatcttatttctccaaagggtgaaaaagagatgaacatatcagataaaggtataggtgggctattccagccacttttgaaggacactgagggtataaaatgtaagctaccataagatggaaaagcaccaggaatttgttgatgtacttttgaattttatttcacagccttgggaggaagaaactatgagtggtctcagatgtctatgaatggtcttaaaatgttttcaaaccatgttccacatagatgccatgttattcaatgtcagcttgtttattagtaaggagctttatcctcctagccttatattaccagccccccacagccttgcatagaaagtttctgttatctccttagaagaaactggctcaatgacgtttctggtgtagtgcagatagaggtcaagaggagcattttcatctcttcttttgctggtcagagaaacggttctgagatcacagaagctatgatgcatacctacagcttacaaaagggagaggaaaaatgtttatatcatctagtaaacagttgtaaaatgagcttttaaatctaatctatagacatattattcattgctcagacacctgtgaacagtcttgatacatgcaagatgtttgccaaactttgtaatcctttctactagctataagagaggatttaagaactggtgtaggacttgttgccatcaccaccagtttctaacagatcttttataacattcacataagtactgtagacagtagtagacttaaactctccgtttctctcagtattttagctaagaatgttaccatatttttctcttaacaattccatctcaggttgctgctgcttgtctagtttaaaaggtcagatctattaatcaggaatgaaattttatttgggattcagtgttagacaaacaacaaaatgatgcgtggcagaagtcatctttttattctggctggtccagggaacaagaaaactgctgctggaccagcaagggaagagtttctgtctgtcttaacagaaatctgtccccaagacaaaggggtacttgactcctacaaaacttaaagggtacattctctatctgatgaggaggtactcattatggccttctggaaagaggctatgttagtgatctggtctttacagatttagagtcatgttatttgaaagctagaatagacaacctataaaatgcttaccaacatgtgtcagtacacgtttatgtttatatgaaaaaaaatttctagccacagtgtcttatgattttgtattgaagcaaacagtaggaattttggaaaaatagagagtaagaatgtgtgttctatggaacactgctccactgagaaggtccatgtaaaaaggattaggtggtcatataagtttggggaacataagctcacttgtcctttcctggagattcatggtatataatattcaaagctctgagaaattctgaagttaaaaacaattgttaaattctgcttaaattagtgttttcctgatatttgttttttgaacaccttttatataatcccttctaatatatacttagtatatacttaatataatattgggaaaattgttactccaaagcacatcttgacatgacatagtttcttaaaaatccaaattttctggaactcagaaatttcctaatatttagcacactgtcttcttttgcacagcactttttgctttgtgccatatagcattactctgtaccttcacagtatttcatctgagccactgaggaaagttaaaggttgcacttccattttacagttaagaaaacaagctcaccttaggcatggttacttaattaatttcagaattaaatttcaggtttccttagtccagattgtcctgatgtgtattctgacacctaaaattatataaacatttatgggatgcttattttactaagactagaatggtggctacctggctaataacattcatcattggttattctgggcatatcatgactttattcccgttgcttaccatctacctgggacacatctctctttgattaaatatattctttttctttgtactttttaggtagacagagaatgtagatcattgaaagcattatttattcctaagattggcaggcacagaatcatttttaagaaccaaatacccagtcctgccttaaaggccacatctatgatcatcagctctgttagaaataacagcctggcataattcctaaatacaagtctgtagatatatccaggagatagggttacactgttttctaaccttttttaaatcccttaatcttgaggtaaactgcatgcatttagtcaaacaagcatcataaaatttgtttcctcactgtttgggcttaacctcctgatagcctgttttactgaataacttgaccctaacctgtagagaataagagcattcaaattaggaaggcaggactatccatctttagtgcttttcctgccgttaaacaacaatgtgaacttggtcaagtcatttctgttctttatctgtgacatgaggtaactgtattaaattttcagcatcaaatccagctataaatttgtattttgtaaacaagagaaagtaaagcaggagacagaatggagaagctggatagtgttttttttttttttttttaaggttcttttatcatcagatatgacacaaagggaaacatcaaaatgcaccgtaaagttaaatcctagttacctttttttgaagctgttggcaaggtttgaccacttggggcatcttctgctgtgagatgacacttgaaaaacacccatcaaagttttcctggtaggaatctctctttactgcgtgtttttttgaaaagctgacagagaatatgctttggctttgacactaatgaagtcacccatcatcaattacatacagctaattgttgggagctagagctagaatccaagctttctgattctctgcatggaagaggaaatgctctagggcccttcagggcaaatcttaaaaggaagttcttggccgggcgcggtggctcatgcctgtaatcccagcactttgggaggccgaggtgggtggatcacgagatcaggagatcgagaccatcttggctaacacggtgaaaccccatctctactaaaaatacaacaaattagctgggcgcggtggcgggtgcctgtagtcccagctactcgggaggctgaggcaggagaatggcctgaacccaggaggcggagcttgcagtgagctgagatagtgccactgcactccggcctggtgaaagagcgagactcagtctcaaaaaaaaaaaaaaaaggaagttcttagtgtgtaattgaccatcagggataaatgggcttcaaaagtgttaattgtctccttacttacagtgagtttctagagatagccctgtctttcagaaattctctgacatctgcttgcgcaatgttataaccactttcccacactactcccctccagaaatctcattgatatgtggcgaggacacgccttagctatcaccccaatggatgcttctttcattgacccaaatccagaatgtaatggggaactgaatacaagttggatgtctccacccttggaaagcacatcttttgttcttactgaagtagtttaacaccaccagatgatcaagggatcagggtatctttctggtatctttttaatcactgaaggactttgacagcagtaatggtggcattgttgactcttaaatttctgaacgtttcacttaatggcaagtgaagagatatagaatcccccaaagagtgtcaagatgctaacttccaaccctatttttatgtactgaagaggcctcagtgtctcactgaactctaacctttttgtcagtgttcctcaacactggatgcgtattattacataacctgaggagttaaaaaatacaataaccagatgtccaattaaataaaattagaatctggaggaggtagaactcaagcatttacagttttgttttgttttttttttaagacagagtctcgctctgtccccaagtgcagtggcacaatctcggctcactgcaagctccgcttcgtgggttcacgccattctcctgcctcagtctcccgagtagctgggactacaggcgcccgccactacgcccggctaatttttttgtactttttagtagagacagggtttcactgtgttatacaggatggtctcgatctcccgacctcatgatccgcccgcctcggcctctcagagtgctgggattacaggcgtgagccaccacgcccggcaagcatttacagttttaaatctcccagtcagaataaattcttattgagggccatacctagcctgtcttcatcaaactcataggtgaatctttgtcaaacctataggagagagatgcaggccatagagatggtcttgctgaaggtcttatagctaaattagttcagatccaggaaccagattctggaactgattgcacctatattatgttgtgtgtcagacactcccaggacctgtttggtaataattaggacagctgacatacttgttgctaattttgagatctgggcaacaactgtgtaggctgttctttcaacctctttcttcttacttctttacttttccttcagagaggagaaagccacccctgtgctatagccaccgctccaattctgactctagctaggtcatgaaacagactgagctattattgcatcaacacataaatcctgtcatttgggtattattctttagagaactagagattacctagctgcaacctaagtttcctgaattagaatcatttgagcagcaccatcttaattggctcattaacatatttgtgaccaggcacagtggcgcatgcctgtaatcccagcactttgggaggccgaggcgggcggatctcttgaggtcaggagtttgagaccagcgtggccaacatggtgaaaccccatttctactaaaaatgtaaaaattagctgggcttggtggcgcgcgcctgtaatcccagctactcggaaggctgaggtgtgagaatcacttaaacccgggagatggaggttgcagtgagcagagattgcgccactgcactccagcctaggtgacaagaatgagactccgtcttaaaacaaaaacaacatatttgttcacttttgaaccctgtggtgtcttttaactttgttaagggcccttggttagcaaaattatgaaagtttaggaaatttggctattgagtatattaagtacaactacaaaatcctctgagttctccaggaagcctaaaccttgagcagtatcttattcaagtggagtatatatcttcaagaatacagatttttaaggtaagtagtttttcgtctttgcatctcctaagaccattgttaacaaccttgatattaaacgaagaagtgaatgtaaacctccttttgaacatattttttataaagaaatattttgttaattggagtaagtagtattgttatgaaatcactgtgtaattgttaattgtaaactgcaatgtctattttgtgttgtaacaatgttgccataaaatagctttgctaaatgtgaaatgactttaatcccttttgtcttcaatatacttcataaaggaggaaatgatgatttacacaatttgtcatgaagcttccgtgtttatgagaaattccaagaagtaagagccaagaggacagatattatcagaatatgggacataagaaattgcatatagtgtcaagggtttctatataacaacttaatttatttcccttgcatatatagtaggggttaacattttgctcaatgttaacgggggacataatggacataaaacattggatagctttttatttaaatgagctaaaggtgtgcgtatacacatgcacttataaaattaaagtcatatatgtatatacacaca

SEQ ID NO: 139201 - DNA, 4378 bp, Homo sapiens
  Payload ID: 7282
  Gene Symbol: GNA12
  Gene Name: guanine nucleotide binding protein (G protein) alpha 12
  Uniprot ID: Q03113
  ENST ID: ENST00000275364
  CDS Start-End: 164-1309
ggcgacgagtgcgggcctcggagcgactgcagcggcggcggcggacgcggcctgaggcgagcggcggggcgtggggcggtgcctcggcccgggctcgccctcgccggcgggagcgtccatggcccccgggcgccggcggggcgcggccgcggcctgaggggccatgtccggggtggtgcggaccctcagccgctgcctgctgccggccgaggccggcggggcccgcgagcgcagggcgggcagcggcgcgcgcgacgcggagcgcgaggcccggaggcgtagccgcgacatcgacgcgctgctggcccgcgagcggcgcgcggtccggcgcctggtgaagatcctgctgctgggcgcgggcgagagcggcaagtccacgttcctcaagcagatgcgcatcatccacggccgcgagttcgaccagaaggcgctgctggagttccgcgacaccatcttcgacaacatcctcaagggctcaagggttcttgttgatgcacgagataagcttggcattccttggcagtattctgaaaatgagaagcatgggatgttcctgatggccttcgagaacaaggcggggctgcctgtggagccggccaccttccagctgtacgtcccggccctgagcgcactctggagggattctggcatcagggaggctttcagccggagaagcgagtttcagctgggggagtcggtgaagtacttcctggacaacttggaccggatcggccagctgaattactttcctagtaagcaagatatcctgctggctaggaaagccaccaagggaattgtggagcatgacttcgttattaagaagatcccctttaagatggtggatgtgggcggccagcggtcccagcgccagaagtggttccagtgcttcgacgggatcacgtccatcctgttcatggtctcctccagcgagtacgaccaggtcctcatggaggacaggcgcaccaaccggctggtggagtccatgaacatcttcgagaccatcgtcaacaacaagctcttcttcaacgtctccatcattctcttcctcaacaagatggacctcctggtggagaaggtgaagaccgtgagcatcaagaagcacttcccggacttcaggggcgacccgcacaggctggaggacgtccagcgctacctggtccagtgcttcgacaggaagagacggaaccgcagcaagccactcttccaccacttcaccaccgccatcgacaccgagaacgtccgcttcgtgttccatgctgtgaaagacaccatcctgcaggagaacctgaaggacatcatgctgcagtgagcgaggaagccccggggtttgtcgtcgttgagcagcccccacggctgtcggtcagactcttgggtgtgtgttgtctgtgtggtccttgagtgggtttctcggatccgtgccctggaatacctggctcaggaatgctgtcagaccagccagccagcgagctctaggcaaaaggacatggaaactgtcacgttagctactgaatcctgggggcgagtgaaactactgaaaatccgagtgatgatgttgtgaatacggaacacctaatcacacagcttgctttgcttttacagaaacgttcctctttttctgacgcagtttaattgaggaccgtgttgtgtgtgtatgtgtgtacacacgctctgtctttaatgacagaaacacaaaaaccagctggccttgcagacggcttttctaactcacaagtcttccctgagacagactaacctgaaagctttgcctaacagtagcttgtagagatccagtgcacgccgatgctgctaaactcagtgcctgagcccggccctgcagccccagccgcagtgtctgaaggccacctcccaaagggagcacgttgccttttcaaactcccgtgccgatttcctaagagcccctagtccaagcctctcagatgaagctgaggagccgtgcctaggatcccttcccagctctgaggacgggctgcagagctctgcaggtgtggattcaccttacgcccctacagcaggctcagcccttcccaccctgccccatgcccagcagcacaacacggagtgagacaggatgcccacggtgactgccgctccgtccgtgcacacacagcggtgctcttctccccttagccacccactgcccaacccaacggcaaagacacagaaaccaggtccccttgcagacggctctcccatcttcctgcaagtcatctgctcacacacagttggcagcacatagcgtttccttctttcagaaacattcctcttctggggcttcagaaagctggcaaggccactagcagagcttttgttaatgccccagctgcttggcgagctaacagctgacctttcgggaagcccacagacgctggaggaatcttgagtttctccaaactgccgctccaccagtgcctttggacagccgtgcctgttcgccgctctccctaagtctgattctcatcgaggcccctcgcttctatgactgtgcttgcagaagagtaaacactctcggatgccgctgtcctgggggagcccgcgggagcctgtgaatgttgatacgagctggccagtcctgggcccagctcacttgtccagctacctgccaggtggctttcactgtgtttaaaatacattgcattccaagctggtcccctctgtgtatcactctactgagaaatcctgcctagtgtgttttgggatgtgtcctagcatttacaagaaaatgaaaagcgtcctcttaattggcacccgaatgttgctgtggctcagtcacatatcccagggccctcgtcccgaggccgtgctgccccgagccccgagcccctctgcagctcacccttggcttgttttccgcaaacccggtaaacgcaagcccttggggcagatgcagaagcagaagagggaggggaaacctgcctctgggtcaccctgttagcacagcgttctcatcgggagacagcatggaactctctctcgcagtgctcgaggctgtgtgtcagtgtttgctgggcttgtggctccttttttggctggataaagaagtcgctgtttttgtactgcttctgtggctcttcacagacctcacggatgtgaccggagatgagtgccgatgaccacgttttaaaggagaaagagagctcctggtggggccctcggggtggtctcaggtcccatttgcagtctgcaacagtgacgcgcagcccggtccggagcgtggtgagctttgtttgccttctgggtcagctttcgctgtgtctcctgtgtgtgttagaatccagagcccagaggaagtgcaagcgggtcctccgccaacggggagagcctcttcgcggcgctgttggcgacagcagcgctgtgattcgcgtagcaggggagttgtttgaaacaccttcctgagtagtccggccttgtcaatgagtgcttgttttcctttaaacagtctgacatatttactcgtcactttcaaaccagaagcatgagaggaaggagatattgtggggtccgtttaactcgatagaaagcgcagggggatggcccccggcgcgggctcttgacccgctcagcgctgaccccaccgccctggccgaggcacttggccttgctgagctggacttcctcctcctcctcctcatgaccggggtgaattagaacgtttttaaagacacccccttccaaattctgtaacacattgtaattggagaagaaggaaactctgcaaggctaaactgtcattcacaacttggctacacatagactctagtcagttttgtctccagaaccttaggcttttgtattttttaattttaatttcactgttaatccttattgtcttttttattaagatgttggaaaagcaggaggtagttgtgcctcaattattgcaaaaatgtaacaataaagttcctcaaaataagatctgttcctcatagctatactgtgtacacataagacgcatatagggttttactgaaatctatttttaactcttatgttcgtagagaaattgtttcaaggattttgagtcataggtctgtaatttatagagatctctagaattcttattgtaattttcctacttctttgataaaagaaaaataagtcagattgttaactccaagattgaaaaaaaaaactcttgaaagaagattattagttgtaactaatttaggggttctgggcacagacatctaacctggtattgtaaggcagaggctcccattggaatggtagtggtccgggtcagttgttcatggtgtaagctttgcacagtgtattaacattgggagggtctggcttgaaaatttggccaccctcagcctctgaatgtttattaaaataaatttagtctttctttgcttaa

SEQ ID NO: 139202 - DNA, 3918 bp, Homo sapiens
  Payload ID: 7282
  Gene Symbol: GNA12
  Gene Name: guanine nucleotide binding protein (G protein) alpha 12
  Uniprot ID: Q03113
  ENST ID: ENST00000407904
  CDS Start-End: 330-1298
atttaagcagcctccttgactgtaggtccgctgactggcttcctccttgagagcacactcacagtgccggaccgcaggcacctcgccgatgttcctgtccacttgctttttgtattgctccttctccagtgagcttggaagcctcatgcgggcaaggccttgtctgtctggttctctgttgtgtcctcggagcctgccacagtggcggcgcttggtggctttgacaggggactggattgggtggaaggggcgagattagacctggatacagtgacgtccttgtcagccatgccgagtgcagagcgcctactgtattgtaggcatttgaaatgaaacggagaatgtttcccaggccgtgcctagcaaggatgcctggcagtcgtggttcgggaagcacaccagatggaaaccgaaagtgctgccgttttgagcacctactcattgcacaccctgggtccaggggctcaagggttcttgttgatgcacgagataagcttggcattccttggcagtattctgaaaatgagaagcatgggatgttcctgatggccttcgagaacaaggcggggctgcctgtggagccggccaccttccagctgtacgtcccggccctgagcgcactctggagggattctggcatcagggaggctttcagccggagaagcgagtttcagctgggggagtcggtgaagtacttcctggacaacttggaccggatcggccagctgaattactttcctagtaagcaagatatcctgctggctaggaaagccaccaagggaattgtggagcatgacttcgttattaagaagatcccctttaagatggtggatgtgggcggccagcggtcccagcgccagaagtggttccagtgcttcgacgggatcacgtccatcctgttcatggtctcctccagcgagtacgaccaggtcctcatggaggacaggcgcaccaaccggctggtggagtccatgaacatcttcgagaccatcgtcaacaacaagctcttcttcaacgtctccatcattctcttcctcaacaagatggacctcctggtggagaaggtgaagaccgtgagcatcaagaagcacttcccggacttcaggggcgacccgcacaggctggaggacgtccagcgctacctggtccagtgcttcgacaggaagagacggaaccgcagcaagccactcttccaccacttcaccaccgccatcgacaccgagaacgtccgcttcgtgttccatgctgtgaaagacaccatcctgcaggagaacctgaaggacatcatgctgcagtgagcgaggaagccccggggtttgtcgtcgttgagcagcccccacggctgtcggtcagactcttgggtgtgtgttgtctgtgtggtccttgagtgggtttctcggatccgtgccctggaatacctggctcaggaatgctgtcagaccagccagccagcgagctctaggcaaaaggacatggaaactgtcacgttagctactgaatcctgggggcgagtgaaactactgaaaatccgagtgatgatgttgtgaatacggaacacctaatcacacagcttgctttgcttttacagaaacgttcctctttttctgacgcagtttaattgaggaccgtgttgtgtgtgtatgtgtgtacacacgctctgtctttaatgacagaaacacaaaaaccagctggccttgcagacggcttttctaactcacaagtcttccctgagacagactaacctgaaagctttgcctaacagtagcttgtagagatccagtgcacgccgatgctgctaaactcagtgcctgagcccggccctgcagccccagccgcagtgtctgaaggccacctcccaaagggagcacgttgccttttcaaactcccgtgccgatttcctaagagcccctagtccaagcctctcagatgaagctgaggagccgtgcctaggatcccttcccagctctgaggacgggctgcagagctctgcaggtgtggattcaccttacgcccctacagcaggctcagcccttcccaccctgccccatgcccagcagcacaacacggagtgagacaggatgcccacggtgactgccgctccgtccgtgcacacacagcggtgctcttctccccttagccacccactgcccaacccaacggcaaagacacagaaaccaggtccccttgcagacggctctcccatcttcctgcaagtcatctgctcacacacagttggcagcacatagcgtttccttctttcagaaacattcctcttctggggcttcagaaagctggcaaggccactagcagagcttttgttaatgccccagctgcttggcgagctaacagctgacctttcgggaagcccacagacgctggaggaatcttgagtttctccaaactgccgctccaccagtgcctttggacagccgtgcctgttcgccgctctccctaagtctgattctcatcgaggcccctcgcttctatgactgtgcttgcagaagagtaaacactctcggatgccgctgtcctgggggagcccgcgggagcctgtgaatgttgatacgagctggccagtcctgggcccagctcacttgtccagctacctgccaggtggctttcactgtgtttaaaatacattgcattccaagctggtcccctctgtgtatcactctactgagaaatcctgcctagtgtgttttgggatgtgtcctagcatttacaagaaaatgaaaagcgtcctcttaattggcacccgaatgttgctgtggctcagtcacatatcccagggccctcgtcccgaggccgtgctgccccgagccccgagcccctctgcagctcacccttggcttgttttccgcaaacccggtaaacgcaagcccttggggcagatgcagaagcagaagagggaggggaaacctgcctctgggtcaccctgttagcacagcgttctcatcgggagacagcatggaactctctctcgcagtgctcgaggctgtgtgtcagtgtttgctgggcttgtggctccttttttggctggataaagaagtcgctgtttttgtactgcttctgtggctcttcacagacctcacggatgtgaccggagatgagtgccgatgaccacgttttaaaggagaaagagagctcctggtggggccctcggggtggtctcaggtcccatttgcagtctgcaacagtgacgcgcagcccggtccggagcgtggtgagctttgtttgccttctgggtcagctttcgctgtgtctcctgtgtgtgttagaatccagagcccagaggaagtgcaagcgggtcctccgccaacggggagagcctcttcgcggcgctgttggcgacagcagcgctgtgattcgcgtagcaggggagttgtttgaaacaccttcctgagtagtccggccttgtcaatgagtgcttgttttcctttaaacagtctgacatatttactcgtcactttcaaaccagaagcatgagaggaaggagatattgtggggtccgtttaactcgatagaaagcgcagggggatggcccccggcgcgggctcttgacccgctcagcgctgaccccaccgccctggccgaggcacttggccttgctgagctggacttcctcctcctcctcctcatgaccggggtgaattagaacgtttttaaagacacccccttccaaattctgtaacacattgtaattggagaagaaggaaactctgcaaggctaaactgtcattcacaacttggctacacatagactctagtcagttttgtctccagaaccttaggcttttgtattttttaattttaatttcactgttaatccttattgtcttttttattaagatgttggaaaagcaggaggtagttgtgcctcaattattgcaaaaatgtaacaataaagttcctcaaaat

SEQ ID NO: 139203 - DNA, 3785 bp, Homo sapiens
  Payload ID: 7282
  Gene Symbol: GNA12
  Gene Name: guanine nucleotide binding protein (G protein) alpha 12
  ENST ID: ENST00000407653
  CDS Start-End: 253-1170
aatgcttctgagaagagagaggaagatgacttcagaggctgcttgtggtctctcactcaaggctggtagggagccccggtctgcgtcctggaggaacggcacgctgagtcctgggccagtggccggcggggctgttggcgaccacagtagcacacaagggctctttctgaggagcaggagaccctggcacgggccccacgggagtgtctggggcgtccccgcctgtggcctcttctccccgccgcagcaccaatggctccacgagcagggctcggagctggccctctcctgcttcggagccgcgctgactgggtgtgtggcggatgggaggccgccctgagtgctcctcctcccttttgtacagcctgggtggaaaggacgggcctggtgcacttcctgcgggagggaggacatggggcctgcttccctctggcgctcctccacccgggcagcgtggtttctttccaaatgatttatcctctcatcgtcctgccgctctgtgcttcatggcattggggtcttatccggaaggggattgtccttttttggggggagtcggtgaagtacttcctggacaacttggaccggatcggccagctgaattactttcctagtaagcaagatatcctgctggctaggaaagccaccaagggaattgtggagcatgacttcgttattaagaagatcccctttaagatggtggatgtgggcggccagcggtcccagcgccagaagtggttccagtgcttcgacgggatcacgtccatcctgttcatggtctcctccagcgagtacgaccaggtcctcatggaggacaggcgcaccaaccggctggtggagtccatgaacatcttcgagaccatcgtcaacaacaagctcttcttcaacgtctccatcattctcttcctcaacaagatggacctcctggtggagaaggtgaagaccgtgagcatcaagaagcacttcccggacttcaggggcgacccgcacaggctggaggacgtccagcgctacctggtccagtgcttcgacaggaagagacggaaccgcagcaagccactcttccaccacttcaccaccgccatcgacaccgagaacgtccgcttcgtgttccatgctgtgaaagacaccatcctgcaggagaacctgaaggacatcatgctgcagtgagcgaggaagccccggggtttgtcgtcgttgagcagcccccacggctgtcggtcagactcttgggtgtgtgttgtctgtgtggtccttgagtgggtttctcggatccgtgccctggaatacctggctcaggaatgctgtcagaccagccagccagcgagctctaggcaaaaggacatggaaactgtcacgttagctactgaatcctgggggcgagtgaaactactgaaaatccgagtgatgatgttgtgaatacggaacacctaatcacacagcttgctttgcttttacagaaacgttcctctttttctgacgcagtttaattgaggaccgtgttgtgtgtgtatgtgtgtacacacgctctgtctttaatgacagaaacacaaaaaccagctggccttgcagacggcttttctaactcacaagtcttccctgagacagactaacctgaaagctttgcctaacagtagcttgtagagatccagtgcacgccgatgctgctaaactcagtgcctgagcccggccctgcagccccagccgcagtgtctgaaggccacctcccaaagggagcacgttgccttttcaaactcccgtgccgatttcctaagagcccctagtccaagcctctcagatgaagctgaggagccgtgcctaggatcccttcccagctctgaggacgggctgcagagctctgcaggtgtggattcaccttacgcccctacagcaggctcagcccttcccaccctgccccatgcccagcagcacaacacggagtgagacaggatgcccacggtgactgccgctccgtccgtgcacacacagcggtgctcttctccccttagccacccactgcccaacccaacggcaaagacacagaaaccaggtccccttgcagacggctctcccatcttcctgcaagtcatctgctcacacacagttggcagcacatagcgtttccttctttcagaaacattcctcttctggggcttcagaaagctggcaaggccactagcagagcttttgttaatgccccagctgcttggcgagctaacagctgacctttcgggaagcccacagacgctggaggaatcttgagtttctccaaactgccgctccaccagtgcctttggacagccgtgcctgttcgccgctctccctaagtctgattctcatcgaggcccctcgcttctatgactgtgcttgcagaagagtaaacactctcggatgccgctgtcctgggggagcccgcgggagcctgtgaatgttgatacgagctggccagtcctgggcccagctcacttgtccagctacctgccaggtggctttcactgtgtttaaaatacattgcattccaagctggtcccctctgtgtatcactctactgagaaatcctgcctagtgtgttttgggatgtgtcctagcatttacaagaaaatgaaaagcgtcctcttaattggcacccgaatgttgctgtggctcagtcacatatcccagggccctcgtcccgaggccgtgctgccccgagccccgagcccctctgcagctcacccttggcttgttttccgcaaacccggtaaacgcaagcccttggggcagatgcagaagcagaagagggaggggaaacctgcctctgggtcaccctgttagcacagcgttctcatcgggagacagcatggaactctctctcgcagtgctcgaggctgtgtgtcagtgtttgctgggcttgtggctccttttttggctggataaagaagtcgctgtttttgtactgcttctgtggctcttcacagacctcacggatgtgaccggagatgagtgccgatgaccacgttttaaaggagaaagagagctcctggtggggccctcggggtggtctcaggtcccatttgcagtctgcaacagtgacgcgcagcccggtccggagcgtggtgagctttgtttgccttctgggtcagctttcgctgtgtctcctgtgtgtgttagaatccagagcccagaggaagtgcaagcgggtcctccgccaacggggagagcctcttcgcggcgctgttggcgacagcagcgctgtgattcgcgtagcaggggagttgtttgaaacaccttcctgagtagtccggccttgtcaatgagtgcttgttttcctttaaacagtctgacatatttactcgtcactttcaaaccagaagcatgagaggaaggagatattgtggggtccgtttaactcgatagaaagcgcagggggatggcccccggcgcgggctcttgacccgctcagcgctgaccccaccgccctggccgaggcacttggccttgctgagctggacttcctcctcctcctcctcatgaccggggtgaattagaacgtttttaaagacacccccttccaaattctgtaacacattgtaattggagaagaaggaaactctgcaaggctaaactgtcattcacaacttggctacacatagactctagtcagttttgtctccagaaccttaggcttttgtattttttaattttaatttcactgttaatccttattgtcttttttattaagatgttggaaaagcaggaggtagttgtgcctcaattattgcaaaaatgtaacaataaagttcctc

SEQ ID NO: 139204 - DNA, 559 bp, Homo sapiens
  Payload ID: 7282
  Gene Symbol: GNA12
  Gene Name: guanine nucleotide binding protein (G protein) alpha 12
  ENST ID: ENST00000447791
  CDS Start-End: 329-559
tttaagcagcctccttgactgtaggtccgctgactggcttcctccttgagagcacactcacagtgccggaccgcaggcacctcgccgatgttcctgtccacttgctttttgtattgctccttctccagtgagcttggaagcctcatgcgggcaaggccttgtctgtctggttctctgttgtgtcctcggagcctgccacagtggcggcgcttggtggctttgacaggggactggattgggtggaaggggcgagattagacctggatacagtgacgtccttgtcagccatgccgagtgcagagcgcctactgtattgtaggcatttgaaatgaaacggagaatgtttcccaggccgtgcctagcaaggatgcctggcagtcgtggctcaagggttcttgttgatgcacgagataagcttggcattccttggcagtattctgaaaatgagaagcatgggatgttcctgatggccttcgagaacaaggcggggctgcctgtggagccggccaccttccagctgtacgtcccggccctgagcgcactctggagggattctggc

SEQ ID NO: 139205 - DNA, 4147 bp, Homo sapiens
  Payload ID: 7283
  Gene Symbol: GNA11
  Gene Name: guanine nucleotide binding protein (G protein), alpha 11 (Gq class)
  Uniprot ID: P29992
  ENST ID: ENST00000078429
  CDS Start-End: 243-1322
gctgcggcggcggcgcgggctgagtgcggccgcgcgggagtccgcggctggcgcggcccgagcggggacccggcggctcgccaggcggcggccgaggcggggcgggccggcccggggccgagggccggtggccgaggccggagggccgcggcgggcggcggccgaggcggctccggccagggccgggccgggggccggggggcggcggcgggcaggcggccgcgtcggccggggccgggacgatgactctggagtccatgatggcgtgttgcctgagcgatgaggtgaaggagtccaagcggatcaacgccgagatcgagaagcagctgcggcgggacaagcgcgacgcccggcgcgagctcaagctgctgctgctcggcacgggcgagagcgggaagagcacgttcatcaagcagatgcgcatcatccacggcgccggctactcggaggaggacaagcgcggcttcaccaagctcgtctaccagaacatcttcaccgccatgcaggccatgatccgggccatggagacgctcaagatcctctacaagtacgagcagaacaaggccaatgcgctcctgatccgggaggtggacgtggagaaggtgaccaccttcgagcatcagtacgtcagtgccatcaagaccctgtgggaggacccgggcatccaggaatgctacgaccgcaggcgcgagtaccagctctccgactctgccaagtactacctgaccgacgttgaccgcatcgccaccttgggctacctgcccacccagcaggacgtgctgcgggtccgcgtgcccaccaccggcatcatcgagtaccctttcgacctggagaacatcatcttccggatggtggatgtggggggccagcggtcggagcggaggaagtggatccactgctttgagaacgtgacatccatcatgtttctcgtcgccctcagcgaatacgaccaagtcctggtggagtcggacaacgagaaccggatggaggagagcaaagccctgttccggaccatcatcacctacccctggttccagaactcctccgtcatcctcttcctcaacaagaaggacctgctggaggacaagatcctgtactcgcacctggtggactacttccccgagttcgatggtccccagcgggacgcccaggcggcgcgggagttcatcctgaagatgttcgtggacctgaaccccgacagcgacaagatcatctactcacacttcacgtgtgccaccgacacggagaacatccgcttcgtgttcgcggccgtgaaggacaccatcctgcagctcaacctcaaggagtacaacctggtctgagcgcccaggcccagggagacgggatggagacacggggcaggaccttccttccacggagcctgcggctgccgggcgggtggcgctgccgagtccgggccggggcctctgcccgcgggaggagatttttttttttcatatttttaacaaatggtttttatttcacagttatcaggggatgtacatctctccctccgtacacttcgcgcaccttctcaccttttgtcaacggcaaaggcagcctttttctggccttgacttatggctcgcttttttctaaaaaaaaaaaaaaaagaaagaaagaaaaaaagcaacgaaacataaaacacacaagcgccccgtgcccccagtgactctgggcctcacagagcccccgccagccagcatggggccccgccctgcagccagtcacgcgcccccacaccgcagccccccgtggctgtccttccaaccccacgtgctttttctttctcctgcccgcttcttttcttcatcacaaaaggcgtggagactcggagacggacgtttttccccttttttaagttattgacgcccagcgcgcctcgcctcttcacccatcaacgctgtgctttgcccactggactcctgaagagggggtggggggctccctcggtcgcccaccctgggaagtgcctaaccttttattttattttatttttttgaggaaaaagaacgcctgactcacaggttgaagaaacaccctgggccctctctcatggccgggttccccgtccctctgcagaggctgggaagggtccccgggctggagccacgggggcttctctgggctgtgcctccggggccaacactggctgcttggggctgcccggggactccagagggctgcacggccaccctgccctggctagagcgcaccccaccggagcccacgtgggctgggcggctggagggatggtcccccggtgacactgggagaaaggccacttggatgggggcgtttctgttttgttccgctttgtgatgtcaccaatttggaaacagcgagggtgggtggggacttttacagaatattctcaggtgtgtacccgagaggcagagagagggacgtggccggcagctctgtgcgtggccttgtcccaagcacttgcgcccgcccccgagcgccgcccccggggagcgggaagccagcactcgcactttggccaggggcgcgtggaaggtggtggcaggcaccggcctgggcagcttccaggcctggctggccacgaccacggcccgagggggagcccgccaggccacgccgcactgagccacagccccgggggccgcctcccggggccccttgaggcactgaggcaccgagactggttctccccgagagactcggaaggtggggaacgaggggactgtgtttggggaggtggctttttcgtctgctgttgactgaacactacagcgccctgtggttccgggcttcgcacagctgtcccagggatggatcgcctgtgctgccttcgcccgccgccacaccgggaccctgcacggctgcttctggcctcgacagatgacaaaagaaacagccccaaaatacgaccactccaaccagcagttcccgcctgcctgcccgccactgtcaggcctgccctggcctcctcgtccgcagggctgtctgctggcttctgggggcagaagagcggggagccccgtggaagggtcaggggagaccaggtcagggcagctacatttctggtgatcagccccatggggagacggggctggcgggataccccccccccggcttccccacaccacttctgtctcacccggaagcgtcctttttttgtgccaggtgtctacctaagagggttggtgccagaagccccccatggcgagtgctggggcccggcggtgccctgggggagcagatggggccacccctggcagggccgctacaaccttttccagcagcggagccctctggggggcctgtgcttgtggcatctctgagggcctagattgcacaaggtgacctggccgtggcctgagggtggagtcgcccagcacgcaggccggggcgctgcggggctaagtattaggccttcccagggagggggcgtgccaagcatcccagagccgggctgggaccgccaaaacgtcgtggcctggatcctctgggtctgagtgcctgatcccctgccccccaaaaaagcagaggtaggtgttgcaggcccagggcaggggtgcctgccccaggagagtcccaggcagtggttctcgtgccagtggcacccaggggcaaggacagccaacccccacccttgccacgtgtggggccacgtgggcatgtggggtgtgtgtttttaccttggtgaatctcacctgccaacgatttctcgtgagtgccgaccaccttctccgaccatgttacgcccgggcggcagcagcccccggccactgcaaacccatgccctgggtcccccggctcccccagggaggcatccccgtgccaatgtcccccagtggtggcagcagatcctgtggccggcctggcggacgggacccagtgatacttgtatattacacagtcctgatttcagacaatttcaaccttaatctatttaaaaaagaatattctatacaagctgtttttaagccttttaccatttgaaatgcatgtgttgtgcgcgttggggatgggaggaggggctgaggagcggctcagtgtcacctcccacagccaccggccctgacccttaatccagacaccgatggaagtcgacttttcatatctttctcctgaaatgaactctgttttaaattggaataaattttgttcctaaatgctg

SEQ ID NO: 139206 - DNA, 733 bp, Homo sapiens
  Payload ID: 7283
  Gene Symbol: GNA11
  Gene Name: guanine nucleotide binding protein (G protein), alpha 11 (Gq class)
  ENST ID: ENST00000587636
  CDS Start-End: 1-710
agctctccgactctgccaagtactacctgaccgacgttgaccgcatcgccaccttgggctacctgcccacccagcaggacgtgctgcgggtccgcgtgcccaccaccggcatcatcgagtaccctttcgacctggagaacatcatcttccggatggtggatgtggggggccagcggtcggagcggaggaagtggatccactgctttgagaacgtgacatccatcatgtttctcgtcgccctcagcgaatacgaccaagtcctggtggagtcggacaacgagaaccggatggaggagagcaaagccctgttccggaccatcatcacctacccctggttccagaactcctccgtcatcctcttcctcaacaagaaggacctgctggaggacaagatcctgtactcgcacctggtggactacttccccgagttcgatggtccccagcgggacgcccaggcggcgcgggagttcatcctgaagatgttcgtggacctgaaccccgacagcgacaagatcatctactcacacttcacgtgtgccaccgacacggagaacatccgcttcgtgttcgcggccgtgaaggacaccatcctgcagctcaacctcaaggagtacaacctgttatcaggggatgtacatctctccctccgtacacttcgcgcaccttctcaccttttgtcaacggcaaaggcagcctttttctggccttgacttatggctcgcttttttctaaa

SEQ ID NO: 139207 - DNA, 295 bp, Homo sapiens
  Payload ID: 7283
  Gene Symbol: GNA11
  Gene Name: guanine nucleotide binding protein (G protein), alpha 11 (Gq class)
  ENST ID: ENST00000588401
  CDS Start-End: 1-217
cctgaccgacgttgaccgcatcgccaccttgggctacctgcccacccagcaggacgtgctgcgggtccgcgtgcccaccaccggcatcatcgagtaccctttcgacctggagaacatcatcttccgctgggcgtggttgtgtgcacctgtggtcccagctactcaggaggctgaggcaggaggatcgctcaagcccaggaggttgaggctgaagtgagccatgatggcaccactggactccagcctgggcgacagagggagaccctgtttcgtcttattaaacaaaagaaagccc

SEQ ID NO: 139208 - DNA, 4922 bp, Homo sapiens
  Payload ID: 7284
  Gene Symbol: GNA13
  Gene Name: guanine nucleotide binding protein (G protein), alpha 13
  Uniprot ID: Q14344
  ENST ID: ENST00000439174
  CDS Start-End: 247-1380
gctccggggccaccgcccctccggggccgggcccgccctccttccctccctccctcccccgctgtcctggcccgccctgcccggcccgccctgcgagtcagttcgctggttccctccctccctgggcgcgctcgggccgccgccgcgctccccgccctcgagcctcggtgccggagccgcccgccgccggaggaggaggtggagggagccggaggggcccgccgaggcggcggcggcggcggcaagatggcggacttcctgccgtcgcggtccgtgctgtccgtgtgcttccccggctgcctgctgacgagtggcgaggccgagcagcaacgcaagtccaaggagatcgacaaatgcctgtctcgggaaaagacctatgtgaagcggctggtgaagatcctgctgctgggcgcgggcgagagcggcaagtccaccttcctgaagcagatgcggatcatccacgggcaggacttcgaccagcgcgcgcgcgaggagttccgccccaccatctacagcaacgtgatcaaaggtatgagggtgctggttgatgctcgagagaagcttcatattccctggggagacaactcaaaccaacaacatggagataagatgatgtcgtttgatacccgggcccccatggcagcccaaggaatggtggaaacaagggttttcttacaatatcttcctgctataagagcattatgggcagacagcggcatacagaatgcctatgaccggcgtcgagaatttcaactgggtgaatctgtaaaatatttcctggataacttggataaacttggagaaccagattatattccatcacaacaagatattctgcttgccagaagacccaccaaaggcatccatgaatacgactttgaaataaaaaatgttcctttcaaaatggttgatgtaggtggtcagagatcagaaaggaaacgttggtttgaatgtttcgacagtgtgacatcaatacttttccttgtttcctcaagtgaatttgaccaggtgcttatggaagatcgactgaccaatcgccttacagagtctctgaacatttttgaaacaatcgtcaataaccgggttttcagcaatgtctccataattctgttcttaaacaagacagacttgcttgaggagaaggtgcaaattgtgagcatcaaagactatttcctagaatttgaaggggatccccactgcttaagagacgtccaaaaattcctggtggaatgtttccggaacaaacgccgggaccagcaacagaagcccttataccaccacttcaccactgctatcaacacggagaacatccgccttgttttccgtgacgtgaaggatactattctgcatgacaacctcaagcagcttatgctacagtgatgtacaaaagacttgctgttttaatatctttttgtgtttttgatgttttctgtttgttttgttttttaaaatagcagtttacaaccagaattagaacaatcttaattctacgtttaacttcttgaaaatcttagtactttttctgcggcctttggtttgtggctgaaagctgttgagtgactcatcgccaagatttgctgtaatgcaggctttgatctgtttcaccatggcttctattcaagtccagttaaaacctcccagctgacctcagactaggcatatttcaggctttaaattattctactttccaaactgaattctcctgcagtgccaagtatcaaaggtgtccttaaatacttgtagggatgaggttaggaatattcagttccaaaacaagatatcttctgtccgccttacatatagcagtgacacttgttgcctaactttatggtgacctcctattttgtaagggctgttagaagttctatctaagaaatggcattctgtaggtttatagaaggtttagccttcatattttaattgcttgtatacacaacagctgttttgcttttagatttctgtgtttctgaaggtaatgttcttcctgttttcaagtttacataaggatctttggtctgatgctgatgaagagttcacaggtggtatgggagagcaaaaggcaagctaatgctgtttaccgtgttttggtcaaacgtaacgagtgaaatagaatttgcctttctcatatttaattatcatgtagtttaatgtaccatatgtgaaacattctggccatagcagcaactaaaaactgcaagcaacttggtaacagaactttctaaataaacttaacctgttccagaatgtcatgtatttgacttttaagccctatctcagttggtcagtaaagaccaatccttactgtaggaaatcattgttgtatcatcacaaacatctatcttttgctgtcctgtccagtcccatcaactccacactgtgccatttgtggcatcgttttgtttatttggagtttgctaagggcagtatttttctgtcaagactattcaagaaggcattatttgagattcctgttcattcttggtgtgtctctaacagatacagtatgtatacatttgtataattgttgttgttgaaagtccagcttttttgaggtatattttaaatgttttaaggatgcttctaaggatcagtagtaatttttttagttcgcacctaaagatgattacattgacctcccccgactgcttaccaaattaaaatgtgtccacgaagtagctttgtgatcgcagatacattcatagtgaactcatcagaatggctggtttgcagtactgaaatactatcttctaggctgtatgtagtgctacaattagagaaacagaagtccaaggctggcgacagcttgaaaagtctgacagcttttctacttttcctgaaaattttaagactgtgatatctgtcattttactgtatagctgactgtgtactcaggtattttattggtccttgaaagattggtcgttatggatcacccagcctttccaagtcagtggctgttgttctgtcttgctgtctgatacgagagtggggcttttcagtgaactaaccagggattgttcttgacatacctgacttttctcacatttgaacttccactatcattgtatccatataacttctagcattttcatgccatggtaatccatgagctacacatacgtagcccggcaccgtgatgcaagttcatggtatcgtgcatgttcgtggtatcatggtatcattcatgcgtgtttgaatagttctacatctagtgcttcttgccaaaaagaatacattgtttaaattcacaaaattagcataattgcagtgctaatgaatatcggaatatgtgcacagtaacatttggactattcattggagagtttacccatacatttagcaaattgaatggccaaaacatttgactccagtgagggctcaagttagatccctatagaaagaggacacttcatcttacttaagtcatagttaagatctgtgatacgaaccatagatattgcctgacaaagcagaaatcaccaagtttcccccttttgaattaccaccaagaagtgttgaaacaccaaatagatatcatgttattttgggcatttgcagttttcttccctgctgcatgtaatgtctcagaatcaacattcttttaaaatctagactatattttgaggcaatgaattacttatattcaacttaggcttgttttgacattcagtagaactttaagttcaatctaaaggcttcagtccacatttttttatacgttgtattttaaaaacgtttgaaaggagtcttacacctgtatcatgaaaactgaatccttttgaaataccactatatgaagagagagatgaaatttagtgaacagaattgaaaaggtgctcataatttcactatgcaaacttaccccagtctctaaaaaagtaatttagatttaaagttctttgatgtatttgattttctaaatctttatggttatgatttggaataaaatgtgcctaatcctgtgttacattctgttcttaaatctgaatgccttctcatttaattctgaggaaatatcacacaagtgtcttcattgaccttgaagaaatgtatatacagttgccttataaaacaacataaatttagaccataacttttatagagaaagggttttgtcaaatgttttctgaaaatctgagtaattcaaagcatgcctctgcccctttaatatttttaataacctgcattgttgctgtctgccaaatattaaattgaaatcttcatttcaattttattatctggaaagggcactggattgctctgcaaccaaagaaagcaatatggaatgaaaaaactcattcacttttgtcttattttcttttaaggtgtattggcatgtaatttgcatagagaaggtcctctggttagtctctcaaattgaggctgtttagggaaatccttattcagttggtggcagtggttggtttaaagtagaaggaaataagatcgccttaataccagaaatgattagaagtgctgatttagattcaacaaataccatatgtccttatcattttttgtaagaagaaattggttaagtcctaactttcaatgtgtacccaaatacttgtatttatgcttttgataaaatgtattttcagcattaatacacatccgattatgccttatttatatatgaagaataaagttaccatgttacactgttatgtcctaaaattcaaatcactatttgagaaaccctcaaattggtgctttcattatataatgatacatttagacaaaaccccaaactaagccatttgaaacaagattctctccattgcagtttgtagcaatgttatttctgtgtatgtcatgagaaggctaaatatcagtgttaatttcttgtttgaatccgtgaaatcatgcctgtaaagcccaaacatttgtaacaaactccctaataaatttagagaaagtca

SEQ ID NO: 139209 - DNA, 1502 bp, Homo sapiens
  Payload ID: 7284
  Gene Symbol: GNA13
  Gene Name: guanine nucleotide binding protein (G protein), alpha 13
  Uniprot ID: Q14344
  ENST ID: ENST00000541118
  CDS Start-End: 185-1033
aataagggaactttttgcccgagacttcttgtcaagggcgtagggtgacagcctccttttgggcgagaatatgaaacttgaggagtgtcaggttgactgtactggaatcaggagagagtggacccatacagttagcatgaaaatgtagcatctgtgctttttcgccccagtgtcacggtcaggtatgagggtgctggttgatgctcgagagaagcttcatattccctggggagacaactcaaaccaacaacatggagataagatgatgtcgtttgatacccgggcccccatggcagcccaaggaatggtggaaacaagggttttcttacaatatcttcctgctataagagcattatgggcagacagcggcatacagaatgcctatgaccggcgtcgagaatttcaactgggtgaatctgtaaaatatttcctggataacttggataaacttggagaaccagattatattccatcacaacaagatattctgcttgccagaagacccaccaaaggcatccatgaatacgactttgaaataaaaaatgttcctttcaaaatggttgatgtaggtggtcagagatcagaaaggaaacgttggtttgaatgtttcgacagtgtgacatcaatacttttccttgtttcctcaagtgaatttgaccaggtgcttatggaagatcgactgaccaatcgccttacagagtctctgaacatttttgaaacaatcgtcaataaccgggttttcagcaatgtctccataattctgttcttaaacaagacagacttgcttgaggagaaggtgcaaattgtgagcatcaaagactatttcctagaatttgaaggggatccccactgcttaagagacgtccaaaaattcctggtggaatgtttccggaacaaacgccgggaccagcaacagaagcccttataccaccacttcaccactgctatcaacacggagaacatccgccttgttttccgtgacgtgaaggatactattctgcatgacaacctcaagcagcttatgctacagtgatgtacaaaagacttgctgttttaatatctttttgtgtttttgatgttttctgtttgttttgttttttaaaatagcagtttacaaccagaattagaacaatcttaattctacgtttaacttcttgaaaatcttagtactttttctgcggcctttggtttgtggctgaaagctgttgagtgactcatcgccaagatttgctgtaatgcaggctttgatctgtttcaccatggcttctattcaagtccagttaaaacctcccagctgacctcagactaggcatatttcaggctttaaattattctactttccaaactgaattctcctgcagtgccaagtatcaaaggtgtccttaaatacttgtagggatgaggttaggaatattcagttccaaaacaagatatcttctgtccgccttacatatagcagtgacacttgttgcctaactttatggtgacctcctattttgtaa

SEQ ID NO: 139210 - DNA, 2482 bp, Homo sapiens
  Payload ID: 7285
  Gene Symbol: GNA14
  Gene Name: guanine nucleotide binding protein (G protein), alpha 14
  Uniprot ID: O95837
  ENST ID: ENST00000341700
  CDS Start-End: 515-1582
ctgcggtcactgctgaggttttcagaactttccaggcaaaggccagccaggtcctttgcctccaacccactccgcgcctacctcccgcctggggacacccctaggcccaggagatcctactctcccccgagcaccgacgttccaactcgtctgcgcccccgactgctgtccggctcctgtgccaaggggcgcgcgcatcttcccggggccagcaacgctcccaacttctcgactcgccctcctcctccccagagcgagagtggggcgggctgagcccggatccggggtgcactcgagcgttcccagcgctcggcattcaccccgcctcagagccgactttcgaagggggattgagcctcggaggtccaggcgtcttactccaaagctcaagtcggcccccgtcttttctttccacacccctgtgcccgtcgcatgctggccgggtgagcggccgggccgaggattcgggtgcccggggccgcgtcgccccgtcgggtactgagctgagcgcaccatggccggctgctgctgcctgtccgcggaggagaaggagtcgcagcgcatcagcgcggagatcgagcgacagcttcgtcgggacaagaaggacgcgcgccgtgagcttaagctgctgctgctgggaactggtgaaagtgggaaaagcacctttatcaagcagatgagaattatccatgggtctggttacagcgacgaagacagaaaggggttcacgaagctggtttaccaaaacatattcaccgccatgcaagccatgatcagagcgatggacacgctaaggatacagtatgtgtgtgaacagaataaggaaaatgcccagataatcagagaagtggaagtggacaaggtctccatgctctccagggagcaggtggaggccatcaagcagctctggcaagatccaggcatccaggagtgttacgacaggaggagggagtaccagctgtcggactctgccaaatattacctgactgacattgaccgcatcgccacaccatcattcgtgcctacccaacaagatgtgcttcgcgtccgagtgcccaccaccggcatcattgagtatccatttgacttggaaaacatcatctttcggatggtggatgttggtggccaacgatcggaaagacggaagtggattcactgctttgagagtgtcacctccattattttcttggttgctctgagtgaatatgaccaggtcctggctgagtgtgacaacgagaatcgcatggaagagagcaaagccttatttaaaaccatcatcacctacccctggtttctgaattcgtctgtgattttattcttgaacaagaaggatcttttggaagagaaaatcatgtactctcatctaattagctatttcccagaatacacaggaccgaaacaggatgtcagagctgccagagactttatcctgaagctttaccaagatcagaatcctgacaaagagaaagtcatctactctcacttcacatgtgctacagatacagacaatattcgctttgtgtttgctgctgtcaaagacacaattctacagctaaacctaagggaattcaaccttgtctaaaagctgctgcccactcctcccctataacagaagatgtgatttgcaaactccttgttttatttgcaagtgcttctgacatcaccagagccagccccatgccaggaactaaggatgtcatgtagatcgtggggacagagatgggtgatggaacttggaagatatttgagtttaccaacatactttaaaagtccttacatcccaaattgtgtttataattattttcttgacttttggctataagattttgtgtaatttttgaatttggtgttttctagaatttttaaaagccactttgatttagttttaaatatgtttaaaaatagcgattaaaattatgtaagcaaggagcctgttagtttatagatcatgccttcaaacctctagagttaatttgggtgacttttttaaaaataagaatgttaatgggtttgaagctttttattaaaccttgtaatttagagacatttttaattgtgtttctcacctcatgctgaagggtgactcctttaacatgccaccaaagattttttttaaacacttggttctttttgtgtgttaactttctaagccaaattaatggatatataagtatatctaatttagctttgccacagtttgatcaccaagaagccaaagctgacatagagtaaatgggctctagatagcatatatgttttattggtgaaaaatgtgtgtgtgtgcacgtgtgtgtgtgtgtacatttttacccccaatgtatatgaccagatcttaaaaatgtatgaaatggctagaagtccacattgtttgacaaatgttacgtaaccctgccaaagttctgatggccaccacagatttgctgtttgaattatgtatgctgtgcctttctgaggaggctaagaatataccattctgctatta

SEQ ID NO: 139211 - DNA, 2133 bp, Homo sapiens
  Payload ID: 7286
  Gene Symbol: GNA15
  Gene Name: guanine nucleotide binding protein (G protein), alpha 15 (Gq class)
  Uniprot ID: P30679
  ENST ID: ENST00000262958
  CDS Start-End: 259-1383
ggggagccctggcctccccacctcctcccgtccccaccctgttcccagcactcaagccttgccaccgccgagccgggcttcctgggtgtttcaggcaaggaagtctaggtccctggggggtgacccccaaggaaaaggcagcctccctgcgcacccggttgcccggagccctctccagggccggctgggctgggggttgccctggccagcaggggcccgggggcgatgccacccggtgccgactgaggccaccgcaccatggcccgctcgctgacctggcgctgctgcccctggtgcctgacggaggatgagaaggccgccgcccgggtggaccaggagatcaacaggatcctcttggagcagaagaagcaggaccgcggggagctgaagctgctgcttttgggcccaggcgagagcgggaagagcaccttcatcaagcagatgcggatcatccacggcgccggctactcggaggaggagcgcaagggcttccggcccctggtctaccagaacatcttcgtgtccatgcgggccatgatcgaggccatggagcggctgcagattccattcagcaggcccgagagcaagcaccacgctagcctggtcatgagccaggacccctataaagtgaccacgtttgagaagcgctacgctgcggccatgcagtggctgtggagggatgccggcatccgggcctgctatgagcgtcggcgggaattccacctgctcgattcagccgtgtactacctgtcccacctggagcgcatcaccgaggagggctacgtccccacagctcaggacgtgctccgcagccgcatgcccaccactggcatcaacgagtactgcttctccgtgcagaaaaccaacctgcggatcgtggacgtcgggggccagaagtcagagcgtaagaaatggatccattgtttcgagaacgtgatcgccctcatctacctggcctcactgagtgaatacgaccagtgcctggaggagaacaaccaggagaaccgcatgaaggagagcctcgcattgtttgggactatcctggaactaccctggttcaaaagcacatccgtcatcctctttctcaacaaaaccgacatcctggaggagaaaatccccacctcccacctggctacctatttccccagtttccagggccctaagcaggatgctgaggcagccaagaggttcatcctggacatgtacacgaggatgtacaccgggtgcgtggacggccccgagggcagcaagaagggcgcacgatcccgacgcctcttcagccactacacatgtgccacagacacacagaacatccgcaaggtcttcaaggacgtgcgggactcggtgctcgcccgctacctggacgagatcaacctgctgtgacccaggccccacctggggcaggcggcaccggcgggcgggtgggaggtgggagtggctgcagggacccctagtgtccctggtctatctctccagcctcggcccacacgcaagggagtcgggggacggacggcccgctgctggccgctctcttctctgcctctcaccaggacagccgccccccagggtactcctgcccttgcttgactcagtttccctcctttgaaagggaaggagcaaaacggccatttgggatgccagggtggatgaaaaggtgaagaaatcaggggattgaggacttgggtgggtgggcatctctcaggagccccatctccgggcgtgtcacctcctgggcagggttctgggaccctctgtgggtgacgcacaccctgggatggggctagtagagccttcaggcgccttcgggcgtggactctggcgcactctagtggacaggagaaggaacgccttccaggaacctgtggactaggggtgcagggacttccctttgcaaggggtaacagaccgctggaaaacactgtcactttcagagctcggtggctcacagcgtgtcctgccccggtttgcggacgagagaaatcgcggcccacaagcatccccccatcccttgcaggctgggggctgggcatgctgcatcttaaccttttgtatttattccctcaccttctgcagggctccgtgcgggctgaaattaaagatttcttagaggctgcgtcgccagcgtcctgttta

SEQ ID NO: 139212 - DNA, 799 bp, Homo sapiens
  Payload ID: 7286
  Gene Symbol: GNA15
  Gene Name: guanine nucleotide binding protein (G protein), alpha 15 (Gq class)
  ENST ID: ENST00000592455
  CDS Start-End: 10-168
caccgcaccatggcccgctcgctgacctggcgctgctgcccctggtgcctgacggaggatgagaaggccgccgcccgggtggaccaggagatcaacaggatcctcttggagcagaagaagcaggaccgcggggagctgaagctgctgcttttggtcccaggctcttgaagactccagcatcagtatcccggacccagggccggtttggcaggtgcgcgaactgggctgtcccagagggttccaggctcagaagagcctgaagtttcagcttgcacccagccccagaaaatctgtggctggccctgcaaggaccctgccagattttgtaccatctgtcagcaaggcccaggcgagagcgggaagagcaccttcatcaagcagatgcggatcatccacggcgccggctactcggaggaggagcgcaagggcttccggcccctggtctaccagaacatcttcgtgtccatgcgggccatgatcgaggccatggagcggctgcagattccattcagcaggcccgagagcaagcaccacgctagcctggtcatgagccaggacccctataaagtgaccacgtttgagaagcgctacgctgcggccatgcagtggctgtggagggatgccggcatccgggcctgctatgagcgtcggcgggaattccacctgctcgattcagccgtgtactacctgtcccacctggagcgcatcaccgaggagggctacgtccccacagctcaggacgtgctccgcagccgcatgcccaccactggcatcaacgagtactgcttctccgtgcaga

SEQ ID NO: 139213 - DNA, 3281 bp, Homo sapiens
  Payload ID: 7287
  Gene Symbol: GNAO1
  Gene Name: guanine nucleotide binding protein (G protein), alpha activating activity polypeptide O
  Uniprot ID: P09471
  ENST ID: ENST00000262493
  CDS Start-End: 847-1911
actcgcgcgctgcgctggcctcctccccgccccgggcccaggcgcgcgcgcgcttgttcgctctcccattttttttttcccctccctccctgcctctctctctctccctctccctcgagctcccggctggctgcggctccctggcgctctccctctctctccggtaggctcaccgagcgatgcgagctctgggagacagcgacgccgcctcccgctagagacctgcccctcggcccggccccctgcccaaccctgcccagcgcgcgggggtcggcgaaggcgccgcggacgcaccgacggctgaagagcggcgatgcacatgcactagcagcaccccctaactcactccctccacatcccgcgccgccgccgccgcctcctccacctcctcctccgccgccgccgcctcctcctcctccggcagccgcggcagcaggacccaccctgccccccaccccaccctctgtcggctccggctgcggctccagcctcgactattattttatttattttgggtcgtgcacaagcctcagtgcctgcagtccgcgcctcctcggcccgcgggcgcctcctcccttggctccggagccccagaccccggccaccctcgattcgacaaccccagacccctgccagctgccgcgagtctccgctgctggaatcttgttagcggctgtctttttggagggttctggtttcccgacatttttgtttccagcccaggagaggatatcgtgattttccccccttgagcccaggctctgctctctgggggggtggggggcgctccaagccggggagccgtgccagccgagtcgtgcgggctgtggcagggaaggggccaccatgggatgtactctgagcgcagaggagagagccgccctcgagcggagcaaggcgattgagaaaaacctcaaagaggatggcatcagcgccgccaaagacgtgaaattactcctgctcggggctggagaatcaggaaaaagcaccattgtgaagcagatgaagatcatccatgaagatggcttctccggagaagacgtgaaacagtacaagcctgttgtctacagcaacactatccagtccctggcagccatcgtccgggccatggacactttgggcatcgaatatggtgataaggagagaaaggctgacgccaagatggtgtgtgatgtggtgagtcggatggaagacaccgagcccttctctgcagagctgctttctgccatgatgcggctctggggcgactcaggaatccaagagtgcttcaaccggtcccgggagtatcagctcaacgactctgccaaatactacctggacagcctggatcggattggggccgccgactaccagcccaccgagcaggacatcctccgaaccagggtcaaaaccactggcatcgtagaaacccacttcacattcaagaacctccacttcaggctgtttgacgtcggaggccagcgatctgaacgcaagaagtggatccattgcttcgaggacgtcacggccatcattttctgtgtcgcgctcagcggctatgaccaggtgctccacgaagacgaaaccacgaaccgcatgcacgagtctctcatgctcttcgactccatctgtaacaacaagttcttcatcgatacctccatcattctcttcctcaacaagaaagatctctttggcgagaagatcaagaagtcacctttgaccatctgctttcctgaatacacaggccccaatacctatgaagacgcagccgcctacatccaagcacaatttgaaagcaaaaaccgctcacccaacaaagaaatatattgtcacatgacttgtgccacagacacgaataacatccaggtggtgttcgacgccgtcaccgacatcatcattgccaacaacctccggggctgcggcttgtactgacctcttgtcctgtatagcaacctatttgactgcttcacggactctttgctgttgacgttgatctcctggtagcatgaccttttggcctttgtaagacacacagcctttctgtatcaagcccctgtctaacctacgaccccagagtgactgacggctgtgtatttctgtagaatgctgtagaatccggttttagttgagtcttcacatttagaatttgaaaggaaaaacagaacatttctcatgtgctttgtagcttaaaaaaaggaaaactcaccatttcatccatatttctttttcttgcaaaacaaacatacccatctgcaccgacgcctgcccccgtcccacctcgcggcgcagcccctggagctcctgctggggggcagggcccatctgccgcctggggctccggtgcggtgcactggtccgaggagtgtgctcaggccgggctttccagaaggccacaggccactgcaaaccctgctgcctgccggccgcccagacaccacagacgccacctggcggccctaagccactcccgccacacgctcactccaggttcgtatagaaaaagcacagctctcactggccagtagctgccaaaaagaacacccatcgtataaggaaatccagccccatagaaaacaatctgcccaccgaccccctttctaaggatagcctttgtaggggttttttggttccttttttttttttttcagtttttgtttttacttttgtcccgccgagtactatgtattaccagccccccaccccacagatcagttttcctagtctttgggaaacgggttgtgttttttttcctttgccgtgttggatttccggtcccggctgacacctcccttcgtgtgtgcgcccctccccacccctgcctttgtttcggtgccctgtgtccgctctctcatgtggggatgtttgtgctgcagacaaaaagaacaaaaaaaaatttttaaataccacaagatggaaaaaaaaaacaaaaaaatttaaaaagatggaatgtagtgtttacattaaagccgccgttttcatgaccaatcctatgtcatttctactttgactaatacccaaaccctaaacctcttcacggtttcacttttaagacttaatctttgctgaagaagaccagtcacagccatttcaaataaagaggaggcaaaaagacaaaacacacaaaaaattaaaaaaaaaaacttaaaaaaaaaaggaaaaaagaaaaaaaagcccacgggtctttgtaagcctttctattcccaatcggtgaggtttctgtgatatcttacacactgccagtctacttctctgactaatggaaaattcctgtgtagctcaataaaagagaatgtttgtctgta

SEQ ID NO: 139214 - DNA, 5574 bp, Homo sapiens
  Payload ID: 7287
  Gene Symbol: GNAO1
  Gene Name: guanine nucleotide binding protein (G protein), alpha activating activity polypeptide O
  Uniprot ID: P09471
  ENST ID: ENST00000262494
  CDS Start-End: 261-1325
agccccagaccccggccaccctcgattcgacaaccccagacccctgccagctgccgcgagtctccgctgctggaatcttgttagcggctgtctttttggagggttctggtttcccgacatttttgtttccagcccaggagaggatatcgtgattttccccccttgagcccaggctctgctctctgggggggtggggggcgctccaagccggggagccgtgccagccgagtcgtgcgggctgtggcagggaaggggccaccatgggatgtactctgagcgcagaggagagagccgccctcgagcggagcaaggcgattgagaaaaacctcaaagaggatggcatcagcgccgccaaagacgtgaaattactcctgctcggggctggagaatcaggaaaaagcaccattgtgaagcagatgaagatcatccatgaagatggcttctccggagaagacgtgaaacagtacaagcctgttgtctacagcaacactatccagtccctggcagccatcgtccgggccatggacactttgggcatcgaatatggtgataaggagagaaaggctgacgccaagatggtgtgtgatgtggtgagtcggatggaagacaccgagcccttctctgcagagctgctttctgccatgatgcggctctggggcgactcaggaatccaagagtgcttcaaccggtcccgggagtatcagctcaacgactctgccaaatactacctggacagcctggatcggattggggccgccgactaccagcccaccgagcaggacatcctccgaaccagggtcaaaaccactggcatcgtagaaacccacttcacattcaagaacctccacttcaggctgtttgacgtcggaggccagcgatctgaacgcaagaagtggatccattgcttcgaggacgtcacggccatcattttctgtgtcgcgctcagcggctatgaccaggtgctccacgaagacgaaaccacgaaccgcatgcacgaatccctgaagctttttgacagcatctgcaacaacaaatggttcacagacacgtccatcatcctgtttcttaacaagaaggacatatttgaagagaagatcaagaagtccccgctcaccatctgctttcctgaatatacaggccccagcgccttcacagaagccgtggcttacatccaggcccagtacgagagcaagaacaagtcagcccacaaagagatctacacccacgtcacctgcgccacggacaccaacaacatccagtttgtctttgatgctgtgacggacgtcatcatcgccaaaaacctgcggggctgtggactctactgagcccagccgccctgcccggcacccttgccctgcctggcctgccgccccccctcccctggaaccaggctccaccactctcagaccactctttgcacttgaggaagaagacctcagaggctggcaccaagggagggaggagggagcatcctccacccgcaccccccaacagaacttgtggtaacgcaggggcggggcggggctgctgagtgcatgctgcaaggccaggagactccacgctcacagcctctgtgtcatctctgagtgcttgatcgggaagctggggggacagggcagggcccagatgggcacaccctgcacctgatgactcactggaagcctcggagtgtcctcctgtcatcttgggtggtgcaggggcgcagatggccctgcagcagggtgctggcagggtggggtcataggagccatccttcagctttgcctggggtctctggtggagggcagttccgtcaacaaaagccagggtgggatcaggccaacttggtgtgggttggaggactcaggccttggcgatggcctccgtctccctgctccctcccctgggtctcagcccttccttctctgggtcatcctcccttgcctttgctctcccagagaactcccatccctgactcctccgagttctggaaatgcttcttgagactgatttatggctcagatagatggtggcgtggagcggggggagggagagatgggaggtgcggggaagggaggtggaagctcctgtgtcacctgggctggggcctcccgcccagtcctcgcaggccaaagggtgacccatttcttttttccagtcaccaggagctcggatggtcactctgaggtgtgaatagatatgtttttccttcagtccacactgaattcaactcaaaccagcaaaggcctttgggctggggattctgtggttgcagaggtctagagggggtggacttttgcagccagtgcctccgcctcaccgtcttggtgaagaaatcagcgagtttgttcacagccgttggtgtcttcccagcccctggggacagaggacagcagggggatggagctgacaccctggagtatttggacccaggccagcacaaacacacccccctgtccccaactctaaagggagagtcctaggactccttagaggaggcttcactgcggagatccctgagcagaagggggcggggtagcttctcccggtgacggtgacgcaggtctggctggccttgggcaaccaacacacctctcccactccaagatgcctccaggtggctgaggccaacgcccacacccaggccagtcgtgtgcttgtacagcaggctgtgcctggggacctagatgtgccatgggagggaggagggtacccactgacaggcctctgcctccctcctcaagccctctgttctccctgcccccactctggacactgcttagtccccagccaggcagggcccctgggtttccacttgcagcccccggactgccccagagccgggaagcaccagtgccaacagctctggacttgttggacccacaggcacagagctctgagtggtgcccaggagacccaggaaccttccctagtgccaaatgcctgcagggaccggtgcctggggagcctctggcagccggactgcaggagccaccccatcagcccaagtccacctctgttttgttcacctcggtcatgttttggaccttgcaccaggtgctgggacgtggcagaggacaggccctgggaaccaacagtgtcctaccatggacagccagggccagctaagctaagccatcccgcccaacacagaagacatggcagttatttctcagcagcaccacgctgggtgaggccagttgttccgcttactctgctccgaactgtaaccccaggctcagaagcagccggcaaaagggggatgctggccacgccccacctctaaggccatcaccctggaggtggaagtcactgggctggagggctctccatgtcccccagcagccgccctcagaacacagtggccagagcaccaggctgggtccaggcctccaatccaggccttccctgtccctagaactggggctggaggagtgggtgctcagcccttcctgccctccatccccagcctgcctttctcttcctttggatgctccatcctccttggtttcttgcactgctctcaatcctcccaccctagcctgggggtggtccttggtcctcaggggtatccggggagaaattctctccctgtgcatgacacctgtcatccatgtcgtaaccagcggctccatcttgtggggtggtgactgagggtgacaaatgagatttggctccgtcgtggatgtggatgtgggaggaatgttgcgagtgacacgtgtgggtttctaatccacagtggtcctgcgtgtgccctgaggggccatggtaacctctccgatggctcggatttagcaggccaagcagaaactgatttctacgaagagcgtctttgccaaactcatgaaaattgtgcctgccactttcatgcctatgggccagttttgtgacctgcgccgctgaccatcctaagaaccaggtcttggccttccctctgagcactgatagaggtccccaaggctctctggcctgaggagggtgtggggtctgcccagccccaagcagagagcacagtctgggcccctgaccaacagctttggcattctgggttccatggggaccctagagctcaggcacaagaacaacaccatacctgctgccaggacgcagctgtctcccaggccctccccacagcccagctcccactggcaggaactggacacatccctgccctccatggtctgcactggtcttctctgagtattcttaggagcagaggcagccccaagttccaacttgcaagccctgtaactaagctgtctataaaccccagcagggaaggccaagggatggtctcacccatgcccttccctttggccaacatgagtcctgcagtggggagcttagcccctgctcccacctaacactctacagttagcacccaggggttgattcaggaagttcttcctttttctagcctgcatccttcctggccaccccctttatttctcagtctgacctggtgcactcttggcaagtgagtccattgcagtcccaggtggatatttaatgagcactcggactgtttcctccaagtcagctagtggcctgccctcctccttttcaagaagtctggggcacagagcctcctctggctgcctcttctcttctctgagcctctgggagccttcaggcaaaacctggcagttctcaggaacccagacctgaggctccagctccgcggccaccagagattcagtgtgcagtgccgaaggcagtcacccccaggcagttcctgctgtcaggccgcaagcctagagcgcaggatcccagcagcccagggaacagggccggcgtgtgagctgctgccgtggggtctgtggtagggctccccatctcccacccctcagcaagaagagtcctgacccctgaccccaccctgcccagagaggagctggggcctccagacagaccccactgcagccagatgaaggcccctgtcaaagaaggggcaggctgggggaaaagcagaaagaatggcccccagtccaaactcctggatcccctccatgagagaggggctccccctggaacagaagctctcatccccaggcccagtgcacaagaccaccagcagagacccaccgcccttcctggcagagcaccacttcctggcagtgcagctccgaggcaccactactgtcctccccttccctccccacccctcccctccctttccctcctctcccctcccctccacacctgccctgttactcccacagctctgggcagccaggccctcccctcctgcctcctggtcttctctactccgctggttctgacccatcccctggctctgcccgccgtcccccaccctgcccctgctgagtatcttcttcctccccacgcacccccctcccccatctaggcgaggtgggctcgggcgtcccaggccctccttagaaaagccgtctctctcgagtgcagtggtcccacctcccaaccccatcactgctgcccaccccatattaactgtaattttgtaagaagagtgacttgttggtttaataaatctctagttattgtaataatttattggctgccataatgtatttattagtcgcctaccgttaataaaaagtgcccgctttccta

SEQ ID NO: 139215 - DNA, 847 bp, Homo sapiens
  Payload ID: 7287
  Gene Symbol: GNAO1
  Gene Name: guanine nucleotide binding protein (G protein), alpha activating activity polypeptide O
  ENST ID: ENST00000565363
  CDS Start-End: 462-847
tcgcatgccttagtccccccctccccctgttcccttaagctgacactcaccagtttttccccactgtctgtgtcccaacaggggctggagaatcaggaaaaagcaccattgtgaagcagatgaacccctcggggagtttaaataaggtgctgcggcacttgagttctgcaaaagacacctattcgctgaccagacaaagatgcttagccacaactcacaactctcagggtgcagttcgaagaggaggaagcagcatggcatataaagctcatgctcccttgaaggctggtgattgagacaagttatgtcttctagcatttgactccctcaaagagattgcaggacttccctctgattgcaggtggctcaatccactcagatcacctagaaacttgatagagatttagaatcttaaagaagacagaagcttagacagagcatgtagcccagcccatcaacagatgaagaagttgaatcctgcagggactacaaggaggatcatccatgaagatggcttctccggagaagacgtgaaacagtacaagcctgttgtctacagcaacactatccagtccctggcagccatcgtccgggccatggacactttgggcatcgaatatggtgataaggagagaaaggctgacgccaagatggtgtgtgatgtggtgagtcggatggaagacaccgagcccttctctgcagagctgctttctgccatgatgcggctctggggcgactcaggaatccaagagtgcttcaaccggtcccgggagtatcagctcaacgactctgccaaatactacctggacagcctggatcggattggggccgccgactaccagcccac

SEQ ID NO: 139216 - DNA, 440 bp, Homo sapiens
  Payload ID: 7287
  Gene Symbol: GNAO1
  Gene Name: guanine nucleotide binding protein (G protein), alpha activating activity polypeptide O
  ENST ID: ENST00000564727
  CDS Start-End: 1-285
atcgatacctccatcattctcttcctcaacaagaaagatctctttggcgagaagatcaagaagtcacctttgaccatctgctttcctgaatacacaggccccaatacctatgaagacgcagccgcctacatccaagcacaatttgaaagcaaaaaccgctcacccaacaaagaaatatattgtcacatgacttgtgccacagacacgaataacatccaggtggtgttcgacgccgtcaccgacatcatcattgccaacaacctccggggctgcggcttgtactgacctcttgtcctgtatagcaacctatttggtaatgattccagcacccacagaacagcttgcgtgcgcgcgcatacacacacacacacacacacacacacacaccactaacaaatgcaagttggtaaataaactttaaagaggcataacaaaacctt

SEQ ID NO: 139217 - DNA, 543 bp, Homo sapiens
  Payload ID: 7287
  Gene Symbol: GNAO1
  Gene Name: guanine nucleotide binding protein (G protein), alpha activating activity polypeptide O
  ENST ID: ENST00000563440
  CDS Start-End: 294-543
atattcccaccacagctggtttcaagctacccatctggccagtgagtgatgcaacgttagctcttgtgagccagcacaactcactccagcacaccactgggtcaggccatggaagatagaagcaagaaggactgaagagcattccatggctttgctctgagcacctgggtagatggggatgccgtctactgaggatcatccatgaagatggcttctccggagaagacgtgaaacagtacaagcctgttgtctacagcaacactatccagtccctggcagccatcgtccgggccatggacactttgggcatcgaatatggtgataaggagagaaaggctgacgccaagatggtgtgtgatgtggtgagtcggatggaagacaccgagcccttctctgcagagctgctttctgccatgatgcggctctggggcgactcaggaatccaagagtgcttcaaccggtcccgggagtatcagctcaacgactctgccaaatactacctggacagcctggatcggattggggccgccgactaccagccca

SEQ ID NO: 139218 - DNA, 492 bp, Homo sapiens
  Payload ID: 7287
  Gene Symbol: GNAO1
  Gene Name: guanine nucleotide binding protein (G protein), alpha activating activity polypeptide O
  ENST ID: ENST00000562316
  CDS Start-End: 161-492
tttccacttgcaggctcgcttcttgccctatccactcggcagttcctggtgatcccacaggatcatccatgaagatggcttctccggagaagacgtgaaacagtacaagcctgttgtctacagcaacactatccagtccctggcagccatcgtccgggccatggacactttgggcatcgaatatggtgataaggagagaaaggctgacgccaagatggtgtgtgatgtggtgagtcggatggaagacaccgagcccttctctgcagagctgctttctgccatgatgcggctctggggcgactcaggaatccaagagtgcttcaaccggtcccgggagtatcagctcaacgactctgccaaatactacctggacagcctggatcggattggggccgccgactaccagcccaccgagcaggacatcctccgaaccagggtcaaaaccactggcatcgtagaaacccacttcacattcaagaacctccacttcag

SEQ ID NO: 139219 - DNA, 500 bp, Homo sapiens
  Payload ID: 7287
  Gene Symbol: GNAO1
  Gene Name: guanine nucleotide binding protein (G protein), alpha activating activity polypeptide O
  ENST ID: ENST00000570235
  CDS Start-End: 262-426
gagccccagaccccggccaccctcgattcgacaaccccagacccctgccagctgccgcgagtctccgctgctggaatcttgttagcggctgtctttttggagggttctggtttcccgacatttttgtttccagcccaggagaggatatcgtgattttccccccttgagcccaggctctgctctctgggggggtggggggcgctccaagccggggagccgtgccagccgagtcgtgcgggctgtggcagggaaggggccaccatgggatgtactctgagcgcagaggagagagccgccctcgagcggagcaaggcgattgagaaaaacctcaaagaggatggcatcagcgccgccaaagacgtgaaattactcctgctcggggctggagaatcaggaaaaagcaccattgtgaagcagatgaagtaagtccctgtggcattgggattcgtacttttattaagaataatttttaaatcgtttttattacattgcttactcca

SEQ ID NO: 139220 - DNA, 1722 bp, Homo sapiens
  Payload ID: 7288
  Gene Symbol: GNAL
  Gene Name: guanine nucleotide binding protein (G protein), alpha activating activity polypeptide, olfactory type
  Uniprot ID: P38405
  ENST ID: ENST00000269162
  CDS Start-End: 302-1447
ggtgagcctcggagggatcctcctccctgctagaatatgcatgatcctccgcgagtcttcgcccgccaggagcagggacgcgtccgagccaacacggggcgcgcgcccagacgcactttcccggctcggggtgcaagagagccaggcggccgcggcgcagcggaggggctgcgggcccggaacccaggccggtcagcgtcaggaaagagaggagccgtcgcaggagccgcacacgtctccaactctctattgctttttgcgcacattcctaacttcctgacgtccatcccagcgggcaggcatggggtgtttgggcggcaacagcaagacgacggaagaccagggcgtcgatgaaaaagaacgacgcgaggccaacaaaaagatcgagaagcagttgcagaaagagcgcctggcttacaaggctacccaccgcctgctgctcctgggggctggtgagtctgggaaaagcactatcgtcaaacagatgaggatcctgcacgtcaatgggtttaatcccgaggaaaagaaacagaaaattctggacatccggaaaaatgttaaagatgctatcgtgacaattgtttcagcaatgagtactataatacctccagttccgctggccaaccctgaaaaccaatttcgatcagactacatcaagagcatagcccctatcactgactttgaatattcccaggaattctttgaccatgtgaaaaaactttgggacgatgaaggcgtgaaggcatgctttgagagatccaacgaataccagctgattgactgtgcacaatacttcctggaaagaatcgacagcgtcagcttggttgactacacacccacagaccaggacctcctcagatgcagagttctgacatctgggatttttgagacacgattccaagtggacaaagtaaacttccacatgtttgatgttggtggccagagggatgagaggagaaaatggatccagtgctttaacgatgtcacagctatcatttacgtcgcagcctgcagtagctacaacatggtgattcgagaagataacaacaccaacaggctgagagagtccctggatctttttgaaagcatctggaacaacaggtggttacggaccatttctatcatcttgttcttgaacaaacaagatatgctggcagaaaaagtcttggcagggaaatcaaaaattgaagactatttcccagaatatgcaaattatactgttcctgaagacgcaacaccagatgcaggagaagatcccaaagttacaagagccaagttctttatccgggacctgtttttgaggatcagcacggccaccggtgacggcaaacattactgctacccgcacttcacctgcgccgtggacacagagaacatccgcagggtgttcaacgactgccgcgacatcatccagcggatgcacctcaagcagtatgagctcttgtgaggatgctgccgccaccctgcgacggagcggcgccccggactgcctgactgccagccccatgccatggtaggaggcagagtctctagttccatctcgctgccgtctgtcccgttctgtgtcgaccaccaagcctctggctacctctgtcccctcaggtttggttgtgtagcttctgttgtcattgaatacggcctcccgcagcatcccacccccaaaccaccgactctcattgccgacactgcagcagaatctctccgggtgggagccccattatt

SEQ ID NO: 139221 - DNA, 6535 bp, Homo sapiens
  Payload ID: 7288
  Gene Symbol: GNAL
  Gene Name: guanine nucleotide binding protein (G protein), alpha activating activity polypeptide, olfactory type
  Uniprot ID: P38405
  ENST ID: ENST00000334049
  CDS Start-End: 609-1985
tcctacacccagctttccgtcctcggttactatcgcccaagatcaaagccaccctggttttctgattgccgcaactgcggctccaggtgctgagtgcacagccactgcggcactgtccgcagctgcgcgccgggctcagacggcattatttacggtacagaatactcgcccgcgcgacggtatttacggtaacggggaccagcctgggcggcagtatttacggtaacgaaagccagctgtatttacggtagcgagggctggaccggcggcggcatttacggtaacgggggccgggctcgcggaggcccgtcggttcggtccgctctgggcgttagcaagtgatctccagccaaggcggccgccaccccttgcacacagcagaaaatgcaaaatgaccctctggggcagtgaggggctgtggccctcggccccggcctgccgcacccccttcccgcagctggcggccggcagcgccgaacagggtccgggtgcagccccctcccgcccctccgctgaggcgccggcctgaactgggcgcgggaaccaggccgccctcggcgcccagcctgccctagtcccgcgcgccgcccccgctgtgccgcgcccacatgggtctgtgctacagtctgcggccgctgcttttcgggggcccaggggacgacccctgcgcggcctcggagccgccggtggaggacgcgcagcccgccccggccccggccctggccccagtccgggcggccgcaagggacacggcccggaccctgctccctcggggcggcgaagggagcccggcatgcgctcggcccaaagcagacaagccgaaggagaagcggcagcgcaccgagcagctgagtgccgaggagcgcgaggcggccaaggagcgcgaggcggtcaaggaggcgaggaaagtgagccggggcatcgaccgcatgctgcgcgaccagaagcgcgacctgcagcagacgcaccggctcctgctgctcggggctggtgagtctgggaaaagcactatcgtcaaacagatgaggatcctgcacgtcaatgggtttaatcccgaggaaaagaaacagaaaattctggacatccggaaaaatgttaaagatgctatcgtgacaattgtttcagcaatgagtactataatacctccagttccgctggccaaccctgaaaaccaatttcgatcagactacatcaagagcatagcccctatcactgactttgaatattcccaggaattctttgaccatgtgaaaaaactttgggacgatgaaggcgtgaaggcatgctttgagagatccaacgaataccagctgattgactgtgcacaatacttcctggaaagaatcgacagcgtcagcttggttgactacacacccacagaccaggacctcctcagatgcagagttctgacatctgggatttttgagacacgattccaagtggacaaagtaaacttccacatgtttgatgttggtggccagagggatgagaggagaaaatggatccagtgctttaacgatgtcacagctatcatttacgtcgcagcctgcagtagctacaacatggtgattcgagaagataacaacaccaacaggctgagagagtccctggatctttttgaaagcatctggaacaacaggtggttacggaccatttctatcatcttgttcttgaacaaacaagatatgctggcagaaaaagtcttggcagggaaatcaaaaattgaagactatttcccagaatatgcaaattatactgttcctgaagacgcaacaccagatgcaggagaagatcccaaagttacaagagccaagttctttatccgggacctgtttttgaggatcagcacggccaccggtgacggcaaacattactgctacccgcacttcacctgcgccgtggacacagagaacatccgcagggtgttcaacgactgccgcgacatcatccagcggatgcacctcaagcagtatgagctcttgtgaggatgctgccgccaccctgcgacggagcggcgccccggactgcctgactgccagccccatgccatggtaggaggcagagtctctagttccatctcgctgccgtctgtcccgttctgtgtcgaccaccaagcctctggctacctctgtcccctcaggtttggttgtgtagcttctgttgtcattgaatacggcctcccgcagcatcccacccccaaaccaccgactctcattgccgacactgcagcagaatctctccgggtgggagccccattattcattctccctttattgattcatcgaggagaacttggtagatggggagaaaacacagttggtttttttttccacgttatcaaccgtgactgcaagagcgttcgtgcagtgccctgagccacggccgtctctgattctccctttatgaagctgcaggctgacgagagatggtcccttcccattggccttagcccaagacttggagtcgaccccaagcgacagagtgaccagaaacccttttacagtcacattcagagtcgctgctggcctcaggcatttgaattagagctactttgagcctcttaggcagaaaacctaccacattcactactgcaaaatgtgtcctgtctaaaaatgattctctaaactttccctatacttaggcatagtcttctttcttagattctctttgttgttgtccctattgctggtttattacactgtacagaccacaaaatgtaatattcttttgtataactactaaagaaaaatccttgtagatctttgtgccttcaccatggctatctatacctgtacatgaaatgtgtttgtattgtgctgaagagcttaatgtcaacattacctgctgcttactctgaaaaaaggaatgaatggtagctgtagaatttaggatattttatcaggttggcactttataaaatactccctgatttaaaaaattgtaagttatacacgttaatcatccacattctatcgacaatgtaccaacatcacaagctgttgcaaccacctgctgttacttctctgagctgtaaaaacctgaactcaattcaggggtacaaattgcaatctaatcttttcagggaaccagggatttttttctctctctctagacaatatgtttcctcattagtctgctaatgaaacacttcttcaagttccccaagtgggaacaggtccatcattcccttagtcaaaactttggacacaggctacgtcatacaagtaagcaaacagtaagagaaaaacaaaatgtggccaggcgcggtggctcacgcctgtaatcccagcactttgggaggccgaggcaggcggatcacgaggccaggagatcaagaccatcctggctaacatggcgaaaccctgtctctaccaaaaatacaaaaattagccaggcgtggtggcgggcacctgtaatctcagctactcgagaggctgaggcaggagaatctcttgaacctgggaggtggagattgcagtgagccgaggtcgtgccatcgcactccagcctggacatcaaagtgagactcaggccaaaaaaaaaaaaaaaaaaaaccttgacgtgtcaatgtttgtgtctggcctaggagaatgaggatgacagcttcacttgccttttgaagaagaaacattacaaaaccttaatctgaagtataaagtcaaaagatacggctctttctcacacttgcaagacttacaaatacagcctcaaacattatgacacaccaacaatatctagaaagtaagaactggtgtagcaatgatgcttcatattctagctgtagccacagagttgagggtagtttttgtaggtctaaaataataatctataaagatgtccaaagttaaattttcaacaatacaaatctagagaagtgacagcctacattacttcattattactcttcttttagtctttagtctttaatattttaaagtttactctataaatcagcattttgtaatcctttataaactcatccagatttaaatgctactttttcatgaagaaaggataactttatagacagtcagtgcaacacacacattttatctcatcaccgtcttactgcctccccatccactgtctcataaagccctcagctgaactaagataaataatacaatggaaattattttcagttccccttgcactgtcaaagtaaaacaagaaaactgaaaagctgcacccccagcaagaaagggaagtatgctgttgtatgcatcattactcaacaattaccctctaactaaacatcctgtttaagagtttaattcaaacaacagccagactgttaagaaaaaaaacaaaaagaataacttttatctggcttacaattattaaagcatttattttcaggtaccaaaagccatatcccattccactttttaagtttcttttgatcactgacaggcattaacagatgtagcaacgtggtctcctatagagaaaattacacttatctaaaaatctgattccattaattgatcaagtataaaaatctacgaaaacaatatgttctgcacatcacatctgtacttttttttttttaaatatattttttgagacggagtctcactctgttgcccaggctggagtgcagtggcatgatcttggctcactgcaacctccgcctcccgggctcaagggattctcctgcctcagcctcagctggtattataggcacttgctaccatgcttggctaatttttgtatttctagcggagacgaggtttcaccatgttggccaggctggtcttgaactcctgacctcaagtgatccacccgcctcagcctcccaaagtgctgggattacaggtgtgagccactgtgcccggccacatctgtacttttaagggtacagctttacagtacataggaatttgagaaccacttcacaggaagagggaaacagcccaatatttatttatgtatacacataatcccaagtgtgtgctggggccaccaggcccttcctgggggaacaaggactgtcgtgcatgtgagtgacgacattaatagcatttacatactgtacagatgcaacctttgatgatacatatatttgataaaaatgagaaaacagatttgttgtagagtacctgtccacttttatagcatgagaacagtacaatcaactatttattttgcagttactcatttcagtgattgagaatttctgtgctgtgcagagagacggcctgtaattggtctcatcatccacttgattctaacatgatctctgcccaaagttccatttcttgggctttgatatttataatggcgcctgctcttcatcttgtcttacgctttccgagcaagttcaaaccagaaagaaaaggtgaggctagaagcccaaagtgagtgagtgtgaggaccacaaggaagcccaccactccacagtagatgatcaaaaccacatcctcacgtgggaggtagcacttggagagggtgtagtctgtgggcgtgatgctaccctggaaaggagaagggaaagttatgctgagagcaccaggcacacgttgaacaccgcagtcttagaaacagcagagggaagactgccttctcaggtccccctcaggtgaggcagggaacgggccctcctcacctgagaccaagggggcccagccttctccctgcacagctcacccccgaccagcccaggctccagcaggagagacaagtaaggcccaagtgtgcctgagtggaaaatgtctgggacactgacctgtcaaaactggcccctggctcactgggttcccatcaaatatagtgggggatccataacagagattcagagaggcaccgtggagttccagggtcatcggtcagcgaggaacaaggagggaaaggtgtcttcctgccccttgatgctcaactaagcatctgttccctagaaatacatgtgtccaggtcgtctccatgggcttttctttgcagatacttttatgtggaacaacagtggcaaatgttttcatttactttgaatttgaaaatgttagggtttcctccacctttttatgaagtaaaagaacctgtcgtaccagcatcatgagctggatgcaggagcccatggctgaaaggagttaaaacgcccagtggtcattaagtgaaacatcttttatcaacctgcaaaagctgcagcgttctctgccaggtcaaatgggcatgtttagaaaataagagaagatggctgagtatagctaatgaataaatggttgtttctttagaaaattaaacacacacagagtgtaagaggagaggatacggccctccctgaaggataaagtccacctggacggtgccctgccctcgcttctcacattaactgcccaggaatgtcatgctgattggttcccggaagggtgtttggcaaggggcagtgtatggagctacgtgtagaaggagagaaatttgtgtgtggcttttgtaaattttgaccgattgcagcaattaaatagttgattactgtgttgatttaaatacttatgaaagctttcagacaaaaataaactttcacgttaccatgatgaaa

SEQ ID NO: 139222 - DNA, 2255 bp, Homo sapiens
  Payload ID: 7288
  Gene Symbol: GNAL
  Gene Name: guanine nucleotide binding protein (G protein), alpha activating activity polypeptide, olfactory type
  Uniprot ID: P38405
  ENST ID: ENST00000423027
  CDS Start-End: 322-1467
gtctccagcggagaccggcgccctcgccccccgtctccgttcattgtgctgtattcatccagcagattttgaaacaattctcgtgtaaaaaggcattttactccgcgcgtcttccttacagccatttagttgggagtttgcggtgggcagggggagggagaagaaacgcctgctctgaatcggaaaacaccgaagagaccagaccatctctttcagcagcaggaaagagaggagccgtcgcaggagccgcacacgtctccaactctctattgctttttgcgcacattcctaacttcctgacgtccatcccagcgggcaggcatggggtgtttgggcggcaacagcaagacgacggaagaccagggcgtcgatgaaaaagaacgacgcgaggccaacaaaaagatcgagaagcagttgcagaaagagcgcctggcttacaaggctacccaccgcctgctgctcctgggggctggtgagtctgggaaaagcactatcgtcaaacagatgaggatcctgcacgtcaatgggtttaatcccgaggaaaagaaacagaaaattctggacatccggaaaaatgttaaagatgctatcgtgacaattgtttcagcaatgagtactataatacctccagttccgctggccaaccctgaaaaccaatttcgatcagactacatcaagagcatagcccctatcactgactttgaatattcccaggaattctttgaccatgtgaaaaaactttgggacgatgaaggcgtgaaggcatgctttgagagatccaacgaataccagctgattgactgtgcacaatacttcctggaaagaatcgacagcgtcagcttggttgactacacacccacagaccaggacctcctcagatgcagagttctgacatctgggatttttgagacacgattccaagtggacaaagtaaacttccacatgtttgatgttggtggccagagggatgagaggagaaaatggatccagtgctttaacgatgtcacagctatcatttacgtcgcagcctgcagtagctacaacatggtgattcgagaagataacaacaccaacaggctgagagagtccctggatctttttgaaagcatctggaacaacaggtggttacggaccatttctatcatcttgttcttgaacaaacaagatatgctggcagaaaaagtcttggcagggaaatcaaaaattgaagactatttcccagaatatgcaaattatactgttcctgaagacgcaacaccagatgcaggagaagatcccaaagttacaagagccaagttctttatccgggacctgtttttgaggatcagcacggccaccggtgacggcaaacattactgctacccgcacttcacctgcgccgtggacacagagaacatccgcagggtgttcaacgactgccgcgacatcatccagcggatgcacctcaagcagtatgagctcttgtgaggatgctgccgccaccctgcgacggagcggcgccccggactgcctgactgccagccccatgccatggtaggaggcagagtctctagttccatctcgctgccgtctgtcccgttctgtgtcgaccaccaagcctctggctacctctgtcccctcaggtttggttgtgtagcttctgttgtcattgaatacggcctcccgcagcatcccacccccaaaccaccgactctcattgccgacactgcagcagaatctctccgggtgggagccccattattcattctccctttattgattcatcgaggagaacttggtagatggggagaaaacacagttggtttttttttccacgttatcaaccgtgactgcaagagcgttcgtgcagtgccctgagccacggccgtctctgattctccctttatgaagctgcaggctgacgagagatggtcccttcccattggccttagcccaagacttggagtcgaccccaagcgacagagtgaccagaaacccttttacagtcacattcagagtcgctgctggcctcaggcatttgaattagagctactttgagcctcttaggcagaaaacctaccacattcactactgcaaaatgtgtcctgtctaaaaatgattctctaaactttccctatacttaggcatagtcttctttcttagattctctttgttgttgtccctattgctggtttattacactgtacagaccacaaaatgtaatattcttttgtataactactaaagaaaaatccttgtagatctttgtgccttca

SEQ ID NO: 139223 - DNA, 1285 bp, Homo sapiens
  Payload ID: 7288
  Gene Symbol: GNAL
  Gene Name: guanine nucleotide binding protein (G protein), alpha activating activity polypeptide, olfactory type
  Uniprot ID: P38405
  ENST ID: ENST00000535121
  CDS Start-End: 140-1285
agtctagaagctgagcagaacaaaggcggtgtgactgcaggaaagagaggagccgtcgcaggagccgcacacgtctccaactctctattgctttttgcgcacattcctaacttcctgacgtccatcccagcgggcaggcatggggtgtttgggcggcaacagcaagacgacggaagaccagggcgtcgatgaaaaagaacgacgcgaggccaacaaaaagatcgagaagcagttgcagaaagagcgcctggcttacaaggctacccaccgcctgctgctcctgggggctggtgagtctgggaaaagcactatcgtcaaacagatgaggatcctgcacgtcaatgggtttaatcccgaggaaaagaaacagaaaattctggacatccggaaaaatgttaaagatgctatcgtgacaattgtttcagcaatgagtactataatacctccagttccgctggccaaccctgaaaaccaatttcgatcagactacatcaagagcatagcccctatcactgactttgaatattcccaggaattctttgaccatgtgaaaaaactttgggacgatgaaggcgtgaaggcatgctttgagagatccaacgaataccagctgattgactgtgcacaatacttcctggaaagaatcgacagcgtcagcttggttgactacacacccacagaccaggacctcctcagatgcagagttctgacatctgggatttttgagacacgattccaagtggacaaagtaaacttccacatgtttgatgttggtggccagagggatgagaggagaaaatggatccagtgctttaacgatgtcacagctatcatttacgtcgcagcctgcagtagctacaacatggtgattcgagaagataacaacaccaacaggctgagagagtccctggatctttttgaaagcatctggaacaacaggtggttacggaccatttctatcatcttgttcttgaacaaacaagatatgctggcagaaaaagtcttggcagggaaatcaaaaattgaagactatttcccagaatatgcaaattatactgttcctgaagacgcaacaccagatgcaggagaagatcccaaagttacaagagccaagttctttatccgggacctgtttttgaggatcagcacggccaccggtgacggcaaacattactgctacccgcacttcacctgcgccgtggacacagagaacatccgcagggtgttcaacgactgccgcgacatcatccagcggatgcacctcaagcagtatgagctcttgtga

SEQ ID NO: 139224 - DNA, 451 bp, Homo sapiens
  Payload ID: 7288
  Gene Symbol: GNAL
  Gene Name: guanine nucleotide binding protein (G protein), alpha activating activity polypeptide, olfactory type
  ENST ID: ENST00000586926
  CDS Start-End: 1-164
gaacaaacaagatatgctggcagaaaaagtcttggcagggaaatcaaaaattgaagactatttcccagaatatgcaaattatactgttcctgaagacggagcaccaaggagaagcaccaccactggctgacagccaaggccacctgcccagccgcgggtgctgaagggcttccgtccaggggctgaggggaccctggcttgctgcctcggtgccaggcccagtgactgctcttcacccagcagcatgcgtcatctccatctgtgccctgcctctcccaagagactcacccatccctgagcatctgcagcacctgctggaagcctgggaccaccatcaactccaacgtcaactctcacttagcaattaaaaggaactaacagttggtccatgtgacggcatgggttaaactcacagtaattgtgctgacagaaagaatcaaagcaaaaacta

SEQ ID NO: 139225 - DNA, 623 bp, Homo sapiens
  Payload ID: 7288
  Gene Symbol: GNAL
  Gene Name: guanine nucleotide binding protein (G protein), alpha activating activity polypeptide, olfactory type
  ENST ID: ENST00000585642
  CDS Start-End: 86-623
agcgatatccggacacagatcacagcgttctttctgtttgtttgcaggggctggtgagtctgggaaaagcactatcgtcaaacagatgaggatcctgcacgtcaatgggtttaatcccgaggaaaagaaacagaaaattctggacatccggaaaaatgttaaagatgctatcgtgacaattgtttcagcaatgagtactataatacctccagttccgctggccaaccctgaaaaccaatttcgatcagactacatcaagagcatagcccctatcactgactttgaatattcccaggaattctttgaccatgtgaaaaaactttgggacgatgaaggcgtgaaggcatgctttgagagatccaacgaataccagctgattgactgtgcacaatacttcctggaaagaatcgacagcgtcagcttggttgactacacacccacagaccaggacctcctcagatgcagagttctgacatctgggatttttgagacacgattccaagtggacaaagtaaacttccacatgtttgatgttggtggccagagggatgagaggagaaaatggatccagtgctttaacgatgtcacagctatcatttacgtcgcagcctgcagtagctaca

SEQ ID NO: 139226 - DNA, 585 bp, Homo sapiens
  Payload ID: 7288
  Gene Symbol: GNAL
  Gene Name: guanine nucleotide binding protein (G protein), alpha activating activity polypeptide, olfactory type
  ENST ID: ENST00000590228
  CDS Start-End: 151-585
ggaaatttaaaatcccactcaattgattggaatcagtgctaagagtaaattaagctaataacaactctctttcaatacagggaaaagaaacagaaaattctggacatccggaaaaatgttaaagatgctatcgtgacaattgtttcagcaatgagtactataatacctccagttccgctggccaaccctgaaaaccaatttcgatcagactacatcaagagcatagcccctatcactgactttgaatattcccaggaattctttgaccatgtgaaaaaactttgggacgatgaaggcgtgaaggcatgctttgagagatccaacgaataccagctgattgactgtgcacaatacttcctggaaagaatcgacagcgtcagcttggttgactacacacccacagaccaggacctcctcagatgcagagttctgacatctgggatttttgagacacgattccaagtggacaaagtaaacttccacatgtttgatgttggtggccagagggatgagaggagaaaatggatccagtgctttaacgatgtcacagctatcatttacgtcgcagcctgcagtagctacaac

SEQ ID NO: 139227 - DNA, 1038 bp, Homo sapiens
  Payload ID: 7288
  Gene Symbol: GNAL
  Gene Name: guanine nucleotide binding protein (G protein), alpha activating activity polypeptide, olfactory type
  Uniprot ID: P38405
  ENST ID: ENST00000602628
  CDS Start-End: 477-1001
aaaagagactgaaggggagactggacagactgcaaagggctggaggccacattaaaagtgtggactttaccccatgggaaggaggaagcgcaggagtcatgagaaatgatggttcaggcagagattagagcataaagcagggaggtggggaaagccaagaggaacacgctcttggatgacgagtcaccatgaatcactgatcacctgggacatggttcagctgcacatgctgacgcagtgggtctgccagtgacgccgatatgctgcgagtctgggaaccccttttaaggagcagggaatcttaactctggctgtgcattacaactgcctggtactttgtcaccaccttcctggaaagaatcgacagcgtcagcttggttgactacacacccacagaccaggacctcctcagatgcagagttctgacatctgggatttttgagacacgattccaagtggacaaagtaaacttccacatgtttgatgttggtggccagagggatgagaggagaaaatggatccagtgctttaacgatgtcacagctatcatttacgtcgcagcctgcagtagctacaacatggtgattcgagaagataacaacaccaacaggctgagagagtccctggatctttttgaaagcatctggaacaacaggtggttacggaccatttctatcatcttgttcttgaacaaacaagatatgctggcagaaaaagtcttggcagggaaatcaaaaattgaagactatttcccagaatatgcaaattatactgttcctgaagacgcaacaccagatgcaggagaagatcccaaagttacaagagccaagttctttatccgggacctgtttttgaggatcagcacggccaccggtgacggcaaacattactgctacccgcacttcacctgcgccgtggacacagagaacatccgcagggtgttcaacgactgccgcgacatcatccagcggatgcacctcaagcagtatgagctcttgtgaggatgctgccgccaccctgcgacggagcggcgccccg

SEQ ID NO: 139228 - DNA, 3347 bp, Homo sapiens
  Payload ID: 7289
  Gene Symbol: GNAI1
  Gene Name: guanine nucleotide binding protein (G protein), alpha inhibiting activity polypeptide 1
  Uniprot ID: P63096
  ENST ID: ENST00000351004
  CDS Start-End: 374-1438
ggaggggcgggcaggggcggggccgcggcggcgcgcggaggccgagctcggctgggcttggcgaggctgcggcgcggccaccggcgggagtgcagcggccactgtacccagagattcaaaaccccaaacccgggacttgggggcgctgagccgggccgggaagcagagcctggtcgtgaggaacagccgcccgttgctgtctgcccctttgcggacagcgtctccctcgactccgcttaggaagtggtgggggcggcgtggcccccgtcgggaggcgttcgaacgcccgctaggagagagaaaggattcccctgtgcttggagcccgcactcgggcgcggagggagcggcggcaggctctcgctttcggcaccatgggctgcacgctgagcgccgaggacaaggcggcggtggagcggagtaagatgatcgaccgcaacctccgtgaggacggcgagaaggcggcgcgcgaggtcaagctgctgctgctcggtgctggtgaatctggtaaaagtacaattgtgaagcagatgaaaattatccatgaagctggttattcagaagaggagtgtaaacaatacaaagcagtggtctacagtaacaccatccagtcaattattgctatcattagggctatggggaggttgaagatagactttggtgactcagcccgggcggatgatgcacgccaactctttgtgctagctggagctgctgaagaaggctttatgactgcagaacttgctggagttataaagagattgtggaaagatagtggtgtacaagcctgtttcaacagatcccgagagtaccagcttaatgattctgcagcatactatttgaatgacttggacagaatagctcaaccaaattacatcccgactcaacaagatgttctcagaactagagtgaaaactacaggaattgttgaaacccattttactttcaaagatcttcattttaaaatgtttgatgtgggaggtcagagatctgagcggaagaagtggattcattgcttcgaaggagtgacggcgatcatcttctgtgtagcactgagtgactacgacctggttctagctgaagatgaagaaatgaaccgaatgcatgaaagcatgaaattgtttgacagcatatgtaacaacaagtggtttacagatacatccattatactttttctaaacaagaaggatctctttgaagaaaaaatcaaaaagagccctctcactatatgctatccagaatatgcaggatcaaacacatatgaagaggcagctgcatatattcaatgtcagtttgaagacctcaataaaagaaaggacacaaaggaaatatacacccacttcacatgtgccacagatactaagaatgtgcagtttgtttttgatgctgtaacagatgtcatcataaaaaataatctaaaagattgtggtctcttttaagttttgcagttcatggtaaaatgcattttcaaaccaaatgagtacttatatatggatctctgtagactagagtcttgcagcaacacagaatgtaatataaggcaaatgcatctgggacttgaccaaagttgttctgttttgtttttttaactgaaagtaacagaaggacctttcttaaatgtgacagatggtcctgcagtgtgaaactgaaggacagtgttaaagctgggctctagtatattgatgatttctgcataagtgtaaatatgcaaatgtatgtatacatgtatttatgactttagttttcgacattatttttaggttttaagagtggcaacttaggattttagggtgatggctttggaaataacataaatataccttgtactgaatgacagactattactacgtttgccagttttaaacagctttatttatgttcatgtcctgtaaatttttaagtacagtaattaatattaggaaacattacagcccttatctagattatatgtatacttgtattaataaaaatgttatttgtacaaacattgcacagactattttaataacatgatttgttctttaaattttatgtgttttattgaaatgttcttaagatgaatacacctgcctttggatcaactatttaaacattgtatgcattttgatttttcctactttaagaaaataaaataatttaattttacattagattccacgttagatttggtttgaaaaactaaaatttcagatttctgaggatatactgtcttagacttattgtacacacttagtttttattcacttgttttcactctgaattttaatatttggctgatatgaatgcattgcctcaaaggtgatgtcatcttaatttttattcactttaaataactacatttttgtttataactaagtttggagggatcctaagagcatttttgtgggtaaaaaaaaaacctgtggacataatgaattttgagacattgattggtgaggcttttatttcccttgaggagtctcttgtacctagcatacatgatagctccttgttgggaagataacaagaaggatctttgaatactctattgctgatataatgcaagatttaaatttatacatataactaatttcaaatgtaattatcacactatgttaaaattacttttttcccttagataattcaaatttctccacttgcttgagattatatcatttctttttcaattatactattatttctgagaatgaaatggacgattacacttagaaaatgagtaatagtgtttaataagtcagtgattatatgtgtgctcaaataagtgttatgtatcagctagatactgagctttgatagaataattttcttttgattattcatgatgtgtcatctctgaccttgtttcagcaaagtaaacagcactccccaccccaccctcctttttttactcatcttggaaaaggttagtctttcagtacacgttgctggtaagtagtttccaagttacgtgttgtcactgggttgaagtatatttgtgtgtgtgtgtgtgtgtgtgtgtgtgtgtgtaaccataaactatattcatatctgtttcatttggaggattttcttctttgtaatgtaaagaaattcaaagttatcaaagttccttaaatgtgttagtttagattctttatgtgcctttcatgaaagatatgttttcattaattttactggtggacctgtaatatccacattgtgaagctgtgtatgaaattcaactataatatgaataaatttgaatcatgagaattatgggttaaaaagccacaaagaagcacatattggtgaccatcattaatgaaatcctgaactttattctgtgtaattgtgttaataaatcctaataaatttaaatttttaaaattt

SEQ ID NO: 139229 - DNA, 571 bp, Homo sapiens
  Payload ID: 7289
  Gene Symbol: GNAI1
  Gene Name: guanine nucleotide binding protein (G protein), alpha inhibiting activity polypeptide 1
  ENST ID: ENST00000447650
  CDS Start-End: 447-571
agtgtgagggtattttgggaaaatttcttacatatcaaaccacaagtaaaatttagggagttttatcctcagattttcaaatagggcatttaactatgacctcttttcagatgcctctgatgatttgggtgtgtgtgtgtgtgtgtgtctttgtgtgtgtgtgtgtgtgtgtgtgtgtgtgtctttgtgtgtctggagagggaaagaggtaaagggagagatgaggcccagaagttgaccatcagttgtatcagtcagaaatagcttaaataaattcaagtacatttctggttggttgattttgtgtatagcacaagctagcttctgagaattcaaatacaaacatgtgcaaagtgagaggcagcaggaatcacatgcagagtgggtaaggagaggttgacaaaggaggtgctggtgaatctggtaaaagtacaattgtgaagcagatgaaaattatccatgaagctggttattcagaagaggagtgtaaacaatacaaagcagtggtctacagtaacaccatccagtcaattattgctatcattagggctatggggaggttgaagataga

SEQ ID NO: 139230 - DNA, 607 bp, Homo sapiens
  Payload ID: 7289
  Gene Symbol: GNAI1
  Gene Name: guanine nucleotide binding protein (G protein), alpha inhibiting activity polypeptide 1
  ENST ID: ENST00000418742
  CDS Start-End: 174-607
ccgggtcggggcccgggggtcggcgggggaccgggtgcggcgctgcgcggccctcggcgtttggaaacccggagggaagggggaggaagcgcccgaggaggcttctgagcgggagctgggtccggcggtgcggaggtgctggtgaatctggtaaaagtacaattgtgaagcagatgaaaattatccatgaagctggttattcagaagaggagtgtaaacaatacaaagcagtggtctacagtaacaccatccagtcaattattgctatcattagggctatggggaggttgaagatagactttggtgactcagcccgggcggatgatgcacgccaactctttgtgctagctggagctgctgaagaaggctttatgactgcagaacttgctggagttataaagagattgtggaaagatagtggtgtacaagcctgtttcaacagatcccgagagtaccagcttaatgattctgcagcatactatttgaatgacttggacagaatagctcaaccaaattacatcccgactcaacaagatgttctcagaactagagtgaaaactacaggaattgttgaaacccattttactttcaaagatcttcattttaa

SEQ ID NO: 139231 - DNA, 539 bp, Homo sapiens
  Payload ID: 7289
  Gene Symbol: GNAI1
  Gene Name: guanine nucleotide binding protein (G protein), alpha inhibiting activity polypeptide 1
  ENST ID: ENST00000442586
  CDS Start-End: 472-539
gttacagctggaaggatggggagatagcaccatagatccactcctcattttatgggcaaagaagctaaggcctgtaaaaatggcatgcccaatggttacgaggaaatccttcaaaatgcgttcttgtgaaaaacgtgagagtgcaaggaaagagggagggataggaagaaggaaagagaagcaaaagttccctgtttctcacggccctgaaaccagccgacagggatttgcattttgaaaaaccttgcgtggctgccggcgctgggcatgctcaaacgcccagaactggcttttttcggcaactttggcagctctcccacccccacccgaaggggcaggaagtggtgggggcggcgtggcccccgtcgggaggcgttcgaacgcccgctaggagagagaaaggattcccctgtgcttggagcccgcactcgggcgcggagggagcggcggcaggctctcgctttcggcaccatgggctgcacgctgagcgccgaggacaaggcggcggtggagcggagtaagatgatcgaccgcaacct

SEQ ID NO: 139232 - DNA, 1633 bp, Homo sapiens
  Payload ID: 7289
  Gene Symbol: GNAI1
  Gene Name: guanine nucleotide binding protein (G protein), alpha inhibiting activity polypeptide 1
  Uniprot ID: P63096
  ENST ID: ENST00000457358
  CDS Start-End: 357-1265
gaaatcagtgcaccttttgtggggcctctgagatggggctgaagcgtctttcctgttaacttcctatggcgactccttaagtggtcaaggagcgctgattacattccccctgcgctgagaaaaggctgcgctggatgcttgatttttcttgctgtgggggcatggaagccacccaagtggggttgggaagctttgctttagtagtaggcaaggcagatactcgagtggtgaaaactgctgtgaaagagcgagagggtcacgccagacaacagggttctgtctccgctgccaccgtttctgatgaatgagatttgccaggtgctggtgaatctggtaaaagtacaattgtgaagcagatgaaaattatccatgaagctggttattcagaagaggagtgtaaacaatacaaagcagtggtctacagtaacaccatccagtcaattattgctatcattagggctatggggaggttgaagatagactttggtgactcagcccgggcggatgatgcacgccaactctttgtgctagctggagctgctgaagaaggctttatgactgcagaacttgctggagttataaagagattgtggaaagatagtggtgtacaagcctgtttcaacagatcccgagagtaccagcttaatgattctgcagcatactatttgaatgacttggacagaatagctcaaccaaattacatcccgactcaacaagatgttctcagaactagagtgaaaactacaggaattgttgaaacccattttactttcaaagatcttcattttaaaatgtttgatgtgggaggtcagagatctgagcggaagaagtggattcattgcttcgaaggagtgacggcgatcatcttctgtgtagcactgagtgactacgacctggttctagctgaagatgaagaaatgaaccgaatgcatgaaagcatgaaattgtttgacagcatatgtaacaacaagtggtttacagatacatccattatactttttctaaacaagaaggatctctttgaagaaaaaatcaaaaagagccctctcactatatgctatccagaatatgcaggatcaaacacatatgaagaggcagctgcatatattcaatgtcagtttgaagacctcaataaaagaaaggacacaaaggaaatatacacccacttcacatgtgccacagatactaagaatgtgcagtttgtttttgatgctgtaacagatgtcatcataaaaaataatctaaaagattgtggtctcttttaagttttgcagttcatggtaaaatgcattttcaaaccaaatgagtacttatatatggatctctgtagactagagtcttgcagcaacacagaatgtaatataaggcaaatgcatctgggacttgaccaaagttgttctgttttgtttttttaactgaaagtaacagaaggacctttcttaaatgtgacagatggtcctgcagtgtgaaactgaaggacagtgttaaagctgggctctagtatattgatgatttctgcataagtgtaaatatgcaaatgtatgtatacatgtatttatgactttagttttcgacattatttttaggttttaagagtggcaacttaggattttagggtgatggctttggaaat

SEQ ID NO: 139233 - DNA, 2169 bp, Homo sapiens
  Payload ID: 7290
  Gene Symbol: GNAI2
  Gene Name: guanine nucleotide binding protein (G protein), alpha inhibiting activity polypeptide 2
  Uniprot ID: P04899
  ENST ID: ENST00000266027
  CDS Start-End: 262-1173
gcggtgctgggcctggtgggcatggggtcaagtcatgcctcctctggtgctcgtgaggccctggctaggcagctgccctctgcccccaaaatgaactctcctgaaaggactcctggattcctgagtatgaagaaactgagatgcccacgatgtacctcactgatgactgtgactggctcctggcccactctggacctcagctgactcagctgcaaagcaaggggtgctggggagtcagggaagagcaccatcgtcaagcagatgaagatcatccacgaggatggctactccgaggaggaatgccggcagtaccgggcggttgtctacagcaacaccatccagtccatcatggccattgtcaaagccatgggcaacctgcagatcgactttgccgacccctccagagcggacgacgccaggcagctatttgcactgtcctgcaccgccgaggagcaaggcgtgctccctgatgacctgtccggcgtcatccggaggctctgggctgaccatggtgtgcaggcctgctttggccgctcaagggaataccagctcaacgactcagctgcctactacctgaacgacctggagcgtattgcacagagtgactacatccccacacagcaagatgtgctacggacccgcgtaaagaccacggggatcgtggagacacacttcaccttcaaggacctacacttcaagatgtttgatgtgggtggtcagcggtctgagcggaagaagtggatccactgctttgagggcgtcacagccatcatcttctgcgtagccttgagcgcctatgacttggtgctagctgaggacgaggagatgaaccgcatgcatgagagcatgaagctattcgatagcatctgcaacaacaagtggttcacagacacgtccatcatcctcttcctcaacaagaaggacctgtttgaggagaagatcacacacagtcccctgaccatctgcttccctgagtacacaggggccaacaaatatgatgaggcagccagctacatccagagtaagtttgaggacctgaataagcgcaaagacaccaaggagatctacacgcacttcacgtgcgccaccgacaccaagaacgtgcagttcgtgtttgacgccgtcaccgatgtcatcatcaagaacaacctgaaggactgcggcctcttctgaggggcagcggggcctggcgggatgggccaccgccgactttgtaccccccaacccctgaggaagatgggggcaagaagatcacgctccccgcctgttcccccgccgcttttctcctctttcctctctttgttctcagctccccctgtcccctcagctccagacgtaggggaggggttgccacaggcctccctgtttgaagcctgcccttgtctgagatgctggtaatggccatggtacccccttctgggcatctgttctggtttttaaccattgtcttgttctgtgatgaggggaggggggcacatgctgagtctcccaaggctgcgtctggaggggcccctgcttctccagcctggacccccagctttgcccaacaccagcccctgccccagcccaagtccaaatgtttacagggagcctcctgcccagtcccccaaccccagccgctcggaggccccaaaggaaaaagcacaagaagcgtgagacgccaccattcctggaaaccacagtccacctgctcattctcgtagctttttaaaaaaatgaaagtaaaggaaaaaaaaaaaactgcaaatctagaaaactttttagagaaaaactatttaaaactgtcagatcctgaccagcaagcccccccccagccccccttccaagtgactccgtgccttgagtgtgtctgcgtgtttacacccgtccctctgctggccgcccccgtgcgagcggcacccctgccctgccctccacagaattgggttccaagggctgttccagacaactgccaacgtcactgagggccctgccccagcggccctggccccaggctctattaacctaaaatgtagctccctagcgctaacctaggaaccgccgctgcctgctggggggccacgcccctcatgcccttgtcccaggcccggggccttcagcgttgaacacttccttgcttttttcacatgttttatggaattgttcacctggtttgaaataataaaatgt

SEQ ID NO: 139234 - DNA, 2464 bp, Homo sapiens
  Payload ID: 7290
  Gene Symbol: GNAI2
  Gene Name: guanine nucleotide binding protein (G protein), alpha inhibiting activity polypeptide 2
  Uniprot ID: P04899
  ENST ID: ENST00000313601
  CDS Start-End: 385-1452
agtgccgggtcccggggtttggaaccacccctattgccttttctccgcgtggccccgcctgcagcccaggcccgagcctgggctgcgcctaacttcccccttcgctccgccctcgagccaatcaacagcctctaatctcctctggccccgcctgcaagcccgccccggcccagtcacaggcttggttcgcccaggccccacccccggcccgccccgccgtcggtgcgcggcggtagggaaggcgcctcccgcagtcgctcggaactgccgacccgagtgcttcccgcagagggctggtggtgggagcggagtgggtcgggcggggccgagccgggccgtgggccgtgtgggggccgggcggcggccgggccggcggacggcgggatgggctgcaccgtgagcgccgaggacaaggcggcggccgagcgctctaagatgatcgacaagaacctgcgggaggacggagagaaggcggcgcgggaggtgaagttgctgctgttgggtgctggggagtcagggaagagcaccatcgtcaagcagatgaagatcatccacgaggatggctactccgaggaggaatgccggcagtaccgggcggttgtctacagcaacaccatccagtccatcatggccattgtcaaagccatgggcaacctgcagatcgactttgccgacccctccagagcggacgacgccaggcagctatttgcactgtcctgcaccgccgaggagcaaggcgtgctccctgatgacctgtccggcgtcatccggaggctctgggctgaccatggtgtgcaggcctgctttggccgctcaagggaataccagctcaacgactcagctgcctactacctgaacgacctggagcgtattgcacagagtgactacatccccacacagcaagatgtgctacggacccgcgtaaagaccacggggatcgtggagacacacttcaccttcaaggacctacacttcaagatgtttgatgtgggtggtcagcggtctgagcggaagaagtggatccactgctttgagggcgtcacagccatcatcttctgcgtagccttgagcgcctatgacttggtgctagctgaggacgaggagatgaaccgcatgcatgagagcatgaagctattcgatagcatctgcaacaacaagtggttcacagacacgtccatcatcctcttcctcaacaagaaggacctgtttgaggagaagatcacacacagtcccctgaccatctgcttccctgagtacacaggggccaacaaatatgatgaggcagccagctacatccagagtaagtttgaggacctgaataagcgcaaagacaccaaggagatctacacgcacttcacgtgcgccaccgacaccaagaacgtgcagttcgtgtttgacgccgtcaccgatgtcatcatcaagaacaacctgaaggactgcggcctcttctgaggggcagcggggcctggcgggatgggccaccgccgactttgtaccccccaacccctgaggaagatgggggcaagaagatcacgctccccgcctgttcccccgccgcttttctcctctttcctctctttgttctcagctccccctgtcccctcagctccagacgtaggggaggggttgccacaggcctccctgtttgaagcctgcccttgtctgagatgctggtaatggccatggtacccccttctgggcatctgttctggtttttaaccattgtcttgttctgtgatgaggggaggggggcacatgctgagtctcccaaggctgcgtctggaggggcccctgcttctccagcctggacccccagctttgcccaacaccagcccctgccccagcccaagtccaaatgtttacagggagcctcctgcccagtcccccaaccccagccgctcggaggccccaaaggaaaaagcacaagaagcgtgagacgccaccattcctggaaaccacagtccacctgctcattctcgtagctttttaaaaaaatgaaagtaaaggaaaaaaaaaaaactgcaaatctagaaaactttttagagaaaaactatttaaaactgtcagatcctgaccagcaagcccccccccagccccccttccaagtgactccgtgccttgagtgtgtctgcgtgtttacacccgtccctctgctggccgcccccgtgcgagcggcacccctgccctgccctccacagaattgggttccaagggctgttccagacaactgccaacgtcactgagggccctgccccagcggccctggccccaggctctattaacctaaaatgtagctccctagcgctaacctaggaaccgccgctgcctgctggggggccacgcccctcatgcccttgtcccaggcccggggccttcagcgttgaacacttccttgcttttttcacatgttttatggaattgttcacctggtttgaaataataaaatgtagaaagaaaaaaaata

SEQ ID NO: 139235 - DNA, 2168 bp, Homo sapiens
  Payload ID: 7290
  Gene Symbol: GNAI2
  Gene Name: guanine nucleotide binding protein (G protein), alpha inhibiting activity polypeptide 2
  ENST ID: ENST00000441156
  CDS Start-End: 133-561
agtcgctcggaactgccgacccgagtgcttcccgcagagggctggtggtgggagcggagtgggtcgggcggggccgagccgggccgtgggccgtgtgggggccgggcggcggccgggccggcggacggcgggatgggctgcaccgtgagcgccgaggacaaggcggcggccgagcgctctaagatgatcgacaagaacctgcgggaggacggagagaaggcggcgcgggaggtgaagttgctgctgttgggatcatccacgaggatggctactccgaggaggaatgccggcagtaccgggcggttgtctacagcaacaccatccagtccatcatggccattgtcaaagccatgggcaacctgcagatcgactttgccgacccctccagagcggacgacgccaggcagctatttgcactgtcctgcaccgccgaggagcaaggcgtgctccctgatgacctgtccggcgtcatccggaggctctgggctgaccatggtgtgcaggcctgctttggccgctcaagggaataccagctcaacgactcagctgcctactacctgaacgacctggagcgtattgcacagagtgactacatccccacacagcaagatgtgctacggacccgcgtaaagaccacggggatcgtggagacacacttcaccttcaaggacctacacttcaagatgtttgatgtgggtggtcagcggtctgagcggaagaagtggatccactgctttgagggcgtcacagccatcatcttctgcgtagccttgagcgcctatgacttggtgctagctgaggacgaggagatgaaccgcatgcatgagagcatgaagctattcgatagcatctgcaacaacaagtggttcacagacacgtccatcatcctcttcctcaacaagaaggacctgtttgaggagaagatcacacacagtcccctgaccatctgcttccctgagtacacaggggccaacaaatatgatgaggcagccagctacatccagagtaagtttgaggacctgaataagcgcaaagacaccaaggagatctacacgcacttcacgtgcgccaccgacaccaagaacgtgcagttcgtgtttgacgccgtcaccgatgtcatcatcaagaacaacctgaaggactgcggcctcttctgaggggcagcggggcctggcgggatgggccaccgccgactttgtaccccccaacccctgaggaagatgggggcaagaagatcacgctccccgcctgttcccccgccgcttttctcctctttcctctctttgttctcagctccccctgtcccctcagctccagacgtaggggaggggttgccacaggcctccctgtttgaagcctgcccttgtctgagatgctggtaatggccatggtacccccttctgggcatctgttctggtttttaaccattgtcttgttctgtgatgaggggaggggggcacatgctgagtctcccaaggctgcgtctggaggggcccctgcttctccagcctggacccccagctttgcccaacaccagcccctgccccagcccaagtccaaatgtttacagggagcctcctgcccagtcccccaaccccagccgctcggaggccccaaaggaaaaagcacaagaagcgtgagacgccaccattcctggaaaccacagtccacctgctcattctcgtagctttttaaaaaaatgaaagtaaaggaaaaaaaaaaaactgcaaatctagaaaactttttagagaaaaactatttaaaactgtcagatcctgaccagcaagcccccccccagccccccttccaagtgactccgtgccttgagtgtgtctgcgtgtttacacccgtccctctgctggccgcccccgtgcgagcggcacccctgccctgccctccacagaattgggttccaagggctgttccagacaactgccaacgtcactgagggccctgccccagcggccctggccccaggctctattaacctaaaatgtagctccctagcgctaacctaggaaccgccgctgcctgctggggggccacgcccctcatgcccttgtcccaggcccggggccttcagcgttgaacacttccttgcttttttcacatgttttatggaattgttcacctggtttgaaataataaaatgtagaaagaaaaaaaat

SEQ ID NO: 139236 - DNA, 1663 bp, Homo sapiens
  Payload ID: 7290
  Gene Symbol: GNAI2
  Gene Name: guanine nucleotide binding protein (G protein), alpha inhibiting activity polypeptide 2
  Uniprot ID: P04899
  ENST ID: ENST00000440628
  CDS Start-End: 344-1255
tgtgagtgcggcagcggcagtgagtgggtgtcgacgcggcggaatgcccgtcgctgctgctgctgctgcccgacgggcctggggagggcacttccggtaccgctgcctcccagtgcccagccaggagtctctagacagcctctccccaggcgattgcagttactgtggtggccgaggaaatgcaagactggaccatagagctgggggaacgcagggcttctggctagttttgtgtcccgacaccagaagggtcccccatcccaccaggcctgctccttggagcccagctcaccttttgggctaaggtgctggggagtcagggaagagcaccatcgtcaagcagatgaagatcatccacgaggatggctactccgaggaggaatgccggcagtaccgggcggttgtctacagcaacaccatccagtccatcatggccattgtcaaagccatgggcaacctgcagatcgactttgccgacccctccagagcggacgacgccaggcagctatttgcactgtcctgcaccgccgaggagcaaggcgtgctccctgatgacctgtccggcgtcatccggaggctctgggctgaccatggtgtgcaggcctgctttggccgctcaagggaataccagctcaacgactcagctgcctactacctgaacgacctggagcgtattgcacagagtgactacatccccacacagcaagatgtgctacggacccgcgtaaagaccacggggatcgtggagacacacttcaccttcaaggacctacacttcaagatgtttgatgtgggtggtcagcggtctgagcggaagaagtggatccactgctttgagggcgtcacagccatcatcttctgcgtagccttgagcgcctatgacttggtgctagctgaggacgaggagatgaaccgcatgcatgagagcatgaagctattcgatagcatctgcaacaacaagtggttcacagacacgtccatcatcctcttcctcaacaagaaggacctgtttgaggagaagatcacacacagtcccctgaccatctgcttccctgagtacacaggggccaacaaatatgatgaggcagccagctacatccagagtaagtttgaggacctgaataagcgcaaagacaccaaggagatctacacgcacttcacgtgcgccaccgacaccaagaacgtgcagttcgtgtttgacgccgtcaccgatgtcatcatcaagaacaacctgaaggactgcggcctcttctgaggggcagcggggcctggcgggatgggccaccgccgactttgtaccccccaacccctgaggaagatgggggcaagaagatcacgctccccgcctgttcccccgccgcttttctcctctttcctctctttgttctcagctccccctgtcccctcagctccagacgtaggggaggggttgccacaggcctccctgtttgaagcctgcccttgtctgagatgctggtaatggccatggtacccccttctgggcatctgttctggtttttaaccattgtcttgttctgtgatgaggggaggggggcacatgctgagtctcccaaggctgcgtctggaggggcccctgcttctccagcctggacccccagctttgcccaacaccagcccctgccccagcccaagtccaaatgtt

SEQ ID NO: 139237 - DNA, 2086 bp, Homo sapiens
  Payload ID: 7290
  Gene Symbol: GNAI2
  Gene Name: guanine nucleotide binding protein (G protein), alpha inhibiting activity polypeptide 2
  ENST ID: ENST00000446079
  CDS Start-End: 388-828
ccgagtagctgggactacaggcgcccgctaccgcgcccggctaattttttgtatttttaatagagacggggtttcaccgtgttagccaggatggtctcgatctcctgacctcgtgatccgcccgccttggcctcccagagtgctgggatgacaggcgtgagcctctgagagcaaattttacccagttcctctctatcctcccgatgactctgaaatcaaactcagcaagtcatccgagcccccacggcgcagcggccctaggctggcatgggcgatgcggagctactccgccctcaggaagcaggcgaggtgcccagcgggagaatcacccacatcaccgtctaatctctgctgtgaagtggaagcgcgagaaggagggagcgtctcatgacggagggtgtgaagacgctaggctggacgaagcagaaaggcgggtgtcactggggacgttctgagggcccctggttgctaaggctcagtgtggggagaagaagggctgctaccctgttggatggagtatgcagggcatcttcctgccagctctgcccagggcaccatattggcatgcaccagctgcacaggtgctggggagtcagggaagagcaccatcgtcaagcagatgaagatcatccacgaggatggctactccgaggaggaatgccggcagtaccgggcggttgtctacagcaacaccatccagtccatcatggccattgtcaaagccatgggcaacctgcagatcgactttgccgacccctccagagcggacgacgccaggcagctatttgcactgtcctgcaccgccgaggagcaaggcgtgctccctgatgacctgtccggcgtcatccggaggctctgggctgaccatggtgtgcaggcctgctttggccgctcaagggaataccagctcaacgactcagctgcctactacctgaacgacctggagcgtattgcacagagtgactacatccccacacagcaagatgtgctacggacccgcgtaaagaccacggggatcgtggagacacacttcaccttcaaggacctacacttcaagatgtttgatgtgggtggtcagcggtctgagcggaagaagtggatccactgctttgagggcgtcacagccatcatcttctgcgtagccttgagcgcctatgacttggtgctagctgaggacgaggagatgaaccgcatgcatgagagcatgaagctattcgatagcatctgcaacaacaagtggttcacagacacgtccatcatcctcttcctcaacaagaaggacctgtttgaggagaagatcacacacagtcccctgaccatctgcttccctgagtacacaggggccaacaaatatgatgaggcagccagctacatccagagtaagtttgaggacctgaataagcgcaaagacaccaaggagatctacacgcacttcacgtgcgccaccgacaccaagaacgtgcagttcgtgtttgacgccgtcaccgatgtcatcatcaagaacaacctgaaggactgcggcctcttctgaggggcagcggggcctggcgggatgggccaccgccgactttgtaccccccaacccctgaggaagatgggggcaagaagatcacgctccccgcctgttcccccgccgcttttctcctctttcctctctttgttctcagctccccctgtcccctcagctccagacgtaggggaggggttgccacaggcctccctgtttgaagcctgcccttgtctgagatgctggtaatggccatggtacccccttctgggcatctgttctggtttttaaccattgtcttgttctgtgatgaggggaggggggcacatgctgagtctcccaaggctgcgtctggaggggcccctgcttctccagcctggacccccagctttgcccaacaccagcccctgccccagcccaagtccaaatgtttacagggagcctcctgcccagtcccccaaccccagccgctcggaggccccaaaggaaaaagcacaagaagcgtgagacgccaccattcctggaaaccacagtccacctgctcattctcgtagctttttaaaaaaatgaaagtaaagg

SEQ ID NO: 139238 - DNA, 1486 bp, Homo sapiens
  Payload ID: 7290
  Gene Symbol: GNAI2
  Gene Name: guanine nucleotide binding protein (G protein), alpha inhibiting activity polypeptide 2
  Uniprot ID: P04899
  ENST ID: ENST00000451956
  CDS Start-End: 176-1132
agtagctctgactcctgtcccaggttatgctgagtcccagcagggaaccaccacagctctgaatcagcctgttagccgctgtccattgctcttcatctgctctttatctgaaaatcttcagaagctttccttcaaatgagatgaccacagcagtcttctctgcaggttgcaggaaatgagaggtgctggggagtcagggaagagcaccatcgtcaagcagatgaagatcatccacgaggatggctactccgaggaggaatgccggcagtaccgggcggttgtctacagcaacaccatccagtccatcatggccattgtcaaagccatgggcaacctgcagatcgactttgccgacccctccagagcggacgacgccaggcagctatttgcactgtcctgcaccgccgaggagcaaggcgtgctccctgatgacctgtccggcgtcatccggaggctctgggctgaccatggtgtgcaggcctgctttggccgctcaagggaataccagctcaacgactcagctgcctactacctgaacgacctggagcgtattgcacagagtgactacatccccacacagcaagatgtgctacggacccgcgtaaagaccacggggatcgtggagacacacttcaccttcaaggacctacacttcaagatgtttgatgtgggtggtcagcggtctgagcggaagaagtggatccactgctttgagggcgtcacagccatcatcttctgcgtagccttgagcgcctatgacttggtgctagctgaggacgaggagatgaaccgcatgcatgagagcatgaagctattcgatagcatctgcaacaacaagtggttcacagacacgtccatcatcctcttcctcaacaagaaggacctgtttgaggagaagatcacacacagtcccctgaccatctgcttccctgagtacacaggggccaacaaatatgatgaggcagccagctacatccagagtaagtttgaggacctgaataagcgcaaagacaccaaggagatctacacgcacttcacgtgcgccaccgacaccaagaacgtgcagttcgtgtttgacgccgtcaccgatgtcatcatcaagaacaacctgaaggactgcggcctcttctgaggggcagcggggcctggcgggatgggccaccgccgactttgtaccccccaacccctgaggaagatgggggcaagaagatcacgctccccgcctgttcccccgccgcttttctcctctttcctctctttgttctcagctccccctgtcccctcagctccagacgtaggggaggggttgccacaggcctccctgtttgaagcctgcccttgtctgagatgctggtaatggccatggtacccccttctgggcatctgttctggtttttaaccattgtcttgttctgtgatgaggggaggggggcacatgctgagtctcccaaggctgcgtctggaggggcccctgcttctccagcct

SEQ ID NO: 139239 - DNA, 2407 bp, Homo sapiens
  Payload ID: 7290
  Gene Symbol: GNAI2
  Gene Name: guanine nucleotide binding protein (G protein), alpha inhibiting activity polypeptide 2
  Uniprot ID: P04899
  ENST ID: ENST00000422163
  CDS Start-End: 833-1852
acacgttgcccagccgtgtggctgggatggtcggtacccatggccgtgcggtcgagccttgatgctccaggacagtcctggaaggcttcctggcagatccgtgggaagaaagccgacagaagggcgggaggcgggaggggaaaggtcccccgggatgggtagggcctcaacgctgggcatcggcgcaggtgtgtactgcagggagccagccagaccccccacggactgcctgaccttgggggaagcccggagtagaggaagaggccggacccccagacccgccattgactatgtccgccattgactatgtgttctgagagaaatttttttttttttttttgagactgagtctcactctttcgcccaggccggagtgcagtggcgcgatctcggctcactgcaagctccgcctcccgggttcacgccattctcctgcctcagcctcccgagtagctgggactacaggcgcccgctaccgcgcccggctaattttttgtatttttaatagagacggggtttcaccgtgttagccaggatggtctcgatctcctgacctcgtgatccgcccgccttggcctcccagagtgctgggatgacaggcgtgagcctctgagagcaaattttacccagttcctctctatcctcccgatgactctgaaatcaaactcagcaagtcatccgagcccccacggcgcagcggccctaggctggcatgggcgatgcggagctactccgccctcaggaagcaggcgaggtgcccagcgggagaatcacccacatcaccgtctaatctctgctgtgaagtggaagcgcgagaaggagggagcgtctcatgacggagggtgtgaagacgctaggctggacgaagcagaaaggcgggtgtcactggggacgttctgagggtgctggggagtcagggaagagcaccatcgtcaagcagatgaagatcatccacgaggatggctactccgaggaggaatgccggcagtaccgggcggttgtctacagcaacaccatccagtccatcatggccattgtcaaagccatgggcaacctgcagatcgactttgccgacccctccagagcggacgacgccaggcagctatttgcactgtcctgcaccgccgaggagcaaggcgtgctccctgatgacctgtccggcgtcatccggaggctctgggctgaccatggtgtgcaggcctgctttggccgctcaagggaataccagctcaacgactcagctgcctactacctgaacgacctggagcgtattgcacagagtgactacatccccacacagcaagatgtgctacggacccgcgtaaagaccacggggatcgtggagacacacttcaccttcaaggacctacacttcaagatgtttgatgtgggtggtcagcggtctgagcggaagaagtggatccactgctttgagggcgtcacagccatcatcttctgcgtagccttgagcgcctatgacttggtgctagctgaggacgaggagatgaaccgcatgcatgagagcatgaagctattcgatagcatctgcaacaacaagtggttcacagacacgtccatcatcctcttcctcaacaagaaggacctgtttgaggagaagatcacacacagtcccctgaccatctgcttccctgagtacacaggggccaacaaatatgatgaggcagccagctacatccagagtaagtttgaggacctgaataagcgcaaagacaccaaggagatctacacgcacttcacgtgcgccaccgacaccaagaacgtgcagttcgtgtttgacgccgtcaccgatgtcatcatcaagaacaacctgaaggactgcggcctcttctgaggggcagcggggcctggcgggatgggccaccgccgactttgtaccccccaacccctgaggaagatgggggcaagaagatcacgctccccgcctgttcccccgccgcttttctcctctttcctctctttgttctcagctccccctgtcccctcagctccagacgtaggggaggggttgccacaggcctccctgtttgaagcctgcccttgtctgagatgctggtaatggccatggtacccccttctgggcatctgttctggtttttaaccattgtcttgttctgtgatgaggggaggggggcacatgctgagtctcccaaggctgcgtctggaggggcccctgcttctccagcctggacccccagctttgcccaacaccagcccctgccccagcccaagtccaaatgtttacagggagcctcctgcccagtcccccaaccccagccgctcggaggccccaaaggaaaaagcacaagaagcgtgagacgccaccattcctggaaaccacagtccacctgctcattctcgtagctttttaaaaaaatgaaagtaaagg

SEQ ID NO: 139240 - DNA, 27174 bp, Homo sapiens
  Payload ID: 7291
  Gene Symbol: GNAI3
  Gene Name: guanine nucleotide binding protein (G protein), alpha inhibiting activity polypeptide 3
  Uniprot ID: P08754
  ENST ID: ENST00000369851
  CDS Start-End: 111-1175
agctgacggagagggccaccgcccagcaatagacggtgcctcagcctgccgagccgcagtttccgtggtgtgagtgagtccgggcccgtgtcccctctcccgccgccgccatgggctgcacgttgagcgccgaagacaaggcggcagtggagcgaagcaagatgatcgaccgcaacttacgggaggacggggaaaaagcggccaaagaagtgaagctgctgctactcggtgctggagaatctggtaaaagcaccattgtgaaacagatgaaaatcattcatgaggatggctattcagaggatgaatgtaaacaatataaagtagttgtctacagcaatactatacagtccatcattgcaatcataagagccatgggacggctaaagattgactttggggaagctgccagggcagatgatgcccggcaattatttgttttagctggcagtgctgaagaaggagtcatgactccagaactagcaggagtgattaaacggttatggcgagatggtggggtacaagcttgcttcagcagatccagggaatatcagctcaatgattctgcttcatattatctaaatgatctggatagaatatcccagtctaactacattccaactcagcaagatgttcttcggacgagagtgaagaccacaggcattgtagaaacacatttcaccttcaaagacctatacttcaagatgtttgatgtaggtggccaaagatcagaacgaaaaaagtggattcactgttttgagggagtgacagcaattatcttctgtgtggccctcagtgattatgaccttgttctggctgaggacgaggagatgaaccgaatgcatgaaagcatgaaactgtttgacagcatttgtaataacaaatggtttacagaaacttcaatcattctcttccttaacaagaaagacctttttgaggaaaaaataaagaggagtccgttaactatctgttatccagaatacacaggttccaatacatatgaagaggcagctgcctatattcaatgccagtttgaagatctgaacagaagaaaagataccaaggagatctatactcacttcacctgtgccacagacacgaagaatgtgcagtttgtttttgatgctgttacagatgtcatcattaaaaacaacttaaaggaatgtggactttattgagaagcatggatgttagtgaaagttactacagtgtggagtgttgagaccagacaccttttgctgtctcatggggcagctacaagcatgaacgggaccagggaatggcagcagcatgcagaatcttagcactctttagcacaatattttgtattagggaacttttaattgacatgagatgctaaagtcagacattggaattggaagaactataaagtgtgattcgatcgtcaagacatcacttggatttcttaatcttaaatgcttatggaagatgtgaagttgaggtgctgcattctagaacttcaatatgtagcttactctttttttccccccttcttaaaccaccagtggttcatttttaaggttttttcatcaagagaagaataactttactaaattttatttctttatttgcaaaagaatctttattaaaacaaacaatcttaactatgcacatgatgtgaccagatcatcttgaaaatattcctctttagtaggaactctttgtttttaactcttggtatggtcagaatataatacttccataattacttataattctttccggttactggggctataaatacaactttttaaatgaaatttatgttattatcctgctcaaagtaccattatggtttccatatggtaattacattggaaagttctgcaataagattctagttctctcttttctttaagcttatggttgaaggttaaccttgtttgtgcagattaccaaattactgctgatgtagtatgataaagtcagcttcttggatacagacacacccagggcagctgccaatcagaaatgcaaattgctaaattccaaacagaaccagtgactttgctgctacatatttactaaattgaccactttgattcttgcttgtttgtctcagttatagggagttttgtacatggtgcctcttgttttccatcttcatggccttttctgttgagaaacatctaaagtgtattaacagtgcatgcttttactttgtaaatgtggtgccaaatccctgtttgccatcgtttttactgtaccgatgttaactgtagtaatccttagccagtatgttcttttgctgaaactgttgcattttgggacttttttccactttgtcatgtgtacatttttaatctgttatagttggcggcagtattaaaatggtgagtaaagagcccaggtttgctcctgtttgtaactagtcttttctggaaatactgtcttctgtttccttttgcctttgcagaatgtgctttagcctttgtctgagaatgggtttaggtagaagggtttcctgaaagtctagtcttttggtgtaatagtattgttgaaccttaggttttatgttatatctgcatatgagtgatatgtgatcatgattcattttgcagatttacattttgcttgtgtggaaagttacgttcacttcaacctacagacccttttgtataatgtacagcaaatgtcattaaatattgaatgctctattgggggaagacaaatgaagagaatgcattttgagcatttcaaatcagtagtttgggcagtgccttttggggtccaatctttttggattggattctatttcatcttttgatgtgacttttcactagtttacaaaaaaaaggttggtggtcaacaaaaaaagcaagtcatagcagttcagtgcctttgttggtagtttttaactttttttgtgattctttttggaaaatcatagcttacagatggtataactgtattatataatggaattttctttaggtgtgggaaaacttgatctgaaagaaaattatcagcttcaattggcgattgattcagtgcccacaatgtaaacagggttggtagttgttactcattttgaatataccttttccttattgtattctgtaatataggatcctggaaatgagacctggtggaatattattttcaactgtagtctttctatactgtggactaatgaaatggtgttgttgataatctaaaataaccaataatccaaaaaagttcattttactttgaatttgtattttcatttgaatatctatctgatatgttaaatttttagcccttctgttaaagaaaaatagcaggtccccatttttctgcctctgtaccatttacatttgctctctgtttgttaacatgaagatcactcttatttcaccatcccaaataacttatctaaatgcacattccttgaggacacagggagacaatttaagtcagtagtttttaatatgacttaagtaaaaatcacttggacccatctaagggattgacttttggctggtgggctggcaatcgattttttttttttttttttttttttgagacggagtctcgctctgtcgcccaggctggagtgcagtggcgcgatctcggcttattgcaagctctgcctcccgggttcatgctattctcctgctgggactaccaggttcctgccaccacgcccagctaatttttttgtatgtcttagtagagacggggtttaaccgtgttagccaggatggtcttgatcccctgacctcgtgatctgcctgcctcagcctcccaaagtgctgggattacaggcgtgagccaccgcacctggctggcaatttataatttttaaaaggtgattctgattaccagccaggcttgcaaatcactggtttgtattgaaataaaagatattttcttgtagcagggctaaaatgtgggatgaaacattaaatctactagcctgaaaaaaaactttggcatttgtaatcaaagaagctgaaagttgccttgtgtgtttcctctgaagaatgctggagatttgtgatggataatgtttcagaattcaggtgcctatgctttggaccatcaaagaagccattagtctctgtgtaaagaagaagtattcttaatggacagtcccccctaaccttataaattcagctttgcaacagatttcacctcctagcatgaaaattccaaaaactttaacaattactcataagtggatcttgagatgacattttcatcttggacagtttgaattctaaatctctagttcacagtgaatcgttttttaaatttttactgatggatcgttatttttcacaaggtactacattcttacaatgtaagactagatggaccaaaattttaaaaaaaacttcttgccttgtttttttaattttcatatatattctatttgttgtatatacacattagactattttaaaataacagctggtttttgtaattcattcattcaccctatattcttatattctgctcattattctctcatttatagctgtgacattctttggacattacttgcctggcctgattagttacttaatataatttattcatttgcttagcatgtgtgacatagttctggaatttcctgttgcagaactccttgctgtattgcagtcatatataaggtaaagtcagtctcttgttcctattaaaaagctaccattgattattttccctttttacatgttcaaaaaaaaaaaaataagcaaccctctactcatttgtataaacctaaaacgtcactgttttccttgagcgttagtacttgtgggttctttccttttcatgtgtaatactgattttaagagcaatgatcttagtttgccagtgccaggtaattattgtgttctactttaggcttcgtagtgcaaatcagggatctgacctggatcagcctcagctctttacatagctttatgatcatcatattttgttgtattgctcccaacaagcacaagagaaaaaggcaggcttcctagagacctcaagttgaaagttgattttgctgacaactatcagggagtaaaagaaagcctttttcaggcactggagaactaactttaatgatgatcaaggtctttatgcctttatcttttagtttttaagatcatttctctccctcctttccccccagttttctcaacatttatgagttagttctgctgagaacaacatacttcagaacatgtcaggatagggcagttttttcttgtttttcttttttctttttttgagacagtcttgctctgttgcccaggctggagtacagtggcacgatctctgctcactgcaacctttgcctcttaggttcaagcgattcttgtgcctcagcctcccaagtagctgtgattacaggcatgtgccaccacatctggctaacttttgtatttctagtagagacagggtttcaccatgttagccaggctggtctcaaactcctgacctcaagtgatttgcctgccttggcctcccaaagtgctgagattacagatgtgaaccactccacccactcagggcagttttttttctgataccatatcaggcctaggcctgggctgactcaaatcttctcaggaataagaggtaagaaggaatgttaaacagcagtagttacctggggtacatggttaatttgatttagcagattctttggctaaaccctagtaaattaaaatgtctgagccaggtcatgggaatatacatgtttttaatacattccttaggtgattttgatgtagccaatctgggccaacatttggggacaactgagtaggacctaatacaggttgaatagcccttatccaaatctcttgggaccagaagtgtttgagagttcagatttttgtgaggttttgaaatatttgcattatatacttattggttcgggattccaaatccaaaaatctgaaatccaaaatgccccagtgtgtgcttcctttgagtgttatgttgttacccaaaaagcttttgattttggagcattttagattttggattttcagatttgaaatgctcaatctatattaaagatcaacacaggctgagcacagtggctcatgtctgtaatcccagcactttgggaggccgaggtaagcagatcacttgaggtcaggagtttgagaccagcttggccaacatggtgaaaccccgtctttactaaaaatacaaaaattagccaggcatggtggtggatgcctgtaatcctagctactcgggaggctgaggcaggagaatcgcttgaacctgggaggcagaggttgcagtgagccgagatcgcaccactgaattccagcctgggcgacagagtgagtctgttttttttttgtttttttttaaagtcaacacaaatattgaaaataagcaacttcagtgcacaaataagctcaaaatcactagtgagtgatctattttttgccaataagaagtaccatttgtacatgacttaaagtgccttccaccaagaaaattattgaaaactgttgggtcacataacattcctacactttggatacagagtatttagttttatacaaaattaagacaacaagaaacctaggatgtccaaacattcatttcatttattttactgcatttatttatgcagtgaaaattgaaagatacaccaaattaaagataaaaccctgtgacagataacagtatatgtaataacatgaatatttatttacacttggtagagaaagcaaagctagctagctctaaactagaatgaaagtcgttttgaaatgggtacgggggtatataaggggaatgattgagtcacatgtaaaagcctttgtatgcccagtgctagtgttttcctgaaatctagtgagaatcacaaggtaccagaaataatcaaataataaatattaatacactgctgggatagaagtatctcagtgtaccagcattcactaagctataaaatctgtgacagcaggaatattaaattatgaacaacctggtttatctgtctcctcttatcttttacctctccctacgcccaaaattctccttaggttatccagacatttttactaagatgcttatttatatgtaagagagatttccagtagatacaacaaaacacaagaaatcacctgttctgtttattcttgctcatgtaggataaaggtcctgagacctctcagaatcttacgaggttggagagttgtttggaatgctgggttctggtcttgtctctgcttccaaccagctatggaatcttgtgtattctttcagtcttaaatcactcatctgttatctaaagatggactaaattattccttcctgctgtgatattctgtggttctcatcagatagaaataacatatttgaaaatgctttgtaaatgttatgatactcaggattatactgcacagaaaaaaaaaaatcctaaggcagcaccaacaaaggtattcaacgtagtgggtggtcttttacagcattactttgcccatattcattttgaagacctgaaatgaagttgaactataaattgctctaaaattcgtgaagcagggtgaaaaggtctttgctttgttttacatttaaatccagctgtctattttctgcttatactagtgctttttcatggcaaaaagacagaaaagttcccttctgcagtctccagtgtcttctgacctcacagaaatgttttcatgcttttacctagcaggaccaccagaggctctgtcacacttgcagtccctggcccaacaccgaaatccttctggaatctgtgctctgggggctgtgccgggtagagagggcagtgggaggtaagagctcttcacccttcaccaccttctccacccagcatggccggcacactttggtctacggcacatctccaagtatagagtgggttttgaatgctgttatgtctcaccgtggggatgggaaggaatactctgttttggactatttggaggtacatgtgagtggattttattaccagagtaggaactgtttcaagttaatgtgtcttttatgttgcttttaagacaacttttgtgccgcttttatccattcttccttttatccacagaaatacaaatttctaattatagtatattttttctatttttaaaattgtgataaagcatatataacaaaatttgccatcttaagtgtacagttcagtggcattaagtacattcacactgttgcacagccatcaccaccatccatttccagaacttgttttcatcttcctgaactgaaactctgtacctgttaaacagtaactccccatgccccaccttctttcagcccctggtaaccagcattttcctttgtctctatgaatttgactattttagatacctcatataagtggaatcatagtatttgtccttttgtgtcaatcatattgtatttttgtctaaaaaaggaaaactatcagatttatgtgaaatgtaacgtaatttacatttgatttactgttagtaatgtctctttaatcatgctatgctagggaagtacattatggtctctccctctaagaatatgaagaggaaattttaccttcaacaaacaagcaaacttagttatatttttgtgattttatgctgttttcatattctattttgagatctatttgtcttagcttggaggtggttttgttaaatgtccacgatttagagacggcataatgaaaaaatgaccaagaatttggttgggaatgggaggagcttagaagaacaagaaattggctttgattttatagtgtatggtgctctgttggtagctggacatcatcacaggctttggattgagaagacctgttctggagttctagttctgctactgcctagcgttgtgatcttgatgaagatactcttccttcctgggcttcagtttttgatctataaattgctagtgatggggctggactatttttaagtttgttctaactttagcagtcttaagaattaaggttgcatgccagaaaatagggttaaatatttgtttctgatctggttacaaaaaaaaaaaaaacttgatggcttaaagtaaataaaaattcaacagtacggtgtaaatttaaaatgaggcaaaagaaagataatgacttaatttttattttaatctttcttatagctgttttatataagaacttttcatgaatacaatcaaaatgtccatgagataaaaataagctaattgtgcaggaaaagtacaaatgcactttttctgcagctctaacatgtaaggtttgggaacaatcgttgggcctgacaaacagttgagctagggtaagggtgaatgccttttctggaagcctatcaagagcatcgaggtgaagtcctcttacctttaatcatgggagagcccattctggaccaagggtttgagaaaattattctgactgtgttctaaggtaataggtgaatgggtgctcaagggcccctgttgcatttcatgtagacttgccagaagagttttagcttgaaaacatcataagatgaatataggcagatcccaaactcagtaaaaaaacagctatagaatgttgctctatcctccaagatgaacactttacataatgtttgtacaaggtggcttgtgtgagtttgttgataaaccagttaaaagttgggatatcccccagctatcccaaaagaagaggactaaatacaaccatgttttagtctgctagagacttgtgttctgacctaagacctgtcagaagacctgtcccactggctctgcttctgtactagtactataaggcaggttctgtgtgaacattaataaccaaggatcctgagttagacttatagtttggtcaataaccaatttatacctagattgaaagaccaaggaaaagttaataaaataatcaacaatctggtactatttgagggaaagtagggctatcctatttggagatggaataaatgggataaattatgtttggggcctgaatagacaagatcatagcttgtatagtaagggttcttaacctggggcttcagagctccagcgagtctacagagagactatttgatatgctagttttctttgtatttctctgaatttaattttacgtgtttaaaaatatgatgatgaaaagaggcacatggtttcatcagattgccggaaggatccatgatacaaaacagattcagaactcctgtatgttgagttaaagtgaacagattagtaatggttggagcatgatattcagagtagttcctgaacagctcttgaatatgagaagtctttcccaggttttttgttttgttttgttttgttttgagatggaatctcactgtcgcccaggctggaagtgcagtggcatgatcttggctcactgcaaacgcctcctgggttcaggtgattctcctgcctcagcctcctgaatagctgggattacaggcaggcaccacaacgcctggctaatttttgtatttttagtagagacggggttttgccctgttagccaggctggtctcaaacccctgacctcaggtgatccacctgccttggcctcccaaagtgctaggattacaggtgtgagccaccgtgcccagccaggtttgttctttggcttgagttttttcatcagcagtagccagagtagtttctcggataattctcccaagctgctttctttttagggaatcagaaagactattaaatgagtttaacttttatagctacaaatttattcttaagtgtatttcaagctcatatggctctctagtattaatattgctagtagcagcctaagtgtgagtgggtgtttctggcaaggagcaatttccattttaattgacattttcttctatgtactaaatcttggatgccaagagctttcctcactggtagttgtaaatgctaaatctatatacttaacttcatccccttctgtcaagataaatgcaaacttcatttcccctcaaaggagttcaaaggaaaacttcttggcgtgtttggggagatgttttcatccaccatcacatggacccaactgcaaagattttcagtgcctaaaacaagctcacctgtcttggttcttctgaaacacgtagcagttgaaaagtttagaattgttcacttgttccaaattctatgatagagaggcggcagcaatacattcattaatactctaaatgagagtatttgatgtcctctaagtttattcaggaagtatcttatgtagctaagaaacatttgtagagataaaggtctgtttgatagcctgggggcagagggataatgtttgcttaataaagatgatcgttttgggatgtgccttagaaactaacaaactcgcatctcctatccagtgatccagatctctgagctaaggcacatagaggtctgttagtaaaaagggaatggcaggtttatttaggtttggttaatactagttttttacagactataggaagccttgctattttgcttggaatagtttgttgcaatagtttattctaaaaaccaggtgttgaatttaatatatggcagcttttatatttttatataggatttatttctgtgaccctaagcacaagcaggcttttttttttttttttttttttttgagacagttctgttgcccaggttagagtgcagtggcgtgatcttggctcactacaacctctgcctcccgggttcaagcaattctcttgcctcagcctcccgagcagctgggattacaggcgcctgccaccatgcccagctaatttttgtatttttggtagagacagggtttcactgtgttggccaggctggtctcaaattcctgatctcgtgatctgcccaccttggcctcccaaagtgctgggattacaagcgtgagccactgtgcctggcctgcacaagcagtttttatgtgccttcccttcagttatgttcgtgctcctcagaataaccctgtaaagtaggtagggaagtcatcttcattttatagttgaaagactcaagactcagaaataaagtattcacagttttgtattaagttggaaaaccagtactggaacctggggggtcttctaactactggcctgtgctctttaagctgcaatagctatcccactttgaaaagaacgtatgaaatacagttgcagtcatgtatactccatctccaaagaatggattcattcttcatgtcatggtatattgactataattttctgtttttaattacccagattccaagcctgtttatagaacttatacctgaggaatggtgaggattagaagaggccgcagtccttgaggttttctttgatgataatatctgtaactgcatcaaacacaaatttgacattctgtgtatctgtagcacaggtcatgtgactgtagatttctttgacatcttttcgcatattgaggtcaaggaactggctctttatgtaattccccgcatcatcataggagttgttacctggttttccagaaaaatagtgaaaaagtagaataaatgaacccttgttagttgctgactcactttaggtgattgacttgatccttgaaatgttattagacaacagcagttgggggcctatttttggagggaagattctctattgcactccagtgtttctcactttagttgaaaagaaattgaggagaggtgtctttccacctttggttttcagtaggtatcatatgaagtcagtggctctcctgcatctaatgcctgctgtattccagagtatctgaatttaaaccctgtaactgtgcccaaggttctcccttaagttcctttgtgtcatcttggcctaaaaaatgagacaattgccagtctctactaaaaggcattattattatttccagcccctgacacttaccatcatactctggaaaacaaatgctgagatggactttcttgattttttcctcaaagaggtccttcttgttgagaaagaggacaatggaagtagccgcaaagaatttgtggttacatatgctgttgaacagatgcaaagactcatgcatacgattctagtaagaggaaacaccattggaaatatcagatttggcttatagaatatctacctacttcctgctcttgttccccttggagagaccagtgctccaaatgtaaaaagcaagacagagaacagcttatctcaatgtaccagagtaaagccagagagatgtgggatcattctagttccctatctttctaatagctgtgtgacttgtggaaaattattgagctttttctgagtctgttttcctatcttatagggttacaatgaaagctaaatgagattgtgtatgtatattgtccatgatagtggctggcatataggtctataatgtgttatgcagatctttagcagccaggatgcaactgagaacttgacattttataagtagtgctgataatgggttgaaacaggcccaagttagcatgtgcccatatgcatctccaggatgattttgataggcttctttcatggggtcccagatctcagtttgggctactttggtcctgctgccacatggtgagagttagagaatttcccagtgccataccacaagcatttctgctctctcatttccttctctgattgctacttagcgagaagtcgggctgcatatctgcagaggctgcccattgccccagcccagcttgcttttagggagcaggtctttagggttttgaagtatactatcagctgacttgcgttcagtctacttatctaataaagcaagaacaatcccatttgtggctttttccccataatactcctgtacaaccctttaaggtctcatagacttgttttattaatgtctcatagactttaataaacctcatagactcatagactttagggttaaagatggaaagtctcatagactgtaatctttaggcttaaagatgggaagtgaatagctctgtaagacattttgattagacgatattcagagtgctctaatgtgaagttaaaactaccaaagggaagggaagagaacaagctgtggcaagggataggagtatccctttcatcagcaagctgtggacctccatttgtaagcagatgcttgggtgaaattaacatttttcacgcctctaacctttcccaaattcagaggtcatcagcaaggtgtggacctccatttgtgagcagatgcttgggtgaaattaacgtttttcacgcctctaacttttcccaaattcagaaagcagatgcttgggtgaaattaacgtttttctcacctctaacctttcccaaattcagaaactggctgggctctaacacttgtcctatagaactcctgtcctacagaattctacaggctaaagagaaccactcttgggtagtcttccagctgccaatttaattggcatgagagaaagctggtctgccagtctctccttaaactcctacggacagtacatttttagcctcctaagtggggttactagctcaacccttctattatgttgcaatgaagattcatatcatatgttattttctctgttctgtcattttcatctccttccttaggcaatttgggagagtactaagtgtaactcctttgctttgcctagttgatggtcccttatctctttgcactcaattcctcttatgagctttgtgatgtccaagtgatacttagatgtctaatttgagaccaagctcactgtcagtaaatttggagctctaaaatgctaatctagaacctgcagaagaagttgttttttagaattatttgcatgagacattgattggtctgctggagggctgctagactgaaattacctaagttggggcagtagagtgacacaaggcttagagaaagggtcatggggagaacttgttctaccaaagctgcttgatgcaaaggccactcaccacttcgtcatcttccaccagcaccatatcataggcactgagggctgcacagaaaatgatgcaggtgactccctcgaagcagtggatccacttctttctctcggatctctgccctcccacatcaaacatcctgagggaagaagcagctattttcataggtatgcccaacatacgacctatatgcctttgatggtcaccccgtgaagtgggagaggaaaagggggagaagcagaacagtaatttagattaggcttcaccaaaggccaagaagcctgcctgtgccccttttcaggattccacacgtgtatccgagatgccctagggaaccatgcacttacctgaaattcaagtctttgacggaaaacttggtttcaatgatgcccgtggttttgactctggatcggagcacatcttgctcactagggaggtactcagggtctgtaattcgttctaattggttcaggtagctagagaaaagtgattagcatcaatgacaaattttccacagacgaggctaagagacgtaaaaggtatcttacccaaagtcacacagctaatttggtgatagaaatcaggactagaagccatattgttaaatttaggattctttccttcaaaccttcatatgtcattaactagaggaaatgggggatggactgagggacaagcccatttgaggctggagttccagcgcatttaaatcaagttagataagttttccttgggtttgccctgactgcaagcttttgtagatttttgaatgagatttagtgggtgctaaaagttccatcaagaggcagtaaattgaaagagactttaaagacatgaaccaatgcaacacatggactttgtttatatcctgaatcaaactggggaggaaacatttgagataactggggaaatttgaacaccgacttggtgatatttgatgctattaaggaattgttaactatttgggtgtgattatattctttttataaaaagggtcaatattttagagatccataatgacatttttaggatgaaatgatacctggaatttgcttcaaaataatccagtagggaatggaggtaaaaagaaataagattggccatgagttgataactgttgaaggtaattcattatgttatttctacttttgtatgtttgaaagttaccttaaaaaagaaaaagttattttttttaaaaaaaaaaaaggtggccaggcacggtggctcgcgcctataatcccagtactttgggaggccgaggcgggcggatcacaaggtcaggagatcgaaaccatcctggctaacacggtgaaaccccatctctactaaaaatacaaaaaattagctgggcatggtggcgggcgccagtatccccagctacttgggaggctgaggcaggagaatggcgtgaacccgggaggcaaagctggcagtgagccgagattgcgccactgcactccagcctgggtgacaaagcgagactccgtctccaaaaaaaaaaaaggcaagaggaaggcagatgtgaactgagatgactgagaggaggagggaagtacaagtaacacaagtgcctattgtatgccaggcattttaatgttcagattctcgtttaaactcctaagccatcaagtttcatatccccattttacagatggagaaattcagaagagttaaatacttggctagggtcaagagaaattgtggtgtattatgaaaaatattcagctttgtagtcaagcagcccaatgcaaatgcagtctctgctatttatctacatgaccttgggcagttaattaacttctctgaacttcagtttttccatgtgtaaaatgaggctaattagaaaggtaccatctaccttaaggtcttactgcgtagatgggtaaagggcgttgagatggtatacacagtacacctagcagtgactgggctttgagtgctccgggaacagtaagtgatagcattattacaagattaggagacagatggttaggttaaataaactcaggtttgactttgaagcccatacttgtctatgatcccatactgtctgaggtaggattgataaattatgtcccttagctttttggaagcagctttgcaatgatggtactaattcctgaccaccttcccttggtttgcccttgtagtttgtgtcccctgccttggcatcgtgacataagatgctctaggtgtaggagactcatttctgcttagtggcctaagtagatcctagattaccagatagaaaattctgccctgaaagagccatcatgaatcacattactcctgcgagagtgtatgacagaactgcagggctatcttagggttctggaaggagaggcttagtgtacacctcaattaagagaacagggctgagggctactaggcagaacacgtcttttgaattttgcatcttcagccttgtaggctgtagtgagccagtgtaaagcaatagaaagtcatgacaactgtggcagatctccccatagcattaaattcaaaacattgctgaagcctaacaaaacagatccacaggctgaattcagtctgggtctccagctttcaatgcctgaaattttgggttgggtgaggtttctcccaaccagagagaagactggctagaagattgcttaagcatcaacccaccctctcaccagtcagtcttactaagatgcggagtcattaagctggtattctgcagctctctcgaagcaggcttgcaccccaccatccttccacaacctcctaatgacctccacgagctcaggaggcatggttccctcctcaatggagtcagccaggttgttgagctgtcgcccgtcatcctgtaatgcagaaacctggttaagaacttcacaggagtaatagctttccaggaggcttctgggaatactgctgaatggaaatcattttacattactacgaagacctaagatggaagcagtatccagtgaagattctatgtaagaaaacatactgttgaatttttgagtatgctccccagatgcagagggtggcactatacccagccctggggtgtgtctaaagcggggcaggggtcccaggtatttcctctctggagtttctggcttccatccttagtctgaaagtttaccgccacaaaacgtgggtcctctgctgcagagagactgaaaatgtaaaggccagattgaccatgaaatagacaagatagaagacagggacccatcacctttgttcttcagcgattgaaagctagaaaaagtccagtactagaagtagggatttcacttacaaaagttccatggccaggaacccaagggtagcaatttaaatggtaaagtaaaaaagcagaggaagctgtgagcagctttattttgtaaatatgtgttataaagtagggcttgaggacaggcacggtggctcacacctgtaatctcaacactttcggagtctgaggcaggaggattgcttaaggccaggagtttgacaccagcctagacaagatggcaagaccccttctctacaaaaaaattttaaaaaatagctgggtgtggtggtgcacacctgtggtcccacctactggggctgaggtgggagaatcacttaagcctgggagggtgagattgcagtgagccatgatcacaccactgcattccagcctgggtaagagaggaagaccctgtcccagtaaaaataagggtggatgttgcttacttctccaggactgcataattgtggtgtattatgaaaaatattcagctttgtagtcaagcagcccaatgcaaatgcagtctctgctatttatctacatgaccttgggcagttaattaacttctctgaacttcagtttttccatgtgtaaaatgaggctaattagaaaggtaccgtctaccttaaggtcttactgcgtagatgggtaaagggccttgagatggtatacacagtacacctagcagtgagatcccacccagcaggtgggattttagttactatttttcttacccatctttccatatagtttgttggcctctggtatgtttcttcttgctagcctttctgcttccacccttaaccacataatagtaatcacataccgcacagcttggttcagcataatcgatgcccagtgtggtcatggcccggatgatagccaggatggactgcagcacatttccatagatgatagccttgaactccaggcattcttctggtgaatagccatcctggtgaatgatcctgcaaggggcagacactctgtctttagctggacctgagtaaccagacctaagggattaggaatttgggggtatttaaaggatcataagaatcctatctctctgttgctactgctttctcaaagtggagggtgagggacaaggggtacagatgaggggcattggaatcagatcctttatacctgggctccttgaggctaaagagcctttcactttgaatacctccactggctgtactgacttcttcaccctatcttgtcttttggggctttgtttctactcacttcatctgtttgacgatggtgctctttcctgactccccagcacctggaaggaaaaatgcttatgctttcgatttccaccagttctcctcagccttccaggagatggcctgggagaagtcagagccactgcttgcttgggggtcttgttaggggagaatacatagggatgactgctgccctcaatttctggcaggcttgagctcaggccattcaacctggatttagagcagtttcttaacttcagtactatttagtttgggctgtctcatgcatggtaggatgttcagcagcattcctggcctctacccactagaggccaatagcatcccacttccctagttatgacaaccaaaagtgtctccagacatttccaaatgaccactggcagtcaaaatcttcctgttgaaaaccactaacagattcagggggagtcctttaacatttctcctctctgcctatttttgactcaggagagtgatcttggggtaggattggagagagctggatcatttcaccaaaataactatattttcatcaccttgctggttcccttttttttttttgagacagggtctcaggtttgtagcccaggctggagtgtaatggcacaatctcggcttactgcagccttgacttcccaggctcaagtgatcctcccacctcagtctcctgagtagttgggattccaggtgtgcgacatcatgcccgactacatttttttttttttttttgagacagtcttgctctgtctcccaggctggagtgcagtggtgctatcttggctcactgcaacctctgcctcctgggttttaagcaattcttctgcctcagcctcctgagtagctgggactctacaggcgcatgccaccatgcctgactaatttttgtatttttagtagaaatggggtttcactatgttggccaggctggtctcaaactcctgacctcaggtagatccacccatcttggcctcccaaagcgctgggattacaggcgtgcgccactgcatccggccatttccccccgcccctccgtagaggcaggttttcaccatgttgctcaacctggtcttggatggggctaagtgggttccctttattgactaatgtgtcctaatgtcctcattcacactctgctctctccatcaaaaactcataccttctagtactgagtttatactaccctaatgcctcgaactcctcctatttcgcttgtgcttgttccctctaagcagcttatcctgaatgtagaagaaatctgcttaggcttaaaagatctctcagtggccccaccatctctgtttccccctgcgtaacctcctgggctccttagagtctggtccagcttacaaagatatgctcctttagtgtgtccttacgactgtgccacagatcagctgggggaaaagaaggtgccttagcctagtgcgtcagctcccagatcccttatgggggcttggaaacccagctcaggcatctaatcttctgctacgtagaccctacctgctccagctaccctacttctgtggtaccagtggtttgttttcctaagccacgtgtctcaaatgttcttgtcttggttttatttacagctgtgatcaatttccctgacaaattgaggtgcttttattttctcagcacagaccagtgatctgcttaggagctcatcaagttgatgaaccttccatctggcaggagctttgcaggcagctattgaatagagagccaggaagggactgctgtacataaagacaccattcctccttcctcagagccccctacttccaaagtttttactgaaagcaagaaggaaccactatacttggcaaaaaccagtgggactatctctggtactgttggcactgactgtatggtgggacttgtgagcctgttggtgagggaaggtcctgttctcttctgatttcttggcttagagttctctgcagattgggtacagtctgcaagtccagggtccttgaagccaaaaggatgtgttaggtttggttagatttggaaatgggtgggttcatggtggcccttgcactattcctcgctcaagagtagaaaaactctggaatagccttggcattctggatccccttggggtggctgtttaggccccatattaactcagctctagatctcctgatcccctagccagactgtgtagaggagaggaaaaatgacctgccacccttccttcccatggggtgaggtagaacccaccaacccttcaggaaagtaggaaggacccctgccttctctggctcatcttcccatctcactcacccagcagtagcagcttgacagtcttggcttccttatcagcatcctcctgcagcttcttttctagctccttggacctcttggccagttctttgtcctcagcactggctccacttcccatatttgccgtcttgtcagctttttcaggcccctaatcctctctcgtaaggtttcctgtatgtgagatggaagagaaggaaaaaagttgggattgagtatcccaacttggctcccctaaaagctggtctgtacgatggcaggtgagagagcaggctgtagggtcttgtactctgcctacattgactgagactccctacttcaactggagacctacttcttagtctagggattgtagcctttatatctagcaatgtgataggtcaagccaattaagagctttgtcaatatggcaaggggtaaagactcaaatgtttctataactagggaaatgatctgctgggttctgacggaaggataggatgcacgactacttccatcctttaaggggttcatcccctgaaagtctcttgcttccttagatttatttgcatcatagagctagagattactggcacatatgtagaaagcattccttatgttgagcctccagattataaggtcttgatctcaagggcttcagggtatcaaagcatactcgtttaccataggctggtcctggccaggaaatttgttttgggtggtgcccttccttgggaagattaggaatgtttcagctcccgcagtggctgctgctccaggaagctactagcattgttcctttgcattggcccctctctttgtacttctgttattagcacttatcacttcatattgtacgtcgttttacaaatcttttccctcactgcatttctccccctggagctcaacggaccaaatctgactcatctttgaacctctcagaacttgtagtttatttgtggatcaaaaggtttggtgaatgaataaatgcaggaaaagggtgtatggtgaagagaatggggttgcttccctttggcccactaaagccagctgagtcccaacttcacttcataaatgaactttgctggtattcagtgtggggtttgtgctgcctcacacaaaaaactctgcttctttgggaaattggactccagactctggcttctcaaaggttggggcagctctctctccttctggctctcatcccagctgccctttcctgggggaaaaatgagggtgcagtctagcaactgcctcacagacatttaggactccacaggttgtactcctctatgccaattatttcagtttacttaaatgagtgttgctggcggagcctcctcaggtggagatgttttagaattttgttgcccaaaatgtggatcaagagccagcaacatcagatcacccggaagctcattagacatgcagaatctcaggctttaatccagaacttctgattcagaatccgcagtttaacaagatctcaggtgactctaaagacattaaagattgggaagtactgccctagggacctgttttccgctaaacttacctaatcctaagaatcacctgggttgctggtgtctgtgtttcctcaagtcttaggtgccactgactagaagattaccctgctttccgagatgttaaaatagtgtatgtttttaaatggtatgttagcatcaaactccagagccagagaaaatattttaagctaatacaggtagttatcacatctgtgaagtttgaaaaaccctggcctgaaacagttctcaacttttagtgtacagtggcatttacctggagagctttttaaaaaatactgatttaattggtctggagtgcagtccaggcacaaggatttaaaaacgtccccagctgattctagtgtacagccaaggtggagaactactgaggtcgaaggatgtaatttgctctttcattttagagctggacttgtgcagcagtggccagttgggactgggaaggtcaggagtagaatctaggtctccccgcctatcaggtaccctgagccatagctaattatcttcctccttcgcaccacctttcagtgactgtaggggctgatggagaaatatgcagctgctgaggtgctttccatggtagccatgttttcccaatcaaattggcaagtccttattgacttaaggaaaaacaggagagtctctttgaaattgtgactatcttggaatcttggttataaggtttcagtaattataccccactgctagccctgctccagcgtactcacaatactggtaactcacactgaggccagagccatgctgaaggctacactgttcaaggggctgcctggaactattaataattattatgttatagttattataattaataactgctgaacaatgtaagtggctcataccagttaattatcacaataactgctattgtccccaatttacagactagattaactgagacttgagagttaagtaactcatttaaagtcagctgggcatagtggcgcatgcctgtaatcccagcactttgggaggctgaggtgggtggatgacctgaggtcaggagttcctggccaacatggtgaaatcccgtatccactaaaaatacaaaaattaggccgggcatggtggctcacgcctgtaattccaacactttgggaggccaaaatgggcagatcatctgaggtcaggagttcgagacagcctggtcaacatggtgaaaccctgtctctacttaaaaaaaatacaaaaattagccaggcatggtggcaggcacctgtaatcccagctacttgggaggctgaggcaggagaatcacttgaacccgggaggcactgcactccagcctgggcaacagagcaagattccgtctcagaaaaaaaaaaaaaaaagaaaagaaaagaaaagaaaaagcccagcatggtggcatgcacccagctacttgggagatagaggcatgagaatcgcttgaacccgggaggtggaggttgcagtgagccgagattgcgccactgcactccaacctgggtgacagagtgagactctgtttcaaaaacaaaaaaacaaagttatatggcctagtaaacagacaaaccggtgatccttctttctattacttccacataagtagccagagagagaaagcatggacaaatgcatgaactctataacagcagcccttgttaaaggaaccactaagttgtttcacacacagggaaagtgggcttgttcctttttctgctactacctctgcaaacttctgtgctgcttctgctttgttccctaacttactggatggaagttcccctttctcactgctaagctgagagagggaactgctagccctcgcctggcctgagagtacagatccattactgtgcatacatcatcctgatgtctgtgacctcctgcctctgcctctatcgtcagttcctgtgcctttcctgtggctgtcccactttatgatcacatttacgaacagtttcctgatgaagtaaataaggtatgtagtgctagttccattttggaggtgagtgaactgaagtacagaaaagtgatcctcacattaataagcaagttggtatcagaagccaagccagagctcaggtgttttgattcacagccctttataaccattatcattttgaatgaaaagtaaatcactgtttcttagtgatttgggcatgtttcctgagttaagggatctgtctgacatccgtggtaagccttgtcttaagtgaattgtgggtaaagacttgtcccagatggagtgggaggacatgaaggatgaggaactaccttcaggaccttccagtccataggcagaggtgggggaaattcacagaaaaacaaatgagttaaagggatactgcagtagtgctgggaaattcagagctgtttaagacctagcattcacccctggtaggaaaggcaatcaaacacacatctgactgtcagactgacaaagttctacagcggaagaaagaaaagggtgattgtgaaatgaatagactttccacagagaagcagaataacagtggaagtgggagatacgcattttggggaaaggaaagagcatgaaaaaagaggtagaggcacaaagtacaaggtgtgctcagagaagactgggactttgatgtgactggactggagtgaaaggtgcatggagtggagggttgggaggtgaagatgaagacaagaaagggaaattggagccagccagtgaagcgccttcaatggcaaggggtttgactaaaatccactggggtcttataaacaagtatagatggaaacagctgtatggtgctataaacacaatgctgggtgactgaggtgagggggagagggagctggctgctgggagaagctgagaaaccagagctgaacagcttgtttctagaagggcctaggcataaggtatggtttgggaaattgccttggccaaggacctttttggagctgcagatattctctcccaagtttagtatctgtgaagattgttctggcctagctagggaggcggacatcacaagtgagctgaagtccagaagcaaagaaaagcacttcttcagagaaacaggagtgcaccatctttagggagctgggattccgggagggccagttaaggagccatgtggggaacaggctaggaggggaggaagctgtgtttggagctagggaatatctcagaggctcaaaggcaatgaatgttaaggcctcagtgtgaaaaaagcccaggccataggatgactcactcctttatttcccaagctctgttctgcgtagacaatgaaacctcactgagattcttgctggtatggagtgggtggagggattgatgcctaactataatcagggccgacttcctagcagcaacaatacaccagatgacctggaaataggggagggttgtagagtgaagggtgtgttgcagatgggactaggggactagcataaagggactaatgaactggtttgcctgggctgggtggagggcaaggattgccacctattggctgctgaggtaggtaggtctgcattaagcaggatgctcaagagacctggcccaatgcaagatactatctttaaaactatgtcaacatttgcatcttatcagaagatacatgacatttatgtagttacatggtgcttgatttttgagattcattttattcattcttgagagtccatcagcctcaaaatccctaagcgccccaagaccaattcagtgggccataaatgtaaacagaatagtttaagtctggggttaagaccccgggaaggctgggttggggggactgtggaggcaattacagatttttacagatttttgttgatttctatccccttgattataaaagttatgggtatgtattataatttctaaaatgcaaataaatataaagaaaataaatataacccataattccatcactacagataatcattggtaaacttgttggtgtgtttcttttctacccatgtatatcacataagtaggaccatactgtgtatagtgttttgcatccattcttttacctaactttatattgtaaacatttccacatcattaaacatttctccaagaa

SEQ ID NO: 139241 - DNA, 2417 bp, Homo sapiens
  Payload ID: 7292
  Gene Symbol: GNAT1
  Gene Name: guanine nucleotide binding protein (G protein), alpha transducing activity polypeptide 1
  Uniprot ID: P11488
  ENST ID: ENST00000232461
  CDS Start-End: 115-1167
ttgattgcaggtcctcctggggccagaagggtgcctgggaggccaggttctggggatcccctccatccagaagaaccacctgctcactctgtcccttcgcctgctgctgggaccatgggggctggggccagtgctgaggagaagcactccagggagctggaaaagaagctgaaagaggacgctgagaaggatgctcgaaccgtgaagctgctgcttctgggtgccggtgagtccgggaagagcaccatcgtcaagcagatgaagattatccaccaggacgggtactcgctggaagagtgcctcgagtttatcgccatcatctacggcaacacgttgcagtccatcctggccatcgtacgcgccatgaccacactcaacatccagtacggagactctgcacgccaggacgacgcccggaagctgatgcacatggcagacactatcgaggagggcacgatgcccaaggagatgtcggacatcatccagcggctgtggaaggactccggtatccaggcctgttttgagcgcgcctcggagtaccagctcaacgactcggcgggctactacctctccgacctggagcgcctggtaaccccgggctacgtgcccaccgagcaggacgtgctgcgctcgcgagtcaagaccactggcatcatcgagacgcagttctccttcaaggatctcaacttccggatgttcgatgtgggcgggcagcgctcggagcgcaagaagtggatccactgcttcgagggcgtgacctgcatcatcttcatcgcggcgctgagcgcctacgacatggtgctagtggaggacgacgaagtgaaccgcatgcacgagagcctgcacctgttcaacagcatctgcaaccaccgctacttcgccacgacgtccatcgtgctcttccttaacaagaaggacgtcttcttcgagaagatcaagaaggcgcacctcagcatctgtttcccggactacgatggacccaacacctacgaggacgccggcaactacatcaaggtgcagttcctcgagctcaacatgcggcgcgacgtgaaggagatctattcccacatgacgtgcgccaccgacacgcagaacgtcaaatttgtcttcgacgctgtcaccgacatcatcatcaaggagaacctcaaagactgtggcctcttctgaggtgcctgaattcatgcgtgtcagtcaccctgagacctggtagccctagctgccttgcagccccaaaccccaggaccctatcagccccctgggactccctggccccaacctgccacctcaccaaagctctgagccctgctagccttgaggcgcggaccctcccccatacctcccacagtatcccagcgcctcatgcccccaaccccaagccctgcccttcaccgcccggctgcactggcctctaggactcacagcagccagccccagctaggaacgggcaggacttggggcagctgaagctcacggtgactcagcagtgcccaactgaccaatctcccgcagctctcctgcccctgggggcccacgactcacctggtgggcctgggctcagcaaacagccctccctcccagtatttcatcaaggacagggaatatccctcccacacacaggccagctgctcaccctgccacctccatgtgacaagtttgacacctgtctacccagagccagtgactgtccctcccagcagcctccaaagggtccaaagtccaagctagctctggcctgtgtggcccccacataaataaattagtggggagggggcagacctgggggcccttgggtgccagagtgagacacagcaggacccttccccaaatactaggctcagagcaacctccagccttctccagcaggatctgctccctgtgtccttggacagcagatccacacaccacttccccacccacacacagtaccctgggctggttggacaacaggatggtgtgttaaggggttaagggagggtactgttgacaccagctatggccaatagctgggctgtcctgaggggtggctggggacagagtccagctcccttggatcagcccagaggattcaggataggacaaaggccctggctgtgcccaaaagggtctacctcaggtggggttacaagcaaacctgggtgaccctcttgtccctaccagcagcttctcttgccccttccattcagggttccctggcaggggaagctgagagccatggctgaactatcagggacaaaggcccatgtccccacatccctgctccctccttcctcatccagcaccaaatctttgcttatgtccacaggccagggcctgtgctgcagtcggggacaaggagcttccgtctggcaaggccggggcacaatttgcactcccctcagctagacgcacagactcagcaataaacctttgcatcaggc

SEQ ID NO: 139242 - DNA, 1224 bp, Homo sapiens
  Payload ID: 7292
  Gene Symbol: GNAT1
  Gene Name: guanine nucleotide binding protein (G protein), alpha transducing activity polypeptide 1
  Uniprot ID: P11488
  ENST ID: ENST00000433068
  CDS Start-End: 57-1109
ccctccatccagaagaaccacctgctcactctgtcccttcgcctgctgctgggaccatgggggctggggccagtgctgaggagaagcactccagggagctggaaaagaagctgaaagaggacgctgagaaggatgctcgaaccgtgaagctgctgcttctgggtgccggtgagtccgggaagagcaccatcgtcaagcagatgaagattatccaccaggacgggtactcgctggaagagtgcctcgagtttatcgccatcatctacggcaacacgttgcagtccatcctggccatcgtacgcgccatgaccacactcaacatccagtacggagactctgcacgccaggacgacgcccggaagctgatgcacatggcagacactatcgaggagggcacgatgcccaaggagatgtcggacatcatccagcggctgtggaaggactccggtatccaggcctgttttgagcgcgcctcggagtaccagctcaacgactcggcgggctactacctctccgacctggagcgcctggtaaccccgggctacgtgcccaccgagcaggacgtgctgcgctcgcgagtcaagaccactggcatcatcgagacgcagttctccttcaaggatctcaacttccggatgttcgatgtgggcgggcagcgctcggagcgcaagaagtggatccactgcttcgagggcgtgacctgcatcatcttcatcgcggcgctgagcgcctacgacatggtgctagtggaggacgacgaagtgaaccgcatgcacgagagcctgcacctgttcaacagcatctgcaaccaccgctacttcgccacgacgtccatcgtgctcttccttaacaagaaggacgtcttcttcgagaagatcaagaaggcgcacctcagcatctgtttcccggactacgatggacccaacacctacgaggacgccggcaactacatcaaggtgcagttcctcgagctcaacatgcggcgcgacgtgaaggagatctattcccacatgacgtgcgccaccgacacgcagaacgtcaaatttgtcttcgacgctgtcaccgacatcatcatcaaggagaacctcaaagactgtggcctcttctgaggccagggcctgtgctgcagtcggggacaaggagcttccgtctggcaaggccggggcacaatttgcactcccctcagctagacgcacagactcagcaataaacctttgcatcagg

SEQ ID NO: 139243 - DNA, 479 bp, Homo sapiens
  Payload ID: 7292
  Gene Symbol: GNAT1
  Gene Name: guanine nucleotide binding protein (G protein), alpha transducing activity polypeptide 1
  ENST ID: ENST00000440836
  CDS Start-End: 90-479
caaaagagctaattccctctgagcctcctggagacacctgcaccccttcaggtgccggtgagtccgggaagagcaccatcgtcaagcagatgaagattatccaccaggacgggtactcgctggaagagtgcctcgagtttatcgccatcatctacggcaacacgttgcagtccatcctggccatcgtacgcgccatgaccacactcaacatccagtacggagactctgcacgccaggacgacgcccggaagctgatgcacatggcagacactatcgaggagggcacgatgcccaaggagatgtcggacatcatccagcggctgtggaaggactccggtatccaggcctgttttgagcgcgcctcggagtaccagctcaacgactcggcgggctactacctctccgacctggagcgcctggtaaccccgggctacgtgcccaccgagcaggacgtgctgcgctcgcgagtcaagaccact

SEQ ID NO: 139244 - DNA, 1339 bp, Homo sapiens
  Payload ID: 7293
  Gene Symbol: GNAT2
  Gene Name: guanine nucleotide binding protein (G protein), alpha transducing activity polypeptide 2
  Uniprot ID: P19087
  ENST ID: ENST00000351050
  CDS Start-End: 188-1252
ctcagtcaatgtaggcagagtacaagaccctacagcctgctctctcacctgccatcgtacagaccagcttttaggggagccaagttgggatactcaatcccaacttttttccttctcttccatctcacatacaggaaaccttacgagagaggattaggggcctgaaaaagctgacaagacggcaaatatgggaagtggagccagtgctgaggacaaagaactggccaagaggtccaaggagctagaaaagaagctgcaggaggatgctgataaggaagccaagactgtcaagctgctactgctgggtgctggggagtcaggaaagagcaccatcgtcaaacagatgaagatcattcaccaggatggctattcaccagaagaatgcctggagttcaaggctatcatctatggaaatgtgctgcagtccatcctggctatcatccgggccatgaccacactgggcatcgattatgctgaaccaagctgtgcggatgacgggcgacagctcaacaacctggctgactccattgaggagggaaccatgcctcctgagctcgtggaggtcattaggaggttgtggaaggatggtggggtgcaagcctgcttcgagagagctgcagaataccagcttaatgactccgcatcttactacctgaaccaattagaacgaattacagaccctgagtacctccctagtgagcaagatgtgctccgatccagagtcaaaaccacgggcatcattgaaaccaagttttccgtcaaagacttgaatttcaggatgtttgatgtgggagggcagagatccgagagaaagaagtggatccactgcttcgagggagtcacctgcatcattttctgtgcagccctcagtgcctatgatatggtgctggtggaagatgacgaagtgaatcgtatgcatgagtctttgcatctgttcaacagcatatgtaaccacaaattctttgcggctacttccattgtcctctttctcaacaagaaggacctctttgaggaaaaaatcaagaaagtccatctcagcatttgttttccagagtatgatggtaacaactcctatgatgatgcggggaattacataaagagccagttccttgacctcaatatgcgaaaagatgtcaaagaaatctacagtcacatgacctgtgctacagatacacagaatgtcaaatttgtgtttgatgcagttacagatattatcatcaaagaaaacctcaaggactgcggcctcttctaatcctcaccattcctcaggtataagttctataaacaggcttggaatctgggtaattaaaaacagaaaattatagtcaatataccatga

SEQ ID NO: 139245 - DNA, 466 bp, Homo sapiens
  Payload ID: 7293
  Gene Symbol: GNAT2
  Gene Name: guanine nucleotide binding protein (G protein), alpha transducing activity polypeptide 2
  ENST ID: ENST00000622865
  CDS Start-End: 96-466
gtcggactcccgcggccggactgtgggggagtcacgcaacaggaaaccttacgagagaggattaggggcctgaaaaagctgacaagacggcaaatatgggaagtggagccagtgctgaggacaaagaactggccaagaggtccaaggagctagaaaagaagctgcaggaggatgctgataaggaagccaagactgtcaagctgctactgctgggtgctggggagtcaggaaagagcaccatcgtcaaacagatgaagatcattcaccaggatggctattcaccagaagaatgcctggagttcaaggctatcatctatggaaatgtgctgcagtccatcctggctatcatccgggccatgaccacactgggcatcgattatgctgaaccaagctgtgcggatgacgggcgacagctcaacaacctggctgactccattgaggagggaaccatgcctcctgagctcgt

SEQ ID NO: 139246 - DNA, 3333 bp, Homo sapiens
  Payload ID: 7294
  Gene Symbol: GNAZ
  Gene Name: guanine nucleotide binding protein (G protein), alpha z polypeptide
  Uniprot ID: P19086
  ENST ID: ENST00000615612
  CDS Start-End: 660-1727
ggcggcgggcggcgggcggcgcgggagggcgggcggagggaaccaggccggccggagcgtgtgcgccgcccgcggtccggtcacgtccccgcgtgggcgccgctgcccgcgtcgtacggaacgagggcgccgcggccccgtgctcgccgccccgccccgccccgccctgcccggagcagctcggcagatgctctgtgctgcggcccggaggtgaagggctggatgcacagtgggagccggaggcggggggctgcagggagcacaccagcgaccggccctccaaccctccagccactcagcaacatcgccacagcaaccagcaaccagacggcagcagccgaggcaaacacaagcggacggcttcccaccgtcgccgaggacagggaatgactacggcaaatcaggccactttgccaactagggaggtggagtgtcactagtggggaggggcggccaccgcccgctgcacagagcgccatgccggctggagaagaggcgctggggcaggggctgcagtgtggctcggcctcacccccctgctggcactgagtgcctccagggcagctgggctcttgtctgcctggtctcagtgtcccctgtggcaagagggagaggtgccccatcccgtgctccttgtctgggcccgctgctgccagaccatgggatgtcggcaaagctcagaggaaaaagaagcagcccggcggtcccggagaattgaccgccacctgcgctcagagagccagcggcaacgccgcgaaatcaagctgctcctgctgggcaccagcaactcaggcaagagcaccatcgtcaaacagatgaagatcatccacagcggcggcttcaacctggaggcctgcaaggagtacaagcccctcatcatctacaatgccatcgactcgctgacccgcatcatccgggccctggccgccctcaggatcgacttccacaaccccgaccgcgcctacgacgctgtgcagctctttgcgctgacgggccccgctgagagcaagggcgagatcacacccgagctgctgggtgtcatgcgacggctctgggccgacccaggggcacaggcctgcttcagccgctccagcgagtaccacctggaggacaacgcggcctactacctgaacgacctggagcgcatcgccgcagctgactatatccccactgtcgaggacatcctgcgctcccgggacatgaccacgggcattgtggagaacaagttcaccttcaaggagctcaccttcaagatggtggacgtgggggggcagaggtcagagcgcaaaaagtggatccactgcttcgagggcgtcacagccatcatcttctgtgtggagctcagcggctacgacctgaaactctacgaggataaccagacaagtcggatggcagagagcttgcgcctctttgactccatctgcaacaacaactggttcatcaacacctcactcatcctcttcctgaacaagaaggacctgctggcagagaagatccgccgcatcccgctcaccatctgctttcccgagtacaagggccagaacacgtacgaggaggccgctgtctacatccagcggcagtttgaagacctgaaccgcaacaaggagaccaaggagatctactcccacttcacctgcgccaccgacaccagtaacatccagtttgtcttcgacgcggtgacagacgtcatcatacagaacaatctcaagtacattggcctttgctgaggagctgggcccggggcccgcctgcctatggtgaaacccacggggtgtcatgccccaacgcgtgctagagaggcccaatccaggggcagaaaacagggggcctaaagaatgtcccccaccccttggcctctgcctccttggccccacatttctgcaaacataaatatttacggatagattgctaggtagatagacacacacacatgcacacacacacatctggagatggcaaaatcctctaaaatgtcgaggtctcttgaagacttgagaagctgtcacaaggtcactacaagcccaacctgccccttcactttgccttcctgagttggccccactccacttgggggtctgcattggattgttagggataggcagcagggctgaggcaaggtaggccaactgcacccctgtcgcctggaggagggccagctcgctgcccgagctctggcctagggaccttgccgctgaccaagagggaggaccagtgcagggtctgtgcaccttccctgctggcctgcacacagctgctcagcaccactttcattctggacctgggaccttaggagccgggtgacagcactaaccagacctccagccactcacagctctttttaaaaaacagcttcaaaatatgcagcaaaaaccaatacaacaaaacgagtggcacgatttatttcaaactaggccagctgggattccagcttttcttctactagtctgatgttttataaatcaaaacctggttttccttctctgacattttttttttgttttgttttttggtttttttttttttttggccaaatctcgtggtgtttcgcagaaaaaaatccagaaaatttcaaatgcagttgagtattcttttttaaatgcagattttcaaaacatattttttttcaggtggtcttttttgtgtctggcttgctgagtgtaaaagttgttatctggacgatctgtctctctgctccaaagaaattttggagtgagtggcagtcctgcgccagcctcgcgggacacgtgttgtacataagcctctgcagtgtcctcttgttaatggtggggttttctgctttgtttttatttaagaaaataaacacgacatatttaaagaaggttctttcacctgggagcaaatgaacaatagctaagtgtcttggtatttaaagagtaaattatttgtggctttgctgagtgaaggaaggggagcaaggggtggtgcccctggtcccagcatgccccgcgcctgagactggctggaaatgctctgactcctgtgaaggcacagccagcgttgtggcctgagggaggccctgctgggaccctgatctgggccttcctgtcccagggcctatgggcaactgcgttgaaaggacgttcgccaagggccgtgtgtaaatacgaactgcgccatggagaggagaggcactgccggagcccttgccagatctccctccctctctccgtgcagtagctgtgtgtccgaggtcagtgtgcggaatcacagccaaggacgtgaagagatgtacgggggaaagagaagctggggattggatgaaagtcaaaggttgtctactttaagaaaataaaataccctgaatggagccca

SEQ ID NO: 139247 - DNA, 8906 bp, Homo sapiens
  Payload ID: 7295
  Gene Symbol: GNB5
  Gene Name: guanine nucleotide binding protein (G protein), beta 5
  Uniprot ID: O14775
  ENST ID: ENST00000261837
  CDS Start-End: 67-1254
ctcacctctcaccatctgctctgtggctcccagtgctgactctggaagctttatcttgggtaaaagatgtgtgatcagacctttctcgttaatgtatttggctcatgtgacaaatgtttcaaacaacgagctctgagaccagttttcaagaagtctcaacaactcagctactgttcaacatgtgcagaaattatggcaaccgaggggctgcacgagaacgagacgctggcgtcgctgaagagcgaggccgagagcctcaagggcaagctggaggaggagcgagccaagctgcacgatgtggagctgcaccaggtggcggagcgggtggaggccctggggcagtttgtcatgaagaccagaaggaccctcaaaggccacgggaacaaagtcctgtgcatggactggtgcaaagataagaggaggatcgtgagctcgtcacaggatgggaaggtgatcgtgtgggattccttcaccacaaacaaggagcacgcggtcaccatgccctgcacgtgggtgatggcatgtgcttatgccccatcgggatgtgccattgcttgtggtggtttggataataagtgttctgtgtaccccttgacgtttgacaaaaatgaaaacatggctgccaaaaagaagtctgttgctatgcacaccaactacctgtcggcctgcagcttcaccaactctgacatgcagatcctgacagcgagcggcgatggcacatgtgccctgtgggacgtggagagcgggcagctgctgcagagcttccacggacatggggctgacgtcctctgcttggacctggccccctcagaaactggaaacaccttcgtgtctgggggatgtgacaagaaagccatggtgtgggacatgcgctccggccagtgcgtgcaggcctttgaaacacatgaatctgacatcaacagtgtccggtactaccccagtggagatgcctttgcttcagggtcagatgacgctacgtgtcgcctctatgacctgcgggcagatagggaggttgccatctattccaaagaaagcatcatatttggagcatccagcgtggacttctccctcagtggtcgcctgctgtttgctggatacaatgattacactatcaacgtctgggatgttctcaaagggtcccgggtctccatcctgtttggacatgaaaaccgcgttagcactctacgagtttcccccgatgggactgctttctgctctggatcatgggatcataccctcagagtctgggcctaatcatcttctgacagtgcactcatgtatacctgagaatttgaaatcttcacatgtaaatagatattacttctagaggagcttagagtttattgcagtgtagcttaggggagcaacccatggctcacaggtcactaagcgtctccaatatgactattaaaactgtcacctctggaaatacactagtgtgagccttcagcactgcgagaataccttcaagtacagtatttttcttttggaacactttttaaaatgtatctgtttttaaggttattctaaattatagtagcctcaactcattctgtcaccagtagaattcagcagttaatatattccatattatttctttgaatcaattcattttcagagcactttaaagtctgatatttctcgatgtgcactgtgatgcctggaaccttcctctggaagtgctgattttatggactgaggactggtgactggtctgtgatagaagcaaattccaattccaaatgtaattagacaaaaatcatttttttagaatgtgtttttattgtaaaagtatctttttcagcttcctgttctattgtcttttttcagatacaacatttttgtctatggtgaactgctgtaaatgacgcagagaaatgcctaaaaaggacaggtggtttgactcatggatgatgatgatgtcactgtgccacttggacagggcgttttctctgaattgaagggaaagccaatggtgtttgtaaacaaatgcttctgagagcaaagaaaagtcttctgtgtgggaacacaagatagtaaacttatttaaaaacctattagtagaattagtggaaacacttaggttaaagtgaatcttgtccatataaattatattcatggccgggcgcggtggctcacgcttgtaatcccagcactttgggaggccgaggcgggcggatcacgaggtcaggagttcgagaccacggtgaaaccctgtctctactaaaaaatacaaaaaattagccgggcgtggtggcgggcgcctgtagtcccagctactcggagaggctgaggcaggagaatggcgtgaacccgggaggtggagcttgcagtgagccgaggtcgagccactgcagcctgggtgacaaagcgagactccgtctcaaaaaaaaaaaaaaattatattcatatgtattgcattgcaattataattacatatgcagattgattgatagtcatgaataataacgtctgctcctcttacatagaaaaacgatattaaaagaagatcttctctttatttgagactcagaattccttctagaagaaggaagtgctttttgttataggatcccttcttttcctttttttgtttttttgtaagatgtagatgcttattctttgctttagaaaacttctcacttaaaaagatggcatgcacctaggggaataaaaggtcacctcagacaccaggtgtcattcctggtgaggcctgcctcgtcggtggcctggggtctgccggcaggttctggctgcacctgaaggctgcgtgcaccttgtcccctggacaggtctcctttcctggccctgctccagcccagcccttcttctagtggtagctctggctttgcaggcccagctccaggccctgctcctcagagagactcttccagagctggagctgggcacagccataagacaggactggaccagatgctcctgtaaacatccaggggtgtgccaggcccaccctcacaactgcttgttcaggtatcgtgatgggccactcggtccaaaatcagccaggccatcttttccatcatctcacttcaaataaacataataattatatttgatcatttgcagagcagttactggtggttttattgtacactggggtctggggtagagagagaaaaatgaagggcctctgccttcctccagggagcccagagagagtgctttttagtcccagtagattccagtctgggcaggggctcaggaaatgggcccagtgtctggccagctcctgccaggtgctgaaggggtcagggcaccatgggattcctgagctctgctccagaatgtcccacagtggcccctggtgcagctggcctccttgtggtggcatccccaaccctctctcccacagccatttttttttttgtctctgcactgtgccttccggctcccagaagtgcaggaaggcacgagaaaggaaggaaaggtggcccagggaagcacattccaggttccatgtttggagaggtggagagcatcttcaggatatgtgcaaagtagactgtgactttccaatccaaaaagccactttaagggcccagggaaagtattccagagaatgcttccactccccgcatgggcaggaagcctccttcgctgtgagcatgcgctctcgcagtgggtgctgtcgggatttgctgatgagatacttgatttggactatgtgacagcatgtggagactcaggggtaagctccatgggatagattgtattttgcagattgaaaataatgctgagtgcattttataatcagcttttcttttttccagaggacttggggataaacctaccaaaccaattgtggtgaaggggccaaacagatgggcccccaggggtgtagagccttgggcagccccctcctgggccagaaaaaagaaagttcaggcagaaaggtgtgggtgatgggtatttatgggaaatatctgtgacatgaagccaagtccagtgctttagaatgcgcggtcagcctctcaccggtggggccctggcagccgtccctcttctcccaggcgagccagaggtgggcatcccgttgccactgccctcttcccgctcttctacctcctttgcacccttctctaggttataagtggcttaaaacagcacagggttgtaagggcctttgtgtcccgggctctcatagttgccaggccagctggctgaaaggtggcaccaccgatactgggactcctctgtgagttagagggatgccttggtgacataagagggctggccttcattcacacccacctctgtcacggtcacagaatatatgataatatctgagtttttctcagcctcagtttccccatttgtaacatgggatgggactaaaatatgtaaagtgcctacctcagcctttagcacatcttcaggaagggttagttcccagcttctccctgtgtcctcctcagtccccttcctatttgcccccctcccttctccctccacctatcttccctctttctcttcccttcccctcctcctccctctctcctccctctctcccatttccccctccctccctcccatctcctcctccctccctcccatctcctcctcctccctcccatctcctccctcccatctcctcctccctcccatctcctcctccctcccatctcctcctccctcccatctcctcctcccttcctcctgtcacccctcctccctccctctcatcacctcctccctccctcccatcgcctcctctctccttcctatctcctctttcctcttctctgccccctccccctctcctcattcatccggactcctttttctaacccttctcaatcttcccccattcctcatctcctcttcctctgtctccctgttccacctctctcctggtctccttccttccccttctgctgtttctccctccctcctcctcccttcccattccccttcccccagcacttccttttctccccatctcctccccattccccttcccccagctctttcttttctccccatctcctccccatccataggcagcccccactcatatagcaaattagtaattctcatcagttagagcttcgtctgggctagtggttctcaaactttttggtcttaggatctctgtacactttttttttttttttttttttacgtggagttttgctcttgttgcccaggctggagtgcagtggcgcgatctcgggctcacttcaacctccgcctcctgggttcaagcgattctcctgcctcagcctcccgagtagctgggattacaaggcatgcaccaccacgcccggctaattttgtatttttagtagagaccaggtttctccatgttggtcacactggtctcgaactcccaacctcaggtgatcctcccaccttggcctcccaaagtgctgggattacaggtgtaagccaccgtgcccagcctacacccttaaaagttattgaggaccccaaataacttgctcattgtggattgtatctatccatatttattgtattagaaattaagactgagaaaaagttataaaacacaagaatacagatgcacacgttccattagccatcaaggtgatctttctcccatgccagtagtctctggaaaattcctgagaggatgaaaataaaaaaatcacccatacaaaaaaaaaaagtgtcaatattattatgaaaatagttttgaccgtgaggaccccctgaaagggtctcagggaccctcgggggccctggatcttgctttgagaacagctgatctgggctaatgagcccttttccagcccctctgtgtgagacctcccagaaaccactaagggccttggaagagcttggcaaagaaagaggtgacaggatgattgaggagagccaccctagggaaagccttcagaggaggctttgggacagccccggtcggtggaggaagtcccagagaggcagtcggaagggctagggaccagctgaggcctgtgacctgaaaatcctttcaaaagaggacgcctggaagcctggggaaggcacagtgggtggggtagaagactggggctgaggcccaggccattcccaagcctggaagagctgattgagtggggatttgtagatcttcatttcccaaacttgcctgctgagaagaatcgtcccacccatggcaggttcctgcactgcgccttcagggccctgccctgagatctggactgggcgggcctgaggtgggccaggaaatctgagccggaggcccactggggaggccgcgagtgaatcttgtctctgtggatcctttgtaaggattgccatgctaaaccacttgccctctcatccgtgaccggagagaattgggtcactcttccagacataccacagactcctgcttctagacagcacttggctggagccaggctggccttcagggttggtcagtctccacaggggactctggcctcccgtgggctgccacagggccaaccccagtgaaagaaatgaaatgactgaatatgttcatgtcattagaaaaaggatgcagcagggggtggggaggagttggttaatggaatcaaatttgcagcaagataggagtctagtgtttggcggcactgtagggtgactatcgctaacaataatttactgtgtattttcaagtagctagaagagagaattttgaatgttcctgtcaacctaaataacaaagacaggctcgctaaagatatttaatcaaaagtagggcattgcaacaggaatatgtgtgctgtagtaaactgtgtgcatattccaggaggtaaagaaaaacaaaggtgactgggcgcggtggctcacgcctgtaatcccagcactttgggaggccgaggcgggtggatcacgaggtcaggagatcgagaccatcctggctaacacggtgaaaccctgtctgtactaaaaaaaaatatatatatatattagctgggcgtggtggcaggtgcctgtagtcccagctgctcgggaggctggggcaggagaatggcatgaacccaggaggtagagcttgcagtgagccgagatggcaccactgcactccagcctgggcgacagagcgagactctgactcaaaaaaacaaagaaaaaaaaaaagaaaaacaaaggtttttaaaggaaaaaatgaggaggattacataatggttttgaaataattatccttggctacaaatatcaataacaaaggtcacaccagtccgaggttggacaggcagttgctaggcagatgtctttgcagaagtaatttttgtgtgaggttgcagcagcctatgtgcaaggttgtaatttttgcagaatcttttgtgatcatttttggtattaggcatacaagcatgagaatcccctcttcatggcctccccagctctatttgtcatggtttgtttttttaaaacactagtgactctatttgaattctaacaactttcacattcccaacacaaatgatagacatttaagggattaatatgctaattaccctgatcattacacattgtatacatgtatcaaaataacacactgtaccccataaatacatacaattatgtgtcaattaaagatcattatttttaaaaataggaccagaaaaaaagatgcagaccctctagtaaggagatgggatcaggagtgattccatggttaatttaacccacataaacaactaatcgtaagtatggtatgagcgtttatgtaaagactgtgacaacaggaaatgtctgtctttgaacccaaggttatctaaccagcacaccaatggtgaaagattaactttgtcagaaaccaggaaccatgaagcagaggtcactgtttccaacctgtgtgttttccacggtaattggcagcctccccaagggaaattaaaacatatgtccacacagaaatttgaatgcaaatgttcatagcagcattactcataatagcccaaagctgaaacagccccaatgttccacagtggatgaatcgatgaacaaaatatggcgcatccacagaatggaatacaaagaaagaaagcgtggacacatgctgcaacatggatgaaccttgaaaatattgtgccaggggaaagaaaccagagacaaagagccacatgttgtaggattccatgtatatgaaaggtcctaataagcaaactcataaagacaaaaagcagattggtggtcacttagggctagggtgaggagtgacggttagtgggcactgagtttctccggggggaactgaattagatggtggtgattgcacaattctgtgaatagactaaaaaccactggactgtaagagggtgaattttttggtatatgaattacatctcaataaagctgttacttaaaacgtggaaaaaataataagcagtcactagctattctcaataaaacagaaaccacataggtaagaccaatattgtcacattttggttttggctgataatggggcaagtgagcatagtcaccgttgccagaggatttaccatttacaaataaaagtttctgtggagtgacaaccttttactgtgtgccaggtactgtgctaagcactttgtatataccgattcatgtaatccttgtgacagccccgtgatgccccatttttagatggggagattgaggttaggagagttgaataacttgcccatagctgcacagcttccaagttgcagagacaggattttcaccgagtcttattacaaactgcctcatattgtgtggactggaaattctatgttgaggttaatttattcatttgttgtttagttcttttcatcattgttgagttaccaatggcagttccagaggatttatcatttaccccaaagctactgcaaatctaagagaaaacaatgttcttgctgctaaagtttaatgtacaaaaaggtaaaatcatgactgtcttgcaaataaaacatgaacatgta

SEQ ID NO: 139248 - DNA, 1735 bp, Homo sapiens
  Payload ID: 7295
  Gene Symbol: GNB5
  Gene Name: guanine nucleotide binding protein (G protein), beta 5
  Uniprot ID: O14775
  ENST ID: ENST00000358784
  CDS Start-End: 123-1184
atcgcggagggcggggccgcggggcggtgctcggggccggggacggctgctggagcggcgcccgccgcggctcagcgcattcccgctctccgcttccctctccgctgcgtccccgcgcgaagatggcaaccgaggggctgcacgagaacgagacgctggcgtcgctgaagagcgaggccgagagcctcaagggcaagctggaggaggagcgagccaagctgcacgatgtggagctgcaccaggtggcggagcgggtggaggccctggggcagtttgtcatgaagaccagaaggaccctcaaaggccacgggaacaaagtcctgtgcatggactggtgcaaagataagaggaggatcgtgagctcgtcacaggatgggaaggtgatcgtgtgggattccttcaccacaaacaaggagcacgcggtcaccatgccctgcacgtgggtgatggcatgtgcttatgccccatcgggatgtgccattgcttgtggtggtttggataataagtgttctgtgtaccccttgacgtttgacaaaaatgaaaacatggctgccaaaaagaagtctgttgctatgcacaccaactacctgtcggcctgcagcttcaccaactctgacatgcagatcctgacagcgagcggcgatggcacatgtgccctgtgggacgtggagagcgggcagctgctgcagagcttccacggacatggggctgacgtcctctgcttggacctggccccctcagaaactggaaacaccttcgtgtctgggggatgtgacaagaaagccatggtgtgggacatgcgctccggccagtgcgtgcaggcctttgaaacacatgaatctgacatcaacagtgtccggtactaccccagtggagatgcctttgcttcagggtcagatgacgctacgtgtcgcctctatgacctgcgggcagatagggaggttgccatctattccaaagaaagcatcatatttggagcatccagcgtggacttctccctcagtggtcgcctgctgtttgctggatacaatgattacactatcaacgtctgggatgttctcaaagggtcccgggtctccatcctgtttggacatgaaaaccgcgttagcactctacgagtttcccccgatgggactgctttctgctctggatcatgggatcataccctcagagtctgggcctaatcatcttctgacagtgcactcatgtatacctgagaatttgaaatcttcacatgtaaatagatattacttctagaggagcttagagtttattgcagtgtagcttaggggagcaacccatggctcacaggtcactaagcgtctccaatatgactattaaaactgtcacctctggaaatacactagtgtgagccttcagcactgcgagaataccttcaagtacagtatttttcttttggaacactttttaaaatgtatctgtttttaaggttattctaaattatagtagcctcaactcattctgtcaccagtagaattcagcagttaatatattccatattatttctttgaatcaattcattttcagagcactttaaagtctgatatttctcgatgtgcactgtgatgcctggaaccttcctctggaagtgctgattttatggactgaggactggtgactggtctgtgatagaagcaaattccaattccaaatgtaattagacaaaaatcatttttttagaatgtgtttttattgtaaaagtatctttttcagc

SEQ ID NO: 139249 - DNA, 2678 bp, Homo sapiens
  Payload ID: 7295
  Gene Symbol: GNB5
  Gene Name: guanine nucleotide binding protein (G protein), beta 5
  Uniprot ID: O14775
  ENST ID: ENST00000396335
  CDS Start-End: 9-860
gcgcgaagatggcaaccgaggggctgcacgagaacgagacgctggcgtcgctgaagagcgaggccgagagcctcaagggcaagctggaggaggagcgagccaagctgcacgatgtggagctgcaccaggtggcggagcgggtggaggccctggggcagtttgtcatgaagaccagaaggaccctcaaaggccacgggaacaaagtcctgtgcatggactggtgcaaagataagaggaggatcgtgagctcgtcacaggatgggaaggtgatcgtgtgggattccttcaccacaaacaagatcctgacagcgagcggcgatggcacatgtgccctgtgggacgtggagagcgggcagctgctgcagagcttccacggacatggggctgacgtcctctgcttggacctggccccctcagaaactggaaacaccttcgtgtctgggggatgtgacaagaaagccatggtgtgggacatgcgctccggccagtgcgtgcaggcctttgaaacacatgaatctgacatcaacagtgtccggtactaccccagtggagatgcctttgcttcagggtcagatgacgctacgtgtcgcctctatgacctgcgggcagatagggaggttgccatctattccaaagaaagcatcatatttggagcatccagcgtggacttctccctcagtggtcgcctgctgtttgctggatacaatgattacactatcaacgtctgggatgttctcaaagggtcccgggtctccatcctgtttggacatgaaaaccgcgttagcactctacgagtttcccccgatgggactgctttctgctctggatcatgggatcataccctcagagtctgggcctaatcatcttctgacagtgcactcatgtatacctgagaatttgaaatcttcacatgtaaatagatattacttctagaggagcttagagtttattgcagtgtagcttaggggagcaacccatggctcacaggtcactaagcgtctccaatatgactattaaaactgtcacctctggaaatacactagtgtgagccttcagcactgcgagaataccttcaagtacagtatttttcttttggaacactttttaaaatgtatctgtttttaaggttattctaaattatagtagcctcaactcattctgtcaccagtagaattcagcagttaatatattccatattatttctttgaatcaattcattttcagagcactttaaagtctgatatttctcgatgtgcactgtgatgcctggaaccttcctctggaagtgctgattttatggactgaggactggtgactggtctgtgatagaagcaaattccaattccaaatgtaattagacaaaaatcatttttttagaatgtgtttttattgtaaaagtatctttttcagcttcctgttctattgtcttttttcagatacaacatttttgtctatggtgaactgctgtaaatgacgcagagaaatgcctaaaaaggacaggtggtttgactcatggatgatgatgatgtcactgtgccacttggacagggcgttttctctgaattgaagggaaagccaatggtgtttgtaaacaaatgcttctgagagcaaagaaaagtcttctgtgtgggaacacaagatagtaaacttatttaaaaacctattagtagaattagtggaaacacttaggttaaagtgaatcttgtccatataaattatattcatggccgggcgcggtggctcacgcttgtaatcccagcactttgggaggccgaggcgggcggatcacgaggtcaggagttcgagaccacggtgaaaccctgtctctactaaaaaatacaaaaaattagccgggcgtggtggcgggcgcctgtagtcccagctactcggagaggctgaggcaggagaatggcgtgaacccgggaggtggagcttgcagtgagccgaggtcgagccactgcagcctgggtgacaaagcgagactccgtctcaaaaaaaaaaaaaaattatattcatatgtattgcattgcaattataattacatatgcagattgattgatagtcatgaataataacgtctgctcctcttacatagaaaaacgatattaaaagaagatcttctctttatttgagactcagaattccttctagaagaaggaagtgctttttgttataggatcccttcttttcctttttttgtttttttgtaagatgtagatgcttattctttgctttagaaaacttctcacttaaaaagatggcatgcacctaggggaataaaaggtcacctcagacaccaggtgtcattcctggtgaggcctgcctcgtcggtggcctggggtctgccggcaggttctggctgcacctgaaggctgcgtgcaccttgtcccctggacaggtctcctttcctggccctgctccagcccagcccttcttctagtggtagctctggctttgcaggcccagctccaggccctgctcctcagagagactcttccagagctggagctgggcacagccataagacaggactggaccagatgctcctgtaaacatccaggggtgtgccaggcccaccctcacaactgcttgttcaggtatcgtgatgggccactcggtccaaaatcagccaggccatcttttccatcatctcacttcaaataaacataataattata

SEQ ID NO: 139250 - DNA, 918 bp, Homo sapiens
  Payload ID: 7295
  Gene Symbol: GNB5
  Gene Name: guanine nucleotide binding protein (G protein), beta 5
  ENST ID: ENST00000560116
  CDS Start-End: 22-402
ccgctgcgtccccgcgcgaagatggcaaccgaggggctgcacgagaacgagacgctggcgtcgctgaagagcgaggccgagagcctcaagggcaagctggaggaggagcgagccaagctgcacgatgtggagctgcaccaggtggcggagcgggtggaggccctggggcagtttgtcatgaagaccagaaggaccctcaaaggccacgggaacaaagtcctgtgcatggactggtgcaaagataagaggaggatcgtgagctcgtcacaggatgggaaggtgatcgtgtgggattccttcaccacaaacaaggtgaggcattgttcccagccacgttatagaggcttcagaatcccagcctacttaaaggtgctctggtccagctgcccggccctgtcctgatttctctccatgtatccctgcaagcagttgcctctacggatggaaaccccaagaaggcctatccgtgtttgaacagctcagccagcccattgcagcatttattcccctctcgccccaagaggacaattagagccaccataggggctgccaataccaacatggaaatgggcaaagcatggaaaacttgcaaccacatgtgcaactgcatgtactatttgtcttctgagtgataagaggcaccaaaattctccattctctctcccctctctttgaccagactccatagccctgtgggaatgaacacgtggagggtggggaagatgaggctgcagtgggactgggcagagctaccctgtgatgcagtctgatccccttgcaagtctggcttgggcatgcacagctcaacttagatttaaattttagctcttaatgaaaataagaccaaaacctatgtgcaggtatgctggaacacctgcattgcattggcatttacaataaagagtattgtgtattaaa

SEQ ID NO: 139251 - DNA, 673 bp, Homo sapiens
  Payload ID: 7295
  Gene Symbol: GNB5
  Gene Name: guanine nucleotide binding protein (G protein), beta 5
  ENST ID: ENST00000558519
  CDS Start-End: 1-312
gccaaaaagaagtctgttgctatgcacaccaactacctgtcggcctgcagcttcaccaactctgacatgcagatcctgacagcgagcggcgatggcacatgtgccctgtgggacgtggagagcgggcagctgctgcagagcttccacggacatggggctgacgtcctctgcttggacctggccccctcagaaactggaaacaccttcgtgtctgggggatgtgacaagaaagccatggtgtgggacatgcgctccggccagtgcgtgcaggcctttgaaacacatgaatctgacatcaacagtgtccgatgaggaaactgaggctgggcaagaggaagtcatttgccaaaagtatcgcaggtactaccccagtggagatgcctttgcttcagggtcagatgacgctacgtgtcgcctctatgacctgcgggcagatagggaggttgccatctattccaaagaaagcatcatatttggagcatccagcgtggacttctccctcagtggtcgcctgctgtttgctggatacaatgattacactatcaacgtctgggatgttctcaaagggtcccgggtctccatcctgtttggacatgaaaaccgcgttagcactctacgagtttcccccgatgggactgctttctgctctggatcatgggatcataccctcaga

SEQ ID NO: 139252 - DNA, 586 bp, Homo sapiens
  Payload ID: 7295
  Gene Symbol: GNB5
  Gene Name: guanine nucleotide binding protein (G protein), beta 5
  ENST ID: ENST00000561313
  CDS Start-End: 95-397
gctcggggccggggacggctgctggagcggcgcccgccgcggctcagcgcattcccgctctccgcttccctctccgctgcgtccccgcgcgaagatggcaaccgaggggctgcacgagaacgagacgctggcgtcgctgaagagcgaggccgagagcctcaagggcaagctggaggaggagcgagccaagctgcacgatgtggagctgcaccaggtggcggagcgggtggaggccctggggcagtttgtcatgaagaccagaaggaccctcaaaggccacgggaacaaagtcctgtgcatggactggtgcaaagataagaggaggatcgtgagctcgtcacaggatgggaaggtgatcgtgtgggattccttcaccacaaacaagtggtttggataataagtgttctgtgtaccccttgacgtttgacaaaaatgaaaacatggctgccaaaaagaagtctgttgctatgcacaccaactacctgtcggcctgcagcttcaccaactctgacatgcagatcctgacagcgagcggcgatggcacatgtgccctgtgggacgtggagagcgggcagctgctgcagag

SEQ ID NO: 139253 - DNA, 3132 bp, Homo sapiens
  Payload ID: 7296
  Gene Symbol: GNB1
  Gene Name: guanine nucleotide binding protein (G protein), beta polypeptide 1
  Uniprot ID: P62873
  ENST ID: ENST00000378609
  CDS Start-End: 333-1355
aggcgtctgaggggcggacggaggcggcggcggcggcggcgggagcgggagcgggcggcgagtggggagcggggccgggagtggagcagccgccgcggcgggactggaccgagcctcgccggcgcgcacctgcccgcagcgcccgcggagcgcgcagcgcggcccgagcgcgacgacctgccgagcggcggccgaggcggcggtgtgggcgcgtcaggccgcgacgagggcgctgagacaaatttacatgtattggagaccagaccagaagcccttctgaattaagatctcacattcttgaaggtggcattgaagagcactaagatcggaagatgagtgagcttgaccagttacggcaggaggccgagcaacttaagaaccagattcgagacgccaggaaagcatgtgcagatgcaactctctctcagatcacaaacaacatcgacccagtgggaagaatccaaatgcgcacgaggaggacactgcgggggcacctggccaagatctacgccatgcactggggcacagactccaggcttctcgtcagtgcctcgcaggatggtaaacttatcatctgggacagctacaccaccaacaaggtccacgccatccctctgcgctcctcctgggtcatgacctgtgcatatgccccttctgggaactatgtggcctgcggtggcctggataacatttgctccatttacaatctgaaaactcgtgaggggaacgtgcgcgtgagtcgtgagctggcaggacacacaggttacctgtcctgctgccgattcctggatgacaatcagatcgtcaccagctctggagacaccacgtgtgccctgtgggacatcgagaccggccagcagacgaccacgtttaccggacacactggagatgtcatgagcctttctcttgctcctgacaccagactgttcgtctctggtgcttgtgatgcttcagccaaactctgggatgtgcgagaaggcatgtgccggcagaccttcactggccacgagtctgacatcaatgccatttgcttctttccaaatggcaatgcatttgccactggctcagacgacgccacctgcaggctgtttgaccttcgtgctgaccaggagctcatgacttactcccatgacaacatcatctgcgggatcacctctgtctccttctccaagagcgggcgcctcctccttgctgggtacgacgacttcaactgcaacgtctgggatgcactcaaagccgaccgggcaggtgtcttggctgggcatgacaaccgcgtcagctgcctgggcgtgactgacgatggcatggctgtggcgacagggtcctgggatagcttcctcaagatctggaactaacgccagtagcatgtggatgccatggagactggaagaccattccaacttggacgcgttaccatgagagcatatcctatccaaccgtactaacgtggacaccctacacctcccctcagaacttcaaaagggcaagatcttttttccttcacttattgctgaaaccaagagcacaattcccattgagagaaagatctctgtgctgtaaactaaaacaaattgtgcattccttccggggccatcgtctttgttttcttttttgtcttgaatgaattttaaaaggaaatatataataaaaatgttaaccagaaggtaaacttgagtgtaattgtcagacagacacacttttccaccagtgtatttgaattttagaccagtgaccctgttttgtggcattcatgcaaaacatgctgagggctttgttcatctggtcatcgtgtccaaatttcagtcatgtttgtagcaagattttggaagcattcatatttcctttttaaaatgtattcctttgtgttcaacagttaatcaaaaccagagagtctagggcagcctctctgatgttgtcaatgatgtaaattcagtccctggtttttaattttctgtctgatgtcacagatcattgttgcacacaaacgtggcatagaaaagaacatgttcagaagccatggggccaagcacatgcggggacggtctcaaatgcgtgatcagagaatccttcacctttgctgaaaagtgagctcagatccagcaccatgttcctcctgacccatcctgtctatcttctcagttgagtttttaatctcactttgggtttccttgtgaagttggagggaagtttataatagcctaacactaccccacccccaactaggaggaacctctgttttcaagagagatgcctgtcctgtgcttggatagtcagtcaattatttgtgtatgaaacaatgtacaaatcaatgttttgaaaataatgatctcagactttctaagttaaattttaaaaattttgattgtttgccatattgggtgggtttactcttagaatcgcatgctgtagaaatgctcaaaagtgcatatgggactcagtccttaggtgttctttttcttttaagaaataacctcttacagttgtaaccattgcggctctgtccacttctcgttgctgctctgtggcacatatcggaagcagtacagcgcgcggctctacacgcttgggtagcgggataagtcactgttttctttatttctttaaaaaaaaaaaagttctgttgcaaacgactgctgttggattctgagggtggggagggagagagagggagggagagggagtgaagagcctgccctcctatatggattcttcagggccctccacatctgaggtggctcattcccatcacacacagattgtcctggtgttcatttcaaggccagtgttcagcagcagcgtttggaaagcaggttctgtgggaccccccgccccgccccccgcactccttcatagcagcagtagtggcttctccatcctgttttctgcaacattctatacaaaactgtgctgtgaccttgcggtaggcctggatctggcaaagagaatacaaatgaaaccccttctttctctttccgtccaacaactctgtagagctctctgcacccttacccctttccaccttttgtatttaattttaaagtcagtgtactgcaaggaagctggatgcaagatagatactatattaaactgtactgttatttaagatgtaataaagcagtttgacatgaggga

SEQ ID NO: 139254 - DNA, 684 bp, Homo sapiens
  Payload ID: 7296
  Gene Symbol: GNB1
  Gene Name: guanine nucleotide binding protein (G protein), beta polypeptide 1
  ENST ID: ENST00000434686
  CDS Start-End: 188-684
gtcggcggccggagcccccgcgcgggccgcctatcgggtggagatggggtttcaccatgttgaccatgctggtctccaattcctgacctcagacaaatttacatgtattggagaccagaccagaagcccttctgaattaagatctcacattcttgaaggtggcattgaagagcactaagatcggaagatgagtgagcttgaccagttacggcaggaggccgagcaacttaagaaccagattcgagacgccaggaaagcatgtgcagatgcaactctctctcagatcacaaacaacatcgacccagtgggaagaatccaaatgcgcacgaggaggacactgcgggggcacctggccaagatctacgccatgcactggggcacagactccaggcttctcgtcagtgcctcgcaggatggtaaacttatcatctgggacagctacaccaccaacaaggtccacgccatccctctgcgctcctcctgggtcatgacctgtgcatatgccccttctgggaactatgtggcctgcggtggcctggataacatttgctccatttacaatctgaaaactcgtgaggggaacgtgcgcgtgagtcgtgagctggcaggacacacaggttacctgtcctgctgccgattcctggatgacaatcagatcgtcaccagctctggagacaccacgtg

SEQ ID NO: 139255 - DNA, 602 bp, Homo sapiens
  Payload ID: 7296
  Gene Symbol: GNB1
  Gene Name: guanine nucleotide binding protein (G protein), beta polypeptide 1
  ENST ID: ENST00000439272
  CDS Start-End: 113-602
gcgacgagggcgctgagacaaatttacatgtattggagaccagaccagaagcccttctgaattaagatctcacattcttgaaggtggcattgaagagcactaagatcggaagatgagtgagcttgaccagttacggcaggaggccgagcaacttaagaaccagattcgaatcacaaacaacatcgacccagtgggaagaatccaaatgcgcacgaggaggacactgcgggggcacctggccaagatctacgccatgcactggggcacagactccaggcttctcgtcagtgcctcgcaggatggtaaacttatcatctgggacagctacaccaccaacaaggtccacgccatccctctgcgctcctcctgggtcatgacctgtgcatatgccccttctgggaactatgtggcctgcggtggcctggataacatttgctccatttacaatctgaaaactcgtgaggggaacgtgcgcgtgagtcgtgagctggcaggacacacaggttacctgtcctgctgccgattcctggatgacaatcagatcgtcaccagctctggagacaccacgtgtgccctgtgggacatcgagaccggccagcaga

SEQ ID NO: 139256 - DNA, 423 bp, Homo sapiens
  Payload ID: 7296
  Gene Symbol: GNB1
  Gene Name: guanine nucleotide binding protein (G protein), beta polypeptide 1
  ENST ID: ENST00000437146
  CDS Start-End: 101-423
ctggaaggtctgggggactgagggaagcgaagagaaaagcaagagcaattaaatatctcacattcttgaaggtggcattgaagagcactaagatcggaagatgagtgagcttgaccagttacggcaggaggccgagcaacttaagaaccagattcgagacgccaggaaagcatgtgcagatgcaactctctctcagatcacaaacaacatcgacccagtgggaagaatccaaatgcgcacgaggaggacactgcgggggcacctggccaagatctacgccatgcactggggcacagactccaggcttctcgtcagtgcctcgcaggatggtaaacttatcatctgggacagctacaccaccaacaaggtccacgccatccctctgcgctcctcctgggtcatgacctgtgcatatgccccttc

SEQ ID NO: 139257 - DNA, 3145 bp, Homo sapiens
  Payload ID: 7296
  Gene Symbol: GNB1
  Gene Name: guanine nucleotide binding protein (G protein), beta polypeptide 1
  Uniprot ID: P62873
  ENST ID: ENST00000610897
  CDS Start-End: 345-1367
gagcgcgtggggttttccgaggctgcgggcaggggcccgccgcgcccatcccgatggctggaggcgtctgaggggcggacggaggcggcggcggcggcggcgggagcgggagcgggcggcgagtggggagcggggccgggagtggagcagccgccgcggcgggactggaccgagcctcgccggcgcgcacctgcccgcagcgcccgcggagcgcgcagcgcggcccgagcgcgacgacctgccgagcggcggccgaggcggcggtgtgggcgcgtcaggccgcgacgagggcgctgagatctcacattcttgaaggtggcattgaagagcactaagatcggaagatgagtgagcttgaccagttacggcaggaggccgagcaacttaagaaccagattcgagacgccaggaaagcatgtgcagatgcaactctctctcagatcacaaacaacatcgacccagtgggaagaatccaaatgcgcacgaggaggacactgcgggggcacctggccaagatctacgccatgcactggggcacagactccaggcttctcgtcagtgcctcgcaggatggtaaacttatcatctgggacagctacaccaccaacaaggtccacgccatccctctgcgctcctcctgggtcatgacctgtgcatatgccccttctgggaactatgtggcctgcggtggcctggataacatttgctccatttacaatctgaaaactcgtgaggggaacgtgcgcgtgagtcgtgagctggcaggacacacaggttacctgtcctgctgccgattcctggatgacaatcagatcgtcaccagctctggagacaccacgtgtgccctgtgggacatcgagaccggccagcagacgaccacgtttaccggacacactggagatgtcatgagcctttctcttgctcctgacaccagactgttcgtctctggtgcttgtgatgcttcagccaaactctgggatgtgcgagaaggcatgtgccggcagaccttcactggccacgagtctgacatcaatgccatttgcttctttccaaatggcaatgcatttgccactggctcagacgacgccacctgcaggctgtttgaccttcgtgctgaccaggagctcatgacttactcccatgacaacatcatctgcgggatcacctctgtctccttctccaagagcgggcgcctcctccttgctgggtacgacgacttcaactgcaacgtctgggatgcactcaaagccgaccgggcaggtgtcttggctgggcatgacaaccgcgtcagctgcctgggcgtgactgacgatggcatggctgtggcgacagggtcctgggatagcttcctcaagatctggaactaacgccagtagcatgtggatgccatggagactggaagaccattccaacttggacgcgttaccatgagagcatatcctatccaaccgtactaacgtggacaccctacacctcccctcagaacttcaaaagggcaagatcttttttccttcacttattgctgaaaccaagagcacaattcccattgagagaaagatctctgtgctgtaaactaaaacaaattgtgcattccttccggggccatcgtctttgttttcttttttgtcttgaatgaattttaaaaggaaatatataataaaaatgttaaccagaaggtaaacttgagtgtaattgtcagacagacacacttttccaccagtgtatttgaattttagaccagtgaccctgttttgtggcattcatgcaaaacatgctgagggctttgttcatctggtcatcgtgtccaaatttcagtcatgtttgtagcaagattttggaagcattcatatttcctttttaaaatgtattcctttgtgttcaacagttaatcaaaaccagagagtctagggcagcctctctgatgttgtcaatgatgtaaattcagtccctggtttttaattttctgtctgatgtcacagatcattgttgcacacaaacgtggcatagaaaagaacatgttcagaagccatggggccaagcacatgcggggacggtctcaaatgcgtgatcagagaatccttcacctttgctgaaaagtgagctcagatccagcaccatgttcctcctgacccatcctgtctatcttctcagttgagtttttaatctcactttgggtttccttgtgaagttggagggaagtttataatagcctaacactaccccacccccaactaggaggaacctctgttttcaagagagatgcctgtcctgtgcttggatagtcagtcaattatttgtgtatgaaacaatgtacaaatcaatgttttgaaaataatgatctcagactttctaagttaaattttaaaaattttgattgtttgccatattgggtgggtttactcttagaatcgcatgctgtagaaatgctcaaaagtgcatatgggactcagtccttaggtgttctttttcttttaagaaataacctcttacagttgtaaccattgcggctctgtccacttctcgttgctgctctgtggcacatatcggaagcagtacagcgcgcggctctacacgcttgggtagcgggataagtcactgttttctttatttctttaaaaaaaaaaaagttctgttgcaaacgactgctgttggattctgagggtggggagggagagagagggagggagagggagtgaagagcctgccctcctatatggattcttcagggccctccacatctgaggtggctcattcccatcacacacagattgtcctggtgttcatttcaaggccagtgttcagcagcagcgtttggaaagcaggttctgtgggaccccccgccccgccccccgcactccttcatagcagcagtagtggcttctccatcctgttttctgcaacattctatacaaaactgtgctgtgaccttgcggtaggcctggatctggcaaagagaatacaaatgaaaccccttctttctctttccgtccaacaactctgtagagctctctgcacccttacccctttccaccttttgtatttaattttaaagtcagtgtactgcaaggaagctggatgcaagatagatactatattaaactgtactgttatttaagatgtaataaagcagtttgacatgagggac

SEQ ID NO: 139258 - DNA, 3048 bp, Homo sapiens
  Payload ID: 7296
  Gene Symbol: GNB1
  Gene Name: guanine nucleotide binding protein (G protein), beta polypeptide 1
  ENST ID: ENST00000615252
  CDS Start-End: 548-1270
gagcgcgtggggttttccgaggctgcgggcaggggcccgccgcgcccatcccgatggctggaggcgtctgaggggcggacggaggcggcggcggcggcggcgggagcgggagcgggcggcgagtggggagcggggccgggagtggagcagccgccgcggcgggactggaccgagcctcgccggcgcgcacctgcccgcagcgcccgcggagcgcgcagcgcggcccgagcgcgacgacctgccgagcggcggccgaggcggcggtgtgggcgcgtcaggccgcgacgagggcgctgagacaaatttacatgtattggagaccagaccagaagcccttctgaattaagatctcacattcttgaaggtggcattgaagagcactaagatcggaagatgagtgagcttgaccagttacggcaggaggccgagcaacttaagaaccagattcgagcttctcgtcagtgcctcgcaggatggtaaacttatcatctgggacagctacaccaccaacaaggtccacgccatccctctgcgctcctcctgggtcatgacctgtgcatatgccccttctgggaactatgtggcctgcggtggcctggataacatttgctccatttacaatctgaaaactcgtgaggggaacgtgcgcgtgagtcgtgagctggcaggacacacaggttacctgtcctgctgccgattcctggatgacaatcagatcgtcaccagctctggagacaccacgtgtgccctgtgggacatcgagaccggccagcagacgaccacgtttaccggacacactggagatgtcatgagcctttctcttgctcctgacaccagactgttcgtctctggtgcttgtgatgcttcagccaaactctgggatgtgcgagaaggcatgtgccggcagaccttcactggccacgagtctgacatcaatgccatttgcttctttccaaatggcaatgcatttgccactggctcagacgacgccacctgcaggctgtttgaccttcgtgctgaccaggagctcatgacttactcccatgacaacatcatctgcgggatcacctctgtctccttctccaagagcgggcgcctcctccttgctgggtacgacgacttcaactgcaacgtctgggatgcactcaaagccgaccgggcaggtgtcttggctgggcatgacaaccgcgtcagctgcctgggcgtgactgacgatggcatggctgtggcgacagggtcctgggatagcttcctcaagatctggaactaacgccagtagcatgtggatgccatggagactggaagaccattccaacttggacgcgttaccatgagagcatatcctatccaaccgtactaacgtggacaccctacacctcccctcagaacttcaaaagggcaagatcttttttccttcacttattgctgaaaccaagagcacaattcccattgagagaaagatctctgtgctgtaaactaaaacaaattgtgcattccttccggggccatcgtctttgttttcttttttgtcttgaatgaattttaaaaggaaatatataataaaaatgttaaccagaaggtaaacttgagtgtaattgtcagacagacacacttttccaccagtgtatttgaattttagaccagtgaccctgttttgtggcattcatgcaaaacatgctgagggctttgttcatctggtcatcgtgtccaaatttcagtcatgtttgtagcaagattttggaagcattcatatttcctttttaaaatgtattcctttgtgttcaacagttaatcaaaaccagagagtctagggcagcctctctgatgttgtcaatgatgtaaattcagtccctggtttttaattttctgtctgatgtcacagatcattgttgcacacaaacgtggcatagaaaagaacatgttcagaagccatggggccaagcacatgcggggacggtctcaaatgcgtgatcagagaatccttcacctttgctgaaaagtgagctcagatccagcaccatgttcctcctgacccatcctgtctatcttctcagttgagtttttaatctcactttgggtttccttgtgaagttggagggaagtttataatagcctaacactaccccacccccaactaggaggaacctctgttttcaagagagatgcctgtcctgtgcttggatagtcagtcaattatttgtgtatgaaacaatgtacaaatcaatgttttgaaaataatgatctcagactttctaagttaaattttaaaaattttgattgtttgccatattgggtgggtttactcttagaatcgcatgctgtagaaatgctcaaaagtgcatatgggactcagtccttaggtgttctttttcttttaagaaataacctcttacagttgtaaccattgcggctctgtccacttctcgttgctgctctgtggcacatatcggaagcagtacagcgcgcggctctacacgcttgggtagcgggataagtcactgttttctttatttctttaaaaaaaaaaaagttctgttgcaaacgactgctgttggattctgagggtggggagggagagagagggagggagagggagtgaagagcctgccctcctatatggattcttcagggccctccacatctgaggtggctcattcccatcacacacagattgtcctggtgttcatttcaaggccagtgttcagcagcagcgtttggaaagcaggttctgtgggaccccccgccccgccccccgcactccttcatagcagcagtagtggcttctccatcctgttttctgcaacattctatacaaaactgtgctgtgaccttgcggtaggcctggatctggcaaagagaatacaaatgaaaccccttctttctctttccgtccaacaactctgtagagctctctgcacccttacccctttccaccttttgtatttaattttaaagtcagtgtactgcaaggaagctggatgcaagatagatactatattaaactgtactgttatttaagatgtaataaagcagtttgacatgagggac

SEQ ID NO: 139259 - DNA, 6706 bp, Homo sapiens
  Payload ID: 7297
  Gene Symbol: GNB1L
  Gene Name: guanine nucleotide binding protein (G protein), beta polypeptide 1-like
  Uniprot ID: Q9BYB4
  ENST ID: ENST00000329517
  CDS Start-End: 238-1221
catgcgccgggtcgtacacggcggccgcgcgcacgctgggggcgtggctgcgcgatgtaatcggtctctggacgctgcgcggcgctcctaggagcaggcgttcccgactccggcaagagggtggcgcctggactctcgccctcagagggaggcccgtcccacggtctgtggctacggatcccaggaccctcttcgcgggcgattcgcgtagcctcaggtaactgcatcctgcccagcatgacggccccctgcccgccgccacctccagacccccagtttgtcctccgaggcacccagtcaccggtgcatgcgctgcacttctgcgaaggagcccaggctcaggggcgcccgctcctcttctcagggtctcagagtggcctggtacacatctggagcctgcagacgcggagagcggttaccaccctggatggccacggcggccagtgtgtgacctggctgcagacgctgccccaggggcgccagctcctcagtcagggccgggacctgaagctgtgcctgtgggacctcgcggagggcaggagcgctgtcgtggactccgtgtgcttggagagtgtgggcttctgccggagcagcatcctggccgggggccagccacgctggacgcttgccgtgccagggaggggcagcgacgaggttcagattctggagatgccctccaagacgtcagtgtgcgccctgaagccgaaggcagatgccaagctgggcatgcccatgtgcctgcggctgtggcaggccgactgcagctcccgcccactccttctggccggctatgaggatggatcggtggtcctgtgggacgtctctgagcagaaggtgtgcagccgcatcgcctgccatgaggagcccgtcatggaccttgactttgactcccagaaggccaggggcatctcaggctccgcggggaaggcgctggctgtctggagcctggactggcagcaggccctgcaggtgcgtgggactcatgaactcaccaatcccgggatcgccgaggtcacgatccggccagatcgcaagatcctggccaccgcaggctgggaccaccgcatccgcgtgttccactggcggacgatgcagccactggccgtgctggccttccacagcgccgctgtccagtgcgtggccttcaccgccgatggcttgctggccgcgggctccaaggatcagcggatcagcctctggtcactctacccacgcgcatgactcacccactcccttcccgggagacgaggagggcgggcagggaggtgggcatcaggccccagccttggcctgaaacctcaagggcctctgaggaccagcaagtcatggcccaaggaccatggagtccccgctgtcttcatgaggttggtatttccttttgtggagtgcctcatcacaggacggtgactctgggggccagccagagccctggccgtccgaggcctgcaggagacgttggcttgggcctgctgtgttgccagctgagggtattttataataaatttccattgccaagttgcaggcttgaggtgggagctccctgaggaggccctggtcccccacttagcatcagtgccctcagacccccaccaggcaggatgctcagccccaccctcacacctgctgttgaatgggccaccccgagtgtgggtttcctgggccaggcctcaggagatgataggccccaaccatagctgcgtcgatgtccacatgacccctcaccccgaggaggccaggagctcccaacacacaggttgaggccaggatcaggatcaggaagtaactgaactccctaaagagtgaagcagagaaaggtgcctgtgagggacggcaaggggggcttgcagcgcacagggccaggccagatgtgggatccgggagggcacgcctgcccgcagagggtgcagtggggaaggcgcacagggtgcacctccaggtgagtgctgggcagaaggcacgagagcagcaagggagtgtgacaagcaccgcctcacagtggccaaggccacagtcacagctgcggctgcacacagggtggcccccagggcacaacacagcaagagcaggacttagcagccagagcctcacactgcatgcagccgggcccagcctggccggtcgtctcctcctaaaagcgggtgttgattgggaaagaaccatgaccctgaatattggagtggggcccatgggcagatccagagaagctgggaccacacacgcctgtgtctgcccggattgccggaagagcccctctagctgaaggcccggggtggcctcccttgaggcagttgccctgcaaggccctgccgatgctccttgggacccccacctgggcttctagtcctagaactagactcgagtccagcagacccccaggatgagatacagagggtgaccctgagagtggcaccagcctcctgcaggaccacatggcatttccaggtttccaggcagaaatctgaacatgtgtgggacggatcggaagggtgtgggatccaggtggccggagcaggggtggatcaggggagttcccggaacagacctgccaaacggagggctggactgggcgctgcagcttggggccaggaaggctccagtgccgggctgggggtgggggctggattacagcctgagggtggctgcactgagtgaagtggacatggccagccgccgtggggtacagccgaggagggcttccaaggcctggggatgggggtgttggatttgtcagtgagacctgtgcacccactgcagggggtcccaaggccgtgcctccccaaccccactgtgaggaacatggttgctggggggcccggagtccttgaggagtcctgtgaccacacttctctgttggtcagaggtaccatggggaccgttccatcaaacgggaatgtcagtgctggccgggaaagcggcccctggcccaagcttggagaccacctggctcgggtactggcctggctccgttggacaagggtggccaccaggtgcccaggacctttggagaggggggccctgctgcttttcctcgagtgtcctatagccgccaggatgcgtagggcactccgggaggtattttcatatcactgaggtgtcagggaggggaagggtcctgggtttaggctgcagtgactgcaggtgctgagggagctgtgccctgggtgctcatcacaggctgtcacagtgagggaaggtgtcaggttctgacatccccatgacagcggcagggtaggtggagtgggaattggctttgcagtttccctgcatgcccttgacagccttgccaaaggcacatctgccccgcctcagctcccaccctgagggttctgggcctctaccccttcccctgtttatgtccctgtcatctttggcatcatcactgtagttacaaaactccctacgtcccacagccacgaggtgggtatcccacatgagggcccaggtgtgcatgccagcatgaggttggcgagtggcactgcctgctgatgtcttacatagaggccatgaagagctgtgggcagggtgtacagaccctgagttggcccctggccctcgtgctttcagtcaaaggcacaagcagggtggatggcaggcggctgccccctagcctggccttgagctccctgccccaggccatgtggcgttgagcagtgtccaggcacatcttgttctgaatctcagtgtgcagggatggagtcgggacagcgtgagtcctgcatgcctaacacagccctcacccctccagtgcacaacggggccacgtgcccgcatctgggtggctaggcagatagggccccccttgccaggcagatccagcttctgaggccttatagacgtcctgtggagggcaggcccaggactttcattcacctggctgagctgcctgggagagcagcagaaccggtgctggggtccaagccggccaagagcagtgcagccctcctggtcctgttcctctcttgagctgctccgtggtgtccacagcagagccatgtggctctggacaggtcggcctttgtgtcaacagaacctgggtcgtgatgaatcaccatgcgtctgaccagccttgaaacccccacaacagaagaagaaacggtctcagctccagacatccagcttggaaaagatgcacctgaacattggcattctcttcctagcaaacagccacttcctgtaggctggcaggaacgccaacagagccagcagtgaaggcattaagtggggaggaggggtggcccggaggcagcacgcgaaggtcagcatgcagctcctgggatgaacctgagaggcgactcctggcagcatggctggtcgctgccatcacgcccctggccaacccaccaactgggagaggcagcccttccacatcttcctccataatgctcttgggtagcagtgaggcctctcaagccagagagaacttggtgtttggaaacaacggcggacatttcttgccattttcagtgccaactcaggtaggtgtgttctaccatcctgtgtttttggggtgtttttttttttgagtcagagtctcactctgtcccccaggctggagtgcaatggagcagtctcggctcactgcaacctctgattcccaggttcaagcgattctcctgcctcagcctcccgagaagctcaggaccacccacataggtgcaggccatcatgcccagctaattttttatttttttttatagagaaggagtctcgctatgttgcccaggctggtttcgaactcctgggctcaagcgatcgatcctcccgcctctagcctcccaaagcactagaattataggcctgagccactgcgcccggcccaccatcctgttcttattggaagaatttccatgtgtcgaggcacgggcacaacgtagctggtcctctgctcagggccccacaaggctgcgtcagggtggcagcgcggctgggggctttttctgttcaaatccagattctcgtggctgtgagccccagccctgggcactgtccgcctggtggtgtcttcacagccagcaggggtggccttggggtgttctgtggagtaactttcacggcccagagtgggatcctgagtggctggagccgtatgctccagcatccccagccgctgcctccggtgcaggtggagtgggcccctctgattaccaggagctgtcagaggggcagcaggtcccactccactggccggtgggcagctgtgtgcagggacgcgggtcctggcacgtctgcctggtgaggccctgcctccagtgccaaggggcctcccctctcgacggtgggcgccaccatgtgctgacctctgtgcagccccactttacaaggtaggttcggccagcaccccatccgcgggcgggcagcactcacccagcgttgcgccgccaacagggtccctcttagacaagcagctgtgcctagagccttttccttcctccctgcgtgttacctgcaggccaacagacggccctgggtctgggaccaggagaacctgcctccgcctctggcagtgggtgtccctgcaggcagattgggcttggcacgtagacaccgaggggtcagccgatgccgggagatgatcccgggaagggctccggagcacagcccaggacccgccgccgctgctgggcgctccatgttgacgtgctgtgcgtgtctccactccccaggcaatgatgttcaatcaggtgtttcccacctgtgtctctgccaagaagccacagaacaccctctgcacaaaaggagtgtttgcacaaagaaaaacaaccctccgggggttctttagaaatgcttatactcaattagctagaacttcatgtgaaatcccagcgtggaagacaacaagccggcaccggtgaaaactttgctgtgcacctgccctctaccaagctgccagccccaccagccctgtggtcctaggtgggcacagctgctgcacggtcccccaggcctgcctctcctcggggtctcaaccttcataccagatttgccagcatccccattcccgccttgtgggtggagagtccttgagaccctctgtcactctgtcagcttccccaggtcagcgagctgtggcttggctcccacgcatcagcttttatgggaggcccattaggagctgggcaggagggacagaggggaggccaggcagccactgctgagtgggacgggtagcccagcccatgaggctggccagccctacaggggaggtcccacagcactggccgggaagtccacataggaaagcatcagttgagggatgaagccacggacgatggggacaacggccacagggtgtgctaagctgaggaaattagtaggaggtgctcataagctgttttgttttttggtttgtttgtttgttttttcttttaagagaccagggacagtgggggtctcactctgtcacccaggctggagtgcagtggcatgatcatagcttactgcagcctccaactaataggctcaagtgatcctcctgcctcagcctcccgagtaactcatggcctttaagtgaactgcttccaccatccagctgtgcaggtggcctgggaacagcagcacatctgtcccctgccacctcttgcatgcacacttgacctcctgacttgggctctgaaacctgtaaaatgtggggtgtagagaaatcgagtcatttggcctcatcctggtgccattatctcttgctacattaataaaccacctcaaacag

SEQ ID NO: 139260 - DNA, 1076 bp, Homo sapiens
  Payload ID: 7297
  Gene Symbol: GNB1L
  Gene Name: guanine nucleotide binding protein (G protein), beta polypeptide 1-like
  Uniprot ID: Q9BYB4
  ENST ID: ENST00000405009
  CDS Start-End: 238-876
catgcgccgggtcgtacacggcggccgcgcgcacgctgggggcgtggctgcgcgatgtaatcggtctctggacgctgcgcggcgctcctaggagcaggcgttcccgactccggcaagagggtggcgcctggactctcgccctcagagggaggcccgtcccacggtctgtggctacggatcccaggaccctcttcgcgggcgattcgcgtagcctcaggtaactgcatcctgcccagcatgacggccccctgcccgccgccacctccagacccccagtttgtcctccgaggcacccagtcaccggtgcatgcgctgcacttctgcgaaggagcccaggctcaggggcgcccgctcctcttctcagggtctcagagtggcctggtacacatctggagcctgcagacgcggagagcggttaccaccctggatggccacggcggccagtgtgtgacctggctgcagacgctgccccaggggcgccagctcctcagtcagggccgggacctgaagctgtgcctgtgggacctcgcggagggcaggagcgctgtcgtggactccgtgtgcttggagagtgtgggcttctgccggagcagcatcctggccgggggccagccacgctggacgcttgccgtgccagggaggggcagcgacgaggttcagattctggagatgccctccaagacgtcagtgtgcgccctgaagccgaaggcagatgccaagctgggcatgcccatgtgcctgcggctgtggcaggccgactgcagctcccgcccactccttctggccggctatgaggatggatcggtggtcctgtgggacgtctctgagcagaaggtgtgcagccgcatcgcctgccatgaggagcccggcctctgaggaccagcaagtcatggcccaaggaccatggagtccccgctgtcttcatgaggttggtatttccttttgtggagtgcctcatcacaggacggtgactctgggggccagccagagccctggccgtccgaggcctgcaggagacgttggcttgggcctgctgtgttgccagctgagggtattttataataaatttccattgc

SEQ ID NO: 139261 - DNA, 1699 bp, Homo sapiens
  Payload ID: 7297
  Gene Symbol: GNB1L
  Gene Name: guanine nucleotide binding protein (G protein), beta polypeptide 1-like
  Uniprot ID: Q9BYB4
  ENST ID: ENST00000403325
  CDS Start-End: 422-1405
ggcgttcccgactccggcaagagggtcagtgtggaggcgggagcccgggcggccggcttgaactccgtgcacgcgggcctggagctgcgcccctgcgtcttttcccgacttctgatccgcagaggggcactcggagccccagcctgggtcgcagtgccttcggtctgcgggcctcagtttctcggtccgcgccgggggtttgtgggggcacctggagacatttgggccgttctcgcagtctcgggaagccgcgcccgctccttgcctggcctcacggcggccgatctcgttctccactttctaggtggcgcctggactctcgccctcagagggaggcccgtcccacggtctgtggctacggatcccaggaccctcttcgcgggcgattcgcgtagcctcaggtaactgcatcctgcccagcatgacggccccctgcccgccgccacctccagacccccagtttgtcctccgaggcacccagtcaccggtgcatgcgctgcacttctgcgaaggagcccaggctcaggggcgcccgctcctcttctcagggtctcagagtggcctggtacacatctggagcctgcagacgcggagagcggttaccaccctggatggccacggcggccagtgtgtgacctggctgcagacgctgccccaggggcgccagctcctcagtcagggccgggacctgaagctgtgcctgtgggacctcgcggagggcaggagcgctgtcgtggactccgtgtgcttggagagtgtgggcttctgccggagcagcatcctggccgggggccagccacgctggacgcttgccgtgccagggaggggcagcgacgaggttcagattctggagatgccctccaagacgtcagtgtgcgccctgaagccgaaggcagatgccaagctgggcatgcccatgtgcctgcggctgtggcaggccgactgcagctcccgcccactccttctggccggctatgaggatggatcggtggtcctgtgggacgtctctgagcagaaggtgtgcagccgcatcgcctgccatgaggagcccgtcatggaccttgactttgactcccagaaggccaggggcatctcaggctccgcggggaaggcgctggctgtctggagcctggactggcagcaggccctgcaggtgcgtgggactcatgaactcaccaatcccgggatcgccgaggtcacgatccggccagatcgcaagatcctggccaccgcaggctgggaccaccgcatccgcgtgttccactggcggacgatgcagccactggccgtgctggccttccacagcgccgctgtccagtgcgtggccttcaccgccgatggcttgctggccgcgggctccaaggatcagcggatcagcctctggtcactctacccacgcgcatgactcacccactcccttcccgggagacgaggagggcgggcagggaggtgggcatcaggccccagccttggcctgaaacctcaagggcctctgaggaccagcaagtcatggcccaaggaccatggagtccccgctgtcttcatgaggttggtatttccttttgtggagtgcctcatcacaggacggtgactctgggggccagccagagccctggccgtccgaggcctgcaggagacgttggcttgggcctgctgtgttgccagctgagggtattttataataaatttccattgccaa

SEQ ID NO: 139262 - DNA, 702 bp, Homo sapiens
  Payload ID: 7297
  Gene Symbol: GNB1L
  Gene Name: guanine nucleotide binding protein (G protein), beta polypeptide 1-like
  ENST ID: ENST00000453108
  CDS Start-End: 422-702
ggcgttcccgactccggcaagagggtcagtgtggaggcgggagcccgggcggccggcttgaactccgtgcacgcgggcctggagctgcgcccctgcgtcttttcccgacttctgatccgcagaggggcactcggagccccagcctgggtcgcagtgccttcggtctgcgggcctcagtttctcggtccgcgccgggggtttgtgggggcacctggagacatttgggccgttctcgcagtctcgggaagccgcgcccgctccttgcctggcctcacggcggccgatctcgttctccactttctaggtggcgcctggactctcgccctcagagggaggcccgtcccacggtctgtggctacggatcccaggaccctcttcgcgggcgattcgcgtagcctcaggtaactgcatcctgcccagcatgacggccccctgcccgccgccacctccagacccccagtttgtcctccgaggcacccagtcaccggtgcatgcgctgcacttctgcgaaggagcccaggctcaggggcgcccgctcctcttctcaggtcagggccgggacctgaagctgtgcctgtgggacctcgcggagggcaggagcgctgtcgtggactccgtgtgcttggagagtgtgggcttctgccggagcagcatcctggccgggggccagccacgctggacgcttgccgtgccagggagggg

SEQ ID NO: 139263 - DNA, 1878 bp, Homo sapiens
  Payload ID: 7298
  Gene Symbol: GNB2
  Gene Name: guanine nucleotide binding protein (G protein), beta polypeptide 2
  Uniprot ID: P62879
  ENST ID: ENST00000303210
  CDS Start-End: 483-1505
tccagtcccagaggggggatgtcttactcctttccgtgaagcaaaccctttgagtacggtttgcgtccacaaagcgtagggtgagaaccttgggagcgactgggcccgtctttgctccctcggtggggttttgtctcctggcttcccccaagtgcgaggcagttggtctcgcccagccgggtcctgggcgcggcggcggcagccgcgtcactggcgggcgggatccctccgctctggggaggcagcgctggcggcggggctggggccactgaggaaatccatccgcgccgccgccgccgccgccgccgccgccgccgccgcctccgccgcggaggaagacagcgccgcccgcgcaccgccagcgacctccgccgcagagtcccaccgccacaggcctcgggccagcggccaggagctgcctcccccagcccccgtcccgcggcccccagccgcccccaaccctgccccacgggcccggcgccatgagtgagctggagcaactgagacaggaggccgagcagctccggaaccagatccgggatgcccgaaaagcatgtggggactcaacactgacccagatcacagctgggctggacccagtggggagaatccagatgaggacccggaggaccctccgtgggcacctggcaaagatctatgccatgcactgggggaccgactcaaggctgctggtcagcgcctcccaggatgggaagctcatcatctgggacagctacaccaccaacaaggtccacgccatcccgctgcgctcctcctgggtaatgacctgtgcctacgcgccctcagggaactttgtggcctgtggggggttggacaacatctgctccatctacagcctcaagacccgcgagggcaacgtcagggtcagccgggagctgcctggccacactgggtacctgtcgtgttgccgcttcctggatgacaaccaaatcatcaccagctctggggataccacctgtgccctgtgggacattgagacaggccagcagacagtgggttttgctggacacagtggggatgtgatgtccctgtccctggcccccgatggccgcacgtttgtgtcaggcgcctgtgatgcctctatcaagctgtgggacgtgcgggattccatgtgccgacagaccttcatcggccatgaatccgacatcaatgcagtggctttcttccccaacggctacgccttcaccaccggctctgacgacgccacgtgccgcctcttcgacctgcgggccgatcaggagctcctcatgtactcccatgacaacatcatctgtggcatcacctctgttgccttctcgcgcagcggacggctgctgctcgctggctacgacgacttcaactgcaacatctgggatgccatgaagggcgaccgtgcaggagtcctcgctggccacgacaaccgcgtgagctgcctcggggtcaccgacgatggcatggctgtggccacgggctcctgggactccttcctcaagatctggaactaatggccccacccccactgggcccaggccaggaggggccctgcccatgcccacactacaggccagggctgcggggctggcgcaatcccagcccccttccccgggccacggggccttgggtccctgccctcccacccaggtttggttcctcccggggcccccactgtggagataagaaggggatggaatgggggaagaggaggagcaggaggccctcatccttctgctgccctggggttggggcctcacccctctggagggccggaggcaggaggtggaaaccccaggggctggcttttttaaaactggttttattttaatttttattatattttcagtttttccataaaggagccaattccaactctgtacctgg

SEQ ID NO: 139264 - DNA, 1524 bp, Homo sapiens
  Payload ID: 7298
  Gene Symbol: GNB2
  Gene Name: guanine nucleotide binding protein (G protein), beta polypeptide 2
  Uniprot ID: P62879
  ENST ID: ENST00000393924
  CDS Start-End: 129-1151
cggcggcctcgggcctgacgtcagccctgcatcccccaggcctcgggccagcggccaggagctgcctcccccagcccccgtcccgcggcccccagccgcccccaaccctgccccacgggcccggcgccatgagtgagctggagcaactgagacaggaggccgagcagctccggaaccagatccgggatgcccgaaaagcatgtggggactcaacactgacccagatcacagctgggctggacccagtggggagaatccagatgaggacccggaggaccctccgtgggcacctggcaaagatctatgccatgcactgggggaccgactcaaggctgctggtcagcgcctcccaggatgggaagctcatcatctgggacagctacaccaccaacaaggtccacgccatcccgctgcgctcctcctgggtaatgacctgtgcctacgcgccctcagggaactttgtggcctgtggggggttggacaacatctgctccatctacagcctcaagacccgcgagggcaacgtcagggtcagccgggagctgcctggccacactgggtacctgtcgtgttgccgcttcctggatgacaaccaaatcatcaccagctctggggataccacctgtgccctgtgggacattgagacaggccagcagacagtgggttttgctggacacagtggggatgtgatgtccctgtccctggcccccgatggccgcacgtttgtgtcaggcgcctgtgatgcctctatcaagctgtgggacgtgcgggattccatgtgccgacagaccttcatcggccatgaatccgacatcaatgcagtggctttcttccccaacggctacgccttcaccaccggctctgacgacgccacgtgccgcctcttcgacctgcgggccgatcaggagctcctcatgtactcccatgacaacatcatctgtggcatcacctctgttgccttctcgcgcagcggacggctgctgctcgctggctacgacgacttcaactgcaacatctgggatgccatgaagggcgaccgtgcaggagtcctcgctggccacgacaaccgcgtgagctgcctcggggtcaccgacgatggcatggctgtggccacgggctcctgggactccttcctcaagatctggaactaatggccccacccccactgggcccaggccaggaggggccctgcccatgcccacactacaggccagggctgcggggctggcgcaatcccagcccccttccccgggccacggggccttgggtccctgccctcccacccaggtttggttcctcccggggcccccactgtggagataagaaggggatggaatgggggaagaggaggagcaggaggccctcatccttctgctgccctggggttggggcctcacccctctggagggccggaggcaggaggtggaaaccccaggggctggcttttttaaaactggttttattttaatttttattatattttcagtttttccataaaggagccaattccaactctgtacctgg

SEQ ID NO: 139265 - DNA, 1641 bp, Homo sapiens
  Payload ID: 7298
  Gene Symbol: GNB2
  Gene Name: guanine nucleotide binding protein (G protein), beta polypeptide 2
  Uniprot ID: P62879
  ENST ID: ENST00000393926
  CDS Start-End: 246-1268
ctcgagagcggctcccacgggctttctgcgggcgcggcggggcgggcggtccctgcgctggagggagcagcggctcggggctgccttccccgccgctgtcacccccacccgcggcggacggctaatggggcgcagccggaccggggattatccggggcctcgggccagcggccaggagctgcctcccccagcccccgtcccgcggcccccagccgcccccaaccctgccccacgggcccggcgccatgagtgagctggagcaactgagacaggaggccgagcagctccggaaccagatccgggatgcccgaaaagcatgtggggactcaacactgacccagatcacagctgggctggacccagtggggagaatccagatgaggacccggaggaccctccgtgggcacctggcaaagatctatgccatgcactgggggaccgactcaaggctgctggtcagcgcctcccaggatgggaagctcatcatctgggacagctacaccaccaacaaggtccacgccatcccgctgcgctcctcctgggtaatgacctgtgcctacgcgccctcagggaactttgtggcctgtggggggttggacaacatctgctccatctacagcctcaagacccgcgagggcaacgtcagggtcagccgggagctgcctggccacactgggtacctgtcgtgttgccgcttcctggatgacaaccaaatcatcaccagctctggggataccacctgtgccctgtgggacattgagacaggccagcagacagtgggttttgctggacacagtggggatgtgatgtccctgtccctggcccccgatggccgcacgtttgtgtcaggcgcctgtgatgcctctatcaagctgtgggacgtgcgggattccatgtgccgacagaccttcatcggccatgaatccgacatcaatgcagtggctttcttccccaacggctacgccttcaccaccggctctgacgacgccacgtgccgcctcttcgacctgcgggccgatcaggagctcctcatgtactcccatgacaacatcatctgtggcatcacctctgttgccttctcgcgcagcggacggctgctgctcgctggctacgacgacttcaactgcaacatctgggatgccatgaagggcgaccgtgcaggagtcctcgctggccacgacaaccgcgtgagctgcctcggggtcaccgacgatggcatggctgtggccacgggctcctgggactccttcctcaagatctggaactaatggccccacccccactgggcccaggccaggaggggccctgcccatgcccacactacaggccagggctgcggggctggcgcaatcccagcccccttccccgggccacggggccttgggtccctgccctcccacccaggtttggttcctcccggggcccccactgtggagataagaaggggatggaatgggggaagaggaggagcaggaggccctcatccttctgctgccctggggttggggcctcacccctctggagggccggaggcaggaggtggaaaccccaggggctggcttttttaaaactggttttattttaatttttattatattttcagtttttccataaaggagccaattccaactctgtacctgg

SEQ ID NO: 139266 - DNA, 1478 bp, Homo sapiens
  Payload ID: 7298
  Gene Symbol: GNB2
  Gene Name: guanine nucleotide binding protein (G protein), beta polypeptide 2
  ENST ID: ENST00000424361
  CDS Start-End: 251-1141
cgggatccctccgctctggggaggcagcgctggcggcggggctggggccactgaggaaatccatccgcgccgccgccgccgccgccgccgccgccgccgccgcctccgccgcggaggaagacagcgccgcccgcgcaccgccagcgacctccgccgcagagtcccaccgccacaggatgcccgaaaagcatgtggggactcaacactgacccagatcacagctgggctggacccagtggggagaatccagatgaggacccggaggaccctccgtgggcacctggcaaagatctatgccatgcactgggggaccgactcaaggctgctggtcagcgcctcccaggatgggaagctcatcatctgggacagctacaccaccaacaaggtccacgccatcccgctgcgctcctcctgggtaatgacctgtgcctacgcgccctcagggaactttgtggcctgtggggggttggacaacatctgctccatctacagcctcaagacccgcgagggcaacgtcagggtcagccgggagctgcctggccacactgggtacctgtcgtgttgccgcttcctggatgacaaccaaatcatcaccagctctggggataccacctgtgccctgtgggacattgagacaggccagcagacagtgggttttgctggacacagtggggatgtgatgtccctgtccctggcccccgatggccgcacgtttgtgtcaggcgcctgtgatgcctctatcaagctgtgggacgtgcgggattccatgtgccgacagaccttcatcggccatgaatccgacatcaatgcagtggctttcttccccaacggctacgccttcaccaccggctctgacgacgccacgtgccgcctcttcgacctgcgggccgatcaggagctcctcatgtactcccatgacaacatcatctgtggcatcacctctgttgccttctcgcgcagcggacggctgctgctcgctggctacgacgacttcaactgcaacatctgggatgccatgaagggcgaccgtgcaggagtcctcgctggccacgacaaccgcgtgagctgcctcggggtcaccgacgatggcatggctgtggccacgggctcctgggactccttcctcaagatctggaactaatggccccacccccactgggcccaggccaggaggggccctgcccatgcccacactacaggccagggctgcggggctggcgcaatcccagcccccttccccgggccacggggccttgggtccctgccctcccacccaggtttggttcctcccggggcccccactgtggagataagaaggggatggaatgggggaagaggaggagcaggaggccctcatccttctgctgccctggggttggggcctcacccctctggagggccggaggcaggaggtggaaaccccaggggctggcttttttaaaactggttttattttaatttttattatattttcagtt

SEQ ID NO: 139267 - DNA, 910 bp, Homo sapiens
  Payload ID: 7298
  Gene Symbol: GNB2
  Gene Name: guanine nucleotide binding protein (G protein), beta polypeptide 2
  ENST ID: ENST00000431068
  CDS Start-End: 214-910
accatcgaagctgggggtgtgtgtggagggtgtgcgccttgtggggtgaatttcaagaggcaccgccccttttaaaattaggtgcttggagggcggtgcctgtgcgggctggggcagaagccaggcctcgggccagcggccaggagctgcctcccccagcccccgtcccgcggcccccagccgcccccaaccctgccccacgggcccggcgccatgagtgagctggagcaactgagacaggaggccgagcagctccggaaccagatccgggatgcccgaaaagcatgtggggactcaacactgacccagatcacagctgggctggacccagtggggagaatccagatgaggacccggaggaccctccgtgggcacctggcaaagatctatgccatgcactgggggaccgactcaaggctgctggtcagcgcctcccaggatgggaagctcatcatctgggacagctacaccaccaacaaggtccacgccatcccgctgcgctcctcctgggtaatgacctgtgcctacgcgccctcagggaactttgtggcctgtggggggttggacaacatctgctccatctacagcctcaagacccgcgagggcaacgtcagggtcagccgggagctgcctggccacactgggtacctgtcgtgttgccgcttcctggatgacaaccaaatcatcaccagctctggggataccacctgtgccctgtgggacattgagacaggccagcagacagtgggttttgctggacacagtggggatgtgatgtccctgtccctggcccccgatggccgcacgtttgtgtcaggcgcctgtgatgcctctatcaagctgtgggacgtgcgggattccatgtgccgacagaccttcatcggccatgaatccgacatcaatgcagtgg

SEQ ID NO: 139268 - DNA, 1285 bp, Homo sapiens
  Payload ID: 7298
  Gene Symbol: GNB2
  Gene Name: guanine nucleotide binding protein (G protein), beta polypeptide 2
  Uniprot ID: P62879
  ENST ID: ENST00000419828
  CDS Start-End: 199-921
gccgccgccgccgccgccgccgccgccgcctccgccgcggaggaagacagcgccgcccgcgcaccgccagcgacctccgccgcagagtcccaccgccacaggctgctggtcagcgcctcccaggatgggaagctcatcatctgggacagctacaccaccaacaaggtccacgccatcccgctgcgctcctcctgggtaatgacctgtgcctacgcgccctcagggaactttgtggcctgtggggggttggacaacatctgctccatctacagcctcaagacccgcgagggcaacgtcagggtcagccgggagctgcctggccacactgggtacctgtcgtgttgccgcttcctggatgacaaccaaatcatcaccagctctggggataccacctgtgccctgtgggacattgagacaggccagcagacagtgggttttgctggacacagtggggatgtgatgtccctgtccctggcccccgatggccgcacgtttgtgtcaggcgcctgtgatgcctctatcaagctgtgggacgtgcgggattccatgtgccgacagaccttcatcggccatgaatccgacatcaatgcagtggctttcttccccaacggctacgccttcaccaccggctctgacgacgccacgtgccgcctcttcgacctgcgggccgatcaggagctcctcatgtactcccatgacaacatcatctgtggcatcacctctgttgccttctcgcgcagcggacggctgctgctcgctggctacgacgacttcaactgcaacatctgggatgccatgaagggcgaccgtgcaggagtcctcgctggccacgacaaccgcgtgagctgcctcggggtcaccgacgatggcatggctgtggccacgggctcctgggactccttcctcaagatctggaactaatggccccacccccactgggcccaggccaggaggggccctgcccatgcccacactacaggccagggctgcggggctggcgcaatcccagcccccttccccgggccacggggccttgggtccctgccctcccacccaggtttggttcctcccggggcccccactgtggagataagaaggggatggaatgggggaagaggaggagcaggaggccctcatccttctgctgccctggggttggggcctcacccctctggagggccggaggcaggaggtggaaaccccaggggctggcttttttaaaactggttttattttaatttttattatattttcagtttttccataaaggagccaattccaactc

SEQ ID NO: 139269 - DNA, 887 bp, Homo sapiens
  Payload ID: 7298
  Gene Symbol: GNB2
  Gene Name: guanine nucleotide binding protein (G protein), beta polypeptide 2
  ENST ID: ENST00000451587
  CDS Start-End: 134-887
tgaagcaaaccctttgagtacggtttgcgtccacaaagcgtagggcctcgggccagcggccaggagctgcctcccccagcccccgtcccgcggcccccagccgcccccaaccctgccccacgggcccggcgccatgagtgagctggagcaactgagacaggaggccgagcagctccggaaccagatccgggatgcccgaaaagcatgtggggactcaacactgacccagatcacagctgggctggacccagtggggagaatccagatgaggacccggaggaccctccgtgggcacctggcaaagatctatgccatgcactgggggaccgactcaaggctgctggtcagcgcctcccaggatgggaagctcatcatctgggacagctacaccaccaacaaggtccacgccatcccgctgcgctcctcctgggtaatgacctgtgcctacgcgccctcagggaactttgtggcctgtggggggttggacaacatctgctccatctacagcctcaagacccgcgagggcaacgtcagggtcagccgggagctgcctggccacactgggtacctgtcgtgttgccgcttcctggatgacaaccaaatcatcaccagctctggggataccacctgtgccctgtgggacattgagacaggccagcagacagtgggttttgctggacacagtggggatgtgatgtccctgtccctggcccccgatggccgcacgtttgtgtcaggcgcctgtgatgcctctatcaagctgtgggacgtgcgggattccatgtgccgacagaccttcatcggccatgaatccgacatcaatgcagtggctttcttccccaacggctacgccttcaccaccggctctgacgacgccacgtgccgcc

SEQ ID NO: 139270 - DNA, 1146 bp, Homo sapiens
  Payload ID: 7298
  Gene Symbol: GNB2
  Gene Name: guanine nucleotide binding protein (G protein), beta polypeptide 2
  Uniprot ID: P62879
  ENST ID: ENST00000427895
  CDS Start-End: 80-802
cccgcgcaccgccagcgacctccgccgcagagtcccaccgccacaggtccacgccatcccgctgcgctcctcctgggtaatgacctgtgcctacgcgccctcagggaactttgtggcctgtggggggttggacaacatctgctccatctacagcctcaagacccgcgagggcaacgtcagggtcagccgggagctgcctggccacactgggtacctgtcgtgttgccgcttcctggatgacaaccaaatcatcaccagctctggggataccacctgtgccctgtgggacattgagacaggccagcagacagtgggttttgctggacacagtggggatgtgatgtccctgtccctggcccccgatggccgcacgtttgtgtcaggcgcctgtgatgcctctatcaagctgtgggacgtgcgggattccatgtgccgacagaccttcatcggccatgaatccgacatcaatgcagtggctttcttccccaacggctacgccttcaccaccggctctgacgacgccacgtgccgcctcttcgacctgcgggccgatcaggagctcctcatgtactcccatgacaacatcatctgtggcatcacctctgttgccttctcgcgcagcggacggctgctgctcgctggctacgacgacttcaactgcaacatctgggatgccatgaagggcgaccgtgcaggagtcctcgctggccacgacaaccgcgtgagctgcctcggggtcaccgacgatggcatggctgtggccacgggctcctgggactccttcctcaagatctggaactaatggccccacccccactgggcccaggccaggaggggccctgcccatgcccacactacaggccagggctgcggggctggcgcaatcccagcccccttccccgggccacggggccttgggtccctgccctcccacccaggtttggttcctcccggggcccccactgtggagataagaaggggatggaatgggggaagaggaggagcaggaggccctcatccttctgctgccctggggttggggcctcacccctctggagggccggaggcaggaggtggaaaccccaggggctggcttttttaaaactggttttattttaatttttattatattttcagtttttccat

SEQ ID NO: 139271 - DNA, 1479 bp, Homo sapiens
  Payload ID: 7298
  Gene Symbol: GNB2
  Gene Name: guanine nucleotide binding protein (G protein), beta polypeptide 2
  ENST ID: ENST00000436220
  CDS Start-End: 242-1132
cgggcgggatccctccgctctggggaggcagcgctggcggcggggctggggccactgaggaaatccatccgcgccgccgccgccgccgccgccgccgccgccgccgcctccgccgcggaggaagacagcgccgcccgcgcaccgccagcgacctccgccgcagagtcccaccgccacagcatgtggggactcaacactgacccagatcacagctgggctggacccagtggggagaatccagatgaggacccggaggaccctccgtgggcacctggcaaagatctatgccatgcactgggggaccgactcaaggctgctggtcagcgcctcccaggatgggaagctcatcatctgggacagctacaccaccaacaaggtccacgccatcccgctgcgctcctcctgggtaatgacctgtgcctacgcgccctcagggaactttgtggcctgtggggggttggacaacatctgctccatctacagcctcaagacccgcgagggcaacgtcagggtcagccgggagctgcctggccacactgggtacctgtcgtgttgccgcttcctggatgacaaccaaatcatcaccagctctggggataccacctgtgccctgtgggacattgagacaggccagcagacagtgggttttgctggacacagtggggatgtgatgtccctgtccctggcccccgatggccgcacgtttgtgtcaggcgcctgtgatgcctctatcaagctgtgggacgtgcgggattccatgtgccgacagaccttcatcggccatgaatccgacatcaatgcagtggctttcttccccaacggctacgccttcaccaccggctctgacgacgccacgtgccgcctcttcgacctgcgggccgatcaggagctcctcatgtactcccatgacaacatcatctgtggcatcacctctgttgccttctcgcgcagcggacggctgctgctcgctggctacgacgacttcaactgcaacatctgggatgccatgaagggcgaccgtgcaggagtcctcgctggccacgacaaccgcgtgagctgcctcggggtcaccgacgatggcatggctgtggccacgggctcctgggactccttcctcaagatctggaactaatggccccacccccactgggcccaggccaggaggggccctgcccatgcccacactacaggccagggctgcggggctggcgcaatcccagcccccttccccgggccacggggccttgggtccctgccctcccacccaggtttggttcctcccggggcccccactgtggagataagaaggggatggaatgggggaagaggaggagcaggaggccctcatccttctgctgccctggggttggggcctcacccctctggagggccggaggcaggaggtggaaaccccaggggctggcttttttaaaactggttttattttaatttttattatattttcagtttttccataaa

SEQ ID NO: 139272 - DNA, 545 bp, Homo sapiens
  Payload ID: 7298
  Gene Symbol: GNB2
  Gene Name: guanine nucleotide binding protein (G protein), beta polypeptide 2
  ENST ID: ENST00000412215
  CDS Start-End: 90-545
ctttctccccacttccccggcggcctcgggcctgacgtcagccctgcatcccccagccgcccccaaccctgccccacgggcccggcgccatgagtgagctggagcaactgagacaggaggccgagcagctccggaaccagatccgggatgcccgaaaagcatgtggggactcaacactgacccagatcacagctgggctggacccagtggggagaatccagatgaggacccggaggaccctccgtgggcacctggcaaagatctatgccatgcactgggggaccgactcaaggctgctggtcagcgcctcccaggatgggaagctcatcatctgggacagctacaccaccaacaaggtccacgccatcccgctgcgctcctcctgggtaatgacctgtgcctacgcgccctcagggaactttgtggcctgtggggggttggacaacatctgctccatctacagcctcaagacccgcgagggcaacgtcagggtcagccgggagctgcctggccacactgggtacctgtcgtgttgccgcttcctg

SEQ ID NO: 139273 - DNA, 965 bp, Homo sapiens
  Payload ID: 7299
  Gene Symbol: GNB2L1
  Gene Name: guanine nucleotide binding protein (G protein), beta polypeptide 2-like 1
  ENST ID: ENST00000376817
  CDS Start-End: 104-925
tctttcactgcaaggcggcggcaggagaggttgtggtgctagtttctctaagccatccagtgccatcctcgtcgctgcagcgacacacgctctcgccgccgccatgactgagcagatgacccttcgtggcaccctcaagggccacaacggctgggtaacccagatcgctactaccccgcagttcccggacatgatcctctccgcctctcgaggctcctgggatggaaccctgcgcctctgggatctcacaacgggcaccaccacgaggcgatttgtgggccataccaaggatgtgctgagtgtggccttctcctctgacaaccggcagattgtctctggatctcgagataaaaccatcaagctatggaataccctgggtgtgtgcaaatacactgtccaggatgagagccactcagagtgggtgtcttgtgtccgcttctcgcccaacagcagcaaccctatcatcgtctcctgtggctgggacaagctggtcaaggtatggaacctggctaactgcaagctgaagaccaaccacattggccacacaggctatctgaacacggtgactgtctctccagatggatccctctgtgcttctggaggcaaggatggccaggccatgttatgggatctcaacgaaggcaaacacctttacacgctagatggtggggacatcatcaacgccctgtgcttcagccctaaccgctactggctgtgtgctgccacaggccccagcatcaagatctgggatttagagggaaagatcattgtagatgaactgaagcaagaagttatcagtaccagcagcaaggcagaaccaccccagtgcacctccctggcctggtctgctgatggccagactctgtttgctggctacacggacaacctggtgcgagtgtggcaggtgaccattggcacacgctagaagtttatggcagagctttacaaataaaaaaaaaactggc

SEQ ID NO: 139274 - DNA, 1150 bp, Homo sapiens
  Payload ID: 7299
  Gene Symbol: GNB2L1
  Gene Name: guanine nucleotide binding protein (G protein), beta polypeptide 2-like 1
  ENST ID: ENST00000511473
  CDS Start-End: 117-236
gcttttctctctctctttcactgcaaggcggcggcaggagaggttgtggtgctagtttctctaagccatccagtgccatcctcgtcgctgcagcgacacacgctctcgccgccgccatgactgagcagatgacccttcgtggcaccctcaagggccacaacggctgggtaacccagatcgctactaccccgcagttcccggacatgatcctctccgcctctcgaggtacggactaagataagaccatcatcatgtggaaactgaccagggatgagaccaactatggaattccacagcgtgctctgcggggtcactcccactttgttagtgatgtggttatctcctcagatggccagtttgccctctcaggctcctgggatggaaccctgcgcctctgggatctcacaacgggcaccaccacgaggcgatttgtgggccataccaaggatgtgctgagtgtggccttctcctctgacaaccggcagattgtctctggatctcgagataaaaccatcaagctatggaataccctgggtgtgtgcaaatacactgtccaggatgagagccactcagagtgggtgtcttgtgtccgcttctcgcccaacagcagcaaccctatcatcgtctcctgtggctgggacaagctggtcaaggtatggaacctggctaactgcaagctgaagaccaaccacattggccacacaggctatctgaacacggtgactgtctctccagatggatccctctgtgcttctggaggcaaggatggccaggccatgttatgggatctcaacgaaggcaaacacctttacacgctagatggtggggacatcatcaacgccctgtgcttcagccctaaccgctactggctgtgtgctgccacaggccccagcatcaagatctgggatttagagggaaagatcattgtagatgaactgaagcaagaagttatcagtaccagcagcaaggcagaaccaccccagtgcacctccctggcctggtctgctgatggccagactctgtttgctggctacacggacaacctggtgcgagtgtggcaggtgaccattggcacacgctagaagtttatggcagagctttacaaataaaaaaaaaactggcttttctgacttttaggtttttttttctt

SEQ ID NO: 139275 - DNA, 697 bp, Homo sapiens
  Payload ID: 7299
  Gene Symbol: GNB2L1
  Gene Name: guanine nucleotide binding protein (G protein), beta polypeptide 2-like 1
  ENST ID: ENST00000513027
  CDS Start-End: 105-697
ctctttcactgcaaggcggcggcaggagaggttgtggtgctagtttctctaagccatccagtgccatcctcgtcgctgcagcgacacacgctctcgccgccgccatgactgagcagatgacccttcgtggcaccctcaagggccacaacggctgggtaacccagatcgctactaccccgcagttcccggacatgatcctctccgcctctcgagtgtggccgggggcctacgggccgggcggggcggtgatgaccccaacatgccatctgagtgtcggtgctgaaatccagaggctgtttctgagctgccgcccggcccaaggctcgtggggagataagaccatcatcatgtggaaactgaccagggatgagaccaactatggaattccacagcgtgctctgcggggtcactcccactttgttagtgatgtggttatctcctcagatggccagtttgccctctcaggctcctgggatggaaccctgcgcctctgggatctcacaacgggcaccaccacgaggcgatttgtgggccataccaaggatgtgctgagtgtggccttctcctctgacaaccggcagattgtctctggatctcgagataaaaccatcaagctatggaataccctgggtgtgtgcaaatacactgtccaggatgagagccactcagagtgggtgtcttgtgtccgcttctcgcc

SEQ ID NO: 139276 - DNA, 685 bp, Homo sapiens
  Payload ID: 7299
  Gene Symbol: GNB2L1
  Gene Name: guanine nucleotide binding protein (G protein), beta polypeptide 2-like 1
  ENST ID: ENST00000507000
  CDS Start-End: 103-685
ggccacaaacacaagagtatgggacacgccagaggaagccacacggattttgcagggagacagtaaggattttgctcatcatcttaaaataagaccatcatcatgtggaaactgaccagggatgagaccaactatggaattccacagcgtgctctgcggggtcactcccactttgttagtgatgtggttatctcctcagatggccagtttgccctctcaggctcctgggatggaaccctgcgcctctgggatctcacaacgggcaccaccacgaggcgatttgtgggccataccaaggatgtgctgagtgtggccttctcctctgacaaccggcagattgtctctggatctcgagataaaaccatcaagctatggaataccctgggtgtgtgcaaatacactgtccaggatgagagccactcagagtgggtgtcttgtgtccgcttctcgcccaacagcagcaaccctatcatcgtctcctgtggctgggacaagctggtcaaggtatggaacctggctaactgcaagctgaagaccaaccacattggccacacaggctatctgaacacggtgactgtctctccagatggatccctctgtgcttctggaggcaaggatggccaggccatgttatgggatctcaacgaaggcaaacacctttacacgctagatggtggggacatca

SEQ ID NO: 139277 - DNA, 456 bp, Homo sapiens
  Payload ID: 7299
  Gene Symbol: GNB2L1
  Gene Name: guanine nucleotide binding protein (G protein), beta polypeptide 2-like 1
  ENST ID: ENST00000509535
  CDS Start-End: 1-416
aggatgagagccactcagagtgggtgtcttgtgtccgcttctcgcccaacagcagcaaccctatcatcgtctcctgtggctgggacaagctggtcaaggtatggaacctggctaactgcaagctgaagaccaaccacattggccacacaggctatctgaacacggtgactgtctctccagatggatccctctgtgcttctggaggcaaggatggccaggccatgttatgggatctcaacgaaggcaaacacctttacacgctagatggtggggacatcatcaacgccctgtgcttcagccctaaccgctactggctgtgtgctgccacaggccccagcatcaagatctggactctgtttgctggctacacggacaacctggtgcgagtgtggcaggtgaccattggcacacgctagaagtttatggcagagctttacaaataaaaaaaaaactggc

SEQ ID NO: 139278 - DNA, 1460 bp, Homo sapiens
  Payload ID: 7299
  Gene Symbol: GNB2L1
  Gene Name: guanine nucleotide binding protein (G protein), beta polypeptide 2-like 1
  ENST ID: ENST00000502844
  CDS Start-End: 751-1460
atgaccccaacatgccatctgagtgtcggtgctgaaatccagaggctgtttctgagctgccgcccggcccaaggctcgtggggaggcaggtggactccagaggacctcgtggctcaagtgtcggcctactttttctgcccctggttctccccgtccctatccctgtgttcctgactgcgtttagacgcttcttgtgcttccgctttgctgctacactgttaagaattgtctgacttttgaatcatgtctggctgttaatcgtaaaatttgttgagtgggacaggtttcagtaaaagcatccaatcctgtagcgcctgaagtggcttttccagcattcattactacatttctgtcggccctcagaggtaggcataggaggccccagctactctacagccacaaactgctgtgcatttggttgcagagaagacacaaagtggctgttgagttcgtctgagtttcaggaaagggtgtctgtatttctggcacctaaattaagttctcaggatacaggctgggcgcggtggctcacgcctataatcccagcactttggaaggcagaggcgagtggatcacttgagatcaggagttagagactagcctggccaatggtgaaaccgcatctctagttaaaaaattagccagacgtgctggcaggtgccagctggccaagtaatcccagctacttgggaggctgaggcgggagaattgcttgaacacgggaggtggagtttggagtgagccgagatcatgccactgcactccagcctgggcgacagagcgagactccatctcaagaaaaaaaaaagttatcaggataagaccatcatcatgtggaaactgaccagggatgagaccaactatggaattccacagcgtgctctgcggggtcactcccactttgttagtgatgtggttatctcctcagatggccagtttgccctctcaggctcctgggatggaaccctgcgcctctgggatctcacaacgggcaccaccacgaggcgatttgtgggccataccaaggatgtgctgagtgtggccttctcctctgacaaccggcagattgtctctggatctcgagataaaaccatcaagctatggaataccctgggtgtgtgcaaatacactgtccaggatgagagccactcagagtgggtgtcttgtgtccgcttctcgcccaacagcagcaaccctatcatcgtctcctgtggctgggacaagctggtcaaggtatggaacctggctaactgcaagctgaagaccaaccacattggccacacaggctatctgaacacggtgactgtctctccagatggatccctctgtgcttctggaggcaaggatggccaggccatgttatgggatctcaacgaaggcaaacacctttacacgctagatggtggggacatcatcaacgccctgtgcttcagccctaaccgctactggctgtgtgctgc

SEQ ID NO: 139279 - DNA, 1098 bp, Homo sapiens
  Payload ID: 7299
  Gene Symbol: GNB2L1
  Gene Name: guanine nucleotide binding protein (G protein), beta polypeptide 2-like 1
  ENST ID: ENST00000504325
  CDS Start-End: 90-440
gcggcggcaggagaggttgtggtgctagtttctctaagccatccagtgccatcctcgtcgctgcagcgacacacgctctcgccgccgccatgactgagcagatgacccttcgtggcaccctcaagggccacaacggctgggtaacccagatcgctactaccccgcagttcccggacatgatcctctccgcctctcgagataagaccatcatcatgtggaaactgaccagggatgagaccaactatggaattccacagcgtgctctgcggggtcactcccactttgttagtgatgtggttatctcctcagatggccagtttgccctctcaggctcctgggatggaaccctgcgcctctgggatctcacaacgcaagggcaccaccacgaggcgatttgtgggccataccaaggatgtgctgagtgtggccttctcctctgacaaccggcagattgtctctggatctcgagataaaaccatcaagctatggaataccctgggtgtgtgcaaatacactgtccaggatgagagccactcagagtgggtgtcttgtgtccgcttctcgcccaacagcagcaaccctatcatcgtctcctgtggctgggacaagctggtcaaggtatggaacctggctaactgcaagctgaagaccaaccacattggccacacaggctatctgaacacggtgactgtctctccagatggatccctctgtgcttctggaggcaaggatggccaggccatgttatgggatctcaacgaaggcaaacacctttacacgctagatggtggggacatcatcaacgccctgtgcttcagccctaaccgctactggctgtgtgctgccacaggccccagcatcaagatctgggatttagagggaaagatcattgtagatgaactgaagcaagaagttatcagtaccagcagcaaggcagaaccaccccagtgcacctccctggcctggtctgctgatggccagactctgtttgctggctacacggacaacctggtgcgagtgtggcaggtgaccattggcacacgctagaagtttatggcagagctttacaaataaaaaaaaaactggcttttctgactt

SEQ ID NO: 139280 - DNA, 889 bp, Homo sapiens
  Payload ID: 7299
  Gene Symbol: GNB2L1
  Gene Name: guanine nucleotide binding protein (G protein), beta polypeptide 2-like 1
  ENST ID: ENST00000507756
  CDS Start-End: 1-824
ttatctcctcagatggccagtttgccctctcaggctcctgggatggaaccctgcgcctctgggatctcacaacgggcaccaccacgaggcgatttgtgggccataccaaggatgtgctgagtgtggccttctcctctgacaaccggcagattgtctctggatctcgagataaaaccatcaagctatggaataccctgggtgtgtgcaaatacactgtccaggatgagagccactcagagtgggtgtcttgtgtccgcttctcgcccaacagcagcaaccctatcatcgtctcctgtggctgggacaagctggtcaaggtatggaacctggctaactgcaagctgaagaccaaccacattggccacacaggctatctgaacacggtgactgtctctccagatggatccctctgtgcttctggaggcaaggatggccaggccatgttatgggatctcaacgaaggcaaacacctttacacgctagatggtggggacatcatcaacgccctgtgcttcagccctaaccgctactggctgtgtgctgccacaggccccagcatcaagatctgggatttagagggaaagatcattgtagatgaactgaagcaagaagttatcagtaccagcagcaaggcagaaccaccccagtgcacctccctggcctggtctgctgatggccaggaatacataaccaccacttacaagctggctgttgaaatgagagcggtttcttacagtctacccggcgttgtggcacatgcctactggaggctgagactctgtttgctggctacacggacaacctggtgcgagtgtggcaggtgaccattggcacacgctagaagtttatggcagagctttacaaataaaaaaaaaactggcttttctga

SEQ ID NO: 139281 - DNA, 922 bp, Homo sapiens
  Payload ID: 7299
  Gene Symbol: GNB2L1
  Gene Name: guanine nucleotide binding protein (G protein), beta polypeptide 2-like 1
  ENST ID: ENST00000511900
  CDS Start-End: 81-890
ggagaggttgtggtgctagtttctctaagccatccagtgccatcctcgtcgctgcagcgacacacgctctcgccgccgccatgactgagcagatgacccttcgtggcaccctcaagggccacaacggctgggtaacccagatcgctactaccccgcagttcccggacatgatcctctccgcctctcgagataagaccatcatcatgtggaaactgaccagggatgagaccaactatggaattccacagcgtgctctgcggggtcactcccactttgttagtgatgtggttatctcctcagatggccagtttgccctctcaggctcctgggatggaaccctgcgcctctgggatctcacaacgcaagatgagagccactcagagtgggtgtcttgtgtccgcttctcgcccaacagcagcaaccctatcatcgtctcctgtggctgggacaagctggtcaaggtatggaacctggctaactgcaagctgaagaccaaccacattggccacacaggctatctgaacacggtgactgtctctccagatggatccctctgtgcttctggaggcaaggatggccaggccatgttatgggatctcaacgaaggcaaacacctttacacgctagatggtggggacatcatcaacgccctgtgcttcagccctaaccgctactggctgtgtgctgccacaggccccagcatcaagatctgggatttagagggaaagatcattgtagatgaactgaagcaagaagttatcagtaccagcagcaaggcagaaccaccccagtgcacctccctggcctggtctgctgatggccagactctgtttgctggctacacggacaacctggtgcgagtgtggcaggtgaccattggcacacgctagaagtttatggcagagctttacaaataaaaaaa

SEQ ID NO: 139282 - DNA, 1100 bp, Homo sapiens
  Payload ID: 7299
  Gene Symbol: GNB2L1
  Gene Name: guanine nucleotide binding protein (G protein), beta polypeptide 2-like 1
  ENST ID: ENST00000510199
  CDS Start-End: 201-1100
cgagtagctgggactacaggcgcccgccaccacgccctaattttttgtatttttagtagagacggggtttcaccgtgttagccaggatggtctcgatctcctgacctcgtgatccgcccgcctcggcctcccaaagtgctgggattacaggcgtgagccaccgtgcccggcctctccttgggactcttaccttgtatggaatggaagtggtgcctctggggtcccagacacgggagagaggaagcagcccaggggctgggagaagtggtgagacccagaagaacggtggacccagtcaggaagggtcctgccagcagggcgtgggccagcctcggggtcttccccaaaaggcaggtaggggcctccagcaagcttcccacctccgtgaggctggagaagaggccccctggatgagaaggaagaggccggcaggtccggcgggcgcaggcacagataagaccatcatcatgtggaaactgaccagggatgagaccaactatggaattccacagcgtgctctgcggggtcactcccactttgttagtgatgtggttatctcctcagatggccagtttgccctctcaggctcctgggatggaaccctgcgcctctgggatctcacaacgggcaccaccacgaggcgatttgtgggccataccaaggatgtgctgagtgtggccttctcctctgacaaccggcagattgtctctggatctcgagataaaaccatcaagctatggaataccctgggtgtgtgcaaatacactgtccaggatgagagccactcagagtgggtgtcttgtgtccgcttctcgcccaacagcagcaaccctatcatcgtctcctgtggctgggacaagctggtcaaggtatggaacctggctaactgcaagctgaagaccaaccacattggccacacaggctatctgaacacggtgactgtctctccagatggatccctctgtgcttctggaggcaaggatggccaggccatgttatgggatctcaacgaaggcaaacacctttacacgctagatggtggggacatcatcaacgccctgtgcttcagccctaaccgctactggctgtgtgctgccaca

SEQ ID NO: 139283 - DNA, 587 bp, Homo sapiens
  Payload ID: 7299
  Gene Symbol: GNB2L1
  Gene Name: guanine nucleotide binding protein (G protein), beta polypeptide 2-like 1
  ENST ID: ENST00000503081
  CDS Start-End: 107-587
ctctctttcactgcaaggcggcggcaggagaggttgtggtgctagtttctctaagccatccagtgccatcctcgtcgctgcagcgacacacgctctcgccgccgccatgactgagcagatgacccttcgtggcaccctcaagggccacaacggctgggtaacccagatcgctactaccccgcagttcccggacatgatcctctccgcctctcgagataagaccatcatcatgtggaaactgaccagggatgagaccaactatggaattccacagcgtgctctgcggggtcactcccactttgttagtgatgtggttatctcctcagatggccagtttgccctctcaggctcctgggatggaaccctgcgcctctgggatctcacaacgcaaattgtctctggatctcgagataaaaccatcaagctatggaataccctgggtgtgtgcaaatacactgtccaggatgagagccactcagagtgggtgtcttgtgtccgcttctcgcccaacagcagcaaccctatcatcgtctcctgtggctgggacaagctggtcaaggtatggaacctggctaactgcaagctga

SEQ ID NO: 139284 - DNA, 888 bp, Homo sapiens
  Payload ID: 7299
  Gene Symbol: GNB2L1
  Gene Name: guanine nucleotide binding protein (G protein), beta polypeptide 2-like 1
  ENST ID: ENST00000509148
  CDS Start-End: 1-250
ttacacgctagatggtggggacatcatcaacgccctgtgcttcagccctaaccgctactggctgtgtgctgccacaggccccagcatcaagatctgggatttagagggaaagatcattgtagatgaactgaagcaagaagttatcagtaccagcagcaaggcagaaccaccccagtgcacctccctggcctggtctgctgatggccaggtaagtgggtctgtcctctcaggtgattctgcttccagttaattttctccctctcattctgttagtatatctagtctgtcagacacaagagcagtgtccttggcataaagtgaaatgacaagccaggttgatgaggatgccctcgtttgccatgccagtgaatgtgtttctgcatcagagggaagactgatgtggaacgcagtggctgtcagccttcaattaataccttaattaatctgaccagttttcaaatgtctggagccttatcaccagctgtttcttcctcaaggaatacataaccaccacttacaagctggctgttgaaatgagagcggtttcttacagtctacccggcgttgtggcacatgcctactggaggctgaggtgggaggatctcttgaactgcaggggcttaaggctgtagtgagccaggatcgcacccctgcactccagcctagacaatggagcaaggtggacggatctcaaaaaaagccacttgggctgaatctagtgagactgcagaatttatgccagcctgacctgtcactgtcatttcttccctgcagactctgtttgctggctacacggacaacctggtgcgagtgtggcaggtgaccattggcacacgctagaagtttatggcagagctttacaaataaaaaaaaaactggcttttctga

SEQ ID NO: 139285 - DNA, 1208 bp, Homo sapiens
  Payload ID: 7299
  Gene Symbol: GNB2L1
  Gene Name:: guanine nucleotide binding protein (G protein), beta polypeptide 2-like 1
  ENST ID: ENST00000508682
  CDS Start-End: 103-546
ctttcactgcaaggcggcggcaggagaggttgtggtgctagtttctctaagccatccagtgccatcctcgtcgctgcagcgacacacgctctcgccgccgccatgactgagcagatgacccttcgtggcaccctcaagggccacaacggctgggtaacccagatcgctactaccccgcagttcccggacatgatcctctccgcctctcgagataagaccatcatcatgtggaaactgaccagggatgagaccaactatggaattccacagcgtgctctgcggggtcactcccactttgttagtgatgtggttatctcctcagatggccagtttgccctctcaggctcctgggatggaaccctgcgcctctgggatctcacaacgggcaccaccacgaggcgatttgtgggccataccaaggatgtgctgagtgtggccttctcctctgacaaccggcagattgtctctggatctcgagataaaaccatcaagctatggaataccctgggtgtgtgcaaatacactgtccaggctggagtgcagtagtgcgatctcggctcactgcaagctctgcttcccgggttcacgccattctcctgcctcagcctcccgagtcgctgggactacaggcgcctgccatcaggatgagagccactcagagtgggtgtcttgtgtccgcttctcgcccaacagcagcaaccctatcatcgtctcctgtggctgggacaagctggtcaaggtatggaacctggctaactgcaagctgaagaccaaccacattggccacacaggctatctgaacacggtgactgtctctccagatggatccctctgtgcttctggaggcaaggatggccaggccatgttatgggatctcaacgaaggcaaacacctttacacgctagatggtggggacatcatcaacgccctgtgcttcagccctaaccgctactggctgtgtgctgccacaggccccagcatcaagatctgggatttagagggaaagatcattgtagatgaactgaagcaagaagttatcagtaccagcagcaaggcagaaccaccccagtgcacctccctggcctggtctgctgatggccagactctgtttgctggctacacggacaacctggtgcgagtgtggcaggtgaccattggcacacgctagaagtttatggcagagctttacaaataaaaaaaaaactggc

SEQ ID NO: 139286 - DNA, 1058 bp, Homo sapiens
  Payload ID: 7299
  Gene Symbol: GNB2L1
  Gene Name: guanine nucleotide binding protein (G protein), beta polypeptide 2-like 1
  ENST ID: ENST00000512968
  CDS Start-End: 94-1058
caaggcggcggcaggagaggttgtggtgctagtttctctaagccatccagtgccatcctcgtcgctgcagcgacacacgctctcgccgccgccatgactgagcagatgacccttcgtggcaccctcaagggccacaacggctgggtaacccagatcgctactaccccgcagttcccggacatgatcctctccgcctctcgagataagaccatcatcatgtggaaactgaccagggatgagaccaactatggaattccacagcgtgctctgcggggtcactcccactttgttagtgatgtggttatctcctcagatggccagtttgccctctcaggctcctgggatggaaccctgcgcctctgggatctcacaacattgtctctggatctcgagataaaaccatcaagctatggaataccctgggtgtgtgcaaatacactgtccagtctcattctgtcgcccaggctggagtgcagtagtgcgatctcggctcactgcaagctctgcttcccgggttcacgccattctcctgcctcagcctcccgagtcgctgggactacaggcgcctgccatcaggatgagagccactcagagtgggtgtcttgtgtccgcttctcgcccaacagcagcaaccctatcatcgtctcctgtggctgggacaagctggtcaaggtatggaacctggctaactgcaagctgaagaccaaccacattggccacacaggctatctgaacacggtgactgtctctccagatggatccctctgtgcttctggaggcaaggatggccaggccatgttatgggatctcaacgaaggcaaacacctttacacgctagatggtggggacatcatcaacgccctgtgcttcagccctaaccgctactggctgtgtgctgccacaggccccagcatcaagatctgggatttagagggaaagatcattgtagatgaactgaagcaagaagttatcagtaccagcagcaaggcagaaccaccccagtgcacctccctggcctggtctgctgatggccagactctgtttgctggctacacgga

SEQ ID NO: 139287 - DNA, 388 bp, Homo sapiens
  Payload ID: 7299
  Gene Symbol: GNB2L1
  Gene Name: guanine nucleotide binding protein (G protein), beta polypeptide 2-like 1
  ENST ID: ENST00000504726
  CDS Start-End: 92-352
aggcggcggcaggagaggttgtggtgctagtttctctaagccatccagtgccatcctcgtcgctgcagcgacacacgctctcgccgccgccatgactgagcagatgacccttcgtggcaccctcaagggccacaacggctgggtaacccagatcgctactaccccgcagttcccggacatgatcctctccgcctctcgagatgaactgaagcaagaagttatcagtaccagcagcaaggcagaaccaccccagtgcacctccctggcctggtctgctgatggccagactctgtttgctggctacacggacaacctggtgcgagtgtggcaggtgaccattggcacacgctagaagtttatggcagagctttacaaataaaaaaaaaac

SEQ ID NO: 139288 - DNA, 825 bp, Homo sapiens
  Payload ID: 7299
  Gene Symbol: GNB2L1
  Gene Name: guanine nucleotide binding protein (G protein), beta polypeptide 2-like 1
  ENST ID: ENST00000511566
  CDS Start-End: 81-782
ggagaggttgtggtgctagtttctctaagccatccagtgccatcctcgtcgctgcagcgacacacgctctcgccgccgccatgactgagcagatgacccttcgtggcaccctcaagggccacaacggctgggtaacccagatcgctactaccccgcagttcccggacatgatcctctccgcctctcgagataagaccatcatcatgtggaaactgaccagggatgagaccaactatggaattccacagcgtgctctgcggggtcactcccactttgttagtgatgtggttatctcctcagatggccagtttgccctctcaggctcctgggatggaaccctgcgcctctgggatctcacaacgggcaccaccacgaggcgatttgtgggccataccaaggatgtgctgagtgtggccttctcctctgacaaccggcagattgtctctggatctcgagataaaaccatcaagctatggaataccctgggtgtgtgcaaatacactgtccaggatgagagccactcagagtgggtgtcttgtgtccgcttctcgcccaacagcagcaaccctatcatcgtctcctgtggctgggacaagctggtcaaggtatggaacctggctaactgcaagctgaagaccaaccacattggccacacaggctatctgaacacggtgactgtctctccagatggatccctctgtgcttctggaggcaagactctgtttgctggctacacggacaacctggtgcgagtgtggcaggtgaccattggcacacgctagaagtttatggcagagctttacaaataaaaaaaaaactggcttt

SEQ ID NO: 139289 - DNA, 843 bp, Homo sapiens
  Payload ID: 7299
  Gene Symbol: GNB2L1
  Gene Name: guanine nucleotide binding protein (G protein), beta polypeptide 2-like 1
  ENST ID: ENST00000503494
  CDS Start-End: 82-543
aggagaggttgtggtgctagtttctctaagccatccagtgccatcctcgtcgctgcagcgacacacgctctcgccgccgccatgactgagcagatgacccttcgtggcaccctcaagggccacaacggctgggtaacccagatcgctactaccccgcagttcccggacatgatcctctccgcctctcgagataagaccatcatcatgtggaaactgaccagggatgagaccaactatggaattccacagcgtgctctgcggggtcactcccactttgttagtgatgtggttatctcctcagatggccagtttgccctctcaggctcctgggatggaaccctgcgcctctgggatctcacaacgggcaccaccacgaggcgatttgtgggccataccaaggatgtgctgagtgtggccttctcctctgacaaccggcagattgtctctggatctcgagataaaaccatcaagctatggaataccctgggtgtgtgcaaatacactgtccagtctcattctgtcgcccaggctggagtgcagtagtgcgatctcggctcactgcaagctctgcttcccgggttcacgccattctcctgcctcagcctcccgagtcgctgggactacaggcgcctgccatcaggatgagagccactcagagtgggtgtcttgtgtccgcttctcgcccaacagcagcaaccctatcatcgtctcctgtggctgggacaagctggtcaaggtatggaacctggctaactgcaagctgaagaccaaccacattggccacacaggctatctgaacacggtgactgtctctccagatggatccctctgtgcttctggagg

SEQ ID NO: 139290 - DNA, 559 bp, Homo sapiens
  Payload ID: 7299
  Gene Symbol: GNB2L1
  Gene Name: guanine nucleotide binding protein (G protein), beta polypeptide 2-like 1
  ENST ID: ENST00000506312
  CDS Start-End: 103-318
ctttcactgcaaggcggcggcaggagaggttgtggtgctagtttctctaagccatccagtgccatcctcgtcgctgcagcgacacacgctctcgccgccgccatgactgagcagatgacccttcgtggcaccctcaagggccacaacggctgggtaacccagatcgctactaccccgcagttcccggacatgatcctctccgcctctcgagataagaccatcatcatgtggaaactgaccagggatgagaccaactatggaattccacagcgggcaccaccacgaggcgatttgtgggccataccaaggatgtgctgagtgtggccttctcctctgacaaccggcagattgtctctggatctcgagataaaaccatcaagctatggaataccctgggtgtgtgcaaatacactgtccaggatgagagccactcagagtgggtgtcttgtgtccgcttctcgcccaacagcagcaaccctatcatcgtctcctgtggctgggacaagctggtcaaggtatggaacctggctaactgcaagctgaagaccaaccacattgg

SEQ ID NO: 139291 - DNA, 791 bp, Homo sapiens
  Payload ID: 7299
  Gene Symbol: GNB2L1
  Gene Name: guanine nucleotide binding protein (G protein), beta polypeptide 2-like 1
  ENST ID: ENST00000514455
  CDS Start-End: 437-742
ctcctgggtaatttttgtatgttagtagagaggattttaccatgttggccaggctggtcttgaactcctgacctcaggtgatccgcccacctcggcttcccaaagtgctgggattacaggcatgagccaccgcacccagcctaaagttggtttcttgaagcagttgatgagattgggatcctggttttcagaaatgattggagtgatttatgtaagttgggaggggttttttgatggggttggtaaggtcttacgttaaaggaaaggtatacagagataaatattggtacttgagtcattagctttcaaagaagcctggggtaatggaggaaaggtaagaattgattctgacagaatcttgagatgggcagaattaacatctggaagaggtcacagtgtcctgatttaccttacctgtgtccaggatggccaggccatgttatgggatctcaacgaaggcaaacacctttacacgctagatggtggggacatcatcaacgccctgtgcttcagccctaaccgctactggctgtgtgctgccacaggccccagcatcaagatctgggatttagagggaaagatcattgtagatgaactgaagcaagaagttatcagtaccagcagcaaggcagaaccaccccagtgcacctccctggcctggtctgctgatggccagactctgtttgctggctacacggacaacctggtgcgagtgtggcaggtgaccattggcacacgctagaagtttatggcagagctttacaaataaaaaaaaaactggcttttctgac

SEQ ID NO: 139292 - DNA, 1403 bp, Homo sapiens
  Payload ID: 7299
  Gene Symbol: GNB2L1
  Gene Name: guanine nucleotide binding protein (G protein), beta polypeptide 2-like 1
  Uniprot ID: P63244
  ENST ID: ENST00000512805
  CDS Start-End: 410-1363
ataggggcggggaagcagcccggcggtcctcatgggaatgtgccgtacacttcacctctttcgcttctcgctctacatcatccctgagaagcctttttaaacacttgaatgtgcttgtttcagagtgtatttgtaaagtgcagtcagattttgttgtacggaagacgggactgtgatgccttgcaatttccctctgccttttgcattacatggcgccgccatcttgagcagaaatgtatcatggggctcgccattttgcatggtcgagcgggtatttccggttccggcggggggcttttctctctctctttcactgcaaggcggcggcaggagaggttgtggtgctagtttctctaagccatccagtgccatcctcgtcgctgcagcgacacacgctctcgccgccgccatgactgagcagatgacccttcgtggcaccctcaagggccacaacggctgggtaacccagatcgctactaccccgcagttcccggacatgatcctctccgcctctcgagataagaccatcatcatgtggaaactgaccagggatgagaccaactatggaattccacagcgtgctctgcggggtcactcccactttgttagtgatgtggttatctcctcagatggccagtttgccctctcaggctcctgggatggaaccctgcgcctctgggatctcacaacgggcaccaccacgaggcgatttgtgggccataccaaggatgtgctgagtgtggccttctcctctgacaaccggcagattgtctctggatctcgagataaaaccatcaagctatggaataccctgggtgtgtgcaaatacactgtccaggatgagagccactcagagtgggtgtcttgtgtccgcttctcgcccaacagcagcaaccctatcatcgtctcctgtggctgggacaagctggtcaaggtatggaacctggctaactgcaagctgaagaccaaccacattggccacacaggctatctgaacacggtgactgtctctccagatggatccctctgtgcttctggaggcaaggatggccaggccatgttatgggatctcaacgaaggcaaacacctttacacgctagatggtggggacatcatcaacgccctgtgcttcagccctaaccgctactggctgtgtgctgccacaggccccagcatcaagatctgggatttagagggaaagatcattgtagatgaactgaagcaagaagttatcagtaccagcagcaaggcagaaccaccccagtgcacctccctggcctggtctgctgatggccagactctgtttgctggctacacggacaacctggtgcgagtgtggcaggtgaccattggcacacgctagaagtttatggcagagctttacaaataaaaaaaaaactggc

SEQ ID NO: 139293 - DNA, 643 bp, Homo sapiens
  Payload ID: 7299
  Gene Symbol: GNB2L1
  Gene Name: guanine nucleotide binding protein (G protein), beta polypeptide 2-like 1
  ENST ID: ENST00000502905
  CDS Start-End: 1-595
ggatggaaccctgcgcctctgggatctcacaacgggcaccaccacgaggcgatttgtgggccataccaaggatgtgctgagtgtggccttctcctctgacaaccggcagattgtctctggatctcgagataaaaccatcaagctatggaataccctgggtgtgtgcaaatacactgtccaggatgagagccactcagagtgggtgtcttgtgtccgcttctcgcccaacagcagcaaccctatcatcgtctcctgtggctgggacaagctggtcaaggatggccaggccatgttatgggatctcaacgaaggcaaacacctttacacgctagatggtggggacatcatcaacgccctgtgcttcagccctaaccgctactggctgtgtgctgccacaggccccagcatcaagatctgggatttagagggaaagatcattgtagatgaactgaagcaagaagttatcagtaccagcagcaaggcagaaccaccccagtgcacctccctggcctggtctgctgatggccagactctgtttgctggctacacggacaacctggtgcgagtgtggcaggtgaccattggcacacgctagaagtttatggcagagctttacaaataaaaaaaaaactggcttttctga

SEQ ID NO: 139294 - DNA, 990 bp, Homo sapiens
  Payload ID: 7299
  Gene Symbol: GNB2L1
  Gene Name: guanine nucleotide binding protein (G protein), beta polypeptide 2-like 1
  ENST ID: ENST00000504128
  CDS Start-End: 1-742
gggcaccaccacgaggcgatttgtgggccataccaaggatgtgctgagtgtggccttctcctctgacaaccggcagattgtctctggatctcgagataaaaccatcaagctatggaataccctgggtgtgtgcaaatacactgtccaggatgagagccactcagagtgggtgtcttgtgtccgcttctcgcccaacagcagcaaccctatcatcgtctcctgtggctgggacaagctggtcaaggtatggaacctggctaactgcaagctgaagaccaaccacattggccacacaggctatctgaacacggtgactgtctctccagatggatccctctgtgcttctggaggcaaggatggccaggccatgttatgggatctcaacgaaggcaaacacctttacacgctagatggtggggacatcatcaacgccctgtgcttcagccctaaccgctactggctgtgtgctgccacaggccccagcatcaagatctgggatttagagggaaagatcattgtagatgaactgaagcaagaagttatcagtaccagcagcaaggcagaaccaccccagtgcacctccctggcctggtctgctgatggccaggaatacataaccaccacttacaagctggctgttgaaatgagagcggtttcttacagtctacccggcgttgtggcacatgcctactggaggctgaggtgggaggatctcttgaactgcaggggcttaaggctgtagtgagccaggatcgcacccctgcactccagcctagacaatggagcaaggtggacggatctcaaaaaaagccacttgggctgaatctagtgagactgcagaatttatgccagcctgacctgtcactgtcatttcttccctgcagactctgtttgctggctacacggacaacctggtgcgagtgtggcaggtgaccattggcacacgctagaagtttatggcagagctttacaaataaaaaaaaaactggc

SEQ ID NO: 139295 - DNA, 564 bp, Homo sapiens
  Payload ID: 7299
  Gene Symbol: GNB2L1
  Gene Name: guanine nucleotide binding protein (G protein), beta polypeptide 2-like 1
  ENST ID: ENST00000626067
  CDS Start-End: 103-564
ctttcactgcaaggcggcggcaggagaggttgtggtgctagtttctctaagccatccagtgccatcctcgtcgctgcagcgacacacgctctcgccgccgccatgactgagcagatgacccttcgtggcaccctcaagggccacaacggctgggtaacccagatcgctactaccccgcagttcccggacatgatcctctccgcctctcgagataagaccatcatcatgtggaaactgaccagggatgagaccaactatggaattccacagcgtgctctgcggggtcactcccactttgttagtgatgtggttatctcctcagatggccagtttgccctctcaggctcctgggatggaaccctgcgcctctgggatctcacaacgggcaccaccacgaggcgatttgtgggccataccaaggatgtgctgagtgtggccttctcctctgacaaccggcagattgtctctggatctcgagataaaaccatcaagctatggaataccctgggtgtgtgcaaatacactgtccagtctcattctgtcgcccaggctggagtgcagtag

SEQ ID NO: 139296 - DNA, 1923 bp, Homo sapiens
  Payload ID: 7300
  Gene Symbol: GNB3
  Gene Name: guanine nucleotide binding protein (G protein), beta polypeptide 3
  Uniprot ID: P16520
  ENST ID: ENST00000229264
  CDS Start-End: 406-1428
ccacaataggggcagacctgtccatccttctctgtgggtcccctgtacctttctcccccaacaggatcagacccagaggcagctggttggggtttgtcgagaagaaggattatccagatcagtcctttctaatctcagctcctgcctgtaccctcccatactcaccaaaccctcttccccaccaccctgagctgaggagcacagtttgaggcccccccaaccccccgccggtcggggccaggccaggccaggccagctcctctggcagcagagcctgggcaggtgacgggcgggcgcgggcgtcgcagctgagggagtaaggaggctcccaggaaccggagctggaaacccggccgaggtccagccagagcccaagagccagagtgacccctcgacctgtcagccatgggggagatggagcaactgcgtcaggaagcggagcagctcaagaagcagattgcagatgccaggaaagcctgtgctgacgttactctggcagagctggtgtctggcctagaggtggtgggacgagtccagatgcggacgcggcggacgttaaggggacacctggccaagatttacgccatgcactgggccactgattctaagctgctggtaagtgcctcgcaagatgggaagctgatcgtgtgggacagctacaccaccaacaaggtgcacgccatcccactgcgctcctcctgggtcatgacctgtgcctatgccccatcagggaactttgtggcatgtggggggctggacaacatgtgttccatctacaacctcaaatcccgtgagggcaatgtcaaggtcagccgggagctttctgctcacacaggttatctctcctgctgccgcttcctggatgacaacaatattgtgaccagctcgggggacaccacgtgtgccttgtgggacattgagactgggcagcagaagactgtatttgtgggacacacgggtgactgcatgagcctggctgtgtctcctgacttcaatctcttcatttcgggggcctgtgatgccagtgccaagctctgggatgtgcgagaggggacctgccgtcagactttcactggccacgagtcggacatcaacgccatctgtttcttccccaatggagaggccatctgcacgggctcggatgacgcttcctgccgcttgtttgacctgcgggcagaccaggagctgatctgcttctcccacgagagcatcatctgcggcatcacgtccgtggccttctccctcagtggccgcctactattcgctggctacgacgacttcaactgcaatgtctgggactccatgaagtctgagcgtgtgggcatcctctctggccacgataacagggtgagctgcctgggagtcacagctgacgggatggctgtggccacaggttcctgggacagcttcctcaaaatctggaactgaggaggctggagaaagggaagtggaaggcagtgaacacactcagcagccccctgcccgaccccatctcattcaggtgttctcttctatattccgggtgccattcccactaagctttctcctttgagggcagtggggagcatgggactgtgcctttgggaggcagcatcagggacacaggggcaaagaactgccccatctcctcccatggccttccctccccacagtcctcacagcctctcccttaatgagcaaggacaacctgcccctccccagccctttgcaggcccagcagacttgagtctgaggccccaggccctaggattcctcccccagagccactacctttgtccaggcctgggtggtatagggcgtttggccctgtgactatggctctggcaccactagggtcctggccctcttcttattcatgctttctcctttttctacctttttttctctcctaagacacctgcaataaagtgtagcaccctggta

SEQ ID NO: 139297 - DNA, 1110 bp, Homo sapiens
  Payload ID: 7300
  Gene Symbol: GNB3
  Gene Name: guanine nucleotide binding protein (G protein), beta polypeptide 3
  ENST ID: ENST00000435982
  CDS Start-End: 91-1110
agtaaggaggctcccaggaaccggagctggaaacccggccgaggtccagccagagcccaagagccagagtgacccctcgacctgtcagccatgggggagatggagcaactgcgtcaggaagcggagcagctcaagaagcagattgcagatgccaggaaagcctgtgctgacgttactctggcagagctggtgtctggcctagaggtggtgggacgagtccagatgcggacgcggcggacgttaaggggacacctggccaagatttacgccatgcactgggccactgattctaagctgctggtaagtgcctcgcaagatgggaagctgatcgtgtgggacagctacaccaccaacaaggtgcacgccatcccactgcgctcctcctgggtcatgacctgtgcctatgccccatcagggaactttgtggcatgtggggggctggacaacatgtgttccatctacaacctcaaatcccgtgagggcaatgtcaaggtcagccgggagctttctgctcacacaggttatctctcctgctgccgcttcctggatgacaacaatattgtgaccagctcgggggacaccactgccttgtgggacattgagactgggcagcagaagactgtatttgtgggacacacgggtgactgcatgagcctggctgtgtctcctgacttcaatctcttcatttcgggggcctgtgatgccagtgccaagctctgggatgtgcgagaggggacctgccgtcagactttcactggccacgagtcggacatcaacgccatctgtttcttccccaatggagaggccatctgcacgggctcggatgacgcttcctgccgcttgtttgacctgcgggcagaccaggagctgatctgcttctcccacgagagcatcatctgcggcatcacgtccgtggccttctccctcagtggccgcctactattcgctggctacgacgacttcaactgcaatgtctgggactccatgaagtctgagcgtgtgggcatcctctctggccacgataacagggtgagctgcctgggagtcacagctgacgggatggctgtggccacaggttcctgggacagcttcctcaaaatctggaactga

SEQ ID NO: 139298 - DNA, 962 bp, Homo sapiens
  Payload ID: 7300
  Gene Symbol: GNB3
  Gene Name: guanine nucleotide binding protein (G protein), beta polypeptide 3
  ENST ID: ENST00000541978
  CDS Start-End: 265-962
cttccccccacccctgccagctgatttcatttgcctgacgttgtggttggctctacccttccctgtcaggcccccccaaccccccgccggtcggggccaggccaggccaggccagctcctctggcagcagagcctgggcaggtgacgggcgggcgcgggcgtcgcagctgagggagtaaggaggctcccaggaaccggagctggaaacccggccgaggtccagccagagcccaagagccagagtgacccctcgacctgtcagccatgggggagatggagcaactgcgtcaggaagcggagcagctcaagaagcagattgcagatgccaggaaagcctgtgctgacgttactctggcagagctggtgtctggcctagaggtggtgggacgagtccagatgcggacgcggcggacgttaaggggacacctggccaagatttacgccatgcactgggccactgattctaagctgctggtaagtgcctcgcaagatgggaagctgatcgtgtgggacagctacaccaccaacaaggtgcacgccatcccactgcgctcctcctgggtcatgacctgtgcctatgccccatcagggaactttgtggcatgtggggggctggacaacatgtgttccatctacaacctcaaatcccgtgagggcaatgtcaaggtcagccgggagctttctgctcacacaggttatctctcctgctgccgcttcctggatgacaacaatattgtgaccagctcgggggacaccacgtgtgccttgtgggacattgagactgggcagcagaagactgtatttgtgggacacacgggtgactgcatgagcctggctgtgtctcctgacttcaatctcttcatttcgggggcctgtgatgccagtgccaagctctgggatgtgcgagaggggacctgccgtcagactttcactggccacgagtcggacatcaacgccatctg

SEQ ID NO: 139299 - DNA, 761 bp, Homo sapiens
  Payload ID: 7300
  Gene Symbol: GNB3
  Gene Name: guanine nucleotide binding protein (G protein), beta polypeptide 3
  ENST ID: ENST00000541257
  CDS Start-End: 66-761
tccccaccaccctgagctgaggagcacagtttgaggagccagagtgacccctcgacctgtcagccatgggggagatggagcaactgcgtcaggaagcggagcagctcaagaagcagattgcagatgccaggaaagcctgtgctgacgttactctggcagagctggtgtctggcctagaggtggtgggacgagtccagatgcggacgcggcggacgttaaggggacacctggccaagatttacgccatgcactgggccactgattctaagctgctggtaagtgcctcgcaagatgggaagctgatcgtgtgggacagctacaccaccaacaaggtgcacgccatcccactgcgctcctcctgggtcatgacctgtgcctatgccccatcagggaactttgtggcatgtggggggctggacaacatgtgttccatctacaacctcaaatcccgtgagggcaatgtcaaggtcagccgggagctttctgctcacacaggttatctctcctgctgccgcttcctggatgacaacaatattgtgaccagctcgggggacaccactgccttgtgggacattgagactgggcagcagaagactgtatttgtgggacacacgggtgactgcatgagcctggctgtgtctcctgacttcaatctcttcatttcgggggcctgtgatgccagtgccaagctctgggatgtgcgagaggggacctgccgtcagactttcactggccacgagtcggacatcaacgccatctgt

SEQ ID NO: 139300 - DNA, 590 bp, Homo sapiens
  Payload ID: 7300
  Gene Symbol: GNB3
  Gene Name: guanine nucleotide binding protein (G protein), beta polypeptide 3
  ENST ID: ENST00000539127
  CDS Start-End: 70-180
cggagctggaaacccggccgaggtccagccagagcccaagagccagagtgacccctcgacctgtcagccatgggggagatggagcaactgcgtcaggaagcggagcagctcaagaagcagattgcagatgccaggaaagcctgtgctgacgttactctggcagagcgggacctgctctgagccaggcaccatattggatgcgaaagatgcggacacggttcctattctcatccgtagaacaagagtgaccacagccccctcccagggccttgaagatgaagaagcgatagtactttctggtgtctggcctagaggtggtgggacgagtccagatgcggacgcggcggacgttaaggggacacctggccaagatttacgccatgcactgggccactgattctaagctgctggtaagtgcctcgcaagatgggaagctgatcgtgtgggacagctacaccaccaacaaggtgcacgccatcccactgcgctcctcctgggtcatgacctgtgcctatgccccatcagggaactttgtggcatgtggggggctggacaacatgtgttccatctacaacctcaaatcccgtgag

SEQ ID NO: 139301 - DNA, 796 bp, Homo sapiens
  Payload ID: 7300
  Gene Symbol: GNB3
  Gene Name: guanine nucleotide binding protein (G protein), beta polypeptide 3
  ENST ID: ENST00000537035
  CDS Start-End: 3-796
ccatgggggagatggagcaactgcgtcaggaagcggagcagctcaagaagcagattgcagatgccaggaaagcctgtgctgacgttactctggcagagctggtgtctggcctagaggtggtgggacgagtccagatgcggacgcggcggacgttaaggggacacctggccaagatttacgccatgcactgggccactgattctaagctgctggtaagtgcctcgcaagatgggaagctgatcgtgtgggacagctacaccaccaacaaggtgcacgccatcccactgcgctcctcctgggtcatgacctgtgcctatgccccatcagggaactttgtggcatgtggggggctggacaacatgtgttccatctacaacctcaaatcccgtgagggcaatgtcaaggtcagccgggagctttctgctcacacaggttatctctcctgctgccgcttcctggatgacaacaatattgtgaccagctcgggggacaccacgtgtgccaagctctgggatgtgcgagaggggacctgccgtcagactttcactggccacgagtcggacatcaacgccatctgtttcttccccaatggagaggccatctgcacgggctcggatgacgcttcctgccgcttgtttgacctgcgggcagaccaggagctgatctgcttctcccacgagagcatcatctgcggcatcacgtccgtggccttctccctcagtggccgcctactattcgctggctacgacgacttcaactgcaatgtctgggactccatgaagtctgagcgtgtggg

SEQ ID NO: 139302 - DNA, 6434 bp, Homo sapiens
  Payload ID: 7301
  Gene Symbol: GNB4
  Gene Name: guanine nucleotide binding protein (G protein), beta polypeptide 4
  Uniprot ID: Q9HAV0
  ENST ID: ENST00000232564
  CDS Start-End: 288-1310
ccccggcacgtccccgccgggcccgcgcgcctcgtgcctcgcgcctcgcgcctccagccacgtccccgccccggctccggcgcgccgcggagttggctgctgggaggtgcgggactgggtgtggccggcggctctggtctcggctgtgagctgcgctctccacgccggctccgcgctccaggggctgctgagcgcccagcggacaccggcagcgcgcggtcgacgcgggcctgagctccctccagctgttttcactcattagctcctgaggtaaacaaattgaaaaaatgagcgaactggaacagttgaggcaagaagcagaacaactgcggaatcagattcaggatgctcggaaagcatgtaatgatgcaacgcttgttcagattacatcaaatatggactctgtgggtcgaatacaaatgcgaacaagacgtacactgaggggccacctagctaaaatctatgctatgcattggggatacgattccaggctgctagtcagtgcttctcaagatggaaaattaattatttgggatagctatacaacaaataagatgcatgctattcctttgaggtcctcctgggtgatgacctgtgcttatgctccctctggtaattatgttgcctgtggaggcttggacaacatctgctctatatataacttaaagaccagagagggaaatgtgagagtaagccgagagttgccaggtcacacagggtacttgtcctgctgtcgttttttagatgacagccaaattgttacaagttcaggagatacaacttgtgctttatgggacatcgaaactgcccagcagaccaccacattcactgggcattctggagatgtgatgagtctttctttgagtcctgacatgaggacttttgtttctggtgcttgtgatgcctcttccaaattatgggatattcgagatggaatgtgtagacagtctttcacgggacatgtctcagatatcaatgctgtcagttttttcccaaatggatatgccttcgccactggctctgatgatgccacttgccggctctttgaccttcgtgcagatcaagagttattattgtattctcatgacaatatcatctgtggaatcacttctgtagccttctcaaaaagtgggcgtctcttgttggctggttacgatgactttaattgtaatgtatgggacacgctaaaaggagatcgtgcaggtgtccttgctggtcatgacaaccgtgtgagctgcttaggtgtaactgatgatggcatggctgtggcaacaggctcttgggacagttttcttagaatctggaattaacagtgtcatacatatttgttctccattgatatatctggagaaatcaatgctacagcctatagctgtgaaaaaattctaccttatatttgcaggtgaagatttttctattagattatctacaaaaacaagctttcagtaaactaccaaaaaaaaagtgggggtggaggaaaaaaggcaaaggcgccttctgagatcaaaaggaccagtgtattaatttgaggggttgggttattttaaccttggtgaattgttgtgtgtactcagagtgtattttctttgtgtagaacagaatgtacacattatagcagctcgccattgtgtttgcattttttaagaagtacatttttaactttgtatacacaagaaatgtcatatttttgagttttgtaatggaagaaccaggcacagaaacagacagaaatgatactgtatgtgtgtgtatttatgtctgaagaaagtccccttgaattctgatatctctttgaatctaagagatcctgatagcttcatgtttaagagcattgacaggtggggcacctctgaggggagttcattgtttctcatgcatcatttgccatatactattaatcaaagtgcttgctttcagtcctttgaggggacagataatctgaaggccagagattagagatttcactgatattttggacatacataagaaacatcattataattaataaaaagtaggtaatagcatataaatggttcttgacattttaaaagcctggttatgatcagttgacactttgagtacccccctaaatagctggactttccttttcatttcatatttggaactaagtttgtagcgtatactcatctttcagaagtttggtaaacattgggattgtccctgcatctgaacatctttcccagtgctatcagtatacatctagagaggaaatgcaatgtgacagtgttacatttggagagaagtgtgaaatctaaccaatcgctagcacatatttgttgtaatacggtggtttatttcatgtttgcatactataaaatctgaattgatgtgaaatatctgtgcctttaaatttcttaaacctttaagctttttgttctgttttgcaacattttgtagtatttcttcccttccttagcacaaaatactggtttctaagtggttttgcttcaaaggatgtctagatgtaagtgattccacttaaagccaaaataaaaattcctaaagcagttcttaaaggagttagagagctatattaaacagtttttctgtggtataataatgtgtctcttactagaagtcccccacgaccaagttaaagatacttttcctgttggattctcttttacaaataagtctaaatgactgataatagaagattgttagtcttgcttgatggtaaagtcttggattattctgatatatagacgtgcattgttttgtaacttagttacttttcagataggtctgtgttaacttttgaacatgtgtaacttaacctaaatactcccaaactttacctctaaatttttgtttttatgttgtgaatgtgctaatatgtgcatcaactgtaaagatgtatcagttttattaaaatcagttgacaattagaataataaagtggataaaggcaaattaagatataggaccaaaacagaatattgtagatggcagttatgaatgtatatttatattttgattaagatttctattaactttttggctgggcagagtggcttacacctataatcccagcaatttgggaggccaaggtgggcagatcacttgaggtcaggagttcgcgaccagcctacccaacatggtgaaaccccatctcttctaaaaatacaaacattagccgggcgtggtggcacattcctgtaatcccagctactcgggaggctgaggcaggagattcgcctgaacccgggaggcagaggttgcagtgagccgagattgtgccactgcactccagcctaggcgacagagtgagactccatctcaaattggaaaaaaaaaaaattatatgaacttttgctattaatgtttatttgtaggctatttatatcacttcataaagaacagttctttgagaaaagaataaaggaatgtattcatttccagaaaaagagggttggggaaagtttgccatgtaggttagtcagaagaaagcaattctattatgcataaaaataaccttaaatatgtaagagagtatctcctctacttaaaagttattatagtagtcacaggcatacagaccacaggaattctatggtcttaacatattttaaaattacatttattttaatgttcttaaagtttatgaagaggagtttaaagcaattcccataattaaatatttactcggcaactaaaaactatttaacacttgtggttaattatacacataaacaaatggcgacagagtagcctcactaccacaattacttcatggttacacctttgctttctaataataggggctccagttgctaaatatatttgtttacttacagtttaagttgagctgattgttgaattctgttattgttcctgaattcaatgagtatataatttgtagagatgttgaatagtttggatcttagtttttaaggctgaaaaatctggctggatttagtttttaaaaatttgcatcatcaagaatattgcagttaatgttcctttttttttttttttaaagacagagtctcactctgtcacccaggctggagtgtacagtggtgtgattttggctcattgcaacctcaacctctgcctcctgggttcaagcaattcttgtgcctcagcctcccaagtagctgggactataggcatgtgccaccatgcccggctaatttttgtatttttagtagagatggggtttcaccatcttggccagtctgatctcgtactcctggcctcaagtgatccaccagcctcagcctcccaaagtgctgggattacagacgtgagccaccgtgcccagccaggtttccttctttaccttctaagaaacatttaaacataatgtgcctgagaaggttaatttgttgactctgtagcatgtcaagaagagtagttttttgagatctggcaagaatattttagagatacatattcttttctaagtatgttatcaccctgtggtgttgagcatatcgtcccaaaaacctgcttcagcaagcagttcttggccaggcatggtggctcacacctgtaatcccagcactttgggaggccgaggcaggtggatcacgaggtcaggagttcaagaccagcctggccaagatggtgaaaccccatctctactaaaaatacaaaaattagccgggcgtggaggtgggcgcctgtcagctactcgtgaggctgaggcagagaattacttgaactcaggaggtggaggttttggtgagctgagatggcgccactgcactccaacccgagcgacagagcaagattccgtcccaaaaagaaaaagcagtttttgccatcagcaaggatatctcctccactttaatggacaggcctcatttttggcagctatgctgtttgagatgtagactgaatatccaaggttcctccctagctcaagtttttacttgtgattacacacaccacattgaattccgtcttcagaggcaaagatttgggcttcatatctcaacagcaaaagggcctgttcagcaattcccttcattttagactcatatgacctcagcgattgcatgatagtagtaaactagtctcctggaaataatggatgtaggtgcttctagaatatgttacagaatttcagacttaacctattaatagataaatggatcttgacttaaggtgacaaaatgaaacttttattattgcttaaaaatgctgtgccaatattgtataactagctcctctaatacttttggtattttggatttaataataagaccttaagcattttaaatgtgaacatgttcagggaagtatgctttgatgtaaatgtctcagatctaagttgtaacacaattgaatacttgtggcttattcttggtttaacttaggaaaactggttaaacaatcccccatttgggcctgtcatcattttaatagtgacgatgttctttctgaaatcttcagggtcggagtcaggctgaatttttttaaaaattaaatattatgttcaaattctttcctttttgccattgtgaaaaagcaaaattttaaatgatttctcctgttagaatttttaaaaatacccacaggttggaccatctttcttatgggttgcacaatgaatttatattttaaattagattaagtagaatgtgaagtacatttcagatttactagttttctttccattgttcattttgggttgcctcagattcagtgtatattttaaaatattggttacataataggtactcaatgaaatggtttatagtagaatatctaagctagcactttattttaaaaagtaacttattaattaatcacacattgatggtacaccttgtatttagcaaatgtttgcatgttgataaaatctcctatgtcttctttcttaaatccagttgctgattttgtaaaatacagttgtgataaagcagcattacgggggggaaaaagctatattccaactggtgttaaatgtattcaacaaaatcttacatcatacagtatttatttcttaattaatagaacttcagtgatatacttggtagatatctcaagccttttgtcttttacacaatggtgctctatcctattgttttcttttcaaagaagcatctgaacacttgcatttctattttcctatccaaaggcatccacatctaagtgtgtttttaaagttgattaaaattatttttctgttaaagcattctgaaagtgtttgtctttacctagaatgatttgtacacactcgtggtcaactgaacatgaatgtcagtagtagtctaattatgggaagggtaaacgtgttagattaaggctcttaaagctctaaaccatataaactatggacttgtatcatgatttaactgttcttagatctttcttacacagtgattcattcctctatttgtacagtggctttatgaaatgttgtgaattgatactgtaatcaataaagtgcttttaaccag

SEQ ID NO: 139303 - DNA, 1360 bp, Homo sapiens
  Payload ID: 7301
  Gene Symbol: GNB4
  Gene Name: guanine nucleotide binding protein (G protein), beta polypeptide 4
  Uniprot ID: Q9HAV0
  ENST ID: ENST00000468623
  CDS Start-End: 212-1234
agctgccacgcgggaactggccccacgaccgccggcgcaggcacttcccgggcggtccagaccgctcgccccggggagcgaggaacggtcggcggtccaagtcctgcagacccccctggtttctcgtcactccccgaggcctccttccaggaactcagagcacgagcccctgttttcactcattagctcctgaggtaaacaaattgaaaaaatgagcgaactggaacagttgaggcaagaagcagaacaactgcggaatcagattcaggatgctcggaaagcatgtaatgatgcaacgcttgttcagattacatcaaatatggactctgtgggtcgaatacaaatgcgaacaagacgtacactgaggggccacctagctaaaatctatgctatgcattggggatacgattccaggctgctagtcagtgcttctcaagatggaaaattaattatttgggatagctatacaacaaataagatgcatgctattcctttgaggtcctcctgggtgatgacctgtgcttatgctccctctggtaattatgttgcctgtggaggcttggacaacatctgctctatatataacttaaagaccagagagggaaatgtgagagtaagccgagagttgccaggtcacacagggtacttgtcctgctgtcgttttttagatgacagccaaattgttacaagttcaggagatacaacttgtgctttatgggacatcgaaactgcccagcagaccaccacattcactgggcattctggagatgtgatgagtctttctttgagtcctgacatgaggacttttgtttctggtgcttgtgatgcctcttccaaattatgggatattcgagatggaatgtgtagacagtctttcacgggacatgtctcagatatcaatgctgtcagttttttcccaaatggatatgccttcgccactggctctgatgatgccacttgccggctctttgaccttcgtgcagatcaagagttattattgtattctcatgacaatatcatctgtggaatcacttctgtagccttctcaaaaagtgggcgtctcttgttggctggttacgatgactttaattgtaatgtatgggacacgctaaaaggagatcgtgcaggtgtccttgctggtcatgacaaccgtgtgagctgcttaggtgtaactgatgatggcatggctgtggcaacaggctcttgggacagttttcttagaatctggaattaacagtgtcatacatatttgttctccattgatatatctggagaaatcaatgctacagcctatagctgtgaaaaaattctaccttatatttgcaggtgaagatttttctattagattatctacaaaaac

SEQ ID NO: 139304 - DNA, 937 bp, Homo sapiens
  Payload ID: 7301
  Gene Symbol: GNB4
  Gene Name: guanine nucleotide binding protein (G protein), beta polypeptide 4
  ENST ID: ENST00000466899
  CDS Start-End: 1-496
attaattatttgggatagctatacaacaaataagatgcatgctattcctttgaggtcctcctgggtgatgacctgtgcttatgctccctctggtaattatgttgcctgtggaggcttggacaacatctgctctatatataacttaaagaccagagagggaaatgtgagagtaagccgagagttgccaggtcacacagggtacttgtcctgctgtcgttttttagatgacagccaaattgttacaagttcaggagatacaacttgtgctttatgggacatcgaaactgcccagcagaccaccacattcactgggcattctggagatgtgatgagtctttctttgagtcctgacatgaggacttttgtttctggtgcttgtgatgcctcttccaaattatgggatattcgagatggaatgtgtagacagtctttcacgggacatgtctcagatatcaatgctgtcagtgtgtccttgctggtcatgacaaccgtgtgagctgcttaggtgtaactgatgatggcatggctgtggcaacaggctcttgggacagttttcttagaatctggaattaacagtgtcatacatatttgttctccattgatatatctggagaaatcaatgctacagcctatagctgtgaaaaaattctaccttatatttgcaggtgaagatttttctattagattatctacaaaaacaagctttcagtaaactaccaaaaaaaaagtgggggtggaggaaaaaaggcaaaggcgccttctgagatcaaaaggaccagtgtattaatttgaggggttgggttattttaaccttggtgaattgttgtgtgtactcagagtgtattttctttgtgtagaacagaatgtacacattatagcagctcgccattgtgtttgcattttttaagaagtacatttttaactttgtatacacaag

SEQ ID NO: 139305 - DNA, 571 bp, Homo sapiens
  Payload ID: 7301
  Gene Symbol: GNB4
  Gene Name: guanine nucleotide binding protein (G protein), beta polypeptide 4
  ENST ID: ENST00000497513
  CDS Start-End: 333-571
ctgggtgtggccggcggctctggtctcggctgtgagctgcgctctccacgccggctccgcgctccaggggctgctgagcgcccagcggacaccggcagcgcgcggtcgacgcgggcctgagctccctccagagatggatacctgccatgtagcccaggctggtcttgaactcctggcctcaagtgatctgcccacctcagcctcccaaagtgctgggattatgggcatgagccactgcgcctggcctatcctgcctttgtgccaggcagtcctcctcatgtgtattacagctgttttcactcattagctcctgaggtaaacaaattgaaaaaatgagcgaactggaacagttgaggcaagaagcagaacaactgcggaatcagattcaggatgctcggaaagcatgtaatgatgcaacgcttgttcagattacatcaaatatggactctgtgggtcgaatacaaatgcgaacaagacgtacactgaggggccacctagctaaaatctatgctatgcattggggatacgattccaggctgctagtcagtgcttctcaagatggaaaattaat

SEQ ID NO: 139306 - DNA, 1491 bp, Homo sapiens
  Payload ID: 7302
  Gene Symbol: GNG10
  Gene Name: guanine nucleotide binding protein (G protein), gamma 10
  Uniprot ID: P50151
  ENST ID: ENST00000374293
  CDS Start-End: 301-507
gattcctgctcatcctaggggcgccagcttcgctggaggacgccgcgctctgcgggtccccgcctcggttccaggcccagctgcaggtgccacccaggtttcaggcgctgaggagcggagagcactgccagctcgctggggtccccgctgtctctggcaagcggctccgcgccgggtgggctggggcggcggggcgggcgcagctgcttccccgccccggggcggcacccgcgctcggggctggcggctcctccccgcccggccgggcccagcagcccctaggagcccagcgccgccgccatgtcctccggggctagcgcgagcgccctgcagcgcttggtagagcagctcaagttggaggctggcgtggagaggatcaaggtctctcaggcagctgcagagcttcaacagtactgtatgcagaatgcctgcaaggatgccctgctggtgggtgttccagctggaagtaaccccttccgggagcctagatcctgtgctttactctgaagactctaggagagaagtttgctgaggaatgccttcaagcacaaagtgatgaatgactgccttcaagtctcaagaaaacacttttccctaacttttagagatatttcagccctttcctgtggcctggtcctatagccaaaatcacagatattcatgagtttctacttgagtgagaaaactgggtgaaggaatagaattttaaatagtaataactgcttgttttttttgtgcaagtacttttatacataagataaacaaaaaccttaccaccaaacataccaaaatgcacctctttcataagtgagttactaagatttctatacctggaatatcatgtatgtttcatttactggatgtttacattttaggaaggaaaatagttttgtttatttaaacaactgaatacttataaactgttgttcctggaagttatttattccataaaaaatttgttcttttgtcatgaatttataattcctaaatgaagaccagaaagtacaaattgctgggaggaagaataggctttattaatcaactgatgtcttgatttttctaaatgggaagattgctttatttttaacactaattatgggagcagattcttagcaaacttctttggaaaagttaatgttatgatgtgcattaggctgccccatcgtgtatataaatgaagcagatttgatttttgtattcttacgtttctctgctttgtagttgtggctgtacttaaagaaatacagaatttcatatatttaaaaatgtttaaaatgtgacccacagaacattgtaaatgattaaaaactaacatgaaaatattacaacctaaaagaattcttaacttcacaagtgttttacttcgacgatgtgcctttgatttaatttgggacacttttttagaaggatacattattcgtgtttgcaacggtctttgaagagcttggaaataaaatttctgcttaattaatcatttttctatgacagcaa

SEQ ID NO: 139307 - DNA, 3055 bp, Homo sapiens
  Payload ID: 7303
  Gene Symbol: GNG11
  Gene Name: guanine nucleotide binding protein (G protein), gamma 11
  Uniprot ID: P61952
  ENST ID: ENST00000248564
  CDS Start-End: 440-661
gcgcggagaacacaaagtaaaacttctgctgttcccagtcctgcagccccagcccagccgtcccccgcgggcgtggcaggtcctgagtcagggcctgtccgtggccagcatccctgctgggcgattgagcagcgggaagctgcttggacccagtctcaaacttaaccctcatctagcacccgggcaggcctcctgggttgcagggacttgagaaaaggcagagttctcaggtcctaggaagctggggcacgctggcgtgacaagcgtcccggagaaagccaagccctcggggagctggggaccgcagcagggctgcagtcacatcctgcgcgggtgggcggcgggccaggccttcagttgtttcgggacgcgccgagcttcgccgctcttccagcggctccgctgccagagctagcccgagcccggttctggggcgaaaatgcctgcccttcacatcgaagatttgccagagaaggaaaaactgaaaatggaagttgagcagcttcgcaaagaagtgaagttgcagagacaacaagtgtctaaatgttctgaagaaataaagaactatattgaagaacgttctggagaggatcctctagtaaagggaattccagaagacaagaacccctttaaagaaaaaggcagctgtgttatttcataaataacttgggagaaactgcatcctaagtggaagaactagtttgttttagttttcccagataaaaccaacatgctttttaaggaaggaagaatgaaattaaaaggagactttcttaagcaccatatagatagggttatgtataaaagcatatgtgctactcatctttgctcactatgcagtcttttttaagagagcagagagtatcagatgtacaattatggaaataagaacattacttgagcatgacacttctttcagtatattgcttgatgcttcaaataaagttttgtcttgggaagatgagtgttggtgatttaagaagacacttttcatgcattaacttttatatttctccccgtaatcttttgggtgtggagtatgattgggtttggaatatgattcagaaggttaggtggttcgacagatcacatctccaaaccctgcgtcaatggtttagagtgctgagttctgacctctggaacgtgtttgatctaaccttaactattaagaaactgagcaggtagaattcctataacattgacagaagtcagattatctgagtcaggaacaaggccaagccacatctatgttagtacttccctagtttatcatcatttagatcttcttaatagtgttcctgtagtagtagccttgaagaaaatactgagttggggttcaggaagagtgccctgcctctctgccgtgtagtggccaggccagccctggctttgagagccagtacttattcctgcacagagctacatctcccatgtgctctccaggtcttgggcatggcactactccagttctgtggcattggtgcagacacttggacctctgcactcatgcttgccagcattttccagcaggcctgggccaaacatgcctttttttcttctcctccaaaggaaccagtgaatctttgcccactttaaagattagttggtctttttcttactgatttgtaggaattcttcatatattctggccatttattcgtgtttggtgatatgtgttgcgaataccttctcccagtctgtggcttaccttttcacagtgaccttcccttcagtggttttatcctgcagggcaacacgtcagagtataactcctgctcaagttcataacaaaggtacctgaagcccaaacctcacaaaaagggacctttctttctcaccttgagcattctcccgcttcttctccgtcttttgggtcaaaattgctccaagtttgagccaaaagaaaaacgtggaaaaacccttgctggttagctctagctcaaatggacttagtcattaacttgacctgcaattttcaatgtggcaccagaagccaatgtttctccttgactagctcttttctcccacttacacatgtaggtataccttactatcaagcgagagaggcgcctgtaacctgtagcagctttctaaagtatatcagcatcctcgttctgaaattcctttcctttccctctctgggaaagaacagaataccccaggcttttgaaaaatagtttacacagaccaaaagcagaaactatttccttcagtttcctgacactgtccaagtgatgacatcaattggcattactgagagcccagggataattttagcccaaaactactactcctaggaaggagtagtatgatctactactcttaggaaggatttaggaatagtaaaggtgtatttcttccaaacagcatagaactattagtactattagtcatttaacatttaacatggcatgggattttagagctttggtgcctgtaaagttttacttctattagctgtttcatttctttgcacttataaagttttcttctgttgcctatgaaagcaaacatttattccggttactggcaaggcagtttaaatcacctgcttctttcatgaaaggccaagacaatacatttattccctaacttgttgggagttgcgattacaagtctatatcctgatttctattagcacattcagctatccatttgtgtacactcccaagtcctagcttttgctcttcatgtctctttcaaccatatgatcaatcagttggacgacttctggtttttcctgaataaatatctaatcttataggtgcttctattaaatataattctgtttctttttcttaccatttatcattataacccagccaacatgtagaagtgcaataaaaatattttaattttcaactgttcaactgctaaaattattagcttgtaattaaaaaagaaaaaatacatccactatatatttagatatattgtaaatgtaacctttggtgactgataatttgttaagtagaatttaaattatgtatccaatttattcaaagtgtatagttgtgtaattatttactatttgattaaaaatagttatcatgca

SEQ ID NO: 139308 - DNA, 4404 bp, Homo sapiens
  Payload ID: 7304
  Gene Symbol: GNG12
  Gene Name: guanine nucleotide binding protein (G protein), gamma 12
  Uniprot ID: Q9UBI6
  ENST ID: ENST00000370982
  CDS Start-End: 201-419
agcgaggcggagccggcgcccggaggagcaagaggaggaggaggaggagaggtcggagccgtctccaggagcccttagagaccgagtcccggcggcgacggcggggcagcgcaccggcaggcggattcattccacttaaaacctgaaaacattggaccacacaaagtcttactgatttcaggtaaaaacaataattgaagatgtccagcaaaacagcaagcaccaacaatatagcccaggcaaggagaactgtgcagcagttaagattagaagcctccattgaaagaataaaggtttcgaaggcatcagcggacctcatgtcctactgtgaggaacatgccaggagtgaccctttgctgataggaataccaacttcagaaaaccctttcaaggataaaaaaacttgcatcatcttatagtggaatagagaaacagctcctcgcctcttcccaacaacgcaaattatgagcagctccttgaagagatttaccttcagcttatttggtaaccactgctaataactaaaatgttctcagcttggaataatggactctgaagtctctattttccaagttgtcctttctcttaaaataccctttactgatttaatacagaataacaatcttattttccacttggtaactatggctttatgttgggttactgtttaaggaaagttgatctgggcctttttaaaaacataattatatactttagaaatacaagggattccgatatgtcaggacctaaatggcctaagcacctgtcaaattaaaattccaaaattcattgaaatcctaaagccttgatattatattctttataaggcgtgtgccagcctgtatagtatataagagagaggggtgtttgtgtgtatatatatatgcctttgtgtatacacttatcaaagctattttcttatgaaaacgtccctctctccataccatcagtttctcagttccagaagttatacctttattttgagctgtgtataggtagaataaaaaattcctttcatatcgttattgtacaaaaagtaaagagtatcctaaagattgtattcattgtaatcaagtaatgcaatcatctctcctctcttgaaatcttgctggacctcttaggctacaataaactgtaccaaactaaactgacagtccttcgataatatgaaacattaatttacaaggacccgttagggcttcaatgatgctgagtctggaaaaggggaggagacccttgggaggactccaggcagctgtgctcccagggctcatgttctctactggattagggataggcacctctgaaatctccaccctgatgattggaatgaaacggagtgaacatgagcccagctgagagaggagcaggaatgtgtgaaaaacagctgctctccttgtcccagctttgtgattgagccctctgtcttgctctctctgccttccctgtgtctttcttctcttaccagagcatctgtttgcagaggtaacattaccttccccagccacaggtatgtggaatacggtgaggaaaaaaaaaattaaaaaaaaaatgcaagctgtcaggatgcttaagctcttttcagacatctgcagtttcatccctaccttgttcacataccatccaagaggcacataggctacccaagagagccttggattcagtggtacactccttgggcccaagggctttagcagctggatatggggttccttgattttcctctgggcccaaatatagccctcacactcttggaatttccaggtatgggggtagccccaaaaggaggaatctcctatggccaataaggtatcttgactttatcaaagtagaagagagggtcacttcggagtcaaatcatacactaggcctttgatgctttaattcttcttcagttcattaaaagtaactactaaggaaaggttaaaaacttcccctcaaaaaggaatcaaccccaggaagtaattatttacaacgattttcccaaattttgtacaatctgtcctggaaagcaaaccccttttaaaatctaatgtctgggctttgagtattagctcatttagggtggacaaatgcattactgttttcaaactgctcacatttattcagtatttctccaagttgctatctactcagccttatgaatgcccctcgcttttctaaggccatgtgaaaatcacggcactgcccttagccttgtgtcatctgctttttcgttctgcgatatgcccagttcccaaatcaattataggtacctgtttaggagagaggaagattttacctctcaaagggtgagatttgaaatttacactaaaaagacaactttacatttaatgcttcacttaatgagacattcttttttttataagtctatttttctactcagtttcagaacactaatctgattttcactctgatttttaacgtttctttaaatatttataatgtagcttctttcaaaatattttcatgaaaaattacttttattataccattatgtgcatgttattggtagcaggcatagtttattatttagtactgaaacatgctcttttacctaacagtaaacaagtatgttttgatatatatctgttaatatgcttatagtggtaagaaatggacttgaggtcccaggagatttcattttattcaccctggtcagatacaataaaggctatgagtataaatacataacttcctaaccaggtgtagggcatgttcatgaatatcaaatcttttgatgctggacccaagagaggaaaagttgtagctaaatgttgatttacttataactagacgtctatgtgagaaaatatatgtatacatatatatgatatgcagaagtcactttttttatcaggctttattctccttacaaagccacagtttaactgtctgcaacagttggtttatgttaatgatagacaaatacccagtgtttgttactttttccaactaccactgtaatgataatctttctcacgtatatacatgcaacttcttggcttcatttccatgaagctgtttcaatatattcagtatactttgtccttaatgctgcttctgttaacagtgatctctttctttttttcattcttatatcttcattagttcatcataaatctgtccagttgaggcctcaggaccacggcatgatttcatgactccgaagtattttacagaaacattttttaaataagggaaatattttatataccagatggttcacaagtgatggctcatagctagtttttttttttcttctaaaaaatgtcaggtttttaaaatcatttaccttattaaaatgaaaagtgccatacttaacttttaaaggaaagacctgacttgctttttctctatttagactgtttttgtactttactaatctttaaactatcaggaaaaaaaccaaaactttataccaatgatttagtaattttgaggcatagggtagcttacgtagtggaggatgtgccaaatattctcttcaaatgccaccttctcaatttataactaaaatagtgttatctgactaattcctctgaattttgatgtaagatctatataggcccccaaaatgatcgtagtacatgccagtcatttctcagtgaaataaatacaataccagagtacattatgggttttattgctttcttttatggtagacctgttaatggggaaaaaatacatcaaatcaaatagaatcttatatctgtatgttaaaatagagcacttacctgaagtcagtggcctggatcatagccctggatcatttcccagtctgtcctgtgctgtgtgaccttggacaaggcgcttcatctctctgggcctctatttctccatttgtaaaacaagtggctgcagtagatgatggctgagagcccttcctgttcccagatgccttggtccaaagaccccacccctctgctggtcctgccaacgtgttggtgctataagctgcttcagatataaaattggtttatctataatgtttgttcatttaatagcttctaaaaggcctttttgttatacagtgctttttttctagttttatggacttggttactgtaataatgtcttgtttttagccatgtaactacaaacagatattctcttgatgtcttagtaaatttgcatttgatatatcattgatgagattttgttgttatgtaatattctttggctacgcatctgtccagcatcttattaaccataatactgtgatcattatttggaaatatgtcctatggaaagaataaaagcatgtacttcacagctagcatgttcacagatttgaaagaagtttcattaaaagcaccattgctttctgtactgcgtcagtgcctcattgtatcatcctacttgtgttttgctcaataaatgaataaaagaccatttctcttc

SEQ ID NO: 139309 - DNA, 984 bp, Homo sapiens
  Payload ID: 7305
  Gene Symbol: GNG13
  Gene Name: guanine nucleotide binding protein (G protein), gamma 13
  Uniprot ID: Q9P2W3
  ENST ID: ENST00000248150
  CDS Start-End: 103-306
cttggccctcgctctcactcgcggtcgcctggccgttgtcattgtccctccgctgtcaccttttcaagccccaggctggctgcttcagaagcccctgaccccatggaggagtgggacgtgccacagatgaagaaagaggtggagagcctcaagtaccagctggccttccagcgggagatggcgtccaagaccatccccgagctgctgaagtggatcgaggacgggatccccaaggaccccttcctgaaccccgacctgatgaagaacaacccatgggtggaaaagggcaaatgcaccatcctgtgagccccgcacccggcccctctcacaccatcctgtgagaccacgcccggccccactcccaccatcttgtaagactgtgcccagccccactcactccatcctgtgagtcccactcccagccccactcccaccatcctgtgagcccatgcccggccccactcacaccaacctgtgagccccactcccggccccactcactccatcttgtaagactatgcccagccccattcactccatcctgtgagtcccactcccagccccactcccaccatcctgtgagccccacttccagccccactcccaccatcctgtgagccccactcccagccccactcccaccatcctgtgagccccactcccggccccactcactccatcctgtgagccccactcccagccccactcacaccaacctgtgagccccactcccggccccactcacaacatcttgtaagactgtgcccggccccattcactccatcctgtgagaccacgcccggccccactcactctatcctgtgagaccacgcctggccccactcccaccatcctgtgagccccactcctggccccactcacaccatcctatgagcccacgcccggccccactcccaccatcctgtgaaccccactccactcgcacgtgattacagtctgtaaaggtgtgactttataaagaca

SEQ ID NO: 139310 - DNA, 3729 bp, Homo sapiens
  Payload ID: 7306
  Gene Symbol: GNG2
  Gene Name: guanine nucleotide binding protein (G protein), gamma 2
  Uniprot ID: P59768
  ENST ID: ENST00000335281
  CDS Start-End: 407-622
aacaaagggagaagggggattaaagtcaaatcactgtcagcagcccaggagcagacaaaaccaccagagtaagccctgaaatggaaatgagagggaaaagaagcaagccgctaacagctaccaagaagaggaggaagtgggagatgcgctgcttcctgtagaaagaacgttgattgaagacaaagctgggtggggactagtccctgggctgcagccgctgctacacatactcacaacgctgccgccgcgctccgtgggcaactcctactactgctgggctgggctgggctgggctgggctgcgccggagctcgcctgcacagatcagctccggagaggggaaaaccacgctcctcggaccaagcctcgggagctaagtgtttctgaaagatctatccagcactccgatggccagcaacaacaccgccagcatagcacaagccaggaagctggtagagcagcttaagatggaagccaatatcgacaggataaaggtgtccaaggcagctgcagatttgatggcctactgtgaagcacatgccaaggaagaccccctcctgacccctgttccggcttcagaaaacccgtttagggagaagaagtttttctgtgccatcctttaagtctttgagaggggcctgaagagcctccgggctcctgggacattgatgtagagtttttagtgaagtgggcacctttctagtccacggcatttgaagagagcgaggagaaccattctggaaactctaggctatgcatgtttaaagatctggtcccctttatgagaatgcaagccgatccacatcctgacttaagagatctgattctgacgaactgcctggaggaggggaatatataaaaataaaattggtgtcacttcttttctgctatcccccagccccccccccaaaatcctcatgtttctgcttcatattttgaaaaataacaattaaaacagacagctgtactgaggtaagatatgtgtgaccttcttggaatgaatattgtctttagaataccctttgataagctgagctgtcccgtgtagatgcaattcggtttaatggcattgatgtatagtcactgtgcctttctttttctttcttccttctcctctacccctccttccacccctccccattagagtagtgtggagataaggctggactggtctatcagattgaactccaagaatgatcacacaaaatgtttagggagatgttccccgtggtgtatcctcatggtaacaacgacaaaaaatgccggttgtctgtgttctcttttcactattcctaacatgtgtacatgatagctttgattctgcaagtaaaagtaaatcctgtgttgtgactggtgctttcatatatttgtgacaatttttgagtaatattgcatgaaaatgtccctatgttacatccattcagaagttttgttgttttactctaaagctgggaaaggaaatgagagggaaaagaccccggagagggaagaaaatctcagtattttgaaaattgagattacttcagagccttagccacacctaaaatacctcctagttaatagtggtataaatgcctcttcaatacgttttccagaatccaaagcattttggtttatccaggacccagggcagcacagctgtcaccaagcaggagagttaaggattcaccatgagctgggaaatgcttttgccatgagtatgagcaaattccctctttccctgaatcatggacattctagattaaaagaacatttttttgtgctcttaacaagaaaaccatggccctcctttgttcaagtatcagaagaaataaacccacagctccagagaaggtgaccattctcagaactccagctattcactctccagggagaaggacctcaaatcgccactctttgggcggcaggtgcggtccccacggccggctctacgaggaagagttctggctcttttgtccactgagatggtcttggtttttcacttaacaaattttttaatggaatctttgtttttgttctccatcttgtttgttagagtctctcggcctttatttacaaattccttgcaactagagcgctccttccccaagatatggtagtgagagtaatttttcattgtagctgtagtctccatcagtaacagcaggccctggaagacttgatcacctttttctgtgtcattttcagtcaaagagggcctctcttacatcttgtttgctttcaaatccccaaatatcatctccatctcccaattaattttattgtctctttcctctctattcgctttctcctgttttttttttaaaaaaaaagcatgaaaaaggaagagaaaaagtttgatatgccaaggacagattttgaaacagacttggtaaatgttttccttagctccttcatgggcatgctggtgaaagaataaatacatccaattaaagctcatgctggggtcggggagaagaggatactgaaacatttgtgaaatgtatgaatgcacttctgtaaccagatacttctgttcttctgttcaaattgtggggtttttgttacagttaggacgcccatgaagatttaggggtgaaaaaaacagcagagtatttattaaactacagcattgtacaattagcttagtaacactatggaataagctaaaacatatcacagtttttacatgggccaaaacatgaattgagtatgtggtcacatgaaaacacggatgaatgaataaaacactctttggtggtgactgaggcatcattagaaggcccagacgatttccactattcacagcatttccttttctcagaaggactctttatatttccatgtaaatctagatctttggagcaattaagatggaattacaatttctagggagcattttaaggaaaatgttttggctttttcataattttatgtcttacagtatggaattataatacgaaaatctttatatgagttttggcttcttggtatttgtacttattcaggggaaaaagtctttcgattacttatgcctctatagagcttaatttcttgagaaattcaacagtcattttcaccagcataattttatcttaaggaataactaataggaaaagtcagcttaattatttaaggccctagtttctacatataatatattcgatagaaatgaaaatctgccgtggaattaactaataagtagtaacaataaacttcatatttagaatgcaaagtctataaagaataattttacatgatcctcaatatcaactccagtttaaaaagtgttatttttaaaacatttgaaaccaagtactgtttaatttcaatcagaagatgcaaatacatactttgatctatgtttgattttgctaataatatttgaaggagattgcctaccaaggacaaaacaataaatttaaaaatcaaacgatttctccatacgctcatagtcacatatggaattttgagaaaataaagcatgctgtctttaggaatttttatacttctttgtctttcttccttaatatttgcttctagctgctcttggcaatgatgaattgttatgtatgcattaatgttttgcagcccaaaagttgttcacatttttcctatataagatctgtggagtgtgtgtttcaaagagagaactacagaaatgttaaagcaggaaaacctgaatgtgatgtgcacattttcatcccacatggacaatgtatgtgttttaataaatggaattttcagattc

SEQ ID NO: 139311 - DNA, 479 bp, Homo sapiens
  Payload ID: 7306
  Gene Symbol: GNG2
  Gene Name: guanine nucleotide binding protein (G protein), gamma 2
  ENST ID: ENST00000553560
  CDS Start-End: 324-479
acaaacgcccgttggcatcaagacaggcctgtgaactggcatccccaggcaggctgcagactgggagggtgggagtgagcatgcagctgaccccaccatgaggcacagggcgtcgccttctcccctcagcacagaggagaggtgacgaatgccacttggtctctgcagcgtctgtagagggaagtctgtaagcgggagtgtcaaccccaattggcagattctctgacacttcaagtctgcaaaggaaaagcagccagatctgccagtgagcctcaggctttaggaactgaagagtgtttctgaaagatctatccagcactccgatggccagcaacaacaccgccagcatagcacaagccaggaagctggtagagcagcttaagatggaagccaatatcgacaggataaagagcgccctctgctggtcagttctcagaaggcgccacatcatcgcgtctttcgtctgcagatgctctttg

SEQ ID NO: 139312 - DNA, 573 bp, Homo sapiens
  Payload ID: 7306
  Gene Symbol: GNG2
  Gene Name: guanine nucleotide binding protein (G protein), gamma 2
  ENST ID: ENST00000557376
  CDS Start-End: 151-483
atgcagagccagcaagagcggatggctgaagaattacacgcagtggaaaagcagcaccgtggagctgggtgattcctgagcccaacctgtgcctctggtctaggggcatgcaggggaaattgcaacctccaatggaaagagaagcaagagatggtgtaccttcaggcaaagacaagaatcccagagcatagaaaagtcacacagctaattaagtgttggagcccggatttgaacccagtgtttctgaaagatctatccagcactccgatggccagcaacaacaccgccagcatagcacaagccaggaagctggtagagcagcttaagatggaagccaatatcgacaggataaaggtgtccaaggcagctgcagatttgatggcctactgtgaagcacatgccaaggaagaccccctcctgacccctgttccggcttcagaaaacccgtttagggagaagaagtttttctgtgccatcctttaagtctttgagaggggcctgaagagcctccgggctcctgggacattgatgtagagtttttagtgaagtgggcacctttctagtccacggcat

SEQ ID NO: 139313 - DNA, 522 bp, Homo sapiens
  Payload ID: 7306
  Gene Symbol: GNG2
  Gene Name: guanine nucleotide binding protein (G protein), gamma 2
  ENST ID: ENST00000556522
  CDS Start-End: 108-221
atgcagagccagcaagagcggatggctgaagaattacacgcagtggaaaagcagcaccgtggagctgggtgattcctgagcccaacctgtgcctctggtctaggggcatgcaggggaaattgcaacctccaatggaaagagaagcaagagatggtgtaccttcaggcaaagccagatctgccagtgagcctcaggctttaggaactgaagagtgtttctgaaagatctatccagcactccgatggccagcaacaacaccgccagcatagcacaagccaggaagctggtagagcagcttaagatggaagccaatatcgacaggataaaggtgtccaaggcagctgcagatttgatggcctactgtgaagcacatgccaaggaagaccccctcctgacccctgttccggcttcagaaaacccgtttagggagaagaagtttttctgtgccatcctttaagtctttgagaggggcctgaagagcctccgggctcctgggacattgatgtagagtttttagtgaag

SEQ ID NO: 139314 - DNA, 908 bp, Homo sapiens
  Payload ID: 7306
  Gene Symbol: GNG2
  Gene Name: guanine nucleotide binding protein (G protein), gamma 2
  Uniprot ID: P59768
  ENST ID: ENST00000555472
  CDS Start-End: 340-555
actcacaacgctgccgccgcgctccgtgggcaactcctactactgctgggctgggctgggctgggctgggctgcgccggagctcgcctgcacagatcagctccggagaggggaaaaccacgctcctcggaccaagcctcgggagctaagccagatctgccagtgagcctcaggctttaggaactgaagagggatgatactgtgaagtgttcaggaatgaagtctcgtgatgtctgctacctagtttcaaatggcaggagagacagagggatggggaagcaaaagtgaccattgttaactctaggtggttgtgtttctgaaagatctatccagcactccgatggccagcaacaacaccgccagcatagcacaagccaggaagctggtagagcagcttaagatggaagccaatatcgacaggataaaggtgtccaaggcagctgcagatttgatggcctactgtgaagcacatgccaaggaagaccccctcctgacccctgttccggcttcagaaaacccgtttagggagaagaagtttttctgtgccatcctttaagtctttgagaggggcctgaagagcctccgggctcctgggacattgatgtagagtttttagtgaagtgggcacctttctagtccacggcatttgaagagagcgaggagaaccattctggaaactctaggctatgcatgtttaaagatctggtcccctttatgagaatgcaagccgatccacatcctgacttaagagatctgattctgacgaactgcctggaggaggggaatatataaaaataaaattggtgtcacttcttttctgctatcccccagccccccccccaaaatcctcatgtttctgcttcatattttgaaaaataacaattaaaacagacagctgtactgaggtaa

SEQ ID NO: 139315 - DNA, 2125 bp, Homo sapiens
  Payload ID: 7306
  Gene Symbol: GNG2
  Gene Name: guanine nucleotide binding protein (G protein), gamma 2
  Uniprot ID: P59768
  ENST ID: ENST00000556766
  CDS Start-End: 216-431
acaacgctgccgccgcgctccgtgggcaactcctactactgctgggctgggctgggctgggctgggctgcgccggagctcgcctgcacagatcagctccggagaggggaaaaccacgctcctcggaccaagcctcgggagctaagccagatctgccagtgagcctcaggctttaggaactgaagagtgtttctgaaagatctatccagcactccgatggccagcaacaacaccgccagcatagcacaagccaggaagctggtagagcagcttaagatggaagccaatatcgacaggataaaggtgtccaaggcagctgcagatttgatggcctactgtgaagcacatgccaaggaagaccccctcctgacccctgttccggcttcagaaaacccgtttagggagaagaagtttttctgtgccatcctttaagtctttgagaggggcctgaagagcctccgggctcctgggacattgatgtagagtttttagtgaagtgggcacctttctagtccacggcatttgaagagagcgaggagaaccattctggaaactctaggctatgcatgtttaaagatctggtcccctttatgagaatgcaagccgatccacatcctgacttaagagatctgattctgacgaactgcctggaggaggggaatatataaaaataaaattggtgtcacttcttttctgctatcccccagccccccccccaaaatcctcatgtttctgcttcatattttgaaaaataacaattaaaacagacagctgtactgaggtaagatatgtgtgaccttcttggaatgaatattgtctttagaataccctttgataagctgagctgtcccgtgtagatgcaattcggtttaatggcattgatgtatagtcactgtgcctttctttttctttcttccttctcctctacccctccttccacccctccccattagagtagtgtggagataaggctggactggtctatcagattgaactccaagaatgatcacacaaaatgtttagggagatgttccccgtggtgtatcctcatggtaacaacgacaaaaaatgccggttgtctgtgttctcttttcactattcctaacatgtgtacatgatagctttgattctgcaagtaaaagtaaatcctgtgttgtgactggtgctttcatatatttgtgacaatttttgagtaatattgcatgaaaatgtccctatgttacatccattcagaagttttgttgttttactctaaagctgggaaaggaaatgagagggaaaagaccccggagagggaagaaaatctcagtattttgaaaattgagattacttcagagccttagccacacctaaaatacctcctagttaatagtggtataaatgcctcttcaatacgttttccagaatccaaagcattttggtttatccaggacccagggcagcacagctgtcaccaagcaggagagttaaggattcaccatgagctgggaaatgcttttgccatgagtatgagcaaattccctctttccctgaatcatggacattctagattaaaagaacatttttttgtgctcttaacaagaaaaccatggccctcctttgttcaagtatcagaagaaataaacccacagctccagagaaggtgaccattctcagaactccagctattcactctccagggagaaggacctcaaatcgccactctttgggcggcaggtgcggtccccacggccggctctacgaggaagagttctggctcttttgtccactgagatggtcttggtttttcacttaacaaattttttaatggaatctttgtttttgttctccatcttgtttgttagagtctctcggcctttatttacaaattccttgcaactagagcgctccttccccaagatatggtagtgagagtaatttttcattgtagctgtagtctccatcagtaacagcaggccctggaagacttgatcacctttttctgtgtcattttcagtcaaagagggcctctcttacatcttgtttgctttcaaatccccaaatatcatctccatctcccaattaattttattgtctctttcctctctattcgctttctcctgttttttttttaaaaaaaaagcatg

SEQ ID NO: 139316 - DNA, 577 bp, Homo sapiens
  Payload ID: 7306
  Gene Symbol: GNG2
  Gene Name: guanine nucleotide binding protein (G protein), gamma 2
  ENST ID: ENST00000553432
  CDS Start-End: 113-421
agagcatgcagagccagcaagagcggatggctgaagaattacacgcagtggaaaagcagcaccgtggagctgggtgattcctgagcccaacctgtgcctctggtctaggggcatgcaggggaaattgcaacctccaatggaaagagaagcaagagatggtgtaccttcaggcaaagtgtttctgaaagatctatccagcactccgatggccagcaacaacaccgccagcatagcacaagccaggaagctggtagagcagcttaagatggaagccaatatcgacaggataaaggtgtccaaggcagctgcagatttgatggcctactgtgaagcacatgccaaggaagaccccctcctgacccctgttccggcttcagaaaacccgtttagggagaagaagtttttctgtgccatcctttaagtctttgagaggggcctgaagagcctccgggctcctgggacattgatgtagagtttttagtgaagtgggcacctttctagtccacggcatttgaagagagcgaggagaaccattctggaaactctaggctatgcatgtttaaagatctggtcccct

SEQ ID NO: 139317 - DNA, 430 bp, Homo sapiens
  Payload ID: 7306
  Gene Symbol: GNG2
  Gene Name: guanine nucleotide binding protein (G protein), gamma 2
  ENST ID: ENST00000554875
  CDS Start-End: 125-310
ttaactctaggtggttgaagatattgaaattgcaatcatcttgtttttgggggaatggagtcattccatattggctcttgagtatgtctgccaccactctgattctagctggaggctgccagaaatgactgtgccattgaatggagttattaggcaacataaaacggacaagccagaccaagtgtttctgaaagatctatccagcactccgatggccagcaacaacaccgccagcatagcacaagccaggaagctggtagagcagcttaagatggaagccaatatcgacaggataaaggaagttcactgacccctggtctacagcgatggttctcagctcatctgtgcgttcccaacacccagagagctctataaaaggaccaattaccgaaccacacccaaaccaattaaattagaatctcctggggta

SEQ ID NO: 139318 - DNA, 3424 bp, Homo sapiens
  Payload ID: 7306
  Gene Symbol: GNG2
  Gene Name: guanine nucleotide binding protein (G protein), gamma 2
  Uniprot ID: P59768
  ENST ID: ENST00000556752
  CDS Start-End: 96-311
gtttttctctctgctttctcaacagccagatctgccagtgagcctcaggctttaggaactgaagagtgtttctgaaagatctatccagcactccgatggccagcaacaacaccgccagcatagcacaagccaggaagctggtagagcagcttaagatggaagccaatatcgacaggataaaggtgtccaaggcagctgcagatttgatggcctactgtgaagcacatgccaaggaagaccccctcctgacccctgttccggcttcagaaaacccgtttagggagaagaagtttttctgtgccatcctttaagtctttgagaggggcctgaagagcctccgggctcctgggacattgatgtagagtttttagtgaagtgggcacctttctagtccacggcatttgaagagagcgaggagaaccattctggaaactctaggctatgcatgtttaaagatctggtcccctttatgagaatgcaagccgatccacatcctgacttaagagatctgattctgacgaactgcctggaggaggggaatatataaaaataaaattggtgtcacttcttttctgctatcccccagccccccccccaaaatcctcatgtttctgcttcatattttgaaaaataacaattaaaacagacagctgtactgaggtaagatatgtgtgaccttcttggaatgaatattgtctttagaataccctttgataagctgagctgtcccgtgtagatgcaattcggtttaatggcattgatgtatagtcactgtgcctttctttttctttcttccttctcctctacccctccttccacccctccccattagagtagtgtggagataaggctggactggtctatcagattgaactccaagaatgatcacacaaaatgtttagggagatgttccccgtggtgtatcctcatggtaacaacgacaaaaaatgccggttgtctgtgttctcttttcactattcctaacatgtgtacatgatagctttgattctgcaagtaaaagtaaatcctgtgttgtgactggtgctttcatatatttgtgacaatttttgagtaatattgcatgaaaatgtccctatgttacatccattcagaagttttgttgttttactctaaagctgggaaaggaaatgagagggaaaagaccccggagagggaagaaaatctcagtattttgaaaattgagattacttcagagccttagccacacctaaaatacctcctagttaatagtggtataaatgcctcttcaatacgttttccagaatccaaagcattttggtttatccaggacccagggcagcacagctgtcaccaagcaggagagttaaggattcaccatgagctgggaaatgcttttgccatgagtatgagcaaattccctctttccctgaatcatggacattctagattaaaagaacatttttttgtgctcttaacaagaaaaccatggccctcctttgttcaagtatcagaagaaataaacccacagctccagagaaggtgaccattctcagaactccagctattcactctccagggagaaggacctcaaatcgccactctttgggcggcaggtgcggtccccacggccggctctacgaggaagagttctggctcttttgtccactgagatggtcttggtttttcacttaacaaattttttaatggaatctttgtttttgttctccatcttgtttgttagagtctctcggcctttatttacaaattccttgcaactagagcgctccttccccaagatatggtagtgagagtaatttttcattgtagctgtagtctccatcagtaacagcaggccctggaagacttgatcacctttttctgtgtcattttcagtcaaagagggcctctcttacatcttgtttgctttcaaatccccaaatatcatctccatctcccaattaattttattgtctctttcctctctattcgctttctcctgttttttttttaaaaaaaaagcatgaaaaaggaagagaaaaagtttgatatgccaaggacagattttgaaacagacttggtaaatgttttccttagctccttcatgggcatgctggtgaaagaataaatacatccaattaaagctcatgctggggtcggggagaagaggatactgaaacatttgtgaaatgtatgaatgcacttctgtaaccagatacttctgttcttctgttcaaattgtggggtttttgttacagttaggacgcccatgaagatttaggggtgaaaaaaacagcagagtatttattaaactacagcattgtacaattagcttagtaacactatggaataagctaaaacatatcacagtttttacatgggccaaaacatgaattgagtatgtggtcacatgaaaacacggatgaatgaataaaacactctttggtggtgactgaggcatcattagaaggcccagacgatttccactattcacagcatttccttttctcagaaggactctttatatttccatgtaaatctagatctttggagcaattaagatggaattacaatttctagggagcattttaaggaaaatgttttggctttttcataattttatgtcttacagtatggaattataatacgaaaatctttatatgagttttggcttcttggtatttgtacttattcaggggaaaaagtctttcgattacttatgcctctatagagcttaatttcttgagaaattcaacagtcattttcaccagcataattttatcttaaggaataactaataggaaaagtcagcttaattatttaaggccctagtttctacatataatatattcgatagaaatgaaaatctgccgtggaattaactaataagtagtaacaataaacttcatatttagaatgcaaagtctataaagaataattttacatgatcctcaatatcaactccagtttaaaaagtgttatttttaaaacatttgaaaccaagtactgtttaatttcaatcagaagatgcaaatacatactttgatctatgtttgattttgctaataatatttgaaggagattgcctaccaaggacaaaacaataaatttaaaaatcaaacgatttctccatacgctcatagtcacatatggaattttgagaaaataaagcatgctgtctttaggaatttttatacttctttgtctttcttccttaatatttgcttctagctgctcttggcaatgatgaattgttatgtatgcattaatgttttgcagcccaaaagttgttcacatttttcctatataagatctgtggagtgtgtgtttcaaagagagaactacagaaatgttaaagcaggaaaacctgaatgtgatgtgcacattttcatcccacatggacaatgtatgtgttttaataaatggaattttcagattcatttca

SEQ ID NO: 139319 - DNA, 569 bp, Homo sapiens
  Payload ID: 7306
  Gene Symbol: GNG2
  Gene Name: guanine nucleotide binding protein (G protein), gamma 2
  Uniprot ID: P59768
  ENST ID: ENST00000554736
  CDS Start-End: 138-353
agtgtcttcctccctcagcttgtgcagctgctttcaggataacctcagacacagctatcatttgccaccagatctgccagtgagcctcaggctttaggaactgaagagtgtttctgaaagatctatccagcactccgatggccagcaacaacaccgccagcatagcacaagccaggaagctggtagagcagcttaagatggaagccaatatcgacaggataaaggtgtccaaggcagctgcagatttgatggcctactgtgaagcacatgccaaggaagaccccctcctgacccctgttccggcttcagaaaacccgtttagggagaagaagtttttctgtgccatcctttaagtctttgagaggggcctgaagagcctccgggctcctgggacattgatgtagagtttttagtgaagtgggcacctttctagtccacggcatttgaagagagcgaggagaaccattctggaaactctaggctatgcatgtttaaagatctggtcccctttatgagaatgcaagccgatccacatcctgacttaagagatctgattctgacgaactgcc

SEQ ID NO: 139320 - DNA, 1294 bp, Homo sapiens
  Payload ID: 7306
  Gene Symbol: GNG2
  Gene Name: guanine nucleotide binding protein (G protein), gamma 2
  Uniprot ID: P59768
  ENST ID: ENST00000615906
  CDS Start-End: 728-943
ggcgtcgccttctcccctcagcacagaggagaggtgacgaatgccacttggtctctgcagcgtctgtagagggaagtctgtaagcgggagtgtcaaccccaattggcagattctctgacacttcaagtctgcaaaggaaaagcaggtacgactcctttatcttggacagtcatcttgtaatgcaggcctgtgggatacaaaggagaccagggaggttatgtgagctctgccaaatctattactactccaggggaaaataaaaccaaattcttgggctagtggaattactgtaggagaaatccagtatgattccatgtgaagaaccaatagcacccttaaattaaagccagatctgccagtgagcctcaggctttaggaactgaagaggtcataaaattgctgttatgtatgtgaaaacggccaaatataccatagaccccagattaggatcagtctggtgcctctgaaaatgtgaattgagaagaactgaaagaaaatctttccctggggagactgcagccgaaacacccttctgacgaatgtgctgacctaatctaagcctcaatttccttcaacaagggatgcatcgctcacttcccttgagttgtgagaatgaaacaagataatgcgttaaagcccttggcccagttcctggcatgtggcgagctcttggtccataagcaaatcttcgtattagttgtttctgaaagatctatccagcactccgatggccagcaacaacaccgccagcatagcacaagccaggaagctggtagagcagcttaagatggaagccaatatcgacaggataaaggtgtccaaggcagctgcagatttgatggcctactgtgaagcacatgccaaggaagaccccctcctgacccctgttccggcttcagaaaacccgtttagggagaagaagtttttctgtgccatcctttaagtctttgagaggggcctgaagagcctccgggctcctgggacattgatgtagagtttttagtgaagtgggcacctttctagtccacggcatttgaagagagcgaggagaaccattctggaaactctaggctatgcatgtttaaagatctggtcccctttatgagaatgcaagccgatccacatcctgacttaagagatctgattctgacgaactgcctggaggaggggaatatataaaaataaaattggtgtcacttcttttctgctatcccccagccccccccccaaaatcctcatgtttctgcttcatattttgaaaaataacaattaaaacagacagctgtactgaggt

SEQ ID NO: 139321 - DNA, 882 bp, Homo sapiens
  Payload ID: 7307
  Gene Symbol: GNG3
  Gene Name: guanine nucleotide binding protein (G protein), gamma 3
  Uniprot ID: P63215
  ENST ID: ENST00000294117
  CDS Start-End: 260-487
ccaggatctgagcagctccttctagcatccttcatccttcaggtaccagccatccagacagtgcttgagctgcagaaactgagaccagacctctggcctggccctccccaggggcctcctttcgtatagtcactgcttctgcatcagatactttcagctgcaactccctactgggtggggcacccatttcaggcagaaggttttggtaccctccactgaccctacacccagggctgctactgccgcttgtggcttcaggatgaaaggtgagaccccggtgaacagcactatgagtattgggcaagcacgcaagatggtggaacagcttaagattgaagccagcttgtgtcggataaaggtgtccaaggcagcagcagacctgatgacttactgtgatgcccacgcctgtgaggatcccctcatcacccctgtgcccacttcggagaaccccttccgggagaagaagttcttctgtgctctcctctgagctcccctgtcccttctcacaactcctcccttttccctctcctgggcccttccttaggtcagtaattgttgtgagccccttaggctccttgcatcccatccctaacccttgcctgaccatgtgaggttatctgaagcacaaggcccaccctcacctatctgtcgaccccatttcctaccacctttgtggccgaccccaagcaccccagagatatgaggcaccctttgctccacccacagcagggccccgtcagactctgccagcgcgtcctgcccgcttccctcggtgacctgctcagacaatggagagggatgggccaggttcttgctctcagtctcacctggagctactgggagggtaaagccatttgaagaataaagtcatccagagcctca

SEQ ID NO: 139322 - DNA, 1595 bp, Homo sapiens; identical to SEQ ID NO: 138313
  Payload ID: 7308
  Gene Symbol: GNG4
  Gene Name: guanine nucleotide binding protein (G protein), gamma 4
  Uniprot ID: P50150
  ENST ID: ENST00000366597
  CDS Start-End: 91-318

SEQ ID NO: 139323 - DNA, 1721 bp, Homo sapiens; identical to SEQ ID NO: 138309
  Payload ID: 7308
  Gene Symbol: GNG4
  Gene Name: guanine nucleotide binding protein (G protein), gamma 4
  Uniprot ID: P50150
  ENST ID: ENST00000366598
  CDS Start-End: 217-444

SEQ ID NO: 139324 - DNA, 5104 bp, Homo sapiens; identical to SEQ ID NO: 138311
  Payload ID: 7308
  Gene Symbol: GNG4
  Gene Name: guanine nucleotide binding protein (G protein), gamma 4
  Uniprot ID: P50150
  ENST ID: ENST00000391854
  CDS Start-End: 455-682

SEQ ID NO: 139325 - DNA, 4978 bp, Homo sapiens; identical to SEQ ID NO: 138310
  Payload ID: 7308
  Gene Symbol: GNG4
  Gene Name: guanine nucleotide binding protein (G protein), gamma 4
  Uniprot ID: P50150
  ENST ID: ENST00000450593
  CDS Start-End: 329-556

SEQ ID NO: 139326 - DNA, 684 bp, Homo sapiens; identical to SEQ ID NO: 138312
  Payload ID: 7308
  Gene Symbol: GNG4
  Gene Name: guanine nucleotide binding protein (G protein), gamma 4
  Uniprot ID: P50150
  ENST ID: ENST00000484517
  CDS Start-End: 102-329

SEQ ID NO: 139327 - DNA, 920 bp, Homo sapiens
  Payload ID: 7309
  Gene Symbol: GNG5
  Gene Name: guanine nucleotide binding protein (G protein), gamma 5
  Uniprot ID: P63218
  ENST ID: ENST00000370641
  CDS Start-End: 475-681
cttcccacaaactgggaggaaaactgagacctcctggtcacccgccgccgggccttttagaaactcccacaagctctgccttccctccctggtcctcttcagaccccctcttagttcttcgcggctaacggtaagctctctccttacctctccctaatcggcccctctggagaggaaaagaaaacttaagagtcgggtcgcgctagcctccagcagccgccgcgcccaccgactgctccgccccttctcctccccctcctccaggctcgcgctcggggccgggtgtggagctggaacagagggctggcaaggcgcgcatgcgcaccgagggtggagccgctgagcacagaaccggaaacttagagacaaagttcggagccccgcccccgccgcgcgccgctgagttgtctggccccgccgacccacggcccacgacccaccgacccacgaatcggcccggccgtcgcgtgcaccatgtctggctcctccagcgtcgccgctatgaagaaagtggttcaacagctccggctggaggccggactcaaccgcgtaaaagtttcccaggcagctgcagacttgaaacagttctgtctgcagaatgctcaacatgaccctctgctgactggagtatcttcaagtacaaatcccttcagaccccagaaagtctgttcctttttgtagtaaaatgaatctttcaaaggtttcccaaaccactccttatgatccagtgaatattcaagagagctacatttgaagcctgtacaaaagcttatccctgtaacacatgtgccataatatacaaacttctactttcgtcagtccttaacatctacctctctgaattttcatgaatttctatttcacaagggtaattgttttatatacactggcagcagcatacaataaaacttagtatgaaa

SEQ ID NO: 139328 - DNA, 790 bp, Homo sapiens
  Payload ID: 7309
  Gene Symbol: GNG5
  Gene Name: guanine nucleotide binding protein (G protein), gamma 5
  Uniprot ID: P63218
  ENST ID: ENST00000370645
  CDS Start-End: 341-547
cttcccacaaactgggaggaaaactgagacctcctggtcacccgccgccgggccttttagaaactcccacaagctctgccttccctccctggtcctcttcagaccccctcttagttcttcgcggctaacggctcgcgctcggggccgggtgtggagctggaacagagggctggcaaggcgcgcatgcgcaccgagggtggagccgctgagcacagaaccggaaacttagagacaaagttcggagccccgcccccgccgcgcgccgctgagttgtctggccccgccgacccacggcccacgacccaccgacccacgaatcggcccggccgtcgcgtgcaccatgtctggctcctccagcgtcgccgctatgaagaaagtggttcaacagctccggctggaggccggactcaaccgcgtaaaagtttcccaggcagctgcagacttgaaacagttctgtctgcagaatgctcaacatgaccctctgctgactggagtatcttcaagtacaaatcccttcagaccccagaaagtctgttcctttttgtagtaaaatgaatctttcaaaggtttcccaaaccactccttatgatccagtgaatattcaagagagctacatttgaagcctgtacaaaagcttatccctgtaacacatgtgccataatatacaaacttctactttcgtcagtccttaacatctacctctctgaattttcatgaatttctatttcacaagggtaattgttttatatacactggcagcagcatacaataaaacttagtatgaaacttt

SEQ ID NO: 139329 - DNA, 4208 bp, Homo sapiens
  Payload ID: 7310
  Gene Symbol: GNG7
  Gene Name: guanine nucleotide binding protein (G protein), gamma 7
  Uniprot ID: O60262
  ENST ID: ENST00000382159
  CDS Start-End: 199-405
gcgggccggggcggagggttcggctgcgcggcggggctgaggcggccgcggggcccgagcgcagggagtggagcttggtttcgggatctcggtgctgcagacggcgagacctcctgcacagggtgtacagcaagctgtgattcctgggaaaactaaaaaagctctctgaacaacggggcccagagctgatggcagacaatgtcagccactaacaacatagcccaggcccggaagctggtggaacagctacgcatagaagccgggattgagcgcatcaaggtctccaaagcggcgtctgacctcatgagctactgtgagcaacatgcccggaacgaccccctgctggtcggagtccctgcctcggagaacccctttaaggacaagaaaccttgtattattttataactgtgttctcatatgttctctctctctctctctctttctctctctctctctctgtctctgtctctgtctcaggcagggcatcattcagtaattagctcaaacaaaacatctcaagtccccaaaacctttaattccaaaagaaatcccccctctccccgccaaaaaaggcgttcccaccgcccggatggggtagaatggaccttgtaggtggagatgaattttcaggtccgaccccatggccctctcagtttgggccaaaagggatggaggctttacggccacttcccgttcggaataactgaaatcccccagcgatggggtaacaattttttaaaactctcgattgccgtttcaattgtggaccggcgccgagggggaaagggaggtgacttcgcccggtggcaatagttccgggagaattggccattggtaaaaagacttcatagggtcactggaatgctttgtgttgtttttaagtagaggtaaaattgagatggggggcgggaggtgacatcatgaagttttttggaaatatctctttatttaaaaaattgttactccatacggctaaactcggattgtgatggttgaacccgtcgctaaactgcacgatcctgcaatgaatgcacgatggagtgtgggggtctggagggggcttcgtctatgaaaagttgccaagtgtgactcccctgcatgatgttagccatgggtcctttctgcagggtcccctctgtgccagaaatgggttttcgggacttgccccagggaagccgtcaccggcccggcccatcatgtttttggattttttttttttttctttttttgagatggagtttcattcttgttacccaggctggagtgcagctgcatgatttcagctcaccgcaacctctgcctccccggttcaagcgattctcctgcctcagcctcccgagtagctgagactacaggcgtgtgccactacgcccggctaattgttgtatttttagtagagacggggtttcaccgtattggccaggccgctctcaaactcctgacctcgggatccgcccacctcggcctcccaaagtgctgggattacaggcatgagccaccgcgcccagtgtgttttaagcatgaggcatccgcgtggctgggagaggctttgaccatccttggctcttccaggttgtcctaccctctggcatccaccatagacgtttttcaaacagaaaatgcaggctggggagccgcggcagggcgggtggggctaccctgtgctgctgtgtgtacaaaattgttccatgatcttggagtgactctgaaggactctgggaggtgagacgttgtcccggagatcaaaacgtccgctcaaaacgttaccctgtcgctcgaacccgatctttttgcttttccacccccgtgcaacccaggacggctgtctgaggccgggagatgccttagacgcaggatgggccactcctcccagcggcaagtggaaatcgaagatgtcatggggtcggggggaggcttctgaaagatgactgcgtcctcctctgcggcacggacgggagcaggtgcagccacatcttccagggcctgccggcatcacctgcggccacacctgagatggaccccacgcagccctgatcgcaggaggcctggccgccccgaccccctccacggggctggcctagaagcaagtagtagaataaaactagcctagtcctgtccctccggccccagtggagacaggcgtctaagaacccgtgccgagagggttcctggacggccgcccaggtcctccgtgcaggcccgtgaggcggggatccctgcttggctcacttcctgagctggtgactgccagggttcccacctcgccaaggctagagggctccgggtgtgtgtgcaggtgtcgggggagtgacctccactcctcaacctcgggcagctcccacaggccacagccgggctccccacccccggcacccagctctctacggcaggtccgggagggctggggcttcggggagccctacccgccaaacctgctgttggcccgggagagccccagaggctcccggagactgcagcctcctgtggttgggctgggagccggcagggtttggggtgtgggcgtccccaccacgcatagcaggaatggcaggaagggacaaaagcctgttccagagaccctgggaggaccccaggcagggagagcccgcctgcctccaccctttccaacaagccatcttggtaactgggaacaaacacaccccaccccgtttttccttaaaagaggccttaatccccgagcccccgctgccagggcagagggaggagggggcacagctgtgccaagcccggccccactggtgtgtcctcacaatgtgaccccagaaatgccagcagggaacggaggctgctgcagagacgcagccccaggcagccggggctcctaggctggtgcagatggtggggttaaacgggctgagcgttccaggtaaactgaggctcggggaggggaaggacaggctggcctctccttcactgtccacagggccttgggttccctgagctgtccagaccccaccatctcccggaccccagggaggtggccattgccagaagcctgtgggtttctttctagcttgggggattaaaaaaaaaattctccacttttttttttcttgagtagacttcagtgaccacactgtggaaaatacctttgcagacgtggcacccgagtgcacacaccgaccgccacatgtgcttttctgccgggaatccctggggtgaacgcatgttttatgggcgtttccaggagcgcgcgtgcacctccagacggggagctggcgggcgggggtggcagcagcagctctagccttggggggacaagcctctctcagctacgccaggggaaaagagagttaaggacactcacccccacccacgcacacacacaaggcagcgtcgggtgggagagagaaggccgtttctccttctgtagcctgggtctcccacgggccttccccgctgctgagcgagacaccagtagccaggtgaagggccacagcgggccaggccccgaccctgttgtgacccacctgggcaccttcccggaccagctccgcctcccctgccctcctctctccaggaaggagccagaaccctcacccctctcccaccctccccaggggtaaccccaggccaagcacagatagctcagctgcgacctctggcctctggggacataaacggggcggctgggccagggcggaaggtgctcctgtttccctccttctgcgtggtccctttgacgggccggccaccgtgtccgaggcgcaacgctaggcctccaggccacgcatccatctccaagttaacagcccgtcctgcccaagttctggggcaggtaggagagggccgtcacacacctgtccgcccgtgagtgacccgggggggcttccgggtggaggtggagccaccacgcccttcctcaaggggtcacttattaaaaagtccacggcctgaggccaggccctctgcacagaagccatatgccggccagccgcgcctcctcctctgtccacggaaccgctgcccatctaaccttcgtaaagacctgtctcctgtttccagccgccgcctgtggttctagcaggttctatgccatctgcattgggatgtctggttgtttttatttctgacttttttaaaattccaggtgtgccgcacccactttctcgcagtgttttaatattgtgtggagttgtcgataccacgtgaattcatacacaataaaaagcctcactctccctttt

SEQ ID NO: 139330 - DNA, 723 bp, Homo sapiens
  Payload ID: 7310
  Gene Symbol: GNG7
  Gene Name: guanine nucleotide binding protein (G protein), gamma 7
  ENST ID: ENST00000587867
  CDS Start-End: 347-457
tcaggctttcaccatctccgcctgctccagctcccctgtttcttctccctgtctgatgtcaccttgtgcttcagtgacaccttgaagtttccgggctcccacccgcctccccactgccagtctttatcagagcctgcatcttcttctttggcctgagcatcgtttttgtttgttggctttatctgtagaagaggctcctacctcaagagcagggagtggagcttggtttcgggatctcggtgctgcagacggcgagacctcctgcacagggtgtacagcaagctgtgattcctgggaaaactaaaaaagctctctgaacaacggggcccagagctgatggcagacaatgtcagccactaacaacatagcccaggcccggaagctggtggaacagctacgcatagaagccgggattgagcgcatcaaggaaagaaagcaaggagagaaaggtcgctgagtcccacagagacacagttaccggttacgggatgagatccagggccagatggacgtgtccccgtgtagcctgacccaggacaccggacaccccagccccagccctgctggggtctccaaagcggcgtctgacctcatgagctactgtgagcaacatgcccggaacgaccccctgctggtcggagtccctgcctcggagaacccctttaaggacaagaaaccttgtattattttataactgtgttctcatatgttctctctctctct

SEQ ID NO: 139331 - DNA, 216 bp, Homo sapiens
  Payload ID: 7311
  Gene Symbol: GNG8
  Gene Name: guanine nucleotide binding protein (G protein), gamma 8
  Uniprot ID: Q9UK08
  ENST ID: ENST00000300873
  CDS Start-End: 4-216
accatgtccaacaacatggccaagattgccgaggcccgcaagacggtggaacagctgaagctggaggtgaacatcgaccgcatgaaggtgtcgcaggcagcagcggaactcctggctttctgcgagacgcatgccaaagatgacccgctggtgacgccagtacccgccgcggagaaccccttccgcgacaagcgcctcttttgtgttctgctctga

SEQ ID NO: 139332 - DNA, 720 bp, Homo sapiens
  Payload ID: 7312
  Gene Symbol: GNGT1
  Gene Name: guanine nucleotide binding protein (G protein), gamma transducing activity polypeptide 1
  Uniprot ID: P63211
  ENST ID: ENST00000248572
  CDS Start-End: 149-373
aatcatattagtgaagattaggaagaagctttaaaatcccaaggctagtgtgcattgctagaattgttaagagagagagctcatatgaaattggttatcgtgggatatttaaaataaaacaaagaacagtttactttcaggcaaaaagatgccagtaatcaatattgaggacctgacagaaaaggacaaattgaagatggaagttgaccagctcaagaaagaagtgacactggaaagaatgctagtttccaaatgttgtgaagaagtaagagattacgttgaagaacgatctggcgaggatccactggtaaagggcatcccagaggacaaaaatcccttcaaggagctcaaaggaggctgtgtgatttcataatacaaacaaaaagaaaaaaaattaaacaaattcttggaaatatctcaaatgttaataacaatatgaatttttctcatgcatactattactactaagcatgtacgtgaatttttaaatttatagatgtaaacttttaataaaaattggggtgtggtaacccatcattctatgtttttcttaacatagctggcacagggtttaacacataattgccaataaatattgcttaaagttctttaaaaagaactatgttttataaatgattctatattattctgagttgtcagcatatatttactgttttatgttttttcacttccctttcaacacttacaattttctaccca

SEQ ID NO: 139333 - DNA, 538 bp, Homo sapiens
  Payload ID: 7312
  Gene Symbol: GNGT1
  Gene Name: guanine nucleotide binding protein (G protein), gamma transducing activity polypeptide 1
  Uniprot ID: P63211
  ENST ID: ENST00000429473
  CDS Start-End: 162-386
gctcatatgaaattggttatcgtgggatatttaaaataaaacaaagaacagtttactttgtaagttaagagctgagggaattgttggctaagactgacttgaaataactccagcaattcatgcatagctgctaaccttctacatcttcagcaggcaaaaagatgccagtaatcaatattgaggacctgacagaaaaggacaaattgaagatggaagttgaccagctcaagaaagaagtgacactggaaagaatgctagtttccaaatgttgtgaagaagtaagagattacgttgaagaacgatctggcgaggatccactggtaaagggcatcccagaggacaaaaatcccttcaaggagctcaaaggaggctgtgtgatttcataatacaaacaaaaagaaaaaaaattaaacaaattcttggaaatatctcaaatgttaataacaatatgaatttttctcatgcatactattactactaagcatgtacgtgaatttttaaatttatagatgtaaacttttaataaaaattggggtgt

SEQ ID NO: 139334 - DNA, 628 bp, Homo sapiens
  Payload ID: 7312
  Gene Symbol: GNGT1
  Gene Name: guanine nucleotide binding protein (G protein), gamma transducing activity polypeptide 1
  ENST ID: ENST00000430875
  CDS Start-End: 156-296
atgaaattggttatcgtgggatatttaaaataaaacaaagaacagtttactttgtaagttaagagctgagggaattgttggctaagactgacttgaaataactccagcaattcatgcatagctgctaaccttctacatcttcagcaggcaaaaagatgccagtaatcaatattgaggacctgacagaaaaggacaaattgaagatggaagttgaccagctcaagaaagaagtgacactggaaagaatgctaatcccagccaggcaccttcaaaaccaatcccttatggactactgaattaaggacagcaagttacacctctgttcctgtcatctgggtgaagccaaaagtagtgacttttagagagagagtgtgggaccactgaggaagagggaaaaaagtgaatctaaattaatgcatatttcaaaagttatgtgaatctgcaagtatcatcctttgaaggaagaaactaacctgacaaatgcttcctggctccagttgaaaataatttgttttactatgtaattaatgagtctgcctagttataaaataatcttaagtcttatatcaaatgttccttggaatttacataaaagcggactaaagatttcatttgaaaaaaaaaaaaa

SEQ ID NO: 139335 - DNA, 1943 bp, Homo sapiens
  Payload ID: 7312
  Gene Symbol: GNGT1
  Gene Name: guanine nucleotide binding protein (G protein), gamma transducing activity polypeptide 1
  ENST ID: ENST00000455502
  CDS Start-End: 255-395
gagtgaggcaatgcctcaccctgcttcggctcgcgcacggtgcgcgcacccactgacctgcgcccactgtctggcactccctagtgagatgaacccggtacctcagatggaaatgcagaaatcaccgtcttctgcgtcgctcgcgctgggagctgtagaccggagctgttcctattcggccatcttggctcctccacaattatgatcctcttctgaaatcaggaatacgaccccaagaaatgacaggcaaaaagatgccagtaatcaatattgaggacctgacagaaaaggacaaattgaagatggaagttgaccagctcaagaaagaagtgacactggaaagaatgctaatcccagccaggcaccttcaaaaccaatcccttatggactactgaattaaggacagcaagttacacctctgttcctgtcatctgggtgaagccaaaagtagtgacttttagagagagagtgtgggaccactgaggaagagggaaaaaagtgaatctaaattaatgcatatttcaaaagttatgtgaatctgcaagtatcatcctttgaaggaagaaactaacctgacaaatgcttcctggctccagttgaaaataatttgttttactatgtaattaatgagtctgcctagttataaaataatcttaagtcttatatcaaatgttccttggaatttacataaaagcggactaaagatttcatttgaaaaaaaaaaaaacagtaaattggttaaatgacttatggaatggccacttaatagactgacaaaaataaagtagcttagtgttactgtcatgaaagatacactaactgaaaacaaacaagttgaagctaaaagagtttgaataatttgatttcgtgtgtatgtatatatatgtatatttatatatgtatagaacatcacctctctctacaaggaatgttaagtggtaccttaacaggctatagctgaagccattaaaatattaaggcctgattttttactaaatcattaaacaataatggtgcagataagtgaagagcaagctcaaaaacaacatgaataattcagtccagcaaattattcactgagcactaaagaacacagcctctgttctagatggctgggatacactgaacaaatcagccaaaggtccctgaccccttgaagctcacctagtgcaccaccatgctcaatcattgtagatgagtgtaaagaaaaattacatgtgtatacttctgagaatttagggatggtgataagccaggaatttaataattattcattctcctccacctttactagtcacatttttgggatgaggaaaaagatttaatcaatatgaactctggtgacacccttgacttctgttgccagctgtgttgtgaaccctgggtcttgtctcctttgatgttggaggcagtgtctgctgggaatctttagctggagtgtggccagctgtttttcctttgtctggagatatatccagaaggagtgggaagggtgcaactttcttctttcctacaaagtaaatatgcattggtgtaaagtagagagaatcaaactgaaattatacaacctgaaaatttattgtaataaataaattcctggcatctggagtattctgttttaaaccaaatgagtcatccctttttccttccccttaaggtttccaaatgttgtgaagaagtaagagattacgttgaagaacgatctggcgaggatccactggtaaagggcatcccagaggacaaaaatcccttcaaggagctcaaaggaggctgtgtgatttcataatacaaacaaaaagaaaaaaaattaaacaaattcttggaaatatctcaaatgttaataacaatatgaatttttctcatgcatactattactactaagcatgtacgtgaatttttaaatttatagatgtaaacttttaataaaaattggggtgtggtaa

SEQ ID NO: 139336 - DNA, 731 bp, Homo sapiens
  Payload ID: 7312
  Gene Symbol: GNGT1
  Gene Name: guanine nucleotide binding protein (G protein), gamma transducing activity polypeptide 1
  ENST ID: ENST00000428834
  CDS Start-End: 63-203
gaaattggttatcgtgggatatttaaaataaaacaaagaacagtttactttcaggcaaaaagatgccagtaatcaatattgaggacctgacagaaaaggacaaattgaagatggaagttgaccagctcaagaaagaagtgacactggaaagaatgctaatcccagccaggcaccttcaaaaccaatcccttatggactactgaattaaggacagcaagttacacctctgttcctgtcatctgggtgaagccaaaagtagtgacttttagagagagagtgtgggaccactgaggaagagggaaaaaagtgaatctaaattaatgcatatttcaaaagttatgtgaatctgcaagtatcatcctttgaaggaagaaactaacctgacaaatgcttcctggctccagttgaaaataatttgttttactatgtaattaatgagtctgcctagttataaaataatcttaagtcttatatcaaatgttccttggaatttacataaaagcggactaaagatttcatttgaaaaaaaaaaaaacagtaaattggttaaatgacttatggaatggccacttaatagactgacaaaaataaagtagcttagtgttactgtcatgaaagatacactaactgaaaacaaacaagttgaagctaaaagagtttgaataatttgatttcgtgtgtatgtatatatatgtatatttatatatgtatagaacatcacctctctctac

SEQ ID NO: 139337 - DNA, 889 bp, Homo sapiens
  Payload ID: 7313
  Gene Symbol: GNGT2
  Gene Name: guanine nucleotide binding protein (G protein), gamma transducing activity polypeptide 2
  Uniprot ID: O14610
  ENST ID: ENST00000300406
  CDS Start-End: 312-521
tggatgaagagtgagctaggagaacttcgtaaggtgaaactgtggggatccaatgggcaacacaaagcatcttggttaaggaggttaggggccggtctaggacttgcctcaggaggaaggacagcctcagagcatgctcagaggtgggaagggaaggaggagaaagcaggcgaagcggggccatctgctttatctgaagattttcagctgatgaagaactaggaggctcaaacactatcttacctgagtccaggacaagtgacttggagagtgtgctcttctgtggcaggatcaggtctgtctagggcaggatggcccaggatctcagcgagaaggacctgttgaagatggaggtggagcagctgaagaaagaagtgaaaaacacaagaattccgatttccaaagcgggaaaggaaatcaaggagtacgtggaggcccaagcaggaaacgatccttttctcaaaggcatccctgaggacaagaatcccttcaaggagaaaggtggctgtctgataagctgatggcatggagccctgccctgagtgtctgtccctcttcagccaagcccaagtctcctagacccccagggagccagtgaactgtcaccttctcttcatcacagaatgagtaaagatccctgaacaaatgcattgtgaacccattccccactcccaccttcaactcttttctcccattatttcctccacctgctgggtctctgctgaccttgctgggaacactctgaggacagtgtggctggccgagcggttggccccatgggtggtggggtgtgagaagcctgcaataccccaagaccccagagggcagtccttaggaagcacttacaccacctgggaacccctccgtcttttccctctactctcatcct

SEQ ID NO: 139338 - DNA, 522 bp, Homo sapiens
  Payload ID: 7313
  Gene Symbol: GNGT2
  Gene Name: guanine nucleotide binding protein (G protein), gamma transducing activity polypeptide 2
  ENST ID: ENST00000503070
  CDS Start-End: 91-357
ggaggctcaaacactatcttacctgagtccaggacaagtgacttggagagtgtgctcttctgtggcaggatcaggtctgtctagggcaggatggcccaggatctcagcgagaaggacctgttgaagatggaggtggagcagctgaagaaagaagtgaaaaacacaagaattccgatttccaaagcgggaaaggaaatcaaggagtacgtggaggcccaagcaggaaacgatccttttctcaaaggcatccctgaggacaagaatcccttcaaggagaaaggacccacatttaacgccttacttcttttgctgggaagagcttcttggttggagctaacctggtctaggacaccgtagctgcctagaagacatcacatgaatccatagatggtggtgttggcagggaatacaaactcaattcctgaataagtgcctattccagtgaggacaattctgtgtcccttccattgacctgccaccagagaactggatggttgccttgaggtctggtactgtatgagg

SEQ ID NO: 139339 - DNA, 585 bp, Homo sapiens
  Payload ID: 7313
  Gene Symbol: GNGT2
  Gene Name: guanine nucleotide binding protein (G protein), gamma transducing activity polypeptide 2
  Uniprot ID: O14610
  ENST ID: ENST00000507680
  CDS Start-End: 264-473
attccgggacaagaggaagtcagtcctgctccccgagcctgtgtctctctgtcccctgcccagaggaagggggaagccaggggcccatttgggggcccagcccccaatcccacccagcagaggaagccaaggccatctgctttatctgaagattttcagctgatgaagaactaggaggctcaaacactatcttacctgagtccaggacaagtgacttggagagtgtgctcttctgtggcaggatcaggtctgtctagggcaggatggcccaggatctcagcgagaaggacctgttgaagatggaggtggagcagctgaagaaagaagtgaaaaacacaagaattccgatttccaaagcgggaaaggaaatcaaggagtacgtggaggcccaagcaggaaacgatccttttctcaaaggcatccctgaggacaagaatcccttcaaggagaaaggtggctgtctgataagctgatggcatggagccctgccctgagtgtctgtccctcttcagccaagcccaagtctcctagacccccagggagccagtgaactgtcaccttctcttcatcacagaatgagtaaag

SEQ ID NO: 139340 - DNA, 500 bp, Homo sapiens
  Payload ID: 7313
  Gene Symbol: GNGT2
  Gene Name: guanine nucleotide binding protein (G protein), gamma transducing activity polypeptide 2
  Uniprot ID: O14610
  ENST ID: ENST00000511673
  CDS Start-End: 291-500
tttttattgaatgagtggatgaagagtgagctaggagaacttcgtaaggtgaaactgtggggatccaatgggcaacacaaagcatcttggttaaggaggttaggggccggtctaggacttgcctcaggaggaaggacagcctcagagcatgctcagaggccatctgctttatctgaagattttcagctgatgaagaactaggaggctcaaacactatcttacctgagtccaggacaagtgacttggagagtgtgctcttctgtggcaggatcaggtctgtctagggcaggatggcccaggatctcagcgagaaggacctgttgaagatggaggtggagcagctgaagaaagaagtgaaaaacacaagaattccgatttccaaagcgggaaaggaaatcaaggagtacgtggaggcccaagcaggaaacgatccttttctcaaaggcatccctgaggacaagaatcccttcaaggagaaaggtggctgtctgataagctga

SEQ ID NO: 139341 - DNA, 783 bp, Homo sapiens
  Payload ID: 7313
  Gene Symbol: GNGT2
  Gene Name: guanine nucleotide binding protein (G protein), gamma transducing activity polypeptide 2
  Uniprot ID: O14610
  ENST ID: ENST00000515635
  CDS Start-End: 396-605
ggcgaagcggggtaagtggggctgcagggtggaggtggagaaatagaagcgctgcgggctctaagctagtgaggtcaccaaaagtgtgaggctaacgcaaggcaaggtggtgaaaaggtggcttctgttttcgcgtttgtttttgtggggagaatgtctgtctctctgctctgctgtagtgagggcttgaaggctcaagcgggtgatgggcttagaactttgagcctatgatcagcttaggcatcagagattttggtttccaggccatctgctttatctgaagattttcagctgatgaagaactaggaggctcaaacactatcttacctgagtccaggacaagtgacttggagagtgtgctcttctgtggcaggatcaggtctgtctagggcaggatggcccaggatctcagcgagaaggacctgttgaagatggaggtggagcagctgaagaaagaagtgaaaaacacaagaattccgatttccaaagcgggaaaggaaatcaaggagtacgtggaggcccaagcaggaaacgatccttttctcaaaggcatccctgaggacaagaatcccttcaaggagaaaggtggctgtctgataagctgatggcatggagccctgccctgagtgtctgtccctcttcagccaagcccaagtctcctagacccccagggagccagtgaactgtcaccttctcttcatcacagaatgagtaaagatccctgaacaaatgcattgtgaacccattccccactcccaccttcaactcttttctcccattatt

SEQ ID NO: 139342 - DNA, 918 bp, Homo sapiens
  Payload ID: 7313
  Gene Symbol: GNGT2
  Gene Name: guanine nucleotide binding protein (G protein), gamma transducing activity polypeptide 2
  Uniprot ID: O14610
  ENST ID: ENST00000511277
  CDS Start-End: 181-390
tttttattgaatgagtggatgaagagtgagctaggagaacttcgtaaggccatctgctttatctgaagattttcagctgatgaagaactaggaggctcaaacactatcttacctgagtccaggacaagtgacttggagagtgtgctcttctgtggcaggatcaggtctgtctagggcaggatggcccaggatctcagcgagaaggacctgttgaagatggaggtggagcagctgaagaaagaagtgaaaaacacaagaattccgatttccaaagcgggaaaggaaatcaaggagtacgtggaggcccaagcaggaaacgatccttttctcaaaggcatccctgaggacaagaatcccttcaaggagaaaggtggctgtctgataagctgatggcatggagccctgccctgagtgtctgtccctcttcagccaagcccaagtctcctagacccccagggagccagtgaactgtcaccttctcttcatcacagaatgagtaaagatccctgaacaaatgcattgtgaacccattccccactcccaccttcaactcttttctcccattatttcctccacctgctgggtctctgctgaccttgctgggaacactctgaggacagtgtggctggccgagcggttggccccatgggtggtggggtgtgagaagcctgcaataccccaagaccccagagggcagtccttaggaagcacttacaccacctgggaacccctccgtcttttccctctactctcatcctaggaataaagcatttccacgccagagtagtttgggctgggggccagggttgggtggtcctgtccctccatatcatgtcctaccctatggtcctgttcctagtcatttagatcaccccagatggcctgatgacaacaagagtttgtgaagttatgatttca

SEQ ID NO: 139343 - DNA, 6539 bp, Homo sapiens
  Payload ID: 7314
  Gene Symbol: GNAQ
  Gene Name: guanine nucleotide binding protein (G protein), q polypeptide
  Uniprot ID: P50148
  ENST ID: ENST00000286548
  CDS Start-End: 224-1303
cgtcggcccagactatccgctcccaccgcgcccccggcccacctggtggccccggccctggccgccgcccccgcggcggttcccggagctcgtcccggacgcgcgcccgggcggcgggggctcggcggccaccgctgcctcgggggagcgagggcgggagggtgtgtgtgcgcgctgtgagcagggggtgccggcggggctgcagcggaggcactttggaagaatgactctggagtccatcatggcgtgctgcctgagcgaggaggccaaggaagcccggcggatcaacgacgagatcgagcggcagctccgcagggacaagcgggacgcccgccgggagctcaagctgctgctgctcgggacaggagagagtggcaagagtacgtttatcaagcagatgagaatcatccatgggtcaggatactctgatgaagataaaaggggcttcaccaagctggtgtatcagaacatcttcacggccatgcaggccatgatcagagccatggacacactcaagatcccatacaagtatgagcacaataaggctcatgcacaattagttcgagaagttgatgtggagaaggtgtctgcttttgagaatccatatgtagatgcaataaagagtttatggaatgatcctggaatccaggaatgctatgatagacgacgagaatatcaattatctgactctaccaaatactatcttaatgacttggaccgcgtagctgaccctgcctacctgcctacgcaacaagatgtgcttagagttcgagtccccaccacagggatcatcgaatacccctttgacttacaaagtgtcattttcagaatggtcgatgtagggggccaaaggtcagagagaagaaaatggatacactgctttgaaaatgtcacctctatcatgtttctagtagcgcttagtgaatatgatcaagttctcgtggagtcagacaatgagaaccgaatggaggaaagcaaggctctctttagaacaattatcacatacccctggttccagaactcctcggttattctgttcttaaacaagaaagatcttctagaggagaaaatcatgtattcccatctagtcgactacttcccagaatatgatggaccccagagagatgcccaggcagcccgagaattcattctgaagatgttcgtggacctgaacccagacagtgacaaaattatctactcccacttcacgtgcgccacagacaccgagaatatccgctttgtctttgctgccgtcaaggacaccatcctccagttgaacctgaaggagtacaatctggtctaattgtgcctcctagacacccgccctgcccttccctggtgggctattgaagatacacaagagggactgtatttctgtggaaaacaatttgcataatactaatttattgccgtcctggactctgtgtgagcgtgtccacagagtttgtagtaaatattatgattttatttaaactattcagaggaaaaacagaggatgctgaagtacagtcccagcacatttcctctctatcttttttttaggcaaaaccttgtgactcagtgtattttaaattctcagtcatgcactcacaaagataagacttgtttctttctgtctctctctctttttcttttctatggagcaaaacaaagctgatttcccttttttcttcccccgctaattcatacctccctcctgatgtttttcccaggttacaatggcctttatcctagttccattcttggtcaagtttttctctcaaatgatacagtcaggacacatcgttcgatttaagccatcatcagcttaatttaagtttgtagtttttgctgaaggattatatgtattaatacttacggttttaaatgtgttgctttggatacacacatagtttcttttttaatagaatatactgtcttgtctcactttggactgggacagtggatgcccatctaaaagttaagtgtcatttcttttagatgtttaccttcagccatagcttgattgctcagagaaatatgcagaaggcaggatcaaagacacacaggagtcctttcttttgaaatgccacgtgccattgtctttcctcccttctttgcttctttttcttaccctctctttcaattgcagatgccaaaaaagatgccaacagacactacattaccctaatggctgctacccagaacctttttataggttgttcttaatttttttgttgttgttgttcaagcttttcctttcttttttttcttggtgtttgggccacgattttaaaatgacttttattatgggtatgtgttgccaaagctggctttttgtcaaataaaatgaatacgaacttaaaaaataaaagctggtatcttaaaatgtaagagagtaagactgtgaagcctaaaatgactggctgagaatgaaccagaaatgccatttgccaaacagttgtaactagaaatttgattctcacggtccattcttttctttgtccttaagatgacattgttagtgttcacgtcccatgttcagtgtccaaaccggcaatgtaaaaagtatcctgtgtggtttaacaggaaatctgtttatgtctctttatttgaaaccagttttactctcagtggttctttaagttcaatgaagtctgccaggaacattggttggtagtattattccgacacctttaatttccaaaatctgaagttcctgctagtttaccaccttcatgatcttcttgaactggtaactgattaggttgaacttatggaagatttgtggacttaactcaaaagtaacctctcagtgttctatagaacatgtatttgtgtaactgaacctaccaggagaaatgtttggaattctatatgtgcaatttttcaacaaatgcaaaaaaaatacagcacatgtattgacaagcttctgtcaagcagcttgagttgaaatttgatttaagaaaataaatcatgattgttcaaagctgctgggacgttagaattaggccatgatactggtctcattttaactacagtggtatttggcactagtgtaaacttccatataaatcactcttttggaacaacaaagggggagggagaaaaatcacggcctgttaaatgagtaccaaagccgcccaacagtaatgagatgttctcatccttgattctcccagcctcaaacaacacagcttactttttttttcccttgctcagaaagtacctgtaatttaacaaacagactgcctgtaggtatagtgcaattacaaatgctctaatcattgtacatacatctctcttgatattgcagcatccatactggctttgtaatcattaattttttggcagattgaatgtgctgtattgatatgtatctatgtaattgtattgtatgtctatagctaattcacgttttgaataatgttattttatttacttttttaagagaggagaatgtaaatttgtcagtttatttctgactagggatattttctttccatttagaaaagaagaaaaaaaaaaaaccttactgtcatacagagcggtactagcgtcgtgctgtataaaatcatttgcacattcctgagtagaggtatactgattataagacccaaaggtaatttcatagcaaaatacataaaatcagtcggagcttttatacaaacatggaaaccaactttgtagaacttttgccatttgatctaggattggaatatgagcttttatacaattcatattcttatttggcaaatgcacagtttagtattacctctctgatggcctttactagaaaggcagttttagaagctattgtgatccactaaggaaatgttttaacagctagagaccactgcttgcctgaaagggcgttcttaaatttggtgcagcaaaaaaaaaaaaaaaaaaaaaaaaaattaaacaacaacatttgaaggcctacagtgtgtatagagaaaacctcatcacaagatcataagtgttacagttttagggaatcaagatattctatttaatagagctatagtaaatgtagtcaattaaacctgatctcaaagcttgaagaagctgagcaaaacagggaaagattgttatatttgtctttatgaaattgggatggaatttgctatgcagaattgaggtttgtggcttcgctgttcctgtagggtgcatgacaagatcccttctcttgagaaaggaaaaaattgatcaccctagcagcagtgatgcatagaaacctaattttagccacaccagtcaatcgaagctaaaggattttcttttttgtttcttcggggttttattgaaggggctaggggcgggacgggattcttttcagttttgtataaaaacaaagtttactcatgctttatattatattgtgattgcaagcgttataagcgtgtgccactggcctcctattgttgatgcttaggtaatggaggcctgtggtgagttttatggtgacttgggcatgtcttattcaaaaacaaaaacataaaacacagaaacctttcttcagcataccaaggcaagcagccatttcatgactcacttaacacattgcagtgtaccagtttacagatgatttttccctttttgcgtgacatggcagttctaacccccagagaattccttatttgtaaattggaagtttctactatgccttacagagcttaaattcagaagtttgtgcctcatatctgaaacaaagggaaataacacacccattcaaaagtaaataaatctcctagaagtttttgtttttaacatttccatataaagagctctgttgaatgtcatgaatagactggaaaaaaaaattttaagaacctgcatatgttgtttactagcagatgacaactacaaaaggaatctgaagaacacgtaaaacttgtatttttttttttttggtagattaactagcaggcctattttaaaaaggtaattcagctaaagggcaatttacttttttgtacttcagactatcttgattgtcaaagtgtacgaactgtaattttaaaatttatactgccacatgattgtaaattttagttgtcttaagttaggaattggtgaaaagctatttatgctggatttgggtcaaaatgacttatttgcaaaaaaataaataatgggaagaaagggctgtataatgaaatactgcaagactcacatattggttggaaatttccctcaaatcacctaccgattacccttgatttccctttgttttcagtttctcaaaacgaatgaaatgaaatatagcagaatgttaacccatataaaaataaagtgtacccaaatattgtaatgtatattgctgctcttcttcaaattaaataagggtttaaaaccacttaattggtaatcaacatctcaattgatacaaataaggtgtgcttggtatacattaatattttcttccaaagatatatctttggttagaaacacaaaaaaataaaactagtaatattgtatgtttatctatctctacatatttccagcatatgtagcgttaatagatctgtcctggtaactgtgtctttgggatttcattttggttccatcaaattaggaaaagaaatggcttagttgtatatgattagctagagatttttggagccagacacctgctgtttagtagataacttagtacagaccctaaacttgtcatttgtttttctcacagaatagccatttcctgctgtcttcccaatgatcactgccctttcaataacactcttgcctctagaatcatatgttcaaagtatgaatacacacctagcacatagtaggtgctcaaatattaatttcctccttgccttccttatctaccctgtgtcctccatttccccgtatgattccaacccaatatagcaaatgacatttacatgttatgaaaacatctattgggtaaaatcagatcttggataaagaaattctgacttttatataagcttttggtagacagaaaaaacagaaaggtattcgttggtagaacatttttaagttcaggaaagaaagctggaataatactacgtaactttgtccaggttactttgactgaaacacgtttttggtggatttcttttcctcaaagaactctctaaatgcaactccttgctggattcctcacccatcatcctgttggaaacccttactagacctatgtatttagggagttttgtcagaaaacatttttaacttgcagtatttaaaagaatatttactgttcctaaaatgtcattcaaatgcatgtactgtctattgtttggggatgggaactagttttgcaaaaaacacctaatgttgtataataatgccccaatgatcttgctggttaaaaatacagtatttttggccataattttgtactatagtattcttcattgttgagttttgcttccattaaagttgcccgagcccctctcagaatgttttgtattagtaggagtactgaaatacatctttccttccttaacacaccttgtgcatattgcattttccaaaataaacaagtttaatggtttcaaaaaaaaaaaaacaccaaaaaa

SEQ ID NO: 139344 - DNA, 551 bp, Homo sapiens
  Payload ID: 7314
  Gene Symbol: GNAQ
  Gene Name: guanine nucleotide binding protein (G protein), q polypeptide
  ENST ID: ENST00000411677
  CDS Start-End: 42-551
ggtgtgcatccattatcagtgccctatggggtcaggagggaatgggggaacggtgggcagactcgcagctggattcccggagcactcatgggacaggagagagtggcaagagtacgtttatcaagcagatgagaatcatccatgggtcaggatactctgatgaagataaaaggggcttcaccaagctggtgtatcagaacatcttcacggccatgcaggccatgatcagagccatggacacactcaagatcccatacaagtatgagcacaataaggctcatgcacaattagttcgagaagttgatgtggagaaggtgtctgcttttgagaatccatatgtagatgcaataaagagtttatggaatgatcctggaatccaggaatgctatgatagacgacgagaatatcaattatctgactctaccaaatactatcttaatgacttggaccgcgtagctgaccctgcctacctgcctacgcaacaagatgtgcttagagttcgagtccccaccacagggatcatcgaatacccctttgacttacaaagtgtc

SEQ ID NO: 139345 - DNA, 1159 bp, Homo sapiens
  Payload ID: 7315
  Gene Symbol: GNAT3
  Gene Name: guanine nucleotide binding protein, alpha transducing 3
  Uniprot ID: A8MTJ3
  ENST ID: ENST00000398291
  CDS Start-End: 95-1159
gagcattactcttgcctcctatgtccaaaccacagctgtgctcaacatttgaaaaatctgaacatataaactgacaagtatctaccaccacaagatgggaagtggaattagttcagagagcaaggagtcagccaaaagatcaaaagaactggagaaaaagcttcaggaggatgctgagcgagatgcaagaaccgtaaagctgctactattaggagcaggagaatctgggaaaagtactattgttaaacaaatgaagatcatccataagaatggttacagtgagcaagaatgcatggagttcaaagcagtaatttacagtaatacattgcaatccatcctagctattgtgaaagccatgactacccttggaattgattatgtaaatcccagaagtgcagaggaccaacgacaactttatgcaatggcaaataccctggaagatggtggcatgacacctcaactggctgaggtaataaaacggctgtggagagatccaggaattcaggcctgctttgaaagggcatctgaatatcagctcaatgactcagcagcttactaccttaatgatttagatagaataacagcatctgggtatgtgccaaatgaacaagatgttctccattctcgagtgaaaacgactggaatcattgaaactcaattctcctttaaagacttgcacttcaggatgtttgatgtaggtggacagagatctgagagaaagaagtggattcactgctttgaaggagttacatgcattatattttgtgctgcacttagtgcctatgacatggtcctcgtggaagacgaagaagtgaatagaatgcatgaaagccttcacctgttcaacagtatctgtaatcacaagtatttttcaacaacctccattgtcctgttcctcaacaaaaaagatatctttcaagaaaaggtaaccaaggtgcatcttagtatctgctttccagaatacactgggccaaatacatttgaagatgcaggaaactacatcaagaaccagtttctagacctgaatttaaaaaaagaagataaggaaatttattcccacatgacctgtgctactgacacccaaaatgtcaagtttgtgtttgacgcagttacagatataataatcaaagagaatctaaaagactgtgggcttttctaa

SEQ ID NO: 139346 - DNA, 7490 bp, Homo sapiens
  Payload ID: 7316
  Gene Symbol: GNL1
  Gene Name: guanine nucleotide binding protein-like 1
  Uniprot ID: P36915
  ENST ID: ENST00000376621
  CDS Start-End: 972-2795
tgcctccctccgtctctgccaggcatggcggcaacctcacaccttccctttgctgcgtttctataaatgctttgaaaaaattactcttttcttccctcgctggaaaacaccacaaccagctcctcagagtgtgtcacagagtcaacaggctctcgggccagagggcctgagaagaggactgtcgcaccgtaagatcgccacatccggtcctcggttactatggtaacagctgcaggcacaacttcgtgccctttgacctccccccaaaagtccttgtcccgcttgggtttcccttctcgcccgcttttgcacttatgatctgtaaacctgctccttatcatcgttcccacaaggaatttgggtcccaacaggtcggcacccaggactctcagaccgccgccctcccctaaagacctctgaccgtgcccccggtgtagtccagcaacctggacgcagtctcggctttccactaaggtcaagcccggggctttgtagtatagcctcagcgtgtccacgccccctctcccctaggtagtaggccccgccctccgctccgccgccccctccaggtgagtggtaggttctcccgggagcgcaaggtagtgatgacacgcgccccccctcctccgaacgcgagttggtagcgtccgtgacggagttagcctggtcctcccacgcgcgcctccttcctcgccgccggggcgccctctcggtgccactggctctcacgtgccagtagcccaccccgcatcatcctctcgcctcgctcctggagggaagtgactatatctcccccgtccgccttccatcgccgccgcggcggtaattctgtcgggcccgcccgctgacgtcacctgctagccccgcctcctctagggtcccgggcccctgcggcgggggctgccccggggggcagtcagttgaggcggcgggagctcggcggagggcgggccaggtgactggtccgggccatgccgaggaagaagccattcagcgtgaagcagaagaagaagcagttgcaggacaaacgggagcggaagagagggcttcaagatgggctgcgctccagttccaacagccgcagcgggagccgggagcggcgagaggaacagaccgacacctcggacggggagtctgtgacccatcatatccgcaggcttaaccagcagccttctcaggggctgggtccacgaggctacgacccaaatcgataccgactgcattttgagagagacagcagggaggaggtagagaggagaaagagagcagcccgggagcaagttctacagccggtcagtgctgagttgttggagctggacatccgggaggtgtatcagcctggctcagttctggactttcctcgacgtcctccttggagctatgagatgtccaaggagcaactaatgagccaagaggaacggagcttccaagactatcttgggaagattcatggggcttactcctctgagaaactcagctactttgagcacaatctggagacatggaggcagctgtggcgggtgttagagatgtctgacatcgtcctgcttatcactgatatccgacatccagttgtgaatttcccgccagcactttatgagtatgtgactggagaacttggactggccctggtgctggttttgaacaaggtggatctggccccgccagctcttgtggttgcctggaagcattatttccatcaacactatccccagctccacgtcgtccttttcacctcttttcctcgggacccccgcaccccacaggaccctagtagtgtcttgaagaagagtcggaggcgggggagaggatggactcgggccctggggccagagcagttgctgagagcctgtgaagccatcactgtggggaaagtggacttgagcagctggcgggagaagattgctcgggatgtggctggggccacctggggtaatggctctggggaggaggaggaagaggaggatggcccagcagtcctggtggagcagcagactgattcagcaatggagccaactggcccaacccaagagcgctacaaggatggggtggtgaccatcggctgtgtgggtttccctaatgtgggaaagtcctcgctgatcaatgggctggtggggcggaaagtcgtgagtgtctccagaaccccgggccatacccgatactttcagacctactttcttaccccctctgtgaagctctgtgactgcccaggcctcatcttcccatctcttctgcctaggcagttgcaggttctggcagggatctaccctatcgcccagatccaggagccctacactgctgtgggctacctggcctcccgaattcccgtgcaggccctgctccacctgcgccacccagaggctgaggacccctcagcggaacacccctggtgtgcctgggacatctgtgaagcctgggcagagaaacgtggttacaagacagccaaggcggctcggaatgatgtgtacagagcagccaacagtctcttgcggctggcagtggacggccgcctcagcctgtgttttcatcccccaggctacagtgaacagaaaggcacctgggagtcccatccagagaccacggagctggtggttttgcagggcagggtggggccagcaggtgacgaggaggaggaggaagaggaagagctgagcagctcctgtgaggaggagggagaggaggaccgggatgcggatgaggagggagaaggggatgaggagaccccaacctcggctccagggtccagcctggctggccgaaacccttatgccctgctgggtgaggatgagtgctgagttcctcgcccagcgccatcttccctcccagtatctttgcttttggactgacctgggggtatctcccctctgccaccccaattgtgaataaagattgtttgctttgtagccccttccccagatgaactgaggtgagagcggctgttccaggctaacagctgtgggaggcttctctcctcttctcccttcttttttcatgcattctctttgcaagggaaagttctcttaggagtttagtaggttctcagtctctgaaacctgcttcctctacccattctcccactctgcaccttaggaatcccgttatctacatggggaggggaggtctaaatccagctcccttttggagtttgtgccattctccgatttgagcagcagccctgtgtgccccctgccgccagacctgctcattccaggagcttctgggagaaggaacagtaagagaggaactgtgtcccaagctgatgtctcttaatgagatttttacaggaattgttcaaattcagcaaatatttattgagggtctattgtgtgtcttgacctgtgctgagcaccaagcatataaggatgtaccaccagagcctgacctaaatttgaagcctggccatgatcaaaaccccaccttcaggcacccaagtttttggattaagaagggtgaatgatgttctccaaatcctgggggctcatgcagtataattctaggacttcatgttgatacaaatttttagttaaggcaaaacgcttgtgaaaatgttgattaaatgtgtacgagtagttttaattactggtgaacaactagcgtgcacatttatgatttgagcagaacagccctttaagtacagtgttaagtttcattgtttaaaagcttggcagctacgagtatttgaggtacataggggcgggcacagaaccagcctcctgaattccatttactctggtttgggggtggaacaaagatgatccagtgcagggtctgagctagaacctagcaggtggccagaaccattttagggtttcacctcagcatttcggcagaaatcagctctctcgtgagtcagggcaccttaggctttgctgtatatccctttgttaagccagcagctagactcctagattgaattcttttagaaatgggagaatgagcttttttattgactgccagtgttgtctgtattggatgatagcaaaaagtgtagttggacaggttgcccactagatggagtgagaagtaccagactccttttttctctaaagcagatcctttcaggatctgagtcactgggcagtttctctaatgcgagcagacagaccctgttaaccaaggagcaaaggaaagtatatttaaagaggctaaggtgtttggccacatattgctttaggttcatctccattggtctcagtgtggacataactcctggaattcactccagtgcaaagtttaaataataccagcatgagaatgtacttgaaggtttcccaaaatgtgctagacaagaaagagaaaaggtcccagctgagagaaaaatccacctgtctcccatctggggctctttggcctcactgatagaaaaggaaaaggggcccaagctaagcttactttgagggttcatgatgttcagagatgctcaggggacttctccgctgcaggaggtggggtgaggacattggattcatttcctcaaaatatggagagaaaggagaaaaatcagaattctatttgtacctctgcttcctgtgctgtttatctttgcttgtctttatctttttccacctcaggggtttcatcaggggtatttgggagagtctaggggtggggatgaagaattgactgggagctgaggaggggggatttttatgctgaagacctggcaggaggcaactcctgacacccccacagggttagactgtaaaacctcttccatgacttgctgactctataggataatagcaacaggaaaagaactgagggacgtgcagatgaggatgaatagggccccaacaccagtgcctgaggctgaggttagaactgactacaaagacacaggaaaccaagggcccagtctcccctccacgctgaaatacgcaccctcttgtctgggtcatgtctactatgtgaatacttgaccatggaggtctggggctctggtggcttccatagctggctagtctcttgatggagagaaatcagggcttctctcatccatgctggaatttcatttagatgtcaacttccaagtttccctttttccagatgggattatagtcctgcttctggaacagggtagctgtgtgtggtccaggatagttcaattatctggccctttgttcacttcttacaatcattgatacagtcaacaaaaattggttaaaaacaatatatgccagacatatatccctgagttctgggacaataaccaaaattgaataaggcaatatcctactctcaagcaatagagggtaggaatagaataataataatataatacaatagctctatagcagtatgtaaactataaaagcattattttacgtgtttctattgaactgtcataactaaataagatggttagtactataattatcccaaggattcattcactcatagaacatttgttgagcaattactacctgccagtcacttccaagtggtaagtgagatagaaatggttctttgtggcgctcacaatttattggagaatggaaacacaattacaaaaaaaaagtgtgataagttctgggagaagggtggtacaggatcctgtggggtagtggtggctccatataggagggacattgggatactgatcaggaaggagtgggggacagggctagaagctgcattagtataaagttatgtcagactgccaaaacaaaacaaacacaaaaaatcagtagtctgtggtaaagaattgctataggaacagccagtaggggcagttaagctggtcttggtgaatcaggggaagcgtcctagaggaacagatgtccatgctgaggccaaatgctggacaggagttagccagacagggaaattgcattctgggcagaggagacagcaaaggtcaagaaacatgacaactttggaagactgtaacttgttcagaggcagagggtgcaaaggagaaatgaggaaaggtgaagctggagaggtgggcttggtccagctcttgctgggccttttcagccgtgttaaagatttagactgtatccagagggatgttgaactttaagcctaagactgaaaaggtgagaattgtgccttagatcactatggttgcagtgtggagactggtttggaaaggggagaaatcagaggcttttacagccatcccagggagagagaatgaacaccagaattagggtaatggaagatggaaagaagagaaatcgttttatgggttgctcaggagatagaattgacatgtcttgggattgttttgctgtgtaggggagagagacaagtcaagagtatacatcctgtttctgacttggcaactgggtgggtcatgggtctgtttcctgagacagttgtctacagccataccaccgtaagcgccctaaatctcatcagagacagtttatgcaaatggagcttggggaaagagaggtcgtggctggagacagagatttgggcatcatcaacatataggtgtggggagcagagaaggctgaggaagaaagcaggaaacatataaaaaggagagcagggaaaggagccagtgagacaggaaaaacctagtaacgtggtgtgatgaagctaggggaggaaggaaggaaggaagggcggcgtggaacgctgctgatgggtggtggcggggaaaatgaacgagtatccaccagcaacgagaggggcctccatggtcttggtgggagcatttctttggagaggtggaatcagaagccccagatgtcagagggttaaggaataatttggaggaaaagcgtaaaggcagtggaggtgaggagagaattttcaaaatgtttggcagtgattgcaatgaaagaaaaaaatggagggagcagagtatatgcagttgaggaacttttttagtttggagtgtgttaacacgatgttaggaagaaggatcaagtgaaggagaaaggtgaaaatgctggaaggtggggcttagtgatgaaacaaaccttggggacaggtgggcgtggtactgagagtcccagtgaggggagtgccctcaggcaggcgccggtggcttctgtcacaggagggaacagcgctgacattcagctggttcgcactgatacggctcaaccagtttgttaaaacatgtctgttccagtgtcagtaatatacgagtaactgcaatatgcagtaaaaattataaattctaatacaaactcagttcaagctaattaagagatcgcaacagccgttggtaaatggacttcccgctgcatttgagaagctttgcagcgccatctgccggtgtcgtagcatcactgcaggctgagaggctgctttgcgccttcatcttgaagcactctgaaattgcctgtttaaattaccttggaatcatggagttgctactgcttctgaatagtttagcttctactttgattttattgttagtgcattgtcgttcttgtgtcagtagcaagtttcagtgttttaatatttacaaatacaaaaatttttaataaaatattaaagccaaacttgaatgaagagacaacaaa

SEQ ID NO: 139347 - DNA, 5919 bp, Homo sapiens
  Payload ID: 7316
  Gene Symbol: GNL1
  Gene Name: guanine nucleotide binding protein-like 1
  ENST ID: ENST00000383450
  CDS Start-End: 1-1224
gttgtgaatttcccgccagcactttatgagtatgtgactggagaacttggactggccctggtgctggttttgaacaaggtggatctggccccgccagctcttgtggttgcctggaagcattatttccatcaacactatccccagctccacgtcgtccttttcacctcttttcctcgggacccccgcaccccacaggatcctagtagtgtcttgaagaagagtcggaggcgggggagaggatggactcgggccctggggccagagcagttgctgagagcctgtgaagccatcactgtggggaaagtggacttgagcagctggcgggagaagattgctcgggatgtggctggggccacctggggtaatggctctggggaggaggaggaagaggaggatggcccagcagtcctggtggagcagcagactgattcagcaatggagccaactggcccaacccaagagcgctacaaggatggggtggtgaccatcggctgtgtgggtttccctaatgtgggaaagtcctcgctgatcaatgggctggtggggcggaaagtcgtgagtgtctccagaaccccgggccatacccgatactttcagacctactttcttaccccctctgtgaagctctgtgactgcccaggcctcatcttcccatctcttctgcctaggcagttgcaggttctggcagggatctaccctatcgcccagatccaggagccctacactgctgtgggctacctggcctcccgaattcccgtgcaggccctgctccacctgcgccacccagaggctgaggacccctcagcggaacacccctggtgtgcctgggacatctgtgaagcctgggcagagaaacgtggttacaagacagccaaggcggctcggaatgatgtgtacagagcagccaacagtctcttgcggctggcagtggacggccgcctcagcctgtgttttcatcccccaggctacagtgaacagaaaggcacctgggagtcccatccagagaccacggagctggtggttttgcagggcagggtggggccagcaggtgacgaggaggaggaggaagaggaagagctgagcagctcctgtgaggaggagggagaggaggaccgggatgcggatgaggagggagaaggggatgaggagaccccaacctcggctccagggtccagcctggctggccgaaacccttatgccctgctgggtgaggatgagtgctgagttcctcgcccagcgccatcttccctcccagtatctttgcttttggactgacctgggggtatctcccctctgccaccccaattgtgaataaagattgtttgctttgtagccccttccccagatgaactgaggtgagagcggctgttccaggctaacagctgtgggaggcttctctcctcttctcccttcttttttcatgcattctctttgcaagggaaagttctcttaggagtttagtaggttctcagtctctgaaacctgcttcctctacccattctcccactctgcaccttaggaatcccgttatctacatggggaggggaggtctaaatccagctcccttttggagtttgtgccattctccgatttgagcagcagccctgtgtgccccctgccgccagacctgctcattccaggagcttctgggagaaggaacagtaagagaggaactgtgtcccaagctgatgtctcttaatgagatttttacaggaattgttcaaattcagcaaatatttattgagggtctattgtgtgtcttgacctgtgctgagcaccaagcatataaggatgtaccaccagagcctgacctaaatttgaagcctggccatgatcaaaaccccaccttcaggcacccaagtttttggattaagaagggtgaatgatgttctccaaatcctgggggctcatgcagtataattctaggacttcatgttgatacaaatttttagttaaggcaaaacgcttgtgaaaatgttgattaaatgtgtacgagtagttttaattactggtgaacaactagcgtgcacatttatgatttgagcagaacagccctttaagtacagtgttaagtttcattgtttaaaagcttggcagctacgagtatttgaggtacataggggcgggcacagaaccagcctcctgaattccatttactctggtttgggggtggaacaaagatgatccagtgcagggtctgagctagaacctagcaggtggccagaaccattttagggtttcacctcagcatttcggcagaaatcagctctctcgtgagtcagggcaccttaggctttgctgtatatccctttgttaagccagcagctagactcctagattgaattcttttagaaatgggagaatgagcttttttattgactgccagtgttgtctgtattggatgatagcaaaaagtgtagttggacaggttgcccactagatggagtgagaagtaccagactccttttttctctaaagcagatcctttcaggatctgagtcactgggcagtttctctaatgcgagcagacagaccctgttaaccaaggagcaaaggaaagtatatttaaagaggctaaggtgtttggccacatattgctttaggttcatctccattggtctcagtgtggacataactcctggaattcactccagtgcaaagtttaaataataccagcatgagaatgtacttgaaggtttcccaaaatgtgctagacaagaaagagaaaaggtcccagctgagagaaaaatccacctgtctcccatctggggctctttggcctcactgatagaaaaggaaaaggggcccaagctaagcttactttgagggttcatgatgttcagagatgctcaggggacttctccgctgcaggaggtggggtgaggacattggattcatttcctcaaaatgtggagagaaaggagaaaaatcagaattctatttgtacctctgcttcctgtgctgtttatctttgcttgtctttatctttttccacctcaggggtttcatcaggggtatttgggagagtctaggggtggggatgaagaattgactgggagctgaggaggggggatttttatgctgaagacctggcaggaggcaactcctgacacccccacagggttagactgtaaaacctcttccatgacttgctgactctataggataatagcaacaggaaaagaactgagggacgtgcagatgaggatgaatagggccccaacaccagtgcctgaggctgaggttagaactgactacaaagacacaggaaaccaagggcccagtctcccctccacgctgaaatacgcaccctcttgtctgggtcatgtctactatgtgaatacttgaccatggaggtctggggctctggtggcttccatagctggctagtctcttgatggagagaaatcagggcttctctcatccatgctggaatttcatttagatgtcaacttccaagtttccctttttccagatgggattatagtcctgcttctggaacagggtagctgtgtgtggtccaggatagttcaattatctggccctttgttcacttcttacaatcattgatacagtcaacaaaaattggttaaaaacaatatatgccagacatatatccctgagttctgggacaataaccaaaattgaataaggcaatatcctactctcaagcaatagagggtaggaatagaataataataatataatacaatagctctatagcagtatgtaaactataaaagcattattttacgtgtttctattgaactgtcataactaaataagatggttagtactataattatcccaaggattcattcactcatagaacatttgttgagcaattactacctgccagtcacttccaagtggtaagtgagatagaaatggttctttgtggcactcacaatttattggagaatggaaacacaattacaaaaaaaaagtgtgataagttctgggagaagggtggtacaggatcctgtggggtagtggtggctccatataggagggacattgggatactgatcaggaaggagtgggggacagggctagaagctgcattagtataaagttatgtcagactgccaaaacaaaacaaacacaaaaaatcagtagtctgtggtaaagaattgctataggaacagccagtaggggcagttaagctggtcttggtgaatcaggggaagcgtcctagaggaacagatgtccatgctgaggccaaatgctggacaggagttagccagacagggaaattgcattctgggcagaggagacagcaaaggtcaagaaacatgacaactttggaagactgtaacttgttcagaggcagagggtgcaaaggagaaatgaggaaaggtgaagctggagaggtgggcttggtccagctcttgctgggccttttcagccgtgttaaagatttagactgtatccagagggatgttgaactttaagcctaagactgaaaaggtgagaattgtgccttagatcactatggttgcagtgtggagactggtttggaaaggggagaaatcagaggcttttacagccatcccagggagagagaatgaacaccagaattagggtaatggaagatggaaagaagagaaatcgttttatgggttgctcaggagatagaattgacatgtcttgggattgttttgctgtgtaggggagagagacaagtcaagagtatacatcctgtttctgacttggcaactgggtgggtcatgggtctgtttcctgagacagttgtctacagccataccaccgtaagcgccctaaatctcatcagagacagtttatgcaaatggagcttggggaaagagaggtcgtggctggagacagagatttgggcatcatcaacatataggtgtggggagcagagaaggctgaggaagaaagcaggaaacatataaaaaggagagcagggaaaggagccagtgagacaggaaaaacctagtaacgtggtgtgatgaagctaggggaggaaggaaggaaggaagggcggcgtggaacgctgctgatgggtggtggcggggaaaatgaacgagtatccaccagcaacgagaggggcctccatggtcttggtgggagcatttctttggagaggtggaatcagaagccccagatgtcagagggttaaggaataatttggaggaaaagcgtaaaggcagtggaggtgaggagagaattttcaaaatgtttggcagtgattgcaatgaaagaaaaaaatggagggagcagagtatatgcagttgaggaacttttttagtttggagtgtgttaacacgatgttaggaagaaggatcaagtgaaggagaaaggtgaaaatgctggaaggtggggcttagtgatgaaacaaaccttggggacaggtgggcgtggtactgagagtcccagtgaggggagtgccctcaggcaggcgccggtggcttctgtcacaggagggaacagcgctgacattcagctggttcgcactgatacggctcaaccagtttgttaaaacatgtctgttccagtgtcagtaatatacgagtaactgcaatatgcagtaaaaattataaattctaatacaaactcagttcaagctaattaagagatcgcaacagccgttggtaaatggacttcccgctgcatttgagaagctttgcagcgccatctgccggtgtcgtagcatcactgcaggctgagaggctgctttgcgccttcatcttgaagcactctgaaattgcctgtttaaattaccttggaatcatggagttgctactgcttctgaatagtttagcttctactttgattttattgttagtgcattgtcgttcttgtgtcagtagcaagtttcagtgttttaatatttacaaatacaaaaatttttaataaaatattaaagccaaacttgaatgaagagacaacaaa

SEQ ID NO: 139348 - DNA, 7490 bp, Homo sapiens
  Payload ID: 7316
  Gene Symbol: GNL1
  Gene Name: guanine nucleotide binding protein-like 1
  Uniprot ID: P36915
  ENST ID: ENST00000383596
  CDS Start-End: 972-2795
tgcctccctccgtctctgccaggcatggcggcaacctcacaccttccctttgctgcgtttctataaatgctttgaaaaaattactcttttcttccctcgctggaaaacaccacaaccagctcctcagagtgtgtcacagagtcaacaggctctcgggccagagggcctgagaagaggactgtcgcaccgtaagatcgccacatccggtcctcggttactatggtaacagctgcaggcacaacttcgtgccctttgacctccccccaaaagtccttgtcccgcttgggtttcccttctcgcccgcttttgcacttatgatctgtaaacctgctccttatcatcgttcccacaaggaatttgggtcccaacaggtcggcacccaggactctcagaccgccgccctcccctaaagacctctgaccgtgcccccggtgtagtccagcaacctggacgcagtctcggctttccactaaggtcaagcccggggctttgtagtatagcctcagcgtgtccacgccccctctcccctaggtagtaggccccgccctccgctccgccgccccctccaggtgagtggtaggttctcccgggagcgcaaggtagtgatgacacgcgccccccctcctccgaacgcgagttggtagcgtccgtgacggagttagcctggtcctcccacgcgcgcctccttcctcgccgccggggcgccctctcggtgccactggctctcacgtgccagtagcccaccccgcatcatcctctcgcctcgctcctggagggaagtgactatatctcccccgtccgccttccatcgccgccgcggcggtaattctgtcgggcccgcccgctgacgtcacctgctagccccgcctcctctagggtcccgggcccctgcggcgggggctgccccggggggcagtcagttgaggcggcgggagctcggcggagggcgggccaggtgactggtccgggccatgccgaggaagaagccattcagcgtgaagcagaagaagaagcagttgcaggacaaacgggagcggaagagagggcttcaagatgggctgcgctccagttccaacagccgcagcgggagccgggagcggcgagaggaacagaccgacacctcggacggggagtctgtgacccatcatatccgcaggcttaaccagcagccttctcaggggctgggtccacgaggctacgacccaaatcgataccgactgcattttgagagagacagcagggaggaggtagagaggagaaagagagcagcccgggagcaagttctacagccggtcagtgctgagttgttggagctggacatccgggaggtgtatcagcctggctcagttctggactttcctcgacgtcctccttggagctatgagatgtccaaggagcaactaatgagccaagaggaacggagcttccaagactatcttgggaagattcatggggcttactcctctgagaaactcagctactttgagcacaatctggagacatggaggcagctgtggcgggtgttagagatgtctgacatcgtcctgcttatcactgatatccgacatccagttgtgaatttcccgccagcactttatgagtatgtgactggagaacttggactggccctggtgctggttttgaacaaggtggatctggccccgccagctcttgtggttgcctggaagcattatttccatcaacactatccccagctccacgtcgtccttttcacctcttttcctcgggacccccgcaccccacaggatcctagtagtgtcttgaagaagagtcggaggcgggggagaggatggactcgggccctggggccagagcagttgctgagagcctgtgaagccatcactgtggggaaagtggacttgagcagctggcgggagaagattgctcgggatgtggctggggccacctggggtaatggctctggggaggaggaggaagaggaggatggcccagcagtcctggtggagcagcagactgattcagcaatggagccaactggcccaacccaagagcgctacaaggatggggtggtgaccatcggctgtgtgggtttccctaatgtgggaaagtcctcgctgatcaatgggctggtggggcggaaagtcgtgagtgtctccagaaccccgggccatacccgatactttcagacctactttcttaccccctctgtgaagctctgtgactgcccaggcctcatcttcccatctcttctgcctaggcagttgcaggttctggcagggatctaccctatcgcccagatccaggagccctacactgctgtgggctacctggcctcccgaattcccgtgcaggccctgctccacctgcgccacccagaggctgaggacccctcagcggaacacccctggtgtgcctgggacatctgtgaagcctgggcagagaaacgtggttacaagacagccaaggcggctcggaatgatgtgtacagagcagccaacagtctcttgcggctggcagtggacggccgcctcagcctgtgttttcatcccccaggctacagtgaacagaaaggcacctgggagtcccatccagagaccacggagctggtggttttgcagggcagggtggggccagcaggtgacgaggaggaggaggaagaggaagagctgagcagctcctgtgaggaggagggagaggaggaccgggatgcggatgaggagggagaaggggatgaggagaccccaacctcggctccagggtccagcctggctggccgaaacccttatgccctgctgggtgaggatgagtgctgagttcctcgcccagcgccatcttccctcccagtatctttgcttttggactgacctgggggtatctcccctctgccaccccaattgtgaataaagattgtttgctttgtagccccttccccagatgaactgaggtgagagcggctgttccaggctaacagctgtgggaggcttctctcctcttctcccttcttttttcatgcattctctttgcaagggaaagttctcttaggagtttagtaggttctcagtctctgaaacctgcttcctctacccattctcccactctgcaccttaggaatcccgttatctacatggggaggggaggtctaaatccagctcccttttggagtttgtgccattctccgatttgagcagcagccctgtgtgccccctgccgccagacctgctcattccaggagcttctgggagaaggaacagtaagagaggaactgtgtcccaagctgatgtctcttaatgagatttttacaggaattgttcaaattcagcaaatatttattgagggtctattgtgtgtcttgacctgtgctgagcaccaagcatataaggatgtaccaccagagcctgacctaaatttgaagcctggccatgatcaaaaccccaccttcaggcacccaagtttttggattaagaagggtgaatgatgttctccaaatcctgggggctcatgcagtataattctaggacttcatgttgatacaaatttttagttaaggcaaaacgcttgtgaaaatgttgattaaatgtgtacgagtagttttaattactggtgaacaactagcgtgcacatttatgatttgagcagaacagccctttaagtacagtgttaagtttcattgtttaaaagcttggcagctacgagtatttgaggtacataggggcgggcacagaaccagcctcctgaattccatttactctggtttgggggtggaacaaagatgatccagtgcagggtctgagctagaacctagcaggtggccagaaccattttagggtttcacctcagcatttcggcagaaatcagctctctcgtgagtcagggcaccttaggctttgctgtatatccctttgttaagccagcagctagactcctagattgaattcttttagaaatgggagaatgagcttttttattgactgccagtgttgtctgtattggatgatagcaaaaagtgtagttggacaggttgcccactagatggagtgagaagtaccagactccttttttctctaaagcagatcctttcaggatctgagtcactgggcagtttctctaatgcgagcagacagaccctgttaaccaaggagcaaaggaaagtatatttaaagaggctaaggtgtttggccacatattgctttaggttcatctccattggtctcagtgtggacataactcctggaattcactccagtgcaaagtttaaataataccagcatgagaatgtacttgaaggtttcccaaaatgtgctagacaagaaagagaaaaggtcccagctgagagaaaaatccacctgtctcccatctggggctctttggcctcactgatagaaaaggaaaaggggcccaagctaagcttactttgagggttcatgatgttcagagatgctcaggggacttctccgctgcaggaggtggggtgaggacattggattcatttcctcaaaatgtggagagaaaggagaaaaatcagaattctatttgtacctctgcttcctgtgctgtttatctttgcttgtctttatctttttccacctcaggggtttcatcaggggtatttgggagagtctaggggtggggatgaagaattgactgggagctgaggaggggggatttttatgctgaagacctggcaggaggcaactcctgacacccccacagggttagactgtaaaacctcttccatgacttgctgactctataggataatagcaacaggaaaagaactgagggacgtgcagatgaggatgaatagggccccaacaccagtgcctgaggctgaggttagaactgactacaaagacacaggaaaccaagggcccagtctcccctccacgctgaaatacgcaccctcttgtctgggtcatgtctactatgtgaatacttgaccatggaggtctggggctctggtggcttccatagctggctagtctcttgatggagagaaatcagggcttctctcatccatgctggaatttcatttagatgtcaacttccaagtttccctttttccagatgggattatagtcctgcttctggaacagggtagctgtgtgtggtccaggatagttcaattatctggccctttgttcacttcttacaatcattgatacagtcaacaaaaattggttaaaaacaatatatgccagacatatatccctgagttctgggacaataaccaaaattgaataaggcaatatcctactctcaagcaatagagggtaggaatagaataataataatataatacaatagctctatagcagtatgtaaactataaaagcattattttacgtgtttctattgaactgtcataactaaataagatggttagtactataattatcccaaggattcattcactcatagaacatttgttgagcaattactacctgccagtcacttccaagtggtaagtgagatagaaatggttctttgtggcactcacaatttattggagaatggaaacacaattacaaaaaaaaagtgtgataagttctgggagaagggtggtacaggatcctgtggggtagtggtggctccatataggagggacattgggatactgatcaggaaggagtgggggacagggctagaagctgcattagtataaagttatgtcagactgccaaaacaaaacaaacacaaaaaatcagtagtctgtggtaaagaattgctataggaacagccagtaggggcagttaagctggtcttggtgaatcaggggaagcgtcctagaggaacagatgtccatgctgaggccaaatgctggacaggagttagccagacagggaaattgcattctgggcagaggagacagcaaaggtcaagaaacatgacaactttggaagactgtaacttgttcagaggcagagggtgcaaaggagaaatgaggaaaggtgaagctggagaggtgggcttggtccagctcttgctgggccttttcagccgtgttaaagatttagactgtatccagagggatgttgaactttaagcctaagactgaaaaggtgagaattgtgccttagatcactatggttgcagtgtggagactggtttggaaaggggagaaatcagaggcttttacagccatcccagggagagagaatgaacaccagaattagggtaatggaagatggaaagaagagaaatcgttttatgggttgctcaggagatagaattgacatgtcttgggattgttttgctgtgtaggggagagagacaagtcaagagtatacatcctgtttctgacttggcaactgggtgggtcatgggtctgtttcctgagacagttgtctacagccataccaccgtaagcgccctaaatctcatcagagacagtttatgcaaatggagcttggggaaagagaggtcgtggctggagacagagatttgggcatcatcaacatataggtgtggggagcagagaaggctgaggaagaaagcaggaaacatataaaaaggagagcagggaaaggagccagtgagacaggaaaaacctagtaacgtggtgtgatgaagctaggggaggaaggaaggaaggaagggcggcgtggaacgctgctgatgggtggtggcggggaaaatgaacgagtatccaccagcaacgagaggggcctccatggtcttggtgggagcatttctttggagaggtggaatcagaagccccagatgtcagagggttaaggaataatttggaggaaaagcgtaaaggcagtggaggtgaggagagaattttcaaaatgtttggcagtgattgcaatgaaagaaaaaaatggagggagcagagtatatgcagttgaggaacttttttagtttggagtgtgttaacacgatgttaggaagaaggatcaagtgaaggagaaaggtgaaaatgctggaaggtggggcttagtgatgaaacaaaccttggggacaggtgggcgtggtactgagagtcccagtgaggggagtgccctcaggcaggcgccggtggcttctgtcacaggagggaacagcgctgacattcagctggttcgcactgatacggctcaaccagtttgttaaaacatgtctgttccagtgtcagtaatatacgagtaactgcaatatgcagtaaaaattataaattctaatacaaactcagttcaagctaattaagagatcgcaacagccgttggtaaatggacttcccgctgcatttgagaagctttgcagcgccatctgccggtgtcgtagcatcactgcaggctgagaggctgctttgcgccttcatcttgaagcactctgaaattgcctgtttaaattaccttggaatcatggagttgctactgcttctgaatagtttagcttctactttgattttattgttagtgcattgtcgttcttgtgtcagtagcaagtttcagtgttttaatatttacaaatacaaaaatttttaataaaatattaaagccaaacttgaatgaagagacaacaaa

SEQ ID NO: 139349 - DNA, 1094 bp, Homo sapiens
  Payload ID: 7316
  Gene Symbol: GNL1
  Gene Name: guanine nucleotide binding protein-like 1
  ENST ID: ENST00000458592
  CDS Start-End: 302-1094
gcacatctggaaggaggggtgtgcccgctgcacctctggggatcgtgggagggggtcgtgggaccgcgtcaaccctcgcggcctatcgcggaggggatcccccaccccccctacatctggaaggggtggggaaggatggagagttgggggaggggaatccctccagctagcacggggcgccgtccccactgctccctgaaggagtgactccccccacgcacatccgggagggtcccaaatagggtgtctgggaggactgaacatcggaagaagttgagtgggatgaaagggagtcaggccgatgggggagagggtcttatggcccctgagagctggccagcactggcgtcaccggcccctccccgcagggcttcaagatgggctgcgctccagttccaacagccgcagcgggagccgggagcggcgagaggaacagaccgacacctcggacggggagtctgtgacccatcatatccgcaggcttaaccagcagccttctcaggggctgggtccacgaggctacgacccaaatcgataccgactgcattttgagagagacagcagggaggaggtagagaggagaaagagagcagcccgggagcaagttctacagccggtcagtgctgagttgttggagctggacatccgggaggtgtatcagcctggctcagttctggactttcctcgacgtcctccttggagctatgagatgtccaaggagcaactaatgagccaagaggaacggagcttccaagactatcttgggaagattcatggggcttactcctctgagaaactcagctactttgagcacaatctggagacatggaggcagctgtggcgggtgttagagatgtctgacatcgtcctgcttatcactgatatccgacatccagttgtgaatttcccgccagcactttatgagtatgtgactggagaacttggactggccctggtgctggttttgaacaaggtggatctggccccgccagctcttgtggttgcctggaagcattatttccatcaacactatccccagctccacgtcgtccttttcacctcttttcctcgggacccccgcaccccacaggatc

SEQ ID NO: 139350 - DNA, 7490 bp, Homo sapiens
  Payload ID: 7316
  Gene Symbol: GNL1
  Gene Name: guanine nucleotide binding protein-like 1
  Uniprot ID: P36915
  ENST ID: ENST00000441604
  CDS Start-End: 972-2795
tgcctccctccgtctctgccaggcatggcggcaacctcacaccttccctttgctgcgtttctataaatgctttgaaaaaattactcttttcttccctcgctggaaaacaccacaaccagctcctcagagtgtgtcacagagtcaacaggctctcgggccagagggcctgagaagaggactgtcgcaccgtaagatcgccacatccggtcctcggttactatggtaacagctgcaggcacaacttcgtgccctttgacctccccccaaaagtccttgtcccgcttgggtttcccttctcgcccgcttttgcacttatgatctgtaaacctgctccttatcatcgttcccacaaggaatttgggtcccaacaggtcggcacccaggactctcagaccgccgccctcccctaaagacctctgaccgtgcccccggtgtagtccagcaacctggacgcagtctcggctttccactaaggtcaagcccggggctttgtagtatagcctcagcgtgtccacgccccctctcccctaggtagtaggccccgccctccgctccgccgccccctccaggtgagtggtaggttctcccgggagcgcaaggtagtgatgacacgcgccccccctcctccgaacgcgagttggtagcgtccgtgacggagttagcctggtcctcccacgcgcgcctccttcctcgccgccggggcgccctctcggtgccactggctctcacgtgccagtagcccaccccgcatcatcctctcgcctcgctcctggagggaagtgactatatctcccccgtccgccttccatcgccgccgcggcggtaattctgtcgggcccgcccgctgacgtcacctgctagccccgcctcctctagggtcccgggcccctgcggcgggggctgccccggggggcagtcagttgaggcggcgggagctcggcggagggcgggccaggtgactggtccgggccatgccgaggaagaagccattcagcgtgaagcagaagaagaagcagttgcaggacaaacgggagcggaagagagggcttcaagatgggctgcgctccagttccaacagccgcagcgggagccgggagcggcgagaggaacagaccgacacctcggacggggagtctgtgacccatcatatccgcaggcttaaccagcagccttctcaggggctgggtccacgaggctacgacccaaatcgataccgactgcattttgagagagacagcagggaggaggtagagaggagaaagagagcagcccgggagcaagttctacagccggtcagtgctgagttgttggagctggacatccgggaggtgtatcagcctggctcagttctggactttcctcgacgtcctccttggagctatgagatgtccaaggagcaactaatgagccaagaggaacggagcttccaagactatcttgggaagattcatggggcttactcctctgagaaactcagctactttgagcacaatctggagacatggaggcagctgtggcgggtgttagagatgtctgacatcgtcctgcttatcactgatatccgacatccagttgtgaatttcccgccagcactttatgagtatgtgactggagaacttggactggccctggtgctggttttgaacaaggtggatctggccccgccagctcttgtggttgcctggaagcattatttccatcaacactatccccagctccacgtcgtccttttcacctcttttcctcgggacccccgcaccccacaggatcctagtagtgtcttgaagaagagtcggaggcgggggagaggatggactcgggccctggggccagagcagttgctgagagcctgtgaagccatcactgtggggaaagtggacttgagcagctggcgggagaagattgctcgggatgtggctggggccacctggggtaatggctctggggaggaggaggaagaggaggatggcccagcagtcctggtggagcagcagactgattcagcaatggagccaactggcccaacccaagagcgctacaaggatggggtggtgaccatcggctgtgtgggtttccctaatgtgggaaagtcctcgctgatcaatgggctggtggggcggaaagtcgtgagtgtctccagaaccccgggccatacccgatactttcagacctactttcttaccccctctgtgaagctctgtgactgcccaggcctcatcttcccatctcttctgcctaggcagttgcaggttctggcggggatctaccctatcgcccagatccaggagccctacactgctgtgggctacctggcctcccgaattcccgtgcaggccctgctccacctgcgccacccagaggctgaggacccctcagcggaacacccctggtgtgcctgggacatctgtgaagcctgggcagagaaacgtggttacaagacagccaaggcggctcggaatgatgtgtacagagcagccaacagtctcttgcggctggcagtggacggccgcctcagcctgtgttttcatcccccaggctacagtgaacagaaaggcacctgggagtcccatccagagaccacggagctggtggttttgcagggcagggtggggccagcaggtgacgaggaggaggaggaagaggaagagctgagcagctcctgtgaggaggagggagaggaggaccgggatgcggatgaggagggagaaggggatgaggagaccccaacctcggctccagggtccagcctggctggccgaaacccttatgccctgctgggtgaggatgagtgctgagttcctcgcccagcgccatcttccctcccagtatctttgcttttggactgacctgggggtatctcccctctgccaccccaattgtgaataaagattgtttgctttgtagccccttccccagatgaactgaggtgagagcggctgttccaggctaacagctgtgggaggcttctctcctcttctcccttcttttttcatgcattctctttgcaagggaaagttctcttaggagtttagtaggttctcagtctctgaaacctgcttcctctacccattctcccactctgcaccttaggaatcccgttatctacatggggaggggaggtctaaatccagctcccttttggagtttgtgccattctccgatttgagcagcagccctgtgtgccccctgccgccagacctgctcattccaggagcttctgggagaaggaacagtaagagaggaactgtgtcccaagctgatgtctcttaatgagatttttacaggaattgttcaaattcagcaaatatttattgagggtctattgtgtgtcttgacctgtgctgagcaccaagcatataaggatgtaccaccagagcctgacctaaatttgaagcctggccatgatcaaaaccccaccttcaggcacccaagtttttggattaagaagggtgaatgatgttctccaaatcctgggggctcatgcagtataattctaggacttcatgttgatacaaatttttagttaaggcaaaacgcttgtgaaaatgttgattaaatgtgtacgagtagttttaattactggtgaacaactagcgtgcacatttatgatttgagcagaacagccctttaagtacagtgttaagtttcattgtttaaaagcttggcagctacgagtatttgaggtacataggggcgggcacagaaccagcctcctgaattccatttactctggtttgggggtggaacaaagatgatccagtgcagggtctgagctagaacctagcaggtggccagaaccattttagggtttcacctcagcatttcggcagaaatcagctctctcgtgagtcagggcaccttaggctttgctgtatatccctttgttaagccagcagctagactcctagattgaattcttttagaaatgggagaatgagcttttttattgactgccagtgttgtctgtattggatgatagcaaaaagtgtagttggacaggttgcccactagatggagtgagaagtaccagactccttttttctctaaagcagatcctttcaggatctgagtcactgggcagtttctctaatgcgagcagacagaccctgttaaccaaggagcaaaggaaagtatatttaaagaggctaaggtgtttggccacatattgctttaggttcatctccattggtctcagtgtggacataactcctggaattcactccagtgcaaagtttaaataataccagcatgagaatgtacttgaaggtttcccaaaatgtgctagacaagaaagagaaaaggtcccagctgagagaaaaatccacctgtctcccatctggggctctttggcctcactgatagaaaaggaaaaggggcccaagctaagcttactttgagggttcatgatgttcagagatgctcaggggacttctccgctgcaggaggtggggtgaggacattggattcatttcctcaaaatgtggagagaaaggagaaaaatcagaattctatttgtacctctgcttcctgtgctgtttatctttgcttgtctttatctttttccacctcaggggtttcatcaggggtatttgggagagtctaggggtggggatgaagaattgactgggagctgaggaggggggatttttatgctgaagacctggcaggaggcaactcctgacacccccacagggttagactgtaaaacctcttccatgacttgctgactctataggataatagcaacaggaaaagaactgagggacgtgcagatgaggatgaatagggccccaacaccagtgcctgaggctgaggttagaactgactacaaagacacaggaaaccaagggcccagtctcccctccacgctgaaatacgcaccctcttgtctgggtcatgtctactatgtgaatacttgaccatggaggtctggggctctggtggcttccatagctggctagtctcttgatggagagaaatcagggcttctctcatccatgctggaatttcatttagatgtcaacttccaagtttccctttttccagatgggattatagtcctgcttctggaacagggtagctgtgtgtggtccaggatagttcaattatctggccctttgttcacttcttacaatcattgatacagtcaacaaaaattggttaaaaacaatatatgccagacatatatccctgagttctgggacaataaccaaaattgaataaggcaatatcctactctcaagcaatagagggtaggaatagaataataataatataatacaatagctctatagcagtatgtaaactataaaagcattattttacgtgtttctattgaactgtcataactaaataagatggttagtactataattatcccaaggattcattcactcatagaacatttgttgagcaattactacctgccagtcacttccaagtggtaagtgagatagaaatggttctttgtggcgctcacaatttattggagaatggaaacacaattacaaaaaaaaagtgtgataagttctgggagaagggtggtacaggatcctgtggggtagtggtggctccatataggagggacattgggatactgatcaggaaggagtgggggacagggctagaagctgcattagtataaagttatgtcagactgccaaaacaaaacaaacacaaaaaatcagtagtctgtggtaaagaattgctataggaacagccagtaggggcagttaagctggtcttggtgaatcaggggaagcgtcctagaggaacagatgtccatgctgaggccaaatgctggacaggagttagccagacagggaaattgcattctgggcagaggagacagcaaaggtcaagaaacatgacaactttggaagactgtaacttgttcagaggcagagggtgcaaaggagaaatgaggaaaggtgaagctggagaggtgggcttggtccagctcttgctgggccttttcagccgtgttaaagatttagactgtatccagagggatgttgaactttaagcctaagactgaaaaggtgagaattgtgccttagatcactatggttgcagtgtggagactggtttggaaaggggagaaatcagaggcttttacagccatcccagggagagagaatgaacaccagaattagggtaatggaagatggaaagaagagaaatcgttttatgggttgctcaggagatagaattgacatgtcttgggattgttttgctgtgtaggggagagagacaagtcaagagtatacatcctgtttctgacttggcaactgggtgggtcatgggtctgtttcctgagacagttgtctacagccataccaccgtaagcgccctaaatctcatcagagacagtttatgcaaatggagcttggggaaagagaggtcgtggctggagacagagatttgggcatcatcaacatataggtgtggggagcagagaaggctgaggaagaaagcaggaaacatataaaaaggagagcagggaaaggagccagtgagacaggaaaaacctagtaacgtggtgtgatgaagctaggggaggaaggaaggaaggaagggcggcgtggaacgctgctgatgggtggtggcggggaaaatgaacgagtatccaccagcaacgagaggggcctccatggtcttggtgggagcatttctttggagaggtggaatcagaagccccagatgtcagagggttaaggaataatttggaggaaaagcgtaaaggcagtggaggtgaggagagaattttcaaaatgtttggcagtgattgcaatgaaagaaaaaaatggagggagcagagtatatgcagttgaggaacttttttagtttggagtgtgttaacacgatgttaggaagaaggatcaagtgaaggagaaaggtgaaaatgctggaaggtggggcttagtgatgaaacaaaccttggggacaggtgggcgtggtactgagagtcccagtgaggggagtgccctcaggcaggcgccggtggcttctgtcacaggagggaacagcgctgacattcagctggttcgcactgatacggctcaaccagtttgttaaaacatgtctgttccagtgtcagtaatatacgagtaactgcaatatgcagtaaaaattataaattctaatacaaactcagttcaagctaattaagagatcgcaacagccgttggtaaatggacttcccgctgcatttgagaagctttgcagcgccatctgccggtgtcgtagcatcactgcaggctgagaggctgctttgcgccttcatcttgaagcactctgaaattgcctgtttaaattaccttggaatcatggagttgctactgcttctgaatagtttagcttctactttgattttattgttagtgcattgtcgttcttgtgtcagtagcaagtttcagtgttttaatatttacaaatacaaaaatttttaataaaatattaaagccaaacttgaatgaagagacaacaaa

SEQ ID NO: 139351 - DNA, 198 bp, Homo sapiens
  Payload ID: 7316
  Gene Symbol: GNL1
  Gene Name: guanine nucleotide binding protein-like 1
  ENST ID: ENST00000456550
  CDS Start-End: 1-198
gttgtgaatttcccgccagcactttatgagtatgtgactggagaacttggactggccctggtgctggttttgaacaaggtggatctggccccgccagctcttgtggttgcctggaagcattatttccatcaacactatccccagctccacgtcgtccttttcacctcttttcctcgggacccccgcaccccacaggat

SEQ ID NO: 139352 - DNA, 1093 bp, Homo sapiens
  Payload ID: 7316
  Gene Symbol: GNL1
  Gene Name: guanine nucleotide binding protein-like 1
  ENST ID: ENST00000430236
  CDS Start-End: 302-1093
gcacatctggaaggaggggtgtgcccgctgcacctctggggatcgtgggagggggtcgtgggaccgcgtcaaccctcgcggcctatcgcggaggggatcccccaccccccctacatctggaaggggtggggaaggatggagagttgggggaggggaatccctccagctagcacggggcgccgtccccactgctccctgaaggagtgactccccccacgcacatccgggagggtcccaaatagggtgtctgggaggactgaacatcggaagaagttgagtgggatgaaagggagtcaggccgatgggggagagggtcttatggcccctgagagctggccagcactggcgtcaccggcccctccccgcagggcttcaagatgggctgcgctccagttccaacagccgcagcgggagccgggagcggcgagaggaacagaccgacacctcggacggggagtctgtgacccatcatatccgcaggcttaaccagcagccttctcaggggctgggtccacgaggctacgacccaaatcgataccgactgcattttgagagagacagcagggaggaggtagagaggagaaagagagcagcccgggagcaagttctacagccggtcagtgctgagttgttggagctggacatccgggaggtgtatcagcctggctcagttctggactttcctcgacgtcctccttggagctatgagatgtccaaggagcaactaatgagccaagaggaacggagcttccaagactatcttgggaagattcatggggcttactcctctgagaaactcagctactttgagcacaatctggagacatggaggcagctgtggcgggtgttagagatgtctgacatcgtcctgcttatcactgatatccgacatccagttgtgaatttcccgccagcactttatgagtatgtgactggagaacttggactggccctggtgctggttttgaacaaggtggatctggccccgccagctcttgtggttgcctggaagcattatttccatcaacactatccccagctccacgtcgtccttttcacctcttttcctcgggacccccgcaccccacaggat

SEQ ID NO: 139353 - DNA, 1093 bp, Homo sapiens; identical to SEQ ID NO: 139352
  Payload ID: 7316
  Gene Symbol: GNL1
  Gene Name: guanine nucleotide binding protein-like 1
  ENST ID: ENST00000450423
  CDS Start-End: 302-1093

SEQ ID NO: 139354 - DNA, 1093 bp, Homo sapiens
  Payload ID: 7316
  Gene Symbol: GNL1
  Gene Name: guanine nucleotide binding protein-like 1
  ENST ID: ENST00000443235
  CDS Start-End: 302-1093
gcacatctggaaggaggggtgtgcccgctgcacctctggggatcgtgggagggggtcgtgggaccgcgtcaaccctcgcggcctatcgcggaggggatcccccaccccccctacatctggaaggggtggggaaggatggagagttgggggaggggaatccctccagctagcacggggcgccgtccccactgctccctgaaggagtgactccccccacgcacatccgggagggtcccaaatagggtgtctgggaggactgaacatcggaagaagttgagtgggatgaaagggagtcaggccgatgggggagagggtcttatggcccctgagagctggccagcactggcgtcaccggcccctccccgcagggcttcaagatgggctgcgctccagttccaacagccgcagcgggagccgggagcggcgagaggaacagaccgacacctcggacggggagtctgtgacccatcatatccgcaggcttaaccagcagccttctcaggggctgggtccacgaggctacgacccaaatcgataccgactgcattttgagagagacagcagggaggaggtagagaggagaaagagagcagcccgggagcaagttctacagccggtcagtgctgagttgttggagctggacatccgggaggtgtatcagcctggctcagttctggactttcctcgacgtcctccttggagctatgagatgtccaaggagcaactaatgagccaagaggaacggagcttccaagactatcttgggaagattcatggggcttactcctctgagaaactcagctactttgagcacaatctggagacatggaggcagctgtggcgggtgttagagatgtctgacatcgtcctgcttatcactgatatccgacatccagttgtgaatttcccgccagcactttatgagtatgtgactggagaacttggactggccctggtgctggttttgaacaaggtggatctggccccgccagctcttgtggttgcctggaagcattatttccatcaacactatccccagctccacgtcgtccttttcacctcttttcctcgggacccccgcaccccacaggac

SEQ ID NO: 139355 - DNA, 7490 bp, Homo sapiens
  Payload ID: 7316
  Gene Symbol: GNL1
  Gene Name: guanine nucleotide binding protein-like 1
  Uniprot ID: P36915
  ENST ID: ENST00000417834
  CDS Start-End: 972-2795
tgcctccctccgtctctgccaggcatggcggcaacctcacaccttccctttgctgcgtttctataaatgctttgaaaaaattactcttttcttccctcgctggaaaacaccacaaccagctcctcagagtgtgtcacagagtcaacaggctctcgggccagagggcctgagaagaggactgtcgcaccgtaagatcgccacatccggtcctcggttactatggtaacagctgcaggcacaacttcgtgccctttgacctccccccaaaagtccttgtcccgcttgggtttcccttctcgcccgcttttgcacttatgatctgtaaacctgctccttatcatcgttcccacaaggaatttgggtcccaacaggtcggcacccaggactctcagaccgccgccctcccctaaagacctctgaccgtgcccccggtgtagtccagcaacctggacgcagtctcggctttccactaaggtcaagcccggggctttgtagtatagcctcagcgtgtccacgccccctctcccctaggtagtaggccccgccctccgctccgccgccccctccaggtgagtggtaggttctcccgggagcgcaaggtagtgatgacacgcgccccccctcctccgaacgcgagttggtagcgtccgtgacggagttagcctggtcctcccacgcgcgcctccttcctcgccgccggggcgccctctcggtgccactggctctcacgtgccagtagcccaccccgcatcatcctctcgcctcgctcctggagggaagtgactatatctcccccgtccgccttccatcgccgccgcggcggtaattctgtcgggcccgcccgctgacgtcacctgctagccccgcctcctctagggtcccgggcccctgcggcgggggctgccccggggggcagtcagttgaggcggcgggagctcggcggagggcgggccaggtgactggtccgggccatgccgaggaagaagccattcagcgtgaagcagaagaagaagcagttgcaggacaaacgggagcggaagagagggcttcaagatgggctgcgctccagttccaacagccgcagcgggagccgggagcggcgagaggaacagaccgacacctcggacggggagtctgtgacccatcatatccgcaggcttaaccagcagccttctcaggggctgggtccacgaggctacgacccaaatcgataccgactgcattttgagagagacagcagggaggaggtagagaggagaaagagagcagcccgggagcaagttctacagccggtcagtgctgagttgttggagctggacatccgggaggtgtatcagcctggctcagttctggactttcctcgacgtcctccttggagctatgagatgtccaaggagcaactaatgagccaagaggaacggagcttccaagactatcttgggaagattcatggggcttactcctctgagaaactcagctactttgagcacaatctggagacatggaggcagctgtggcgggtgttagagatgtctgacatcgtcctgcttatcactgatatccgacatccagttgtgaatttcccgccagcactttatgagtatgtgactggagaacttggactggccctggtgctggttttgaacaaggtggatctggccccgccagctcttgtggttgcctggaagcattatttccatcaacactatccccagctccacgtcgtccttttcacctcttttcctcgggacccccgcaccccacaggatcctagtagtgtcttgaagaagagtcggaggcgggggagaggatggactcgggccctggggccagagcagttgctgagagcctgtgaagccatcactgtggggaaagtggacttgagcagctggcgggagaagattgctcgggatgtggctggggccacctggggtaatggctctggggaggaggaggaagaggaggatggcccagcagtcctggtggagcagcagactgattcagcaatggagccaactggcccaacccaagagcgctacaaggatggggtggtgaccatcggctgtgtgggtttccctaatgtgggaaagtcctcgctgatcaatgggctggtggggcggaaagtcgtgagtgtctccagaaccccgggccatacccgatactttcagacctactttcttaccccctctgtgaagctctgtgactgcccaggcctcatcttcccatctcttctgcctaggcagttgcaggttctggcagggatctaccctatcgcccagatccaggagccctacactgctgtgggctacctggcctcccgaattcccgtgcaggccctgctccacctgcgccacccagaggctgaggacccctcagcggaacacccctggtgtgcctgggacatctgtgaagcctgggcagagaaacgtggttacaagacagccaaggcggctcggaatgatgtgtacagagcagccaacagtctcttgcggctggcagtggacggccgcctcagcctgtgttttcatcccccaggctacagtgaacagaaaggcacctgggagtcccatccagagaccacggagctggtggttttgcagggcagggtggggccagcaggtgacgaggaggaggaggaagaggaagagctgagcagctcctgtgaggaggagggagaggaggaccgggatgcggatgaggagggagaaggggatgaggagaccccaacctcggctccagggtccagcctggctggccgaaacccttatgccctgctgggtgaggatgagtgctgagttcctcgcccagcgccatcttccctcccagtatctttgcttttggactgacctgggggtatctcccctctgccaccccaattgtgaataaagattgtttgctttgtagccccttccccagatgaactgaggtgagagcggctgttccaggctaacagctgtgggaggcttctctcctcttctcccttcttttttcatgcattctctttgcaagggaaagttctcttaggagtttagtaggttctcagtctctgaaacctgcttcctctacccattctcccactctgcaccttaggaatcccgttatctacatggggaggggaggtctaaatccagctcccttttggagtttgtgccattctccgatttgagcagcagccctgtgtgccccctgccgccagacctgctcattccaggagcttctgggagaaggaacagtaagagaggaactgtgtcccaagctgatgtctcttaatgagatttttacaggaattgttcaaattcagcaaatatttattgagggtctattgtgtgtcttgacctgtgctgagcaccaagcatataaggatgtaccaccagagcctgacctaaatttgaagcctggccatgatcaaaaccccaccttcaggcacccaagtttttggattaagaagggtgaatgatgttctccaaatcctgggggctcatgcagtataattctaggacttcatgttgatacaaatttttagttaaggcaaaacgcttgtgaaaatgttgattaaatgtgtacgagtagttttaattactggtgaacaactagcgtgcacatttatgatttgagcagaacagccctttaagtacagtgttaagtttcattgtttaaaagcttggcagctacgagtatttgaggtacataggggcgggcacagaaccagcctcctgaattccatttactctggtttgggggtggaacaaagatgatccagtgcagggtctgagctagaacctagcaggtggccagaaccattttagggtttcacctcagcatttcggcagaaatcagctctctcgtgagtcagggcaccttaggctttgctgtatatccctttgttaagccagcagctagactcctagattgaattcttttagaaatgggagaatgagcttttttattgactgccagtgttgtctgtattggatgatagcaaaaagtgtagttggacaggttgcccactagatggagtgagaagtaccagactccttttttctctaaagcagatcctttcaggatctgagtcactgggcagtttctctaatgcgagcagacagaccctgttaaccaaggagcaaaggaaagtatatttaaagaggctaaggtgtttggccacatattgctttaggttcatctccattggtctcagtgtggacataactcctggaattcactccagtgcaaagtttaaataataccagcatgagaatgtacttgaaggtttcccaaaatgtgctagacaagaaagagaaaaggtcccagctgagagaaaaatccacctgtctcccatctggggctctttggcctcactgatagaaaaggaaaaggggcccaagctaagcttactttgagggttcatgatgttcagagatgctcaggggacttctccgctgcaggaggtggggtgaggacattggattcatttcctcaaaatgtggagagaaaggagaaaaatcagaattctatttgtacctctgcttcctgtgctgtttatctttgcttgtctttatctttttccacctcaggggtttcatcaggggtatttgggagagtctaggggtggggatgaagaattgactgggagctgaggaggggggatttttatgctgaagacctggcaggaggcaactcctgacacccccacagggttagactgtaaaacctcttccatgacttgctgactctataggataatagcaacaggaaaagaactgagggacgtgcagatgaggatgaatagggccccaacaccagtgcctgaggctgaggttagaactgactacaaagacacaggaaaccaagggcccagtctcccctccacgctgaaatacgcaccctcttgtctgggtcatgtctactatgtgaatacttgaccatggaggtctggggctctggtggcttccatagctggctagtctcttgatggagagaaatcagggcttctctcatccatgctggaatttcatttagatgtcaacttccaagtttccctttttccagatgggattatagtcctgcttctggaacagggtagctgtgtgtggtccaggatagttcaattatctggccctttgttcacttcttacaatcattgatacagtcaacaaaaattggttaaaaacaatatatgccagacatatatccctgagttctgggacaataaccaaaattgaataaggcaatatcctactctcaagcaatagagggtaggaatagaataataataatataatacaatagctctatagcagtatgtaaactataaaagcattattttacgtgtttctattgaactgtcataactaaataagatggttagtactataattatcccaaggattcattcactcatagaacatttgttgagcaattactacctgccagtcacttccaagtggtaagtgagatagaaatggttctttgtggcgctcacaatttattggagaatggaaacacaattacaaaaaaaaagtgtgataagttctgggagaagggtggtacaggatcctgtggggtagtggtggctccatataggagggacattgggatactgatcaggaaggagtgggggacagggctagaagctgcattagtataaagttatgtcagactgccaaaacaaaacaaacacaaaaaatcagtagtctgtggtaaagaattgctataggaacagccagtaggggcagttaagctggtcttggtgaatcaggggaagcgtcctagaggaacagatgtccatgctgaggccaaatgctggacaggagttagccagacagggaaattgcattctgggcagaggagacagcaaaggtcaagaaacatgacaactttggaagactgtaacttgttcagaggcagagggtgcaaaggagaaatgaggaaaggtgaagctggagaggtgggcttggtccagctcttgctgggccttttcagccgtgttaaagatttagactgtatccagagggatgttgaactttaagcctaagactgaaaaggtgagaattgtgccttagatcactatggttgcagtgtggagactggtttggaaaggggagaaatcagaggcttttacagccatcccagggagagagaatgaacaccagaattagggtaatggaagatggaaagaagagaaatcgttttatgggttgctcaggagatagaattgacatgtcttgggattgttttgctgtgtaggggagagagacaagtcaagagtatacatcctgtttctgacttggcaactgggtgggtcatgggtctgtttcctgagacagttgtctacagccataccaccgtaagcgccctaaatctcatcagagacagtttatgcaaatggagcttggggaaagagaggtcgtggctggagacagagatttgggcatcatcaacatataggtgtggggagcagagaaggctgaggaagaaagcaggaaacatataaaaaggagagcagggaaaggagccagtgagacaggaaaaacctagtaacgtggtgtgatgaagctaggggaggaaggaaggaaggaagggcggcgtggaacgctgctgatgggtggtggcggggaaaatgaacgagtatccaccagcaacgagaggggcctccatggtcttggtgggagcatttctttggagaggtggaatcagaagccccagatgtcagagggttaaggaataatttggaggaaaagcgtaaaggcagtggaggtgaggagagaattttcaaaatgtttggcagtgattgcaatgaaagaaaaaaatggagggagcagagtatatgcagttgaggaacttttttagtttggagtgtgttaacacgatgttaggaagaaggatcaagtgaaggagaaaggtgaaaatgctggaaggtggggcttagtgatgaaacaaaccttggggacaggtgggcgtggtactgagagtcccagtgaggggagtgccctcaggcaggcgccggtggcttctgtcacaggagggaacagcgctgacattcagctggttcgcactgatacggctcaaccagtttgttaaaacatgtctgttccagtgtcagtaatatacgagtaactgcaatatgcagtaaaaattataaattctaatacaaactcagttcaagctaattaagagatcgcaacagccgttggtaaatggacttcccgctgcatttgagaagctttgcagcgccatctgccggtgtcgtagcatcactgcaggctgagaggctgctttgcgccttcatcttgaagcactctgaaattgcctgtttaaattaccttggaatcatggagttgctactgcttctgaatagtttagcttctactttgattttattgttagtgcattgtcgttcttgtgtcagtagcaagtttcagtgttttaatatttacaaatacaaaaatttttaataaaatattaaagccaaacttgaatgaagagacaacaaa

SEQ ID NO: 139356 - DNA, 1093 bp, Homo sapiens; identical to SEQ ID NO: 139354
  Payload ID: 7316
  Gene Symbol: GNL1
  Gene Name: guanine nucleotide binding protein-like 1
  ENST ID: ENST00000433809
  CDS Start-End: 302-1093

SEQ ID NO: 139357 - DNA, 1093 bp, Homo sapiens; identical to SEQ ID NO: 139354
  Payload ID: 7316
  Gene Symbol: GNL1
  Gene Name: guanine nucleotide binding protein-like 1
  ENST ID: ENST00000416639
  CDS Start-End: 302-1093

SEQ ID NO: 139358 - DNA, 7490 bp, Homo sapiens; identical to SEQ ID NO: 139348
  Payload ID: 7316
  Gene Symbol: GNL1
  Gene Name: guanine nucleotide binding protein-like 1
  Uniprot ID: P36915
  ENST ID: ENST00000428189
  CDS Start-End: 972-2795

SEQ ID NO: 139359 - DNA, 7490 bp, Homo sapiens; identical to SEQ ID NO: 139346
  Payload ID: 7316
  Gene Symbol: GNL1
  Gene Name: guanine nucleotide binding protein-like 1
  Uniprot ID: P36915
  ENST ID: ENST00000454829
  CDS Start-End: 972-2795

SEQ ID NO: 139360 - DNA, 1093 bp, Homo sapiens; identical to SEQ ID NO: 139352
  Payload ID: 7316
  Gene Symbol: GNL1
  Gene Name: guanine nucleotide binding protein-like 1
  ENST ID: ENST00000435788
  CDS Start-End: 302-1093

SEQ ID NO: 139361 - DNA, 7490 bp, Homo sapiens; identical to SEQ ID NO: 139346
  Payload ID: 7316
  Gene Symbol: GNL1
  Gene Name: guanine nucleotide binding protein-like 1
  Uniprot ID: P36915
  ENST ID: ENST00000437917
  CDS Start-End: 972-2795

SEQ ID NO: 139362 - DNA, 2334 bp, Homo sapiens
  Payload ID: 7317
  Gene Symbol: GNL2
  Gene Name: guanine nucleotide binding protein-like 2 (nucleolar)
  Uniprot ID: Q13823
  ENST ID: ENST00000373062
  CDS Start-End: 100-2295
gtggttcaggcgggtgtcttcggccgggcttgggaacataaaagtttgtttcaccacgtaagccggacctcgcactccggtcccggtctcgtcgccaagatggtgaagcccaagtacaaaggacggagcaccatcaacccgtccaaggccagcacaaacccagatcgagtgcagggagcaggaggccaaaacatgagggaccgggccaccatccggcgcctgaatatgtataggcaaaaggagcgcaggaacagtcgtggtaaaataattaaacccctgcaatatcaatcaacggtggcttctggcacagtggcaagagtagagccaaatattaaatggtttggaaacacacgtgtgattaagcagtcatcattacaaaaatttcaagaggaaatggatacagttatgaaggatccatacaaagttgtcatgaagcaaagcaagttaccaatgtctcttctccatgatcgaatccggcctcataacttgaaggtgcacattcttgatactgaaagttttgaaactacatttggccctaagtcacagaggaaacgaccaaacttatttgcaagtgatatgcagtctcttatcgaaaatgctgaaatgtccactgagagctatgaccagggcaaggatcgtgatttggtaactgaagacactggtgtgagaaatgaagctcaagaagagatctataaaaagggacagtccaaaagaatatggggtgagctctacaaggtgatagattcatcagatgttgtagttcaagttcttgatgctagagatccaatgggtactcgttcccctcacattgaaacttacctgaagaaggaaaaaccttggaaacacctcatttttgtacttaacaaatgtgaccttgttccaacctgggcaacaaaacggtgggttgctgtcctctcccaggattatccaacacttgctttccatgcaagccttactaacccgtttggcaagggagcattcattcagcttctgcggcagtttggaaagttgcacactgacaagaaacagatcagtgttgggttcattggctatccaaatgttggcaagagctctgtgataaatacattgcgttctaagaaagtttgcaacgtggctcccattgcaggtgaaacaaaggtctggcagtatattactttgatgcgtcggatattcctgattgactgtccaggtgtggtttacccctctgaggactccgagacagacattgtgctaaaaggagttgttcaagtagaaaaaattaagagtcctgaagaccacattggtgctgtacttgaacgagcaaagccagaatatatcagcaaaacatacaagattgattcttgggagaatgctgaggactttcttgagaagctcgctttccggactgggaagttactaaagggtggagagcccgacttgcagactgtgggtaagatggtcctcaatgactggcagaggggccggattcctttctttgtcaagccacccaatgcagagccacttgtggccccccagcttctaccctcctcatctttggaagttgtcccagaagcagcccagaacaatccaggggaggaagtcacagaaactgcaggtgaagggtcagaatccatcattaaggaagaaacagaagagaacagtcactgtgatgctaacacagagatgcagcagattctcacacgagttcggcagaactttggtaaaatcaacgtggtgcctcagttttctggggatgacctggttcctgtggaggtgtcagatcttgaggaagagcttgagagcttttctgatgaagaggaggaggaacaggagcaacaaagagatgatgcggaagagtcttcctcggagcctgaggaggaaaatgtgggaaacgacaccaaagccgttattaaagcactggatgagaagattgccaaatatcagaagtttctagacaaagccaaagccaaaaagttttcagcagtcagaatatccaagggactgagtgaaaagatatttgcaaaacctgaagaacaaagaaaaacactggaagaagatgtagatgacagagcaccttccaaaaagggaaagaagcggaaggcacaaagggaagaggaacaggaacattcaaataaagctcccagggcgcttacatcaaaagaacggaggcgagcagtacgacagcaacggccgaaaaaagttggtgtgcgctactatgaaacacacaacgtgaaaaataggaacaggaacaaaaagaagaccaatgactcagagggacagaaacacaaacgcaaaaaattcagacaaaagcagtaatgtttaaaaggtttttattaaattatacaaaaacaggca

SEQ ID NO: 139363 - DNA, 698 bp, Homo sapiens
  Payload ID: 7317
  Gene Symbol: GNL2
  Gene Name: guanine nucleotide binding protein-like 2 (nucleolar)
  ENST ID: ENST00000538069
  CDS Start-End: 1-698
cagatgttgtagttcaagttcttgatgctagagatccaatgggtactcgttcccctcacattgaaacttacctgaagaaggaaaaaccttggaaacacctcatttttgtacttaacaaatgtgaccttgttccaacctgggcaacaaaacggtgggttgctgtcctctcccaggattatccaacacttgctttccatgcaagccttactaacccgtttggcaagggagcattcattcagcttctgcggcagtttggaaagccctggcacctgacgttccacgctctgctgggctttccaggcctgctgtgcatcctctgcccatggagcccatgcagcttctatgtcctctggttggagagggccctgccaaaattcaagcttcagatccctggtcagacgtcagctcctgagggaagccgtggaaccagactaccctatcaaattcttaaagcttcatgttctttgcacactgacaagaaacagatcagtgttgggttcattggctatccaaatgttggcaagagctctgtgataaatacattgcgttctaagaaagtttgcaacgtggctcccattgcaggtgaaacaaaggtctggcagtatattactttgatgcgtcggatattcctgattgactgtccaggtgtggtttacccctctgaggactccgagacagacattgtgctaaaaggagtt

SEQ ID NO: 139364 - DNA, 2041 bp, Homo sapiens
  Payload ID: 7318
  Gene Symbol: GNL3
  Gene Name: guanine nucleotide binding protein-like 3 (nucleolar)
  Uniprot ID: Q9BVP2
  ENST ID: ENST00000394799
  CDS Start-End: 211-1824
gctcgtcagtggcttcagttcacacgtggcgccagcggaggcaggttgatgtgtttgtgcttccttctacagccaatatgaaaaggcctagtaagtggggtcgggaggcgggcgtggagggacccacgtctggaagttgctgcagccaccacgacgctcttctacggctacggctttgtctctgctgagttaaagaaagcaagtaaacgcatgacctgccataagcggtataaaatccaaaaaaaggttcgagaacatcatcgaaaattaagaaaggaggctaaaaagcggggtcacaagaagcctaggaaagacccaggagttccaaacagtgctccctttaaggaggctcttcttagggaagctgagctaaggaaacagaggcttgaagaactaaaacagcagcagaaacttgacaggcagaaggaactagaaaagaaaagaaaacttgaaactaatcctgatattaagccatcaaatgtggaacctatggaaaaggagtttgggctttgcaaaactgagaacaaagccaagtcgggcaaacagaattcaaagaagctgtactgccaagaacttaaaaaggtgattgaagcctccgatgttgtcctagaggtgttggatgccagagatcctcttggttgcagatgtcctcaggtagaagaggccattgtccagagtggacagaaaaagctggtacttatattaaataaatcagatctggtaccaaaggagaatttggagagctggctaaattatttgaagaaagaattgccaacagtggtgttcagagcctcaacaaaaccaaaggataaagggaagataaccaagcgtgtgaaggcaaagaagaatgctgctccattcagaagtgaagtctgctttgggaaagagggcctttggaaacttcttggaggttttcaggaaacttgcagcaaagccattcgggttggagtaattggtttcccaaatgtggggaaaagcagcattatcaatagcttaaaacaagaacagatgtgtaatgttggtgtatccatggggcttacaaggagcatgcaagttgtccccttggacaaacagatcacaatcatagatagtccgagcttcatcgtatctccacttaattcctcctctgcgcttgctctgcgaagtccagcaagtattgaagtagtaaaaccgatggaggctgccagtgccatcctttcccaggctgatgctcgacaggtagtactgaaatatactgtcccaggctacaggaattctctggaattttttactgtgcttgctcagagaagaggtatgcaccaaaaaggtggaatcccaaatgttgaaggtgctgccaaactgctgtggtctgagtggacaggtgcctcattagcttactattgccatccccctacatcttggactcctcctccatattttaatgagagtattgtggtagacatgaaaagcggcttcaatctggaagaactggaaaagaacaatgcacagagcataagagccatcaagggccctcatttggccaatagcatccttttccagtcttccggtctgacaaatggaataatagaagaaaaggacatacatgaagaattgccaaaacggaaagaaaggaagcaggaggagagggaggatgacaaagacagtgaccaggaaactgttgatgaagaagttgatgaaaacagctcaggcatgtttgctgcagaagagacaggggaggcactgtctgaggagactacagcaggtgaacagtctacaaggtcttttatcttggataaaatcattgaagaggatgatgcttatgacttcagtacagattatgtgtaacagaacaatggctttttatgattttttttttaacattttaagcagactgctaaactgttctctgtataagttatggtatgcatgagctgtgtaaattttgtgaatatgtattatattaaaaccaggcaacttggaatccctaaattctgtaaaaagacaattcatctcattgtgagtggaagtagttatctggaataaaaaaagaagatacctattg

SEQ ID NO: 139365 - DNA, 2040 bp, Homo sapiens
  Payload ID: 7318
  Gene Symbol: GNL3
  Gene Name: guanine nucleotide binding protein-like 3 (nucleolar)
  Uniprot ID: Q9BVP2
  ENST ID: ENST00000418458
  CDS Start-End: 174-1823
gcggccgccaagcgatccctgctccgcgcgacactgcgtgcccgcgcacgcagagaggcggtgacgcactttacggcggcagcgtaagtgcgtgacgctcgtcagtggcttcagttcacacgtggcgccagcggaggcaggttgatgtgtttgtgcttccttctacagccaatatgaaaaggcctaagttaaagaaagcaagtaaacgcatgacctgccataagcggtataaaatccaaaaaaaggttcgagaacatcatcgaaaattaagaaaggaggctaaaaagcggggtcacaagaagcctaggaaagacccaggagttccaaacagtgctccctttaaggaggctcttcttagggaagctgagctaaggaaacagaggcttgaagaactaaaacagcagcagaaacttgacaggcagaaggaactagaaaagaaaagaaaacttgaaactaatcctgatattaagccatcaaatgtggaacctatggaaaaggagtttgggctttgcaaaactgagaacaaagccaagtcgggcaaacagaattcaaagaagctgtactgccaagaacttaaaaaggtgattgaagcctccgatgttgtcctagaggtgttggatgccagagatcctcttggttgcagatgtcctcaggtagaagaggccattgtccagagtggacagaaaaagctggtacttatattaaataaatcagatctggtaccaaaggagaatttggagagctggctaaattatttgaagaaagaattgccaacagtggtgttcagagcctcaacaaaaccaaaggataaagggaagataaccaagcgtgtgaaggcaaagaagaatgctgctccattcagaagtgaagtctgctttgggaaagagggcctttggaaacttcttggaggttttcaggaaacttgcagcaaagccattcgggttggagtaattggtttcccaaatgtggggaaaagcagcattatcaatagcttaaaacaagaacagatgtgtaatgttggtgtatccatggggcttacaaggagcatgcaagttgtccccttggacaaacagatcacaatcatagatagtccgagcttcatcgtatctccacttaattcctcctctgcgcttgctctgcgaagtccagcaagtattgaagtagtaaaaccgatggaggctgccagtgccatcctttcccaggctgatgctcgacaggtagtactgaaatatactgtcccaggctacaggaattctctggaattttttactgtgcttgctcagagaagaggtatgcaccaaaaaggtggaatcccaaatgttgaaggtgctgccaaactgctgtggtctgagtggacaggtgcctcattagcttactattgccatccccctacatcttggactcctcctccatattttaatgagagtattgtggtagacatgaaaagcggcttcaatctggaagaactggaaaagaacaatgcacagagcataagagccatcaagggccctcatttggccaatagcatccttttccagtcttccggtctgacaaatggaataatagaagaaaaggacatacatgaagaattgccaaaacggaaagaaaggaagcaggaggagagggaggatgacaaagacagtgaccaggaaactgttgatgaagaagttgatgaaaacagctcaggcatgtttgctgcagaagagacaggggaggcactgtctgaggagactacagcaggtgaacagtctacaaggtcttttatcttggataaaatcattgaagaggatgatgcttatgacttcagtacagattatgtgtaacagaacaatggctttttatgattttttttttaacattttaagcagactgctaaactgttctctgtataagttatggtatgcatgagctgtgtaaattttgtgaatatgtattatattaaaaccaggcaacttggaatccctaaattctgtaaaaagacaattcatctcattgtgagtggaagtagttatctggaataaaaaaagaagatacctattg

SEQ ID NO: 139366 - DNA, 547 bp, Homo sapiens
  Payload ID: 7318
  Gene Symbol: GNL3
  Gene Name: guanine nucleotide binding protein-like 3 (nucleolar)
  ENST ID: ENST00000479230
  CDS Start-End: 144-547
gacaccagcagctgaatgattagaacaggagaacactggttgccagcagtatggaaagaaaggttggggatctccaggaaacagaaagaaggagcaaaagaatcacatttgaaaatcctgagttaaagaaagcaagtaaacgcatgacctgccataagcggtataaaatccaaaaaaaggttcgagaacatcatcgaaaattaagaaaggaggctaaaaagcggggtcacaagaagcctaggaaagacccaggagttccaaacagtgctccctttaaggaggctcttcttagggaagctgagctaaggaaacagaggcttgaagaactaaaacagcagcagaaacttgacaggcagaaggaactagaaaagaaaagaaaacttgaaactaatcctgatattaagccatcaaatgtggaacctatggaaaaggagtttgggctttgcaaaactgagaacaaagccaagtcgggcaaacagaattcaaagaagctgtactgccaagaacttaaaaaggtgattgaagcctccgatgttgtcctagaggt

SEQ ID NO: 139367 - DNA, 567 bp, Homo sapiens
  Payload ID: 7318
  Gene Symbol: GNL3
  Gene Name: guanine nucleotide binding protein-like 3 (nucleolar)
  ENST ID: ENST00000474423
  CDS Start-End: 279-567
gctcttctacggctacggctttgtctctgctggtatgggggtgggagcctacgcgtaggccttggccctatttcctggtagaaccgagagttggaagtccctacggcgatcatgttaaccgcgcgggctcattctgcggaacgaagccgggcagagggtggggaagactaggctagattttcgtaaggaagcagcgtctgagccaggtttgaggcccaatattttctttccgtggccacgtgcagactggcccagagttaaagaaagcaagtaaacgcatgacctgccataagcggtataaaatccaaaaaaaggttcgagaacatcatcgaaaattaagaaaggaggctaaaaagcggggtcacaagaagcctaggaaagacccaggagttccaaacagtgctccctttaaggaggctcttcttagggaagctgagctaaggaaacagaggcttgaagaactaaaacagcagcagaaacttgacaggcagaaggaactagaaaagaaaagaaaacttgaaactaatcctgatattaagccatcaaatgtggaacctatggaaaagg

SEQ ID NO: 139368 - DNA, 729 bp, Homo sapiens
  Payload ID: 7318
  Gene Symbol: GNL3
  Gene Name: guanine nucleotide binding protein-like 3 (nucleolar)
  ENST ID: ENST00000492349
  CDS Start-End: 62-478
agttcacacgtggcgccagcggaggcaggttgatgtgtttgtgcttccttctacagccaatatgaaaaggcctaagttaaagaaagcaagtaaacgcatgacctgccataagcggtataaaatccaaaaaaaggttcgagaacatcatcgaaaattaagaaaggaggctaaaaagcggggtcacaagaagcctaggaaagacccaggagttccaaacagtgctccctttaaggaggctcttcttagggaagctgagctaaggaaacagaggcttgaagaactaaaacagcagcagaaacttgacaggcagaaggaactagaaaagaaaagaaaacttgaaactaatcctgatattaagccatcaaatgtggaacctatggaaaaggagtttgggctttgcaaaactgagaacaaagccaagtcgggcaaacagaattcaaagaagctgtactgccaagaacttaaaaaggtatcttagcctaggtgattgaagcctccgatgttgtcctagaggtgttggatgccagagatcctcttggttgcagatgtcctcaggtagaagaggccattgtccagagtggacagaaaaagctggtacttatattaaataaatcagatctggtaccaaaggagaatttggagagctggctaaattatttgaagaaagaattgccaacagtggtgttcagagcctcaacaaaaccaaaggataaagggaagataaccaag

SEQ ID NO: 139369 - DNA, 2357 bp, Homo sapiens
  Payload ID: 7319
  Gene Symbol: GNL3L
  Gene Name: guanine nucleotide binding protein-like 3 (nucleolar)-like
  Uniprot ID: Q9NVN8
  ENST ID: ENST00000336470
  CDS Start-End: 140-1888
gatccggaagtcggagcctagctgcgcgagagtttctgctcgctcaaccgagttgtcgtgttgccctcgcttctcagatccccgccggaagtgaagagagcaagcagatttgaacctatctgctttcaagctggtcatcatgatgaaacttagacacaaaaataaaaagccaggtgaaggttccaagggccacaagaagataagttggccctaccctcagcctgcaaagcaaaatgggaagaaagcaacctccaaagtgccctctgcacctcattttgttcaccccaatgatcatgccaatcgagaggctgaattaaagaagaagtgggttgaggagatgagggagaagcagcaagccgcccgggagcaagaaagacaaaaacgcaggaccattgagagctactgtcaggatgtcctaagacgccaggaggagtttgagcataaggaggaagttttgcaggaattaaatatgtttcctcagctggatgacgaggccacgaggaaggcttattacaaggagttccgtaaggtggtggaatactctgatgtgattctggaagtcctggatgccagagacccattaggctgccgctgcttccaaatggaggaggctgtcctgcgagcacaaggcaacaagaagctggtcctggtcttgaacaagattgacctggtccccaaggaggttgtggagaaatggctggattaccttcggaatgagttgccaaccgtggctttcaaggccagtacccagcatcaggtcaaaaacctgaatcgttgcagtgtgccagtagatcaggcctctgagtcactgctgaaaagcaaagcctgctttggagctgaaaacctcatgagggttctggggaactattgccgccttggtgaagtgcgcacccacattcgtgtgggtgttgtgggtcttcccaatgttgggaagagcagcctgatcaatagcctgaagcgcagccgcgcatgcagcgtgggagctgttcctggaattaccaaattcatgcaggaggtctacctggacaagttcatccggctcttggatgctccaggcattgtcccagggcccaactcagaggtgggcaccatcctgcgtaactgcgtccacgtgcagaagctggcagaccctgtgaccccagtggagaccatcctgcagcgctgcaacctggaggagatttccaactattatggcgtctctgggttccagaccactgagcactttctgacggcagtggcccaccgtttggggaagaagaagaagggaggcttatatagtcaggaacaggcggccaaagctgtcctagctgactgggtgagcgggaagatcagcttctatataccaccaccagccactcacactctgcccacccatctcagtgctgagatcgttaaggaaatgaccgaggtctttgacatcgaggatactgagcaggccaatgaagacaccatggaatgcttggccaccggagaatctgatgagctgttgggtgacacggacccacttgaaatggagatcaagttgctccattctccgatgacgaaaatagcagatgccattgaaaataaaaccaccgtgtataagattggagatctcactgggtattgcaccaatccgaaccgtcatcagatggggtgggctaaacgcaatgtggaccaccgccctaagagcaacagtatggtggatgtctgctcagtggaccgccgctcagtgctgcagaggatcatggagacggaccccctgcaacagggccaggctctggcatctgccctgaaaaataagaagaagatgcagaaacgtgcagataaaatcgccagcaagctgtctgattccatgatgtctgctctcgacctctctggcaatgctgatgatggtgttggtgactaatcgactgatctcacttcccttccgctccaagcaccagttccggtggtacgggggaataccagtgaaatagtttggttctccctgaagcatctgcatattgaaagaacgctttccccactgtgtgtcttctccccctcctccagtaaaaacagtcccggctaggtgctgtggctcacgtctgtaatcccagcactttgggaggccgaggtgggcagatcacctgaggtcaggagttcgagaccagcctggccaacatggtgaaaccccgtctctactaaaaatacaaaaaaatttagccgtgcttagtggcacctataatcccagctacttgggaggctgaggcaggagaatcgcctgaacctgggagactaaggcaggagaatcgcctgaacctgggaggcagaggttgcagtgagcccagacggcaccattgcactctagcctgggcaacaacacgaaactccgtccc

SEQ ID NO: 139370 - DNA, 2135 bp, Homo sapiens
  Payload ID: 7319
  Gene Symbol: GNL3L
  Gene Name: guanine nucleotide binding protein-like 3 (nucleolar)-like
  Uniprot ID: Q9NVN8
  ENST ID: ENST00000360845
  CDS Start-End: 226-1974
gtttctgctcgctcaaccgagttgtcgtgttgccctcgcttctcagatccccgccggaagtgtaagtaagaaacttctctcctcttttctcacaatgtgcgctcacctagacggccgggcagttaggatcgtctattggatgtgaaaccagagatgcccgccaacctggaatagagaggaagagagcaagcagatttgaacctatctgctttcaagctggtcatcatgatgaaacttagacacaaaaataaaaagccaggtgaaggttccaagggccacaagaagataagttggccctaccctcagcctgcaaagcaaaatgggaagaaagcaacctccaaagtgccctctgcacctcattttgttcaccccaatgatcatgccaatcgagaggctgaattaaagaagaagtgggttgaggagatgagggagaagcagcaagccgcccgggagcaagaaagacaaaaacgcaggaccattgagagctactgtcaggatgtcctaagacgccaggaggagtttgagcataaggaggaagttttgcaggaattaaatatgtttcctcagctggatgacgaggccacgaggaaggcttattacaaggagttccgtaaggtggtggaatactctgatgtgattctggaagtcctggatgccagagacccattaggctgccgctgcttccaaatggaggaggctgtcctgcgagcacaaggcaacaagaagctggtcctggtcttgaacaagattgacctggtccccaaggaggttgtggagaaatggctggattaccttcggaatgagttgccaaccgtggctttcaaggccagtacccagcatcaggtcaaaaacctgaatcgttgcagtgtgccagtagatcaggcctctgagtcactgctgaaaagcaaagcctgctttggagctgaaaacctcatgagggttctggggaactattgccgccttggtgaagtgcgcacccacattcgtgtgggtgttgtgggtcttcccaatgttgggaagagcagcctgatcaatagcctgaagcgcagccgcgcatgcagcgtgggagctgttcctggaattaccaaattcatgcaggaggtctacctggacaagttcatccggctcttggatgctccaggcattgtcccagggcccaactcagaggtgggcaccatcctgcgtaactgcgtccacgtgcagaagctggcagaccctgtgaccccagtggagaccatcctgcagcgctgcaacctggaggagatttccaactattatggcgtctctgggttccagaccactgagcactttctgacggcagtggcccaccgtttggggaagaagaagaagggaggcttatatagtcaggaacaggcggccaaagctgtcctagctgactgggtgagcgggaagatcagcttctatataccaccaccagccactcacactctgcccacccatctcagtgctgagatcgttaaggaaatgaccgaggtctttgacatcgaggatactgagcaggccaatgaagacaccatggaatgcttggccaccggagaatctgatgagctgttgggtgacacggacccacttgaaatggagatcaagttgctccattctccgatgacgaaaatagcagatgccattgaaaataaaaccaccgtgtataagattggagatctcactgggtattgcaccaatccgaaccgtcatcagatggggtgggctaaacgcaatgtggaccaccgccctaagagcaacagtatggtggatgtctgctcagtggaccgccgctcagtgctgcagaggatcatggagacggaccccctgcaacagggccaggctctggcatctgccctgaaaaataagaagaagatgcagaaacgtgcagataaaatcgccagcaagctgtctgattccatgatgtctgctctcgacctctctggcaatgctgatgatggtgttggtgactaatcgactgatctcacttcccttccgctccaagcaccagttccggtggtacgggggaataccagtgaaatagtttggttctccctgaagcatctgcatattgaaagaacgctttccccactgtgtgtcttctccccctcctccagtaaaaacagtcccggcta

SEQ ID NO: 139371 - DNA, 1515 bp, Homo sapiens
  Payload ID: 7320
  Gene Symbol: GMPR
  Gene Name: guanosine monophosphate reductase
  Uniprot ID: P36959
  ENST ID: ENST00000259727
  CDS Start-End: 115-1152
ccggcccacgccagctcccggccgcggcacagcagccccggcgctccccgcgccgccccgcgcaggcgcccccgccccgccgtcgccgccgccgcagccaggagccgctgcaccatgccccgcatagatgcggacctcaagctcgacttcaaggatgtcctgctccgacctaagcggagcagcctcaagagccgagccgaggtggatcttgaacgcaccttcacgtttcgaaattcaaagcagacctactcagggattcccatcatcgtggccaacatggacactgtgggcacgtttgagatggcagccgtgatgtcacagcactccatgtttacagcaattcataagcattactccctggatgactggaagctctttgccacaaatcacccagaatgcctgcagaatgtagccgtgagttcaggcagtgggcagaatgatctggaaaagatgaccagcatcctggaagctgtgccacaggttaagtttatttgcctggatgtggccaatgggtattcagaacattttgtggaattcgtgaaacttgtccgtgccaaatttcctgaacacaccattatggcagggaacgtggtgacaggagaaatggtagaagagcttattctttccggagcagatatcatcaaagtgggagttggaccaggttctgtgtgcaccacccgcaccaagacgggagtggggtacccccagctgagtgccgtcattgagtgtgccgactctgcccatggcctgaagggccacatcatctctgatggaggctgtacgtgtccaggggatgtcgccaaagcctttggagctggagcagattttgtcatgctgggaggaatgttttcgggtcatacggagtgtgctggagaagtgtttgagaggaacggacggaagctcaagctcttctacgggatgagctctgacaccgccatgaacaagcacgcaggaggagttgctgagtacagagcctctgagggtaagactgtggaagttccttacaaaggagatgtggaaaacactatcctggatattctcgggggactgaggtccacgtgcacctacgtgggggccgccaaactcaaggagctcagcaggagggcaacattcatccgggtgacccagcagcacaacaccgtgttcagctaaccctggggacaaagcagcgtctggctcgagtggaagcgtccaaacctgcttttcccatctccccccaagtctgttccgtcagagcttctggctgctcctgaatggtggaatgctgtgtcctctcttctgtctcctgctgcctggaggcttcggggctctcccgcctgccttctcggggcccagacgcaaggcaccgattgggccaacatcagagccctgctgcccagaactcataacctcattgttcaaaccaacacttgcacctttctctttttctctttctctctccctttctttgtttttctttcttttttaaaagaagatggtttcactttaatataatgctattatcttaagacttaa

SEQ ID NO: 139372 - DNA, 1684 bp, Homo sapiens
  Payload ID: 7321
  Gene Symbol: GMPR2
  Gene Name: guanosine monophosphate reductase 2
  ENST ID: ENST00000348719
  CDS Start-End: 174-1223
acctcagtgcgtgaactctgttatccagaaggcctcgccctgccgccgccgaagctggaattcgtcggctagtagttctcgccggcaactagaggaacctgttggcgtggcccagaaggcttagcgggattgcacgagccctcagattcatcgctaccccgaggctaagcgccatgcctcatattgacaacgatgtgaaactggacttcaaggatgtccttttgaggcccaaacgcagtacccttaagtctcgaagtgaggtggatctcacaagatccttttcatttcggaactcaaagcagacatactctggggttcccatcattgctgccaatatggatactgtgggcacctttgagatggccaaggttctctgtaagttctctctcttcactgctgtccataagcactatagcctcgttcagtggcaagagtttgctggccagaatcctgaactctgtttctcccacagcatctggctgccagctcaggcacaggctcttctgactttgagcagctggaacagatcctggaagctattccccaggagtatatgcctggatgtggcaaatggctactctgaacactttgttgaatttgtaaaagatgtacggaagcgcttcccccagcacaccatcatggcagggaatgtggtaacaggagagatggtagaagagctcatcctttctggggctgacatcatcaaagtgggaattgggccaggctctgtgtgtactactcggaagaaaactggagtggggtatccacagctcagcgcagtgatggagtgtgcagatgctgctcatggcctcaaaggccacatcatttcagatggaggttgcagctgtcctggggatgtggccaaggcttttggggcaggagctgacttcgtgatgctgggtggcatgctggctgggcacagtgagtcaggtggtgagctcatcgagagggatggcaagaagtacaagctcttctatggaatgagttctgaaatggccatgaagaagtatgctgggggcgtggctgagtacagagcctcagagggaaagacagtggaagttccttttaaaggagatgtggaacataccatccgagacatcctaggagggatccgctctacgtgtacctatgtgggagcagctaagctcaaagagttgagcaggagaactaccttcatccgagtcacccagcaggtgaatccaatcttcagtgaggcgtgctagacctgagcagttctaccctcccaaggcaccagtactctaccatggggcatcccaagtggggtcctcacccatcccagctactgcagctctgtattactttgtcatttcctgttgtctcactcctgagggctcctgcagtaactctgtacttctctatctgcacacacaaaatgcccaaggcactcactggggaggaagcaaggaagcaaacagtctgagaaaatgatgcaagaaaatcaaatgggaatctggggacccaacacaacatcctgaagattattaaaaggaaaagatgctgattggtacataaatcttttacatggccttggtctagaggaggcaggcttttagaatcatgttttgttaatccgcttcactaaattggaccttcacatatctaaaaagctctgaagtgtttgtatatttgaaatacctcaataaagagagagctcattgactgt

SEQ ID NO: 139373 - DNA, 1972 bp, Homo sapiens
  Payload ID: 7321
  Gene Symbol: GMPR2
  Gene Name: guanosine monophosphate reductase 2
  Uniprot ID: Q9P2T1
  ENST ID: ENST00000355299
  CDS Start-End: 462-1508
aaaggctcagggttgctcccgcgtttcggttcagtgacgtcgtaaattggaatgaggcatccagtttagcaacagcagagatgacgactctgcgattctgagagtccctggcgagcccgggctagcgaaaagtgggggcagaacgaactacatctcccatcgtgccaggaggcggtcccgcccgtttccccctgggagttgtagtctaaccccctcggatccaacagcaacctcagtgcgtgaactctgttatccagaaggcctcgccctgccgccgccgaagctggaattcgtcggctagtagttctcgccggcaactagaggaacctgttggcgtggcccagaaggcttagcgggattgcacgaggttagttgctaagcaaggtggtctttggtcaactgccgcctggaccaaggcaacaggaaccctcagattcatcgctaccccgaggctaagcgccatgcctcatattgacaacgatgtgaaactggacttcaaggatgtccttttgaggcccaaacgcagtacccttaagtctcgaagtgaggtggatctcacaagatccttttcatttcggaactcaaagcagacatactctggggttcccatcattgctgccaatatggatactgtgggcacctttgagatggccaaggttctctgtaagttctctctcttcactgctgtccataagcactatagcctcgttcagtggcaagagtttgctggccagaatcctgactgtcttgagcatctggctgccagctcaggcacaggctcttctgactttgagcagctggaacagatcctggaagctattccccaggtgaagtatatatgcctggatgtggcaaatggctactctgaacactttgttgaatttgtaaaagatgtacggaagcgcttcccccagcacaccatcatggcagggaatgtggtaacaggagagatggtagaagagctcatcctttctggggctgacatcatcaaagtgggaattgggccaggctctgtgtgtactactcggaagaaaactggagtggggtatccacagctcagcgcagtgatggagtgtgcagatgctgctcatggcctcaaaggccacatcatttcagatggaggttgcagctgtcctggggatgtggccaaggcttttggggcaggagctgacttcgtgatgctgggtggcatgctggctgggcacagtgagtcaggtggtgagctcatcgagagggatggcaagaagtacaagctcttctatggaatgagttctgaaatggccatgaagaagtatgctgggggcgtggctgagtacagagcctcagagggaaagacagtggaagttccttttaaaggagatgtggaacataccatccgagacatcctaggagggatccgctctacgtgtacctatgtgggagcagctaagctcaaagagttgagcaggagaactaccttcatccgagtcacccagcaggtgaatccaatcttcagtgaggcgtgctagacctgagcagttctaccctcccaaggcaccagtactctaccatggggcatcccaagtggggtcctcacccatcccagctactgcagctctgtattactttgtcatttcctgttgtctcactcctgagggctcctgcagtaactctgtacttctctatctgcacacacaaaatgcccaaggcactcactggggaggaagcaaggaagcaaacagtctgagaaaatgatgcaagaaaatcaaatgggaatctggggacccaacacaacatcctgaagattattaaaaggaaaagatgctgattggtacataaatcttttacatggccttggtctagaggaggcaggcttttagaatcatgttttgttaatccgcttcactaaattggaccttcacatatctaaaaagctctgaagtgtttgtatatttgaaatacctcaataaagagagagctcattgactgtaaa

SEQ ID NO: 139374 - DNA, 1652 bp, Homo sapiens
  Payload ID: 7321
  Gene Symbol: GMPR2
  Gene Name: guanosine monophosphate reductase 2
  Uniprot ID: Q9P2T1
  ENST ID: ENST00000399440
  CDS Start-End: 142-1188
agttatgaaccctccccgccccccgtcgccaacattccttcgttcccctaaatcagcctcttgccccattgctctttgcaggggtagaagaaggaagtgtagcgggccctcagattcatcgctaccccgaggctaagcgccatgcctcatattgacaacgatgtgaaactggacttcaaggatgtccttttgaggcccaaacgcagtacccttaagtctcgaagtgaggtggatctcacaagatccttttcatttcggaactcaaagcagacatactctggggttcccatcattgctgccaatatggatactgtgggcacctttgagatggccaaggttctctgtaagttctctctcttcactgctgtccataagcactatagcctcgttcagtggcaagagtttgctggccagaatcctgactgtcttgagcatctggctgccagctcaggcacaggctcttctgactttgagcagctggaacagatcctggaagctattccccaggtgaagtatatatgcctggatgtggcaaatggctactctgaacactttgttgaatttgtaaaagatgtacggaagcgcttcccccagcacaccatcatggcagggaatgtggtaacaggagagatggtagaagagctcatcctttctggggctgacatcatcaaagtgggaattgggccaggctctgtgtgtactactcggaagaaaactggagtggggtatccacagctcagcgcagtgatggagtgtgcagatgctgctcatggcctcaaaggccacatcatttcagatggaggttgcagctgtcctggggatgtggccaaggcttttggggcaggagctgacttcgtgatgctgggtggcatgctggctgggcacagtgagtcaggtggtgagctcatcgagagggatggcaagaagtacaagctcttctatggaatgagttctgaaatggccatgaagaagtatgctgggggcgtggctgagtacagagcctcagagggaaagacagtggaagttccttttaaaggagatgtggaacataccatccgagacatcctaggagggatccgctctacgtgtacctatgtgggagcagctaagctcaaagagttgagcaggagaactaccttcatccgagtcacccagcaggtgaatccaatcttcagtgaggcgtgctagacctgagcagttctaccctcccaaggcaccagtactctaccatggggcatcccaagtggggtcctcacccatcccagctactgcagctctgtattactttgtcatttcctgttgtctcactcctgagggctcctgcagtaactctgtacttctctatctgcacacacaaaatgcccaaggcactcactggggaggaagcaaggaagcaaacagtctgagaaaatgatgcaagaaaatcaaatgggaatctggggacccaacacaacatcctgaagattattaaaaggaaaagatgctgattggtacataaatcttttacatggccttggtctagaggaggcaggcttttagaatcatgttttgttaatccgcttcactaaattggaccttcacatatctaaaaagctctgaagtgtttgtatatttgaaatacctcaataaagagagagctcattgactgtaaa

SEQ ID NO: 139375 - DNA, 1864 bp, Homo sapiens
  Payload ID: 7321
  Gene Symbol: GMPR2
  Gene Name: guanosine monophosphate reductase 2
  Uniprot ID: Q9P2T1
  ENST ID: ENST00000420554
  CDS Start-End: 300-1400
caacattccttcgttcccctaaatcagcctcttgccccattgctctttgcaggggtagaagaaggaagtgtagcggggtaaggaatgcaccgtcagggtctctcacaaccctttcccagctctcctccccaacaaacagtacctgggatggagccctagggtaatcgcagccacgggatgggtcgaggtgacaggcttcagggaccacacttcggcctttgcccgaccttccacaacttaagcgaagagaggccaccagccgtaacagggcgttaaagcccaggggaagattggtccttatgacttcctgccttccagccctcagattcatcgctaccccgaggctaagcgccatgcctcatattgacaacgatgtgaaactggacttcaaggatgtccttttgaggcccaaacgcagtacccttaagtctcgaagtgaggtggatctcacaagatccttttcatttcggaactcaaagcagacatactctggggttcccatcattgctgccaatatggatactgtgggcacctttgagatggccaaggttctctgtaagttctctctcttcactgctgtccataagcactatagcctcgttcagtggcaagagtttgctggccagaatcctgactgtcttgagcatctggctgccagctcaggcacaggctcttctgactttgagcagctggaacagatcctggaagctattccccaggtgaagtatatatgcctggatgtggcaaatggctactctgaacactttgttgaatttgtaaaagatgtacggaagcgcttcccccagcacaccatcatggcagggaatgtggtaacaggagagatggtagaagagctcatcctttctggggctgacatcatcaaagtgggaattgggccaggctctgtgtgtactactcggaagaaaactggagtggggtatccacagctcagcgcagtgatggagtgtgcagatgctgctcatggcctcaaaggccacatcatttcagatggaggttgcagctgtcctggggatgtggccaaggcttttggggcaggagctgacttcgtgatgctgggtggcatgctggctgggcacagtgagtcaggtggtgagctcatcgagagggatggcaagaagtacaagctcttctatggaatgagttctgaaatggccatgaagaagtatgctgggggcgtggctgagtacagagcctcagagggaaagacagtggaagttccttttaaaggagatgtggaacataccatccgagacatcctaggagggatccgctctacgtgtacctatgtgggagcagctaagctcaaagagttgagcaggagaactaccttcatccgagtcacccagcaggtgaatccaatcttcagtgaggcgtgctagacctgagcagttctaccctcccaaggcaccagtactctaccatggggcatcccaagtggggtcctcacccatcccagctactgcagctctgtattactttgtcatttcctgttgtctcactcctgagggctcctgcagtaactctgtacttctctatctgcacacacaaaatgcccaaggcactcactggggaggaagcaaggaagcaaacagtctgagaaaatgatgcaagaaaatcaaatgggaatctggggacccaacacaacatcctgaagattattaaaaggaaaagatgctgattggtacataaatcttttacatggccttggtctagaggaggcaggcttttagaatcatgttttgttaatccgcttcactaaattggaccttcacatatctaaaaagctctgaagtgtttgtatatttgaaatacctcaataaagagagagctcattgactgtaaa

SEQ ID NO: 139376 - DNA, 1484 bp, Homo sapiens
  Payload ID: 7321
  Gene Symbol: GMPR2
  Gene Name: guanosine monophosphate reductase 2
  Uniprot ID: Q9P2T1
  ENST ID: ENST00000456667
  CDS Start-End: 66-1028
tgcaggggtagaagaaggaagtgtagcgggccctcagattcatcgctaccccgaggctaagcgccatgcctcatattgacaacgatgtgaaactggacttcaaggatgtccttttgaggcccaaacgcagtacccttaagtctcgaagtgaggtggatctcacaagatccttttcatttcggaactcaaagcagacatactctggggttcccatcattgctgccaatatggatactgtgggcacctttgagatggccaaggttctctgtaagcatctggctgccagctcaggcacaggctcttctgactttgagcagctggaacagatcctggaagctattccccaggtgaagtatatatgcctggatgtggcaaatggctactctgaacactttgttgaatttgtaaaagatgtacggaagcgcttcccccagcacaccatcatggcagggaatgtggtaacaggagagatggtagaagagctcatcctttctggggctgacatcatcaaagtgggaattgggccaggctctgtgtgtactactcggaagaaaactggagtggggtatccacagctcagcgcagtgatggagtgtgcagatgctgctcatggcctcaaaggccacatcatttcagatggaggttgcagctgtcctggggatgtggccaaggcttttggggcaggagctgacttcgtgatgctgggtggcatgctggctgggcacagtgagtcaggtggtgagctcatcgagagggatggcaagaagtacaagctcttctatggaatgagttctgaaatggccatgaagaagtatgctgggggcgtggctgagtacagagcctcagagggaaagacagtggaagttccttttaaaggagatgtggaacataccatccgagacatcctaggagggatccgctctacgtgtacctatgtgggagcagctaagctcaaagagttgagcaggagaactaccttcatccgagtcacccagcaggtgaatccaatcttcagtgaggcgtgctagacctgagcagttctaccctcccaaggcaccagtactctaccatggggcatcccaagtggggtcctcacccatcccagctactgcagctctgtattactttgtcatttcctgttgtctcactcctgagggctcctgcagtaactctgtacttctctatctgcacacacaaaatgcccaaggcactcactggggaggaagcaaggaagcaaacagtctgagaaaatgatgcaagaaaatcaaatgggaatctggggacccaacacaacatcctgaagattattaaaaggaaaagatgctgattggtacataaatcttttacatggccttggtctagaggaggcaggcttttagaatcatgttttgttaatccgcttcactaaattggaccttcacatatctaaaaagctctgaagtgtttgtatatttgaaatacctcaataaagagagagctcattg

SEQ ID NO: 139377 - DNA, 573 bp, Homo sapiens
  Payload ID: 7321
  Gene Symbol: GMPR2
  Gene Name: guanosine monophosphate reductase 2
  ENST ID: ENST00000559479
  CDS Start-End: 1-265
gaagtacaagctcttctatggaatgagttctgaaatggccatgaagaagtatgctgggggcgtggctgagtacagagcctcagagggaaagacagtggaagttccttttaaaggagatgtggaacataccatccgagacatcctaggagggatccgctctacgtgtacctatgtgggagcagctaagctcaaagagttgagcaggagaactaccttcatccgagtcacccagcaggtgaatccaatcttcagtgaggcgtgctagacctgagcagttctaccctcccaaggcactcactggggaggaagcaaggaagcaaacagtctgagaaaatgatgcaagaaaatcaaatgggaatctggggacccaacacaacatcctgaagattattaaaaggaaaagatgctgattggtacataaatcttttacatggccttggtctagaggaggcaggcttttagaatcatgttttgttaatccgcttcactaaattggaccttcacatatctaaaaagctctgaagtgtttgtatatttgaaatacctcaataaagagagagctcattgactgta

SEQ ID NO: 139378 - DNA, 2160 bp, Homo sapiens
  Payload ID: 7321
  Gene Symbol: GMPR2
  Gene Name: guanosine monophosphate reductase 2
  ENST ID: ENST00000561038
  CDS Start-End: 335-547
gcaacagcagagatgacgactctgcgattctgagagtccctggcgagcccgggctagcgaaaagtgggggcagaacgaactacatctcccatcgtgccaggaggcggtcccgcccgtttccccctgggagttgtagtctaaccccctcggatccaacagcaacctcagtgcgtgaactctgttatccagaaggcctcgccctgccgccgccgaagctggaattcgtcggctagtagttctcgccggcaactagaggaacctgttggcgtggcccagaaggcttagcgggattgcacgagccctcagattcatcgctaccccgaggctaagcgccatgcctcatattgacaacgatgtgaaactggacttcaaggatgtccttttgaggcccaaacgcagtacccttaagtctcgaagtgaggtggatctcacaagatccttttcatttcggaactcaaagcagacatactctggggttcccatcattgctgccaatatggatactgtgggcacctttgagatggccaaggttctctgtaagtcctaggttcctgggagtttctgggatgtgccccaaatgggatgtgtttttcttatatacaagttgttcactttgaaatggaagatgctgctcctgtcagtactattacctgcctctatacttgttgctgagaagttctctctcttcactgctgtccataagcactatagcctcgttcagtggcaagagtttgctggccagaatcctgactgtcttgagcatctggctgccagctcaggcacaggctcttctgactttgagcagctggaacagatcctggaagctattccccaggtgaagtatatatgcctggatgtggcaaatggctactctgaacactttgttgaatttgtaaaagatgtacggaagcgcttcccccagcacaccatcatggcagggaatgtggtaacaggagagatggtagaagagctcatcctttctggggctgacatcatcaaagtgggaattgggccaggctctgtgtgtactactcggaagaaaactggagtggggtatccacagctcagcgcagtgatggagtgtgcagatgctgctcatggcctcaaaggccacatcatttcagatggaggttgcagctgtcctggggatgtggccaaggcttttggggcaggagctgacttcgtgatgctgggtggcatgctggctgggcacagtgagtcaggtggtgagctcatcgagagggatggcaagaagtacaagctcttctatggaatgagttctgaaatggccatgaagaagtatgctgggggcgtggctgagtacaggtatgtgtggaggcccaggagcttagtaatagtatggaggcagaactcatggctgctgagagggggatggtacagttctcagagaagcatggtgaaccggggctcaatgctagggtctgtggaaaagtccctgggcttaaggaatccagaaggagaagataataaagtttttcctactttaagagcctcagagggaaagacagtggaagttccttttaaaggagatgtggaacataccatccgagacatcctaggagggatccgctctacgtgtacctatgtgggagcagctaagctcaaagagttgagcaggagaactaccttcatccgagtcacccagcaggtgaatccaatcttcagtgaggcgtgctagacctgagcagttctaccctcccaaggcaccagtactctaccatggggcatcccaagtggggtcctcacccatcccagctactgcagctctgtattactttgtcatttcctgttgtctcactcctgagggctcctgcagtaactctgtacttctctatctgcacacacaaaatgcccaaggcactcactggggaggaagcaaggaagcaaacagtctgagaaaatgatgcaagaaaatcaaatgggaatctggggacccaacacaacatcctgaagattattaaaaggaaaagatgctgattggtacataaatcttttacatggccttggtctagaggaggcaggcttttagaatcatgttttgttaatccgcttcactaaattggaccttcacatatctaaaaagctctgaagtgtttgtatatttgaaatacctcaataaagagagagctcattgactgt

SEQ ID NO: 139379 - DNA, 657 bp, Homo sapiens
  Payload ID: 7321
  Gene Symbol: GMPR2
  Gene Name: guanosine monophosphate reductase 2
  ENST ID: ENST00000558748
  CDS Start-End: 1-419
gggcaggagctgacttcgtgatgctgggtggcatgctggctgggcacagtgagtcaggtggtgagctcatcgagagggatggcaagaagtacaagctcttctatggaatgagttctgaaatggccatgaagaagtatgctgggggcgtggctgagtacagagcctcagagggaaagacagtggaagttccttttaaaggagatgtggaacataccatccgagacatcctaggagggatccgctctacgtgtacctatgtgggagcagctaagctcaaagagttgagcaggagaactaccttcatccgagtcacccagcagggctcctgcagtaactctgtacttctctatctgcacacacaaaatgcccaaggcactcactggggaggaagcaaggaagcaaacagtctgagaaaatgatgcaagaaaatcaaatgggaatctggggacccaacacaacatcctgaagattattaaaaggaaaagatgctgattggtacataaatcttttacatggccttggtctagaggaggcaggcttttagaatcatgttttgttaatccgcttcactaaattggaccttcacatatctaaaaagctctgaagtgtttgtatatttgaaatacctcaataaagagagagctcattgactgtaaa

SEQ ID NO: 139380 - DNA, 360 bp, Homo sapiens
  Payload ID: 7321
  Gene Symbol: GMPR2
  Gene Name: guanosine monophosphate reductase 2
  ENST ID: ENST00000559943
  CDS Start-End: 1-193
tggagtggggtatccacagctcagcgcagtgatggagtgtgcagatgctgctcatggcctcaaaggccacatcatttcagatggaggttgcagctgtcctggggatgtggccaaggcttttgagcctcagagggaaagacagtggaagttccttttaaaggagatgtggaacataccatccgagacatcctaggagggatccgctctacgtgtacctatgtgggagcagctaagctcaaagagttgagcaggagaactaccttcatccgagtcacccagcaggtgaatccaatcttcagtgaggcgtgctagacctgagcagttctaccctcccaaggcaccagtactctaccatggggc

SEQ ID NO: 139381 - DNA, 817 bp, Homo sapiens
  Payload ID: 7321
  Gene Symbol: GMPR2
  Gene Name: guanosine monophosphate reductase 2
  ENST ID: ENST00000558760
  CDS Start-End: 299-565
aacattccttcgttcccctaaatcagcctcttgccccattgctctttgcaggggtagaagaaggaagtgtagcggggtaaggaatgcaccgtcagggtctctcacaaccctttcccagctctcctccccaacaaacagtacctgggatggagccctagggtaatcgcagccacgggatgggtcgaggtgacaggcttcagggaccacacttcggcctttgcccgaccttccacaacttaagcgaagagaggccaccagccgtaacagggcgttaaagcccaggggaagattggtccttatgacttcctgccttccagccctcagattcatcgctaccccgaggctaagcgccatgcctcatattgacaacgatgtgaaactggacttcaaggatgtccttttgaggcccaaacgcagtacccttaagtctcgaagtgaggtggatctcacaagatccttttcatttcggaactcaaagcagacatactctggggttcccatcattgctgccaatatggatactgtgggcacctttgagatggccaaggttctctgtaagtcctaggttcctgggagtttctgggatgtgccccaaatgggatgtgtttttcttatatacaagttgttcactttgaaatggaagatgctgctcctgtcagtactattacctgcctctatacttgttgctgagaagttctctctcttcactgctgtccataagcactatagcctcgttcagtggcaagagtttgctggccagaatcctgactgtcttgagcatctggctgccagctcaggcacaggctcttctgacttt

SEQ ID NO: 139382 - DNA, 346 bp, Homo sapiens
  Payload ID: 7321
  Gene Symbol: GMPR2
  Gene Name: guanosine monophosphate reductase 2
  ENST ID: ENST00000558279
  CDS Start-End: 174-346
tgttggcgtggcccagaaggcttagcgggattgcacgaggttagttgctaagcaaggtggtctttggtcaactgccgcctggaccaaggcaacaggaagtggatctcacaagatccttttcatttcggaactcaaagcagacatactctggggttcccatcattgctgccaatatggatactgtgggcacctttgagatggccaaggttctctgtaagttctctctcttcactgctgtccataagcactatagcctcgttcagtggcaagagtttgctggccagaatcctgactgtcttgagcatctggctgccagctcaggcacaggctcttctgactttgagca

SEQ ID NO: 139383 - DNA, 857 bp, Homo sapiens
  Payload ID: 7321
  Gene Symbol: GMPR2
  Gene Name: guanosine monophosphate reductase 2
  ENST ID: ENST00000558483
  CDS Start-End: 1-510
tttgtaaaagatgtacggaagcgcttcccccagcacaccatcatggcagggaatgtggtaacaggagagatggtagaagagctcatcctttctggggctgacatcatcaaagtgggaattgggccaggctctgtgtgtactactcggaagaaaactggagtggggtatccacagctcagcgcagtgatggagtgtgcagatgctgctcatggcctcaaaggccacatcatttcagatggaggttgcagctgtcctggggatgtggccaaggcttttggggcaggagctgacttcgtgatgctgggtggcatgctggctgggcacagtgagtcaggtggtgagctcatcgagagggatggcaagaagtacaagctcttctatggaatgagttctgaaatggccatgaagaagtatgctgggggcgtggctgagtacaggagatgtggaacataccatccgagacatcctaggagggatccgctctacgtgtacctatgtgggagcagctaagctcaaagagttgagcaggagaactaccttcatccgagtcacccagcaggtgaatccaatcttcagtgaggcgtgctagacctgagcagttctaccctcccaaggcaccagtactctaccatggggcatcccaagtggggtcctcacccatcccagctactgcagctctgtattactttgtcatttcctgttgtctcactcctgagggctcctgcagtaactctgtacttctctatctgcacacacaaaatgcccaaggcactcactggggaggaagcaaggaagcaaacagtctgagaaaatgatgcaagaaaatcaaatgggaatctggggacccaacacaacat

SEQ ID NO: 139384 - DNA, 1893 bp, Homo sapiens
  Payload ID: 7321
  Gene Symbol: GMPR2
  Gene Name: guanosine monophosphate reductase 2
  Uniprot ID: Q9P2T1
  ENST ID: ENST00000559836
  CDS Start-End: 383-1429
gcgtttcggttcagtgacgtcgtaaattggaatgaggcatccagtttagcaacagcagagatgacgactctgcgattctgagagtccctggcgagcccgggctagcgaaaagtgggggcagaacgaactacatctcccatcgtgccaggaggcggtcccgcccgtttccccctgggagttgtagtctaaccccctcggatccaacagcaacctcagtgcgtgaactctgttatccagaaggcctcgccctgccgccgccgaagctggaattcgtcggctagtagttctcgccggcaactagaggaacctgttggcgtggcccagaaggcttagcgggattgcacgagccctcagattcatcgctaccccgaggctaagcgccatgcctcatattgacaacgatgtgaaactggacttcaaggatgtccttttgaggcccaaacgcagtacccttaagtctcgaagtgaggtggatctcacaagatccttttcatttcggaactcaaagcagacatactctggggttcccatcattgctgccaatatggatactgtgggcacctttgagatggccaaggttctctgtaagttctctctcttcactgctgtccataagcactatagcctcgttcagtggcaagagtttgctggccagaatcctgactgtcttgagcatctggctgccagctcaggcacaggctcttctgactttgagcagctggaacagatcctggaagctattccccaggtgaagtatatatgcctggatgtggcaaatggctactctgaacactttgttgaatttgtaaaagatgtacggaagcgcttcccccagcacaccatcatggcagggaatgtggtaacaggagagatggtagaagagctcatcctttctggggctgacatcatcaaagtgggaattgggccaggctctgtgtgtactactcggaagaaaactggagtggggtatccacagctcagcgcagtgatggagtgtgcagatgctgctcatggcctcaaaggccacatcatttcagatggaggttgcagctgtcctggggatgtggccaaggcttttggggcaggagctgacttcgtgatgctgggtggcatgctggctgggcacagtgagtcaggtggtgagctcatcgagagggatggcaagaagtacaagctcttctatggaatgagttctgaaatggccatgaagaagtatgctgggggcgtggctgagtacagagcctcagagggaaagacagtggaagttccttttaaaggagatgtggaacataccatccgagacatcctaggagggatccgctctacgtgtacctatgtgggagcagctaagctcaaagagttgagcaggagaactaccttcatccgagtcacccagcaggtgaatccaatcttcagtgaggcgtgctagacctgagcagttctaccctcccaaggcaccagtactctaccatggggcatcccaagtggggtcctcacccatcccagctactgcagctctgtattactttgtcatttcctgttgtctcactcctgagggctcctgcagtaactctgtacttctctatctgcacacacaaaatgcccaaggcactcactggggaggaagcaaggaagcaaacagtctgagaaaatgatgcaagaaaatcaaatgggaatctggggacccaacacaacatcctgaagattattaaaaggaaaagatgctgattggtacataaatcttttacatggccttggtctagaggaggcaggcttttagaatcatgttttgttaatccgcttcactaaattggaccttcacatatctaaaaagctctgaagtgtttgtatatttgaaatacctcaataaagagagagctcattgactgtaaa

SEQ ID NO: 139385 - DNA, 1719 bp, Homo sapiens
  Payload ID: 7321
  Gene Symbol: GMPR2
  Gene Name: guanosine monophosphate reductase 2
  ENST ID: ENST00000559104
  CDS Start-End: 254-1255
ttgcaggggtagaagaaggaagtgtagcggggtaaggaatgcaccgtcagggtctctcacaaccctttcccagctctcctccccaacaaacagtacctgggatggagccctagggtaatcgcagccacgggatgggtcgaggtgacaggcttcagggaccacacttcggcctttgcccgaccttccacaacttaagcgaagagaggccaccagccgtaacagggcgttaaagcccaggggaagattggtccttatgacttcctgccttccagccctcagattcatcgctaccccgaggctaagcgccatgcctcatattgacaacgatgtgaaactggacttcaaggatgtccttttgaggcccaaacgcagtacccttaagtctcgaagtgaggtggatctcacaagatccttttcatttcggaactcaaagcagacatactctggggttcccatcattgctgccaatatggatactgtgggcacctttgagatggccaaggttctctgtaagttctctctcttcactgctgtccataagcactatagcctcgttcagtggcaagagtttgctggccagaatcctgactgtcttgagcatctggctgccagctcaggcacaggctcttctgactttgagcagctggaacagatcctggaagctattccccaggcagggaatgtggtaacaggagagatggtagaagagctcatcctttctggggctgacatcatcaaagtgggaattgggccaggctctgtgtgtactactcggaagaaaactggagtggggtatccacagctcagcgcagtgatggagtgtgcagatgctgctcatggcctcaaaggccacatcatttcagatggaggttgcagctgtcctggggatgtggccaaggcttttggggcaggagctgacttcgtgatgctgggtggcatgctggctgggcacagtgagtcaggtggtgagctcatcgagagggatggcaagaagtacaagctcttctatggaatgagttctgaaatggccatgaagaagtatgctgggggcgtggctgagtacagagcctcagagggaaagacagtggaagttccttttaaaggagatgtggaacataccatccgagacatcctaggagggatccgctctacgtgtacctatgtgggagcagctaagctcaaagagttgagcaggagaactaccttcatccgagtcacccagcaggtgaatccaatcttcagtgaggcgtgctagacctgagcagttctaccctcccaaggcaccagtactctaccatggggcatcccaagtggggtcctcacccatcccagctactgcagctctgtattactttgtcatttcctgttgtctcactcctgagggctcctgcagtaactctgtacttctctatctgcacacacaaaatgcccaaggcactcactggggaggaagcaaggaagcaaacagtctgagaaaatgatgcaagaaaatcaaatgggaatctggggacccaacacaacatcctgaagattattaaaaggaaaagatgctgattggtacataaatcttttacatggccttggtctagaggaggcaggcttttagaatcatgttttgttaatccgcttcactaaattggaccttcacatatctaaaaagctctgaagtgtttgtatatttgaaatacctcaataaagagagagctcattgactgtaaa

SEQ ID NO: 139386 - DNA, 1562 bp, Homo sapiens
  Payload ID: 7321
  Gene Symbol: GMPR2
  Gene Name: guanosine monophosphate reductase 2
  ENST ID: ENST00000559910
  CDS Start-End: 189-1136
tcggatccaacagcaacctcagtgcgtgaactctgttatccagaaggcctcgccctgccgccgccgaagctggaattcgtcggctagtagttctcgccggcaactagaggaacctgttggcgtggcccagaaggcttagcgggattgcacgagccctcagattcatcgctaccccgaggctaagcgccatgcctcatattgacaacgatgtgaaactggacttcaaggatgtccttttgaggcccaaacgcagtacccttaagtctcgaagtgaggtggatctcacaagatccttttcatttcggaactcaaagcagacatactctggggttcccatcattgctgccaatatggatactgtgggcacctttgagatggccaaggttctctgtaagttctctctcttcactgctgtccataagcactatagcctcgttcagtggcaagagtttgctggccagaatcctgactgtcttgagcatctggctgccagctcaggcacaggctcttctgactttgagcagctggaacagatcctggaagctattccccaggcagggaatgtggtaacaggagagatggtagaagagctcatcctttctggggctgacatcatcaaagtgggaattgggccaggctctgtgtgtactactcggaagaaaactggagtggggtatccacagctcagcgcagtgatggagtgtgcagatgctgctcatggcctcaaaggccacatcatttcagatggaggttgcagctgtcctggggatgtggccaaggcttttggggcaggagctgacttcgtgatgctgggtggcatgctggctgggcacagtgagtcaggtggtgagctcatcgagagggatggcaagaagtacaagctcttctatggaatgagttctgaaatggccatgaagaagtatgctgggggcgtggctgagtacagagcctcagagggaaagacagtggaagttccttttaaaggagatgtggaacataccatccgagacatcctaggagggatccgctctacgtgtacctatgtgggagcagctaagctcaaagagttgagcaggagaactaccttcatccgagtcacccagcaggtgaatccaatcttcagtgaggcgtgctagacctgagcagttctaccctcccaaggcaccagtactctaccatggggcatcccaagtggggtcctcacccatcccagctactgcagctctgtattactttgtcatttcctgttgtctcactcctgagggctcctgcagtaactctgtacttctctatctgcacacacaaaatgcccaaggcactcactggggaggaagcaaggaagcaaacagtctgagaaaatgatgcaagaaaatcaaatgggaatctggggacccaacacaacatcctgaagattattaaaaggaaaagatgctgattggtacataaatcttttacatggccttggtctagaggaggcaggcttttagaatcatgttttgttaatccgcttcactaaattggaccttcacatatctaaaaagctctgaagtgtttgtatattt

SEQ ID NO: 139387 - DNA, 842 bp, Homo sapiens
  Payload ID: 7321
  Gene Symbol: GMPR2
  Gene Name: guanosine monophosphate reductase 2
  ENST ID: ENST00000561130
  CDS Start-End: 116-328
cgccaacattccttcgttcccctaaatcagcctcttgccccattgctctttgcaggggtagaagaaggaagtgtagcgggccctcagattcatcgctaccccgaggctaagcgccatgcctcatattgacaacgatgtgaaactggacttcaaggatgtccttttgaggcccaaacgcagtacccttaagtctcgaagtgaggtggatctcacaagatccttttcatttcggaactcaaagcagacatactctggggttcccatcattgctgccaatatggatactgtgggcacctttgagatggccaaggttctctgtaagtcctaggttcctgggagtttctgggatgtgccccaaatgggatgtgtttttcttatatacaagttgttcactttgaaatggaagatgctgctcctgtcagtactattacctgcctctatacttgttgctgagaagttctctctcttcactgctgtccataagcactatagcctcgttcagtggcaagagtttgctggccagaatcctgactgtcttgagcatctggctgccagctcaggcacaggctcttctgactttgagcagctggaacagatcctggaagctattccccaggtgaagtatatatgcctggatgtggcaaatggctactctgaacactttgttgaatttgtaaaagatgtacggaagcgcttcccccagcacaccatcatggcagggaatgtggtaacaggagagatggtagaagagctcatcctttctggggctgacatcatcaaagtgggaattgggccaggctctgtgtgtactactcggaagaaaactggagtggggtatccac

SEQ ID NO: 139388 - DNA, 1748 bp, Homo sapiens
  Payload ID: 7321
  Gene Symbol: GMPR2
  Gene Name: guanosine monophosphate reductase 2
  ENST ID: ENST00000559287
  CDS Start-End: 249-476
ctcggatccaacagcaacctcagtgcgtgaactctgttatccagaaggcctcgccctgccgccgccgaagctggaattcgtcggctagtagttctcgccggcaactagaggaacctgttggcgtggcccagaaggcttagcgggattgcacgaggttagttgctaagcaaggtggtctttggtcaactgccgcctggaccaaggcaacaggaaccctcagattcatcgctaccccgaggctaagcgccatgcctcatattgacaacgatgtgaaactggacttcaaggatgtccttttgaggcccaaacgcagtacccttaagtctcgaagtgaggtggatctcacaagatccttttcatttcggaactcaaagcagacatactctggggttcccatcattgctgccaatatggatactgtgggcacctttgagatggccaaggttctctttctctctcttcactgctgtccataagcactatagcctcgttcagtggcaagagtttgctggccagaatcctgactgtcttgagcatctggctgccagctcaggcacaggctcttctgactttgagcagctggaacagatcctggaagctattccccaggtgaagtatatatgcctggatgtggcaaatggctactctgaacactttgttgaatttgtaaaagatgtacggaagcgcttcccccagcacaccatcatggatgctgtatttcaattgctctgtctcaggcagggaatgtggtaacaggagagatggtagaagagctcatcctttctggggctgacatcatcaaagtgggaattgggccaggctctgtgtgtactactcggaagaaaactggagtggggtatccacagctcagcgcagtgatggagtgtgcagatgctgctcatggcctcaaaggccacatcatttcagatggaggttgcagctgtcctggggatgtggccaaggcttttggggcaggagctgacttcgtgatgctgggtggcatgctggctgggcacagtgagtcaggtggtgagctcatcgagagggatggcaagaagtacaagctcttctatggaatgagttctgaaatggccatgaagaagtatgctgggggcgtggctgagtacagagcctcagagggaaagacagtggaagttccttttaaaggagatgtggaacataccatccgagacatcctaggagggatccgctctacgtgtacctatgtgggagcagctaagctcaaagagttgagcaggagaactaccttcatccgagtcacccagcaggtgaatccaatcttcagtgaggcgtgctagacctgagcagttctaccctcccaaggcaccagtactctaccatggggcatcccaagtggggtcctcacccatcccagctactgcagctctgtattactttgtcatttcctgttgtctcactcctgagggctcctgcagtaactctgtacttctctatctgcacacacaaaatgcccaaggcactcactggggaggaagcaaggaagcaaacagtctgagaaaatgatgcaagaaaatcaaatgggaatctggggacccaacacaacatcctgaagattattaaaaggaaaagatgctgattggtacataaatcttttacatggccttggtctagaggaggcaggcttttagaatcatgttttgttaatccgcttcactaaattggaccttcacatatctaaaaagctctgaagtgtttgtatatttgaa

SEQ ID NO: 139389 - DNA, 583 bp, Homo sapiens
  Payload ID: 7321
  Gene Symbol: GMPR2
  Gene Name: guanosine monophosphate reductase 2
  ENST ID: ENST00000560139
  CDS Start-End: 189-583
tcggatccaacagcaacctcagtgcgtgaactctgttatccagaaggcctcgccctgccgccgccgaagctggaattcgtcggctagtagttctcgccggcaactagaggaacctgttggcgtggcccagaaggcttagcgggattgcacgagccctcagattcatcgctaccccgaggctaagcgccatgcctcatattgacaacgatgtgaaactggacttcaaggatgtccttttgaggcccaaacgcagtacccttaagtctcgaagtgaggtggatctcacaagatccttttcatttcggaactcaaagcagacatactctggggttcccatcattgctgccaatatggatactgtgggcacctttgagatggccaaggttctctgtaagttctctctcttcactgctgtccataagcactatagcctcgttcagtggcaagagtttgctggccagaatcctgactgtcttgagcatctggctgccagctcaggcacaggctcttctgactttgagcagctggaacagatcctggaagctattccccaggcagggaatgtggtaacaggagagatggt

SEQ ID NO: 139390 - DNA, 601 bp, Homo sapiens
  Payload ID: 7321
  Gene Symbol: GMPR2
  Gene Name: guanosine monophosphate reductase 2
  ENST ID: ENST00000559409
  CDS Start-End: 149-601
cagaaggcctcgccctgccgccgccgaagctggaattcgtcggctagtagttctcgccggcaactagaggaacctgttggcgtggcccagaaggcttagcgggattgcacgagccctcagattcatcgctaccccgaggctaagcgccatgcctcatattgacaacgatgtgaaactggacttcaaggatgtccttttgaggcccaaacgcagtacccttaagtctcgaagtgaggtggatctcacaagatccttttcatttcggaactcaaagcagacatactctggggttcccatcattgctgccaatatggatactgtgggcacctttgagatggccaagttctctctcttcactgctgtccataagcactatagcctcgttcagtggcaagagtttgctggccagaatcctgactgtcttgagcatctggctgccagctcaggcacaggctcttctgactttgagcagctggaacagatcctggaagctattccccaggtgaagtatatatgcctggatgtggcaaatggctactctgaacactttgttgaatttgtaaaagatgtacggaagcgcttcccccagcacaccatcatg

SEQ ID NO: 139391 - DNA, 517 bp, Homo sapiens
  Payload ID: 7321
  Gene Symbol: GMPR2
  Gene Name: guanosine monophosphate reductase 2
  ENST ID: ENST00000558788
  CDS Start-End: 1-280
agcctcagagggaaagacagtggaagttccttttaaaggagatgtggaacataccatccgagacatcctaggagggatccgctctacgtgtacctatgtgggagcagctaagctcaaagagttgagcaggagaactaccttcatccgagtcacccagcaggtgaatccaatcttcagtgagggctcctgcagtaactctgtacttctctatctgcacacacaaaatgcccaaggcactcactggggaggaagcaaggaagcaaacagtctgagaaaatgatgcaagaaaatcaaatgggaatctggggacccaacacaacatcctgaagattattaaaaggaaaagatgctgattggtacataaatcttttacatggccttggtctagaggaggcaggcttttagaatcatgttttgttaatccgcttcactaaattggaccttcacatatctaaaaagctctgaagtgtttgtatatttgaaatacctcaataaagagagagctcattgactgtaa

SEQ ID NO: 139392 - DNA, 231 bp, Homo sapiens
  Payload ID: 7321
  Gene Symbol: GMPR2
  Gene Name: guanosine monophosphate reductase 2
  ENST ID: ENST00000558932
  CDS Start-End: 1-209
gtatgctgggggcgtggctgagtacagagggaaagacagtggaagttccttttaaaggagatgtggaacataccatccgagacatcctaggagggatccgctctacgtgtacctatgtgggagcagctaagctcaaagagttgagcaggagaactaccttcatccgagtcacccagcaggtgaatccaatcttcagtgaggcgtgctagacctgagcagttctaccctccc

SEQ ID NO: 139393 - DNA, 721 bp, Homo sapiens
  Payload ID: 7321
  Gene Symbol: GMPR2
  Gene Name: guanosine monophosphate reductase 2
  ENST ID: ENST00000559102
  CDS Start-End: 283-564
cctaaatcagcctcttgccccattgctctttgcaggggtagaagaaggaagtgtagcggggtaaggaatgcaccgtcagggtctctcacaaccctttcccagctctcctccccaacaaacagtacctgggatggagccctagggtaatcgcagccacgggatgggtcgaggtgacaggcttcagggaccacacttcggcctttgcccgaccttccacaacttaagcgaagagaggccaccagccgtaacagggcgttaaagcccaggggaagattggtccttatgacttcctgccttccagccctcagattcatcgctaccccgaggctaagcgccatgcctcatattgacaacgatgtgaaactggacttcaaggatgtccttttgaggcccaaacgcagtacccttaagtctcgaagtgaggtggatctcacaagatccttttcatttcggaactcaaagcagacatactctggggttcccatcattgctgccaatatggatactgtgggcacctttgagatggccaaggttctctttctctctcttcactgctgtccataagcactatagcctcgttcagtggcaagagtttgctggccagaatcctgactgtcttgagcatctggctgccagctcaggcacaggctcttctgactttgagcagctggaacagatcctggaagctattccccaggtgaagtatatatgcctggatgtg

SEQ ID NO: 139394 - DNA, 877 bp, Homo sapiens
  Payload ID: 7321
  Gene Symbol: GMPR2
  Gene Name: guanosine monophosphate reductase 2
  ENST ID: ENST00000561035
  CDS Start-End: 159-877
ctctgttatccagaaggcctcgccctgccgccgccgaagctggaattcgtcggctagtagttctcgccggcaactagaggaacctgttggcgtggcccagaaggcttagcgggattgcacgagccctcagattcatcgctaccccgaggctaagcgccatgcctcatattgacaacgatgtgaaactggacttcaaggatgtccttttgaggcccaaacgcagtacccttaagtctcgaagtgaggtggatctcacaagatccttttcatttcggaactcaaagcagacatactctggggttcccatcattgctgccaatatggatactgtgggcacctttgagatggccaaggttctctgtaaggttcctgggagtttctgggatgtgccccaaatgggatgtgtttttcttatatacaagttgttcactttgaaatggaagatgctgctcctgtcagtactattacctgcctctatacttgttgctgagaagttctctctcttcactgctgtccataagcactatagcctcgttcagtggcaagagtttgctggccagaatcctgactgtcttgagcatctggctgccagctcaggcacaggctcttctgactttgagcagctggaacagatcctggaagctattccccaggtgaagtatatatgcctggatgtggcaaatggctactctgaacactttgttgaatttgtaaaagatgtacggaagcgcttcccccagcacaccatcatggcagggaatgtggtaacaggagagatggtagaagagctcatcctttctggggctgacatcatcaaagtgggaattgggccaggctctgtgtgtactactcggaagaaaactggagtggggtatcc

SEQ ID NO: 139395 - DNA, 2025 bp, Homo sapiens
  Payload ID: 7321
  Gene Symbol: GMPR2
  Gene Name: guanosine monophosphate reductase 2
  ENST ID: ENST00000557854
  CDS Start-End: 278-1561
atcagcctcttgccccattgctctttgcaggggtagaagaaggaagtgtagcggggtaaggaatgcaccgtcagggtctctcacaaccctttcccagctctcctccccaacaaacagtacctgggatggagccctagggtaatcgcagccacgggatgggtcgaggtgacaggcttcagggaccacacttcggcctttgcccgaccttccacaacttaagcgaagagaggccaccagccgtaacagggcgttaaagcccaggggaagattggtccttatgacttcctgccttccagccctcagattcatcgctaccccgaggctaagcgccatgcctcatattgacaacgatgtgaaactggacttcaaggatgtccttttgaggcccaaacgcagtacccttaagtctcgaagtgaggtggatctcacaagatccttttcatttcggaactcaaagcagacatactctggggttcccatcattgctgccaatatggatactgtgggcacctttgagatggccaaggttctctgtaagttctctctcttcactgctgtccataagcactatagcctcgttcagtggcaagagtttgctggccagaatcctgactgtcttgagcatctggctgccagctcaggcacaggctcttctgactttgagcagctggaacagatcctggaagctattccccaggtgaagtatatatgcctggatgtggcaaatggctactctgaacactttgttgaatttgtaaaagatgtacggaagcgcttcccccagcacaccatcatggcagggaatgtggtaacaggagagatggtagaagagctcatcctttctggggctgacatcatcaaagtgggaattgggccaggctctgtgtgtactactcggaagaaaactggagtggggtatccacagctcagcgcagtgatggagtgtgcagatgctgctcatggcctcaaaggccacatcatttcagatggaggttgcagctgtcctggggatgtggccaaggcttttggggcaggagctgacttcgtgatgctgggtggcatgctggctgggcacagtgagtcaggtggtgagctcatcgagagggatggcaagaagtacaagctcttctatggaatgagttctgaaatggccatgaagaagtatgctgggggcgtggctgagtacaggtatgtgtggaggcccaggagcttagtaatagtatggaggcagaactcatggctgctgagagggggatggtacagttctcagagaagcatggtgaaccggggctcaatgctagggtctgtggaaaagtccctgggcttaaggaatccagaaggagaagataataaagtttttcctactttaagagcctcagagggaaagacagtggaagttccttttaaaggagatgtggaacataccatccgagacatcctaggagggatccgctctacgtgtacctatgtgggagcagctaagctcaaagagttgagcaggagaactaccttcatccgagtcacccagcaggtgaatccaatcttcagtgaggcgtgctagacctgagcagttctaccctcccaaggcaccagtactctaccatggggcatcccaagtggggtcctcacccatcccagctactgcagctctgtattactttgtcatttcctgttgtctcactcctgagggctcctgcagtaactctgtacttctctatctgcacacacaaaatgcccaaggcactcactggggaggaagcaaggaagcaaacagtctgagaaaatgatgcaagaaaatcaaatgggaatctggggacccaacacaacatcctgaagattattaaaaggaaaagatgctgattggtacataaatcttttacatggccttggtctagaggaggcaggcttttagaatcatgttttgttaatccgcttcactaaattggaccttcacatatctaaaaagctctgaagtgtttgtatatttgaaatacctcaataaagagagagctcattgactgtaaa

SEQ ID NO: 139396 - DNA, 735 bp, Homo sapiens
  Payload ID: 7321
  Gene Symbol: GMPR2
  Gene Name: guanosine monophosphate reductase 2
  ENST ID: ENST00000558865
  CDS Start-End: 359-735
cgccctgccgccgccgaagctggaattcgtcggctagtagttctcgccggcaactagaggaacctgttggcgtggcccagaaggcttagcgggattgcacgagttctctctcttcactgctgtccataagcactatagcctcgttcagtggcaagagtttgctggccagaatcctgactgtcttgagcatctggctgccagctcaggcacaggctcttctgactttgagcagctggaacagatcctggaagctattccccaggtgaagtatatatgcctggatgtggcaaatggctactctgaacactttgttgaatttgtaaaagatgtacggaagcgcttcccccagcacaccatcatggcagggaatgtggtaacaggagagatggtagaagagctcatcctttctggggctgacatcatcaaagtgggaattgggccaggctctgtgtgtactactcggaagaaaactggagtggggtatccacagctcagcgcagtgatggagtgtgcagatgctgctcatggcctcaaaggccacatcatttcagatggaggttgcagctgtcctggggatgtggccaaggcttttggggcaggagctgacttcgtgatgctgggtggcatgctggctgggcacagtgagtcaggtggtgagctcatcgagagggatggcaagaagtacaagctcttctatggaatgagttctgaaatggccatgaagaagtatgctgg

SEQ ID NO: 139397 - DNA, 1910 bp, Homo sapiens
  Payload ID: 7321
  Gene Symbol: GMPR2
  Gene Name: guanosine monophosphate reductase 2
  ENST ID: ENST00000620807
  CDS Start-End: 403-1449
aaaggctcagggttgctcccgcgtttcggttcagtgacgtcgtaaattggaatgaggcatccagtttagcaacagcagagatgacgactctgcgattctgagagtccctggcgagcccgggctagcgaaaagtgggggcagaacgaactacatctcccatcgtgccaggaggcggtcccgcccgtttccccctgggagttgtagtctaaccccctcggatccaacagcaacctcagtgcgtgaactctgttatccagaaggcctcgccctgccgccgccgaagctggaattcgtcggctagtagttctcgccggcaactagaggaacctgttggcgtggcccagaaggcttagcgggattgcacgagccctcagattcatcgctaccccgaggctaagcgccatgcctcatattgacaacgatgtgaaactggacttcaaggatgtccttttgaggcccaaacgcagtacccttaagtctcgaagtgaggtggatctcacaagatccttttcatttcggaactcaaagcagacatactctggggttcccatcattgctgccaatatggatactgtgggcacctttgagatggccaaggttctctgtaagttctctctcttcactgctgtccataagcactatagcctcgttcagtggcaagagtttgctggccagaatcctgactgtcttgagagcatctggctgccagctcaggcacaggctcttctgactttgagcagctggaacagatcctggaagctattccccaggaagtatatatgcctggatgtggcaaatggctactctgaacactttgttgaatttgtaaaagatgtacggaagcgcttcccccagcacaccatcatggcagggaatgtggtaacaggagagatggtagaagagctcatcctttctggggctgacatcatcaaagtgggaattgggccaggctctgtgtgtactactcggaagaaaactggagtggggtatccacagctcagcgcagtgatggagtgtgcagatgctgctcatggcctcaaaggccacatcatttcagatggaggttgcagctgtcctggggatgtggccaaggcttttggggcaggagctgacttcgtgatgctgggtggcatgctggctgggcacagtgagtcaggtggtgagctcatcgagagggatggcaagaagtacaagctcttctatggaatgagttctgaaatggccatgaagaagtatgctgggggcgtggctgagtacagagcctcagagggaaagacagtggaagttccttttaaaggagatgtggaacataccatccgagacatcctaggagggatccgctctacgtgtacctatgtgggagcagctaagctcaaagagttgagcaggagaactaccttcatccgagtcacccagcaggtgaatccaatcttcagtgaggcgtgctagacctgagcagttctaccctcccaaggcaccagtactctaccatggggcatcccaagtggggtcctcacccatcccagctactgcagctctgtattactttgtcatttcctgttgtctcactcctgagggctcctgcagtaactctgtacttctctatctgcacacacaaaatgcccaaggcactcactggggaggaagcaaggaagcaaacagtctgagaaaatgatgcaagaaaatcaaatgggaatctggggacccaacacaacatcctgaagattattaaaaggaaaagatgctgattggtacataaatcttttacatggccttggtctagaggaggcaggcttttagaatcatgttttgttaatccgcttcactaaattggaccttcacatatctaaaaagctctgaagtgtttgtatatttgaaatacctcaataaagagagagctcattgactgt

SEQ ID NO: 139398 - DNA, 3035 bp, Homo sapiens
  Payload ID: 7322
  Gene Symbol: GBP1
  Gene Name: guanylate binding protein 1, interferon-inducible
  Uniprot ID: P32455
  ENST ID: ENST00000370473
  CDS Start-End: 221-1999
ggagtcagtgatttgaacgaagtactttcagtttcatattactctaaatccattacaaatctgcttagcttctaaatatttcatcaatgaggaaatcccagccctacaacttcggaacagtgaaatattagtccagggatccagtgagagacacagaagtgctagaagccagtgctcgtgaactaaggagaaaaagaacagacaagggaacagcctggacatggcatcagagatccacatgacaggcccaatgtgcctcattgagaacactaatgggcgactgatggcgaatccagaagctctgaagatcctttctgccattacacagcctatggtggtggtggcaattgtgggcctctaccgcacaggcaaatcctacctgatgaacaagctggctggaaagaaaaagggcttctctctgggctccacggtgcagtctcacactaaaggaatctggatgtggtgtgtgccccaccccaagaagccaggccacatcctagttctgctggacaccgagggtctgggagatgtagagaagggtgacaaccagaatgactcctggatcttcgccctggccgtcctcctgagcagcaccttcgtgtacaatagcataggaaccatcaaccagcaggctatggaccaactgtactatgtgacagagctgacacatagaatccgatcaaaatcctcacctgatgagaatgagaatgaggttgaggattcagctgactttgtgagcttcttcccagactttgtgtggacactgagagatttctccctggacttggaagcagatggacaacccctcacaccagatgagtacctgacatactccctgaagctgaagaaaggtaccagtcaaaaagatgaaacttttaacctgcccagactctgtatccggaaattcttcccaaagaaaaaatgctttgtctttgatcggcccgttcaccgcaggaagcttgcccagctcgagaaactacaagatgaagagctggaccccgaatttgtgcaacaagtagcagacttctgttcctacatctttagtaattccaaaactaaaactctttcaggaggcatccaggtcaacgggcctcgtctagagagcctggtgctgacctacgtcaatgccatcagcagtggggatctgccgtgcatggagaacgcagtcctggccttggcccagatagagaactcagctgcagtgcaaaaggctattgcccactatgaacagcagatgggccagaaggtgcagctgcccacagaaaccctccaggagctgctggacctgcacagggacagtgagagagaggccattgaagtcttcatcaggagttccttcaaagatgtggaccatctatttcaaaaggagttagcggcccagctagaaaaaaagcgggatgacttttgtaaacagaatcaggaagcatcatcagatcgttgctcagctttacttcaggtcattttcagtcctctagaagaagaagtgaaggcgggaatttattcgaaaccagggggctatcgtctctttgttcagaagctacaagacctgaagaaaaagtactatgaggaaccgaggaaggggatacaggctgaagagattctgcagacatacttgaaatccaaggagtctatgactgatgcaattctccagacagaccagactctcacagaaaaagaaaaggagattgaagtggaacgtgtgaaagctgagtctgcacaggcttcagcaaaaatgttgcaggaaatgcaaagaaagaatgagcagatgatggaacagaaggagaggagttatcaggaacacttgaaacaactgactgagaagatggagaacgacagggtccagttgctgaaagagcaagagaggaccctcgctcttaaacttcaggaacaggagcaactactaaaagagggatttcaaaaagaaagcagaataatgaaaaatgagatacaggatctccagacgaaaatgagacgacgaaaggcatgtaccataagctaaagaccagagccttcctgtcacccctaaccaaggcataattgaaacaattttagaatttggaacaagcgtcactacatttgataataattagatcttgcatcataacaccaaaagtttataaaggcatgtggtacaatgatcaaaatcatgttttttcttaaaaaaaaaaaaagactgtaaattgtgcaacaaagatgcatttacctctgtatcaactcaggaaatctcataagctggtaccactcaggagaagtttattcttccagatgaccagcagtagacaaatggatactgagcagagtcttaggtaaaagtcttgggaaatatttgggcattggtctggccaagtctacaatgtcccaatatcaaggacaaccaccctagcttcttagtgaagacaatgtacagttatccgttagatcaagactacacggtctatgagcaataatgtgatttctggacattgcccatgtataatcctcactgatgatttcaagctaaagcaaaccaccttatacagagatctagaatctctttatgttctccagaggaaggtggaagaaaccatgggcaggagtaggaattgagtgataaacaattgggctaatgaagaaaacttctcttattgttcagttcatccagattataacttcaatgggacactttagaccattagacaattgacactggattaaacaaattcacataatgccaaatacacaatgtatttatagcaacgtataatttgcaaagatggactttaaaagatgctgtgtaactaaactgaaataattcaattacttattatttagaatgttaaagcttatgatagtcttttctaactcttaacactcatacttgaaaactttctgagtttccccagaagagaatatgggattttttttgacatttttgactcatttaataatgctcttgtgtttacctagtatatgtagactttgtcttatgtgtgaaaagtcctaggaaagtggttgatgtttcttatagcaattaaaaattatttttgaactgaaaa

SEQ ID NO: 139399 - DNA, 2220 bp, Homo sapiens
  Payload ID: 7323
  Gene Symbol: GBP2
  Gene Name: guanylate binding protein 2, interferon-inducible
  Uniprot ID: P32456
  ENST ID: ENST00000370466
  CDS Start-End: 270-2045
atattagtgcatttctttgcagaggttacctctttttcttgtctctcgtcaggtctctgacattgacagagcctggacgttggaggaagccccaggacgttggaggggtaaagtaaaagtccacagttaccgtgagagaaaaaagagggagaaagcagtgcagccaaactcggaagaaaagagaggaggaaaaggactcgactttcacattggaacaaccttctttccagtgctaaaggatctctgatctggggaacaacaccctggacatggctccagagatcaacttgccgggcccaatgagcctcattgataacactaaagggcagctggtggtgaatccagaagctctgaagatcctatctgcaattacgcagcctgtggtggtggtggcgattgtgggcctctatcgcacaggcaaatcctacctgatgaacaagctggctgggaagaaaaacggcttctctctaggctccacagtgaagtctcacaccaagggaatctggatgtggtgtgtgcctcatcccaagaagccagaacacaccctagttctgctcgacactgagggcctgggagatatagagaagggtgacaatgagaatgactcctggatctttgccttggccatcctcctgagcagcaccttcgtgtacaatagcatgggaaccatcaaccagcaggccatggaccaacttcactatgtgacagagctgacagatcgaatcaaggcaaactcctcacctggtaacaattctgtagacgactcagctgactttgtgagcttttttccagcatttgtgtggactctcagagatttcaccctggaactggaagtagatggagaacccatcactgctgatgactacttggagctttcgctaaagctaagaaaaggtactgataagaaaagtaaaagctttaatgatcctcggttgtgcatccgaaagttcttccccaagaggaagtgcttcgtcttcgattggcccgctcctaagaagtaccttgctcacctagagcagctaaaggaggaagagctgaaccctgatttcatagaacaagttgcagaattttgttcctacatcctcagccattccaatgtcaagactctttcaggtggcattccagtcaatgggcctcgtctagagagcctggtgctgacctacgtcaatgccatcagcagtggggatctaccctgcatggagaacgcagtcctggccttggcccagatagagaactcagccgcagtggaaaaggctattgcccactatgaacagcagatgggccagaaggtgcagctgcccacggaaaccctccaggagctgctggacctgcacagggacagtgagagagaggccattgaagtcttcatgaagaactctttcaaggatgtggaccaaatgttccagaggaaattaggggcccagttggaagcaaggcgagatgacttttgtaagcagaattccaaagcatcatcagattgttgcatggctttacttcaggatatatttggccctttagaagaagatgtcaagcagggaacattttctaaaccaggaggttaccgtctctttactcagaagctgcaggagctgaagaataagtactaccaggtgccaaggaaggggatacaggccaaagaggtgctgaaaaaatatttggagtccaaggaggatgtggctgatgcacttctacagactgatcagtcactctcagaaaaggaaaaagcgattgaagtggaacgtataaaggctgaatctgcagaagctgcaaagaaaatgttggaggaaatacaaaagaagaatgaggagatgatggaacagaaagagaagagttatcaggaacatgtgaaacaattgactgagaagatggagagggacagggcccagttaatggcagagcaagagaagaccctcgctcttaaacttcaggaacaggaacgccttctcaaggagggattcgagaatgagagcaagagacttcaaaaagacatatgggatatccagatgagaagcaaatcattggagccaatatgtaacatactctaaaagtccaaggagcaaaatttgcctgtccagctccctctccccaagaaacaacatgaatgagcaacttcagagtgtcaaacaactgccattaaacttaactcaaaatcatgatgcatgcatttttgttgaaccataaagtttgcaaagtaaaggttaagtatgaggtcaatgtttt

SEQ ID NO: 139400 - DNA, 3687 bp, Homo sapiens
  Payload ID: 7323
  Gene Symbol: GBP2
  Gene Name: guanylate binding protein 2, interferon-inducible
  Uniprot ID: P32456
  ENST ID: ENST00000464839
  CDS Start-End: 839-2614
gttgaagaagtacgagaagaccaactggatagtaatttccagatgcaatcagaaaatttctgttcttatatcttcacccatgcaaagaccaagaccctgagagagggaatccttgtcactggaaaccggctggggatgctggtggagacctacctggatgccatcaacagtggagcgactccttgtctggagaatgcaatggcagttctggcccagtgtgagaactcagcagccgtgcagagggcagccaaccactacagccagcagatggcccagcaagtgagattccccacagacacactccaggagctgctggacgtgcatgcagtttgtgagagggaagccattgcagtcttcatggagtactccttcaaagataaaagccaggaatttcagaagaagcttgtggacaccatggagaaaaagaaggaagactttgtgctgcagaatgaagaggcatctgccaaatattgtcaggctgagcttaagcggctttcagagctcttgacagaaagtatttcaagaggaactttctttgttccgggggggcacaatatctacttagaagcaaaaaagaagattgaacaggactatacactagtgcccagaaaaggagttaaggtctctgacattgacagagcctggacgttggaggaagccccaggacgttggaggggtaaagtaaaagtccacagttaccgtgagagaaaaaagagggagaaagcagtgcagccaaactcggaagaaaagagaggaggaaaaggactcgactttcacattggaacaaccttctttccagtgctaaaggatctctgatctggggaacaacaccctggacatggctccagagatcaacttgccgggcccaatgagcctcattgataacactaaagggcagctggtggtgaatccagaagctctgaagatcctatctgcaattacgcagcctgtggtggtggtggcgattgtgggcctctatcgcacaggcaaatcctacctgatgaacaagctggctgggaagaaaaacggcttctctctaggctccacagtgaagtctcacaccaagggaatctggatgtggtgtgtgcctcatcccaagaagccagaacacaccctagttctgctcgacactgagggcctgggagatatagagaagggtgacaatgagaatgactcctggatctttgccttggccatcctcctgagcagcaccttcgtgtacaatagcatgggaaccatcaaccagcaggccatggaccaacttcactatgtgacagagctgacagatcgaatcaaggcaaactcctcacctggtaacaattctgtagacgactcagctgactttgtgagcttttttccagcatttgtgtggactctcagagatttcaccctggaactggaagtagatggagaacccatcactgctgatgactacttggagctttcgctaaagctaagaaaaggtactgataagaaaagtaaaagctttaatgatcctcggttgtgcatccgaaagttcttccccaagaggaagtgcttcgtcttcgattggcccgctcctaagaagtaccttgctcacctagagcagctaaaggaggaagagctgaaccctgatttcatagaacaagttgcagaattttgttcctacatcctcagccattccaatgtcaagactctttcaggtggcattccagtcaatgggcctcgtctagagagcctggtgctgacctacgtcaatgccatcagcagtggggatctaccctgcatggagaacgcagtcctggccttggcccagatagagaactcagccgcagtggaaaaggctattgcccactatgaacagcagatgggccagaaggtgcagctgcccacggaaaccctccaggagctgctggacctgcacagggacagtgagagagaggccattgaagtcttcatgaagaactctttcaaggatgtggaccaaatgttccagaggaaattaggggcccagttggaagcaaggcgagatgacttttgtaagcagaattccaaagcatcatcagattgttgcatggctttacttcaggatatatttggccctttagaagaagatgtcaagcagggaacattttctaaaccaggaggttaccgtctctttactcagaagctgcaggagctgaagaataagtactaccaggtgccaaggaaggggatacaggccaaagaggtgctgaaaaaatatttggagtccaaggaggatgtggctgatgcacttctacagactgatcagtcactctcagaaaaggaaaaagcgattgaagtggaacgtataaaggctgaatctgcagaagctgcaaagaaaatgttggaggaaatacaaaagaagaatgaggagatgatggaacagaaagagaagagttatcaggaacatgtgaaacaattgactgagaagatggagagggacagggcccagttaatggcagagcaagagaagaccctcgctcttaaacttcaggaacaggaacgccttctcaaggagggattcgagaatgagagcaagagacttcaaaaagacatatgggatatccagatgagaagcaaatcattggagccaatatgtaacatactctaaaagtccaaggagcaaaatttgcctgtccagctccctctccccaagaaacaacatgaatgagcaacttcagagtgtcaaacaactgccattaaacttaactcaaaatcatgatgcatgcatttttgttgaaccataaagtttgcaaagtaaaggttgcacaccgatgctccagaattgtgagggagccatactctacagctattccaccgaggataatactaccattgtaaaggcatctcacgggaaaacaacacagctaccatgaaccagcaccatgatctctggatgaaatgctggaagcttctgcagtgtcagctatgagtaaatggatgccaccaccttcacattttcagtaaacaaatactcccctaccccatgaaaagttgcatctttgagctgctcacatctccagctaagcctcacaaaagtcaatctgcagggaagaatctaaatcatatgcctacccatgggaaagtctgagaattagagtatttttgtcttctacttttggaggaagaaactaataacgtgggaaattttcctgtatgtttagtcaaccagtttttccatgcagatgtatggagataaatcttatagtaggaataacctaagacttgagttagtatttttgtgtacatcagatacaacactcttctcatcttttttgtcattatttttcaatgttgttttaatctttccactgttgtttcatgtcatgcactttgttaatattctttaagttattcttagtttttaacaatgatacttaagaaagacttaataggactatagaataggtactccctattccccaaccctgggaacacaatttaacatattagttcatttgtatttaagatctatcttgtttatgcctcagtttagttattgctcttacctttcaaacagttagtattttgtatctagttctgtgaaagcaaaaagcaactttattctttcttacaattccccttttacttaatcggaacatttctttcctgtttgttcattagtcactctcagataaatgaatagtctctttttctaaaaaaaaaaataacatttgacctaaa

SEQ ID NO: 139401 - DNA, 2062 bp, Homo sapiens
  Payload ID: 7324
  Gene Symbol: GBP3
  Gene Name: guanylate binding protein 3
  ENST ID: ENST00000235878
  CDS Start-End: 178-606
attacaaaggttgcttaacttctaattatttgatcactgaggaaaatccagaaagctacacaacactgaaggggtgaaataaaagtccagcgatccagcgaaagaaaagagaagtgacagaaacaactttacctggactgaagataaaagcacagacaagagaacaatgccctggacatggctccagagatccacatgacaggcccaatgtgcctcattgagaacactaatggggaactggtggcgaatccagaagctctgaaaatcctgtctgccattacacagcctgtggtggtggtggcaattgtgggcctctaccgcacaggaaaatcctacctgatgaacaagctagctgggaagaataagggcttctctctgggctccacagtgaaatctcacaccaaaggaatctggatgtggtgtgtgcctcaccccaaaaagccagaacacaccttagtcctgcttgacactgagggcctgggagatgtaaagaagggtgacaaccagaatgactcctggatcttcaccctggccgtcctcctgagcagcactctcgtgtacaatagcatgggaaccatcaaccagcaggctatggaccaactgtagtatccttttgtgacccagaacagcaccaaggtcagaggggacacctgtattcataaaccagctgcctgactgtgaatcctgatgaatcaagctcaaaaggagaaaacaaaaaataatgcaagtacagaggagagatcccatctatgtgacagagctgacacatcgaatccgatcaaaatcctcacctgatgagaatgagaatgaggattcagctgactttgtgagcttcttcccagattttgtgtggacactgagagatttctccctggacttggaagcagatggacaacccctcacaccagatgagtacctggagtattccctgaagctaacgcaaggtaccagtcaaaaagataaaaattttaatctgccccgactctgtatccggaagttcttcccaaagaaaaaatgttttgtcttcgatctgcccattcaccgcaggaagcttgcccagcttgagaaactacaagatgaagagctggaccctgaatttgtgcaacaagtagcagacttctgttcctacatctttagcaattccaaaactaaaactctttcaggaggcatcaaggtcaatgggcctcgtctagagagcctagtgctgacctatatcaatgctatcagcagaggggatctgccctgcatggagaacgcagtcctggccttggcccagatagagaactcagccgcagtgcaaaaggctattgcccactatgaccagcagatgggccagaaggtgcagctgcccgcagaaaccctccaggagctgctggacctgcacagggttagtgagagggaggccactgaagtctatatgaagaactctttcaaggatgtggaccatctgtttcaaaagaaattagcggcccagctagacaaaaagcgggatgacttttgtaaacagaatcaagaagcatcatcagatcgttgctcagctttacttcaggtcattttcagtcctctagaagaagaagtgaaggcgggaatttattcgaaaccagggggctattgtctctttattcagaagctacaagacctggagaaaaagtactatgaggaaccaaggaaggggatacaggctgaagagattctgcagacatacttgaaatccaaggagtctgtgaccgatgcaattctacagacagaccagattctcacagaaaaggaaaaggagattgaagtggaatgtgtaaaagctgaatctgcacaggcttcagcaaaaatggtggaggaaatgcaaataaagtatcagcagatgatggaagagaaagagaagagttatcaagaacatgtgaaacaattgactgagaagatggagagggagagggcccagttgctggaagagcaagagaagaccctcactagtaaacttcaggaacaggcccgagtactaaaggagagatgccaaggtgaaagtacccaacttcaaaatgagatacaaaagctacagaagaccctg

SEQ ID NO: 139402 - DNA, 3067 bp, Homo sapiens
  Payload ID: 7324
  Gene Symbol: GBP3
  Gene Name: guanylate binding protein 3
  Uniprot ID: Q9H0R5
  ENST ID: ENST00000370481
  CDS Start-End: 222-2009
cttccttgaaagaagtactttcagtttcattaggctctgaagccattacaaaggttgcttaacttctaattatttgatcactgaggaaaatccagaaagctacacaacactgaaggggtgaaataaaagtccagcgatccagcgaaagaaaagagaagtgacagaaacaactttacctggactgaagataaaagcacagacaagagaacaatgccctggacatggctccagagatccacatgacaggcccaatgtgcctcattgagaacactaatggggaactggtggcgaatccagaagctctgaaaatcctgtctgccattacacagcctgtggtggtggtggcaattgtgggcctctaccgcacaggaaaatcctacctgatgaacaagctagctgggaagaataagggcttctctctgggctccacagtgaaatctcacaccaaaggaatctggatgtggtgtgtgcctcaccccaaaaagccagaacacaccttagtcctgcttgacactgagggcctgggagatgtaaagaagggtgacaaccagaatgactcctggatcttcaccctggccgtcctcctgagcagcactctcgtgtacaatagcatgggaaccatcaaccagcaggctatggaccaactgtactatgtgacagagctgacacatcgaatccgatcaaaatcctcacctgatgagaatgagaatgaggattcagctgactttgtgagcttcttcccagattttgtgtggacactgagagatttctccctggacttggaagcagatggacaacccctcacaccagatgagtacctggagtattccctgaagctaacgcaaggtaccagtcaaaaagataaaaattttaatctgccccgactctgtatccggaagttcttcccaaagaaaaaatgttttgtcttcgatctgcccattcaccgcaggaagcttgcccagcttgagaaactacaagatgaagagctggaccctgaatttgtgcaacaagtagcagacttctgttcctacatctttagcaattccaaaactaaaactctttcaggaggcatcaaggtcaatgggcctcgtctagagagcctagtgctgacctatatcaatgctatcagcagaggggatctgccctgcatggagaacgcagtcctggccttggcccagatagagaactcagccgcagtgcaaaaggctattgcccactatgaccagcagatgggccagaaggtgcagctgcccgcagaaaccctccaggagctgctggacctgcacagggttagtgagagggaggccactgaagtctatatgaagaactctttcaaggatgtggaccatctgtttcaaaagaaattagcggcccagctagacaaaaagcgggatgacttttgtaaacagaatcaagaagcatcatcagatcgttgctcagctttacttcaggtcattttcagtcctctagaagaagaagtgaaggcgggaatttattcgaaaccagggggctattgtctctttattcagaagctacaagacctggagaaaaagtactatgaggaaccaaggaaggggatacaggctgaagagattctgcagacatacttgaaatccaaggagtctgtgaccgatgcaattctacagacagaccagattctcacagaaaaggaaaaggagattgaagtggaatgtgtaaaagctgaatctgcacaggcttcagcaaaaatggtggaggaaatgcaaataaagtatcagcagatgatggaagagaaagagaagagttatcaagaacatgtgaaacaattgactgagaagatggagagggagagggcccagttgctggaagagcaagagaagaccctcactagtaaacttcaggaacaggcccgagtactaaaggagagatgccaaggtgaaagtacccaacttcaaaatgagatacaaaagctacagaagaccctgaaaaaaaaaaccaagagatatatgtcgcataagctaaagatctaaacaacagagcttttctgtcatcctaacccaaggcataactgaaacaattttagaatttggaacaagtgtcactatatttgataataattagatcttgcatcataacactaaaagtttacaagaacatgcagttcaatgatcaaaatcatgttttttccttaaaaagattgtaaattgtgcaacaaagatgcatttacctctgtaccaacagaggagggatcatgagttgccaccactcagaagtttattcttccagacgaccagtggatactgaggaaagtcttaggtaaaaatcttgggacatatttgggcactggtttggccaagtgtacaatgggtcccaatatcagaaacaaccatcctagcttcctagggaagacagtgtacagttctccattatatcaaggctacaaggtctatgagcaataatgtgatttctggacattgcccatggataattctcactgatggatctcaagctaaagcaaaccatcttatacagagatctagaatcttatattttccataggaaggtaaagaaatcattagcaagagtaggaattgaatcataaacaaattggctaatgaagaaatcttttctttcttgttcaattcatctagattataaccttaatgtgacacctgagacctttagacagttgaccctgaattaaatagtcacatggtaacaattatgcactgtgtaattttagtaatgtataacatgcaatgatgcactttaactgaagatagagactatgttagaaaattgaactaatttaattatttgattgttttaatcctaaagcataagttagtcttttcctgattcttaaaggtcatacttgaaatcctgccaattttccccaaagggaatatggaatttttttgactttcttttgagcaataaaataattgtcttgccattacttagtatatgtagacttcatcccaattgtcaaacatcctaggtaagtggttgacatttcttacagcaattacagattatttttgaactagaaataaactaaactagaaataaaataagtttcactagt

SEQ ID NO: 139403 - DNA, 411 bp, Homo sapiens
  Payload ID: 7324
  Gene Symbol: GBP3
  Gene Name: guanylate binding protein 3
  ENST ID: ENST00000445969
  CDS Start-End: 1-411
caagatgaagagctggaccctgaatttgtgcaacaagtagcagacttctgttcctacatctttagcaattccaaaactaaaactctttcaggaggcatcaaggctgaagagattctgcagacatacttgaaatccaaggagtctgtgaccgatgcaattctacagacagaccagattctcacagaaaaggaaaaggagattgaagtggaatgtgtaaaagctgaatctgcacaggcttcagcaaaaatggtggaggaaatgcaaataaagtatcagcagatgatggaagagaaagagaagagttatcaagaacatgtgaaacaattgactgagaagatggagagggagagggcccagttgctggaagagcaagagaagaccctcactagtaaacttcaggtatccaaatgc

SEQ ID NO: 139404 - DNA, 2455 bp, Homo sapiens
  Payload ID: 7324
  Gene Symbol: GBP3
  Gene Name: guanylate binding protein 3
  ENST ID: ENST00000489444
  CDS Start-End: 118-990
caacactgaaggggtgaaataaaagtccagcgatccagcgaaagaaaagagaagtgacagaaacaactttacctggactgaagataaaagcacagacaagagaacaatgccctggacatggctccagagatccacatgacaggcccaatgtgcctcattgagaacactaatggggaactggtggcgaatccagaagctctgaaaatcctgtctgccattacacagcctgtggtggtggtggcaattgtgggcctctaccgcacaggaaaatcctacctgatgaacaagctagctgggaagaataagggcttctctctgggctccacagtgaaatctcacaccaaaggaatctggatgtggtgtgtgcctcaccccaaaaagccagaacacaccttagtcctgcttgacactgagggcctgggagatgtaaagaagggtgacaaccagaatgactcctggatcttcaccctggccgtcctcctgagcagcactctcgtgtacaatagcatgggaaccatcaaccagcaggctatggaccaactgtactatgtgacagagctgacacatcgaatccgatcaaaatcctcacctgatgagaatgagaatgaggattcagctgactttgtgagcttcttcccagattttgtgtggacactgagagatttctccctggacttggaagcagatggacaacccctcacaccagatgagtacctggagtattccctgaagctaacgcaaggtaccagtcaaaaagataaaaattttaatctgccccgactctgtatccggaagttcttcccaaagaaaaaatgttttgtcttcgatctgcccattcaccgcaggaagcttgcccagcttgagaaactacaagatgaagagctggaccctgaatttgtgcaacaagtagcagacttctgttcctacatctttagcaattccaaaactaaaactctttcaggaggcatcaaggtcaatgggcctcgctgaagagattctgcagacatacttgaaatccaaggagtctgtgaccgatgcaattctacagacagaccagattctcacagaaaaggaaaaggagattgaagtggaatgtgtaaaagctgaatctgcacaggcttcagcaaaaatggtggaggaaatgcaaataaagtatcagcagatgatggaagagaaagagaagagttatcaagaacatgtgaaacaattgactgagaagatggagagggagagggcccagttgctggaagagcaagagaagaccctcactagtaaacttcaggaacaggcccgagtactaaaggagagatgccaaggtgaaagtacccaacttcaaaatgagatacaaaagctacagaagaccctgaaaaaaaaaaccaagagatatatgtcgcataagctaaagatctaaacaacagagcttttctgtcatcctaacccaaggcataactgaaacaattttagaatttggaacaagtgtcactatatttgataataattagatcttgcatcataacactaaaagtttacaagaacatgcagttcaatgatcaaaatcatgttttttccttaaaaagattgtaaattgtgcaacaaagatgcatttacctctgtaccaacagaggagggatcatgagttgccaccactcagaagtttattcttccagacgaccagtggatactgaggaaagtcttaggtaaaaatcttgggacatatttgggcactggtttggccaagtgtacaatgggtcccaatatcagaaacaaccatcctagcttcctagggaagacagtgtacagttctccattatatcaaggctacaaggtctatgagcaataatgtgatttctggacattgcccatggataattctcactgatggatctcaagctaaagcaaaccatcttatacagagatctagaatcttatattttccataggaaggtaaagaaatcattagcaagagtaggaattgaatcataaacaaattggctaatgaagaaatcttttctttcttgttcaattcatctagattataaccttaatgtgacacctgagacctttagacagttgaccctgaattaaatagtcacatggtaacaattatgcactgtgtaattttagtaatgtataacatgcaatgatgcactttaactgaagatagagactatgttagaaaattgaactaatttaattatttgattgttttaatcctaaagcataagttagtcttttcctgattcttaaaggtcatacttgaaatcctgccaattttccccaaagggaatatggaatttttttgactttcttttgagcaataaaataattgtcttgccattacttagtatatgtagacttcatcccaattgtcaaacatcctaggtaagtggttgacatttcttacagcaattacagattatttttgaactagaaataaactaaactagaaataaaa

SEQ ID NO: 139405 - DNA, 702 bp, Homo sapiens
  Payload ID: 7324
  Gene Symbol: GBP3
  Gene Name: guanylate binding protein 3
  ENST ID: ENST00000461384
  CDS Start-End: 1-656
tgcacagggttagtgagagggaggccactgaagtctatatgaagaactctttcaaggatgtggaccatctgtttcaaaagaaattagcggcccagctagacaaaaagcgggatgacttttgtaaacagaatcaagaagcatcatcagatcgttgctcagctttacttcaggtcattttcagtcctctagaagaagaagtgaaggcgggaatttattcgaaaccagggggctattgtctctttattcagaagctacaagacctggagaaaaagtactatgaggaaccaaggaaggggatacaggctgaagagattctgcagacatacttgaaatccaaggagtctgtgaccgatgcaattctacagacagaccagattctcacagaaaaggaaaaggagattgaagtggaatgtgtaaaagctgaatctgcacaggcttcagcaaaaatggtggaggaaatgcaaataaagtatcagcagatgatggaagagaaagagaagagttatcaagaacatgtgaaacaattgactgagaagatggagagggagagggcccagttgctggaagagcaagagaagaccctcactagtaaacttcaggtatccaaatgcatcaccttgtggttcgtttttctgttttctctctgttcttcctgatcacaaacttagtatggcagagcgaacataaagcccaggggaagga

SEQ ID NO: 139406 - DNA, 583 bp, Homo sapiens
  Payload ID: 7324
  Gene Symbol: GBP3
  Gene Name: guanylate binding protein 3
  ENST ID: ENST00000568006
  CDS Start-End: 143-433
actgaggaaaatccagaaagctacacaacactgaaggggtgaaataaaagtccagcgatccagcgaaagaaaagagaagtgacagaaacaactttacctggactgaagataaaagcacagacaagagaacaatgccctggacatggctccagagatccacatgacaggcccaatgtgcctcattgagaacactaatggggaactggtggcgaatccagaagctctgaaaatcctgtctgccattacacagcctgtggtggtggtggcaattgtgggcctctaccgcacaggaaaatcctacctgatgaacaagctagctgggaagaataagggtgagtggcatgagcaaagctctgccaagtcccttctgtcccccaacacagtcagcatccattatgaggatgtgaggagagaaagctggcactgggaataagctaactttccattcacagttgggctccttatcttcactcttctaggggataagcatcagctcacagctgttctgagggcttctctctgggctccacagtgaaatctcacaccaaaggaatctggatgtggtgtgtgcctcaccccaaaa

SEQ ID NO: 139407 - DNA, 599 bp, Homo sapiens
  Payload ID: 7324
  Gene Symbol: GBP3
  Gene Name: guanylate binding protein 3
  ENST ID: ENST00000564665
  CDS Start-End: 231-599
actttcagtttcattaggctctgaagccattacaaaggttgcttaacttctaattatttgatcactgaggaaaatccagaaagctacacaacactgaaggggtgaaataaaagtccagcgatccagcgaaagaaaagagaagtgacagaaacaactttacctggactgaagataaaagcacaggcttctctctgggctccacagtgaaatctcacaccaaaggaatctggatgtggtgtgtgcctcaccccaaaaagccagaacacaccttagtcctgcttgacactgagggcctgggagatgtaaagaagggtgacaaccagaatgactcctggatcttcaccctggccgtcctcctgagcagcactctcgtgtacaatagcatgggaaccatcaaccagcaggctatggaccaactgtactatgtgacagagctgacacatcgaatccgatcaaaatcctcacctgatgagaatgagaatgaggattcagctgactttgtgagcttcttcccagattttgtgtggacactgagagatttctccctggacttggaagcagatggacaacccctcacaccagatgagtacctggagtat

SEQ ID NO: 139408 - DNA, 2561 bp, Homo sapiens
  Payload ID: 7324
  Gene Symbol: GBP3
  Gene Name: guanylate binding protein 3
  ENST ID: ENST00000493594
  CDS Start-End: 234-509
gttactgagtcacttccttgaaagaagtactttcagtttcattaggctctgaagccattacaaaggttgcttaacttctaattatttgatcactgaggaaaatccagaaagctacacaacactgaaggggtgaaataaaagtccagcgatccagcgaaagaaaagagaagtgacagaaacaactttacctggactgaagataaaagcacagacaagagaacaatgccctggacatggctccagagatccacatgacaggcccaatgtgcctcattgagaacactaatggggaactggtggcgaatccagaagctctgaaaatcctgtctgccattacacagcctgtggtggtggtggcaattgtgggcctctaccgcacaggaaaatcctacctgatgaacaagctagctgggaagaataagggctggagtacagtggcaagatctcagctcaccacagtcttgacttcctgggctcaagcaatcctctcacctcagcctcctgagtaggcttctctctgggctccacagtgaaatctcacaccaaaggaatctggatgtggtgtgtgcctcaccccaaaaagccagaacacaccttagtcctgcttgacactgagggcctgggagatgtaaagaagggtgacaaccagaatgactcctggatcttcaccctggccgtcctcctgagcagcactctcgtgtacaatagcatgggaaccatcaaccagcaggctatggaccaactgtactatgtgacagagctgacacatcgaatccgatcaaaatcctcacctgatgagaatgagaatgaggattcagctgactttgtgagcttcttcccagattttgtgtggacactgagagatttctccctggacttggaagcagatggacaacccctcacaccagatgagtacctggagtattccctgaagctaacgcaaggtaccagtcaaaaagataaaaattttaatctgccccgactctgtatccggaagttcttcccaaagaaaaaatgttttgtcttcgatctgcccattcaccgcaggaagcttgcccagcttgagaaactacaagatgaagagctggaccctgaatttgtgcaacaagtagcagacttctgttcctacatctttagcaattccaaaactaaaactctttcaggaggcatcaaggtcaatgggcctcgtctagagagcctagtgctgacctatatcaatgctatcagcagaggggatctgccctgcatggagaacgcagtcctggccttggcccagatagagaactcagccgcagtgcaaaaggctattgcccactatgaccagcagatgggccagaaggtgcagctgcccgcagaaaccctccaggagctgctggacctgcacagggttagtgagagggaggccactgaagtctatatgaagaactctttcaaggatgtggaccatctgtttcaaaagaaattagcggcccagctagacaaaaagcgggatgacttttgtaaacagaatcaagaagcatcatcagatcgttgctcagctttacttcaggtcattttcagtcctctagaagaagaagtgaaggcgggaatttattcgaaaccagggggctattgtctctttattcagaagctacaagacctggagaaaaagtactatgaggaaccaaggaaggggatacaggctgaagagattctgcagacatacttgaaatccaaggagtctgtgaccgatgcaattctacagacagaccagattctcacagaaaaggaaaaggagattgaagtggaatgtgtaaaagctgaatctgcacaggcttcagcaaaaatggtggaggaaatgcaaataaagtatcagcagatgatggaagagaaagagaagagttatcaagaacatgtgaaacaattgactgagaagatggagagggagagggcccagttgctggaagagcaagagaagaccctcactagtaaacttcaggaacaggcccgagtactaaaggagagatgccaaggtgaaagtacccaacttcaaaatgagatacaaaagctacagaagaccctgaaaaaaaaaaccaagagatatatgtcgcataagctaaagatctaaacaacagagcttttctgtcatcctaacccaaggcataactgaaacaattttagaatttggaacaagtgtcactatatttgataataattagatcttgcatcataacactaaaagtttacaagaacatgcagttcaatgatcaaaatcatgttttttccttaaaaagattgtaaattgtgcaacaaagatgcatttacctctgtaccaacagaggagggatcatgagttgccaccactcagaagtttattcttccagacgaccagtggatactgaggaaagtcttaggtaaaaatcttgggacatatttgggcactggtttggccaagtgtacaatgggtcccaatatcagaaacaaccatcctagcttcctagggaagacagtgtacagttctccattatatcaaggctacaaggtctatgagcaataatgtgatttctggacattgcccatgg

SEQ ID NO: 139409 - DNA, 6127 bp, Homo sapiens
  Payload ID: 7325
  Gene Symbol: GBP4
  Gene Name: guanylate binding protein 4
  Uniprot ID: Q96PP9
  ENST ID: ENST00000355754
  CDS Start-End: 99-2021
ctcacagactcttacttggatgtctgtaaatccggctggactttcagcttctaagaacagtccgtttctcgaggatccaggcgcaggaggacagagcaatgggtgagagaactcttcacgctgcagtgcccacaccaggttatccagaatctgaatccatcatgatggcccccatttgtctagtggaaaaccaggaagagcagctgacagtgaattcaaaggcattagagattcttgacaagatttctcagcccgtggtggtggtggccattgtagggctataccgcacaggaaaatcctatctcatgaatcgtcttgcaggaaagcgcaatggcttccctctgggctccacggtgcagtctgaaactaagggcatctggatgtggtgtgtgccccacctctctaagccaaaccacaccctggtccttctggacaccgagggcctgggcgatgtagaaaagagtaaccctaagaatgactcgtggatctttgccctggctgtgcttctaagcagcagctttgtctataacagcgtgagcaccatcaaccaccaggccctggagcagctgcactatgtgactgagctagcagagctaatcagggcaaaatcctgccccagacctgatgaagctgaggactccagcgagtttgcgagtttctttccagactttatttggactgttcgggattttaccctggagctaaagttagatggaaaccccatcacagaagatgagtacctggagaatgccttgaagctgattccaggcaagaatcccaaaattcaaaattcaaacatgcctagagagtgtatcaggcatttcttccgaaaacggaagtgctttgtctttgaccggcctacaaatgacaagcaatatttaaatcatatggacgaagtgccagaagaaaatctggaaaggcatttccttatgcaatcagacaacttctgttcttatatcttcacccatgcaaagaccaagaccctgagagagggaatcattgtcactggaaagcggctggggactctggtggtgacttatgtagatgccatcaacagtggagcagtaccttgtctggagaatgcagtgacagcactggcccagcttgagaacccagcggctgtgcagagggcagccgaccactatagccagcagatggcccagcaactgaggctccccacagacacgctccaggagctgctggacgtgcatgcagcctgtgagagggaagccattgcagtcttcatggagcactccttcaaggatgaaaaccatgaattccagaagaagcttgtggacaccatagagaaaaagaagggagactttgtgctgcagaatgaagaggcatctgccaaatattgccaggctgagcttaagcggctttcagagcacctgacagaaagcattttgagaggaattttctctgttcctggaggacacaatctctacttagaagaaaagaaacaggttgagtgggactataagctagtgcccagaaaaggagttaaggcaaacgaggtcctccagaacttcctgcagtcacaggtggttgtagaggaatccatcctgcagtcagacaaagccctcactgctggagagaaggccatagcagcggagcgggccatgaaggaagcagctgagaaggaacaggagctgctaagagaaaaacagaaggagcagcagcaaatgatggaggctcaagagagaagcttccaggaatacatggcccaaatggagaagaagttggaggaggaaagggaaaaccttctcagagagcatgaaaggctgctaaaacacaagctgaaggtacaagaagaaatgcttaaggaagaatttcaaaagaaatctgagcagttaaataaagagattaatcaactgaaagaaaaaattgaaagcactaaaaatgaacagttaaggctcttaaagatccttgacatggctagcaacataatgattgtcactctacctggggcttccaagctacttggagtagggacaaaatatcttggctcacgtatttaagagcctgaatattccaggtaagaaaatataaaatgaggtttattttattttaataacataacactgttgctcattttgtaagtatatgtgttatagcagtttcattcaagaaaagtttaaaattaaaaagtgattatcaaagaatatcagggcctgacatccacaaaaaacaaacttaattttgattgaactaataatttataaacatgggaaacaagtcagaagtagtgacattattcctagaaaagatttaaggaaagcaaaaagacaactggtaagattaagaagccattaaccatttgcaatttatattatagtcacagaaataatttcagttatgactagctcttgccgattaatgagaagagagcagctccacaatttttaatttttttaacttttattttagattcaggggtatatgtgcaggtttgttacataggtaaactgcatgtcatgggggtttggtgtgcagataattttatcacacaattattaatcataatacccaataggtttttttctgatcttctccctcctcccaacctacaccctcaagtagaccccagtgtctcttgttctcctctgagtatccatgtgttctctttgtttggcccccatttataagtgagaacatgtggtatttgggtttctgttcctgtgttagtttgcttatgataatggcttccagctccatccatattgctacagaggacatgatcttgttgttttttatggctgcatagtattccatggtgtttgtatataccacattttcattatccagcctattattaatgcacatttaggttgattccttatctttgctattgtgaacagtgctgcaatggacatacacgtgcatgtgcctttatggtacaatgatttatatttccttgggatatgcattcctttgggaataatgggattgctgagttgaatggtaattctgagttctttgaggaatcaccaacctgctttccacagtggctaaactaatttacactcccaccaacagtgtatgtgttccattttctccacaaccttgccagcatctgttatttattgactttctagtaacagccattctgactggtgtgagatggtatgcatttctgtagtgattagtgatgatgagtgatttttatatgctttttaaatgcatatatgtcttcttttgaaatgtgttcatgttctttgcccactttctttttaatggggttgcttgtttttcgcttgtaaattttttgaagcttcttatagattctggatattagatctttgttggatgcatagttggcaaatattttctaccattctgtaggttgtctgttactttgttaattgtttcattttgttttgtttttgttttttgaaacagggtctcactttgacacccaggctggagtgcagtagcacaaacatgggtcattgtagcctcaacctcccaggctcaagcagtcctttcacctcaaccccccacatagctgggactacaggtgcttacacccaagaccagttaattttttgtatttgtttgtagagatgtgtttttccatgttgcccaagctggtcttgaactactgagctcaagcaatctgcctgcttcagcctcccaaagtactgggatttaggcatgagccaccacatctggccaatagtttcttttgatgtgcagaagctctttaatttaattagatctcctttgtcagtttttgtttttgctgcaattgcttatgttatcttcatcatgaaattttagccaagtcttatgtccagaatggtatttcttaggttatttttcagagtttttatagtttaatgttttatatttaagtctttaatccttcttaagttgatttttgtatgcagagtaagctgggggcccagtttcaatcttctgcatatggctagccagtaatcccagcaccatttattaaatggggacttctttccccattgcttgtttttgtcagctttgtccaagatcagatgattgtaggtgtacagcattatttctggactctctgttatgttccatttatctgtgtgtctgtttttctactaataccatgctgttttggttactgtagctctgtagtatggtttgaggtttggtaacttgatgcctccccttttgttctttatgtttaggattgccttggctaggctcttttttggttccatatgaattttaaagtagtttctaattctgtgaagaatgtcattggtagtttgatagggatagcattgaactatttgctcaactcaacattttaggaatttatttctgctgtctagtgctcaaaacttgcagctagaattgagggaagagagagaccttcttatattgttttatattgtttgatactcagtacctgttttaagaaaaaacaacaaggaagtaaaaccaaagacaggcagcccagcgccaggcccaaaaccaggcctgggcctgcctggcctaaacccagtagttaaaaatcaactcattgcctgtaatcccagcactttgggaggccgagacgggtggatcacgaggtcaggagatcgagaccatcctggctaacacggtgaaaccccgtctctactaaaaatacaaaaattagccgggcatggtggcacgcgcctgtagtcccagctacacgggaggctgaggcaggagaatggcgtgaacccaggaggcggagcttgcagtgagtcgagatcgcgccactgcactccagcctgggcgacagagcgaaactccgtctcaaaaaaaaaaaaaaaaaatcaactcataacttagaaaccgatgttattcatagattccagacattgtatagaagaacatttggaaactcactgccttgttctgtttctctctgaccaccagtgcatgcagcccctgtcatgtaccgcctgtttgctcaaatcaatcatgaccctttcatgtgaaatctttagtgttgtgagcccttaaaagggacagaaattgtgcattcaaggagcttggattttaaggcagcagcttgctgatgccaccagctgaaaaaagcccttccttctccaactcggtgtctgagaagttttgtctgcagctcatcctgctacagaatgaactccttgtaattctacaagatatgccatgggccttttcacaggggacacaggcttcttaaaacaacccggcttcctcaccctatgtcctttatttacaaagctgtgctcctattcatgagcatggaatgtttttccatttgtttgtgacatctcttatttctttcaggggtatcttgtaattctcattatatatatcttttgcttccttggttagctgtatttttaggtattttagtcttcttgtggcaattgtgaatgggattgcattcctgatttggctcttggcttaatgttattaacgccacattttttaaatagacaaaaatatgagattaaaaatgttgaattttactaacaataaaagttgttcaaaggaaaactataaggttcttgtttcaactctgtcataggaagaacaggacagtgagctggcacagagttagggaaactgactgtgtctcatattggctagtgagagtgatctgttggaattgtatatcaaaattttaatgtacatacattttgtctagcaattctactattgggtatttatatagtacatataaatataaatgtatatgtttagtaaatatatacttatagttagtaaatatattttatatctatttagtaaatatactaaatgtcaggcctctgagcccaagctaagccatcatatcccctgtgacctgcatgtacatacgtccagatggcctgaagcaagtgaagaatcacaaaagaagtgaaaatggcctgttcctgccttaactgatgacattaccttgtgaaattccttctcctggctcatcctggctcaaaagctcccccactaagcaacttgtgacacccacctctgcccgccagagaacaaccccctttgactgtaattttcctttaccaacccaaatcctgtaaaatggtcccaaccctatctcccttcactgactgtcttttcggactcagccagcctgcacccaggtgattaaaaagctttattgctcaca

SEQ ID NO: 139410 - DNA, 2011 bp, Homo sapiens
  Payload ID: 7326
  Gene Symbol: GBP5
  Gene Name: guanylate binding protein 5
  Uniprot ID: Q96PP8
  ENST ID: ENST00000370459
  CDS Start-End: 129-1889
gctaattgttgtagatcatcacttcaaggtgcccatatctttctagtggaaaaattattctggcctccgctgcatacaaatcaggcaaccagaattctacatatataaggcaaagtaacatcctagacatggctttagagatccacatgtcagaccccatgtgcctcatcgagaactttaatgagcagctgaaggttaatcaggaagctttggagatcctgtctgccattacgcaacctgtagttgtggtagcgattgtgggcctctatcgcactggcaaatcctacctgatgaacaagctggctgggaagaacaagggcttctctgttgcatctacggtgcagtctcacaccaagggaatttggatatggtgtgtgcctcatcccaactggccaaatcacacattagttctgcttgacaccgagggcctgggagatgtagagaaggctgacaacaagaatgatatccagatctttgcactggcactcttactgagcagcacctttgtgtacaatactgtgaacaaaattgatcagggtgctatcgacctactgcacaatgtgacagaactgacagatctgctcaaggcaagaaactcacccgaccttgacagggttgaagatcctgctgactctgcgagcttcttcccagacttagtgtggactctgagagatttctgcttaggcctggaaatagatgggcaacttgtcacaccagatgaatacctggagaattccctaaggccaaagcaaggtagtgatcaaagagttcaaaatttcaatttgccccgtctgtgtatacagaagttctttccaaaaaagaaatgctttatctttgacttacctgctcaccaaaaaaagcttgcccaacttgaaacactgcctgatgatgagctagagcctgaatttgtgcaacaagtgacagaattctgttcctacatctttagccattctatgaccaagactcttccaggtggcatcatggtcaatggatctcgtctaaagaacctggtgctgacctatgtcaatgccatcagcagtggggatctgccttgcatagagaatgcagtcctggccttggctcagagagagaactcagctgcagtgcaaaaggccattgcccactatgaccagcaaatgggccagaaagtgcagctgcccatggaaaccctccaggagctgctggacctgcacaggaccagtgagagggaggccattgaagtcttcatgaaaaactctttcaaggatgtagaccaaagtttccagaaagaattggagactctactagatgcaaaacagaatgacatttgtaaacggaacctggaagcatcctcggattattgctcggctttacttaaggatatttttggtcctctagaagaagcagtgaagcagggaatttattctaagccaggaggccataatctcttcattcagaaaacagaagaactgaaggcaaagtactatcgggagcctcggaaaggaatacaggctgaagaagttctgcagaaatatttaaagtccaaggagtctgtgagtcatgcaatattacagactgaccaggctctcacagagacggaaaaaaagaagaaagaggcacaagtgaaagcagaagctgaaaaggctgaagcgcaaaggttggcggcgattcaaaggcagaacgagcaaatgatgcaggagagggagagactccatcaggaacaagtgagacaaatggagatagccaaacaaaattggctggcagagcaacagaaaatgcaggaacaacagatgcaggaacaggctgcacagctcagcacaacattccaagctcaaaatagaagccttctcagtgagctccagcacgcccagaggactgttaataacgatgatccatgtgttttactctaaagtgctaaatatgggagtttcctttttttactctttgtcactgatgacacaacagaaaagaaactgtagaccttgggacaatcaacatttaaataaactttataattattttttcaaacttt

SEQ ID NO: 139411 - DNA, 4699 bp, Homo sapiens
  Payload ID: 7326
  Gene Symbol: GBP5
  Gene Name: guanylate binding protein 5
  ENST ID: ENST00000443807
  CDS Start-End: 3250-4699
cttgctgctgctcactctttgggtccacactgcctttatgagctgtaacactcactgggaatgtctgcagcttcactcctgaagccagcgagaccacgaacccaccaggaggaacaaacaactccagacgcgcagccttaagagctgtaacactcaccgcgaaggtctgcagcttcactcctgagccagccagaccacgaacccaccagaaggaagaaactccaaacacatccgaacatcagaaggagcaaactcctgacacgccacctttaagaaccgtgacactcaacgctagggtccgcggcttcattcttgaagtcagtgagaccaagaacccaccaattccggacacggtaagactggggcaagaggtggaagagatttgcaagattcatttggttttagaaacattctacaaaggataggatgcagcttatcctgatgtggtatatcagacctcagtaaagaataaattgtattcttatcagacaggcagcagaattcatcaagtaccagctgtgtctgcctcttgctgaattagacatcaatgtgtgtggtgactaaactaagagtttgaaatgccttcaaattatttttcttcctttgcaattttatgacttattcaggatcataatttccacttaagttaccttcgtccttcataaaatctgattaaactgactcgaacttcagcatgaaagtttcaaaaactatgatagctattattttcatgagaaagaacaatgaatatgatgcaatgtaagtagcttgcaaacattaaggacaagaaaaaaatgttgcccagagagaagtttcatgaaaacagtgatgtatttttagtcatagtcttgtactttgtttgaaagtagatttcttcctttagcaatagccctgacttaattcatgttggtttcttggcatctactcacttaactaaccccttttgtgttgggttctgcttctactactctattgcctttactattatgaatcacctaatttaacagttgcccaactggatccctcaatactgtctggcaactgttcactcgttgaaattctctcctttgaatttcttaccatgacacatacttcaagcattttgtactagtttgatttccatttatatccttaataagagccttttccttttccttgaaattcaaaccagaaactatgcaaaataagcaaaagcaagcaataacaactacatatacaaatgcaggcgcaaaacccaaactagaatcatatggctgaaaacagatgttttctttcagaaatccttccactaccacttctgagcattttctcttagtatttttttttgggcattttccttctttgcactttttaaaatctcctgcagctcgctcactctctttcataagccagcagttatactgatgttaataaatagttgtttatttacttttgcttttttagaaaacaagctgaaagaattgagtgaaatgccagagagatacagatagccagttgtagggctggggttggaaatcaagtctaatttaaggcaagggcaaaatgtgcattttgtgtgtgtattttgaaccattcttgcattgtttttatttgcaaaggttatagggctcaagcagttagggagaatgcatcccagaacactaagttatgaataacagagcaacagttatgtttgtggcttgaacacattaaatctgcaataatgttttagaaatttggctttactaaaagcattaaagatgctatccagatgacattggggacaacatgtcaaatactattattaatgtagatatacaatgctattgtcattcataagagagtctgaacactcagacacattcattccctcttccttagtgacatcatcccaaatcataagatcttgtaagctctcaatatctgcttatagatttggcttatgtatcttttgtttttctagctaattgttgtagatcatcacttcaaggtgcccatatctttctagtggaaaaattattctggcctccgctgcatacaaatcaggcaaccagaattctacatatataaggtactaatactacattgaaaatagattagaatgagaagagacctgccatttgagtctctaaatttgttgcaaaattgcctctttctgggtcaggcttgcactaggcatttcctgactcccatgtcctagtgctacaccatttgcaaatggatatcctattttctgctgccaagcagtttctgttttaatttatgtcaacataatgatttccagggcattagctatgaggaagcagggagaatgggtcttcataattgtaaaatgacagtttttgaaatttgctagtaaagagatggagaatccaaaccttttcattgtaagattttagtgaaagaactcgtcaagcggatagtgaagttttagcatccttagtaaataaccacctttaaaatggaagaaaactatcctttatgataaggcaaagtagaaaagcatatttttatggcatttgctttttctcatatagctcaaacattttttttaaccagagactctttaggttatagggattgatgctcagaagttagaaaaaaataggttaagtattattaaaggaagttgttttactcattcagtcaatcataaaataatcatgctttgaagttttggtttaataaagcacattagtaactatgtaaaaaatttcaagtatatcactaagaagcaaacagctatgatttgttagataatgctgcataatgacttggtagtatttaatgtaatgcagtttgactggacatagatctaactgaaaaaaatgaagttgacacaaagtaaaaggaacagtgtaatatattaataaagaacatcataaagaattaatataggaacccagggaggtaaaaactaaaaaacataactaagccaaaaaccaatggaataagagttagattcaaactagtaggttagacgcaggaaatggattttcgtatgcctatcaaatatttaagaaccagtagaatggcctatagtagacatataaagggcctaggacttacttttgttttaaaataaagtctctctattttacaggactctttttattttaaaactttttttttccagaaacttaggcagtgctggggagtagtatgtccccaggttcagtaagcaaaatgacttcctttgcttattaaacaaacaccagaaattccagcctatcccatctgttcccttgcaggcaaagtaacatcctagacatggctttagagatccacatgtcagaccccatgtgcctcatcgagaactttaatgagcagctgaaggttaatcaggaagctttggagatcctgtctgccattacgcaacctgtagttgtggtagcgattgtgggcctctatcgcactggcaaatcctacctgatgaacaagctggctgggaagaacaagggcttctctgttgcatctacggtgcagtctcacaccaagggaatttggatatggtgtgtgcctcatcccaactggccaaatcacacattagttctgcttgacaccgagggcctgggagatgtagagaaggctgacaacaagaatgatatccagatctttgcactggcactcttactgagcagcacctttgtgtacaatactgtgaacaaaattgatcagggtgctatcgacctactgcacaatgtgacagaactgacagatctgctcaaggcaagaaactcacccgaccttgacagggttgaagatcctgctgactctgcgagcttcttcccagacttagtgtggactctgagagatttctgcttaggcctggaaatagatgggcaacttgtcacaccagatgaatacctggagaattccctaaggccaaagcaaggtagtgatcaaagagttcaaaatttcaatttgccccgtctgtgtatacagaagttctttccaaaaaagaaatgctttatctttgacttacctgctcaccaaaaaaagcttgcccaacttgaaacactgcctgatgatgagctagagcctgaatttgtgcaacaagtgacagaattctgttcctacatctttagccattctatgaccaagactcttccaggtggcatcatggtcaatggatctcgtctaaagaacctggtgctgacctatgtcaatgccatcagcagtggggatctgccttgcatagagaatgcagtcctggccttggctcagagagagaactcagctgcagtgcaaaaggccattgcccactatgaccagcaaatgggccagaaagtgcagctgcccatggaaaccctccaggagctgctggacctgcacaggaccagtgagagggaggccattgaagtcttcatgaaaaactctttcaaggatgtagaccaaagtttccagaaagaattggagactctactagatgcaaaacagaatgacatttgtaaacggaacctggaagcatcctcggattattgctcggctttacttaaggatatttttggtcctctagaagaagcagtgaagcagggaatttattctaagccaggaggccataatctcttcattcagaaaacagaagaactgaaggcaaagtactatcgggagcctcggaaaggaatacaggctgaagaagttctgcagaaatatttaaagtccaaggagtctgtgagtcatgcaatattacagactgaccaggctctcacagagacgg

SEQ ID NO: 139412 - DNA, 2454 bp, Homo sapiens
  Payload ID: 7327
  Gene Symbol: GBP7
  Gene Name: guanylate binding protein 7
  Uniprot ID: Q8N8V2
  ENST ID: ENST00000294671
  CDS Start-End: 140-2056
aagaaaaaaagtgggagaaatcagtgcagccaaattcagaactaaagagaagagaataaagactcataactttctcattgaagctgccttcttaccaagtccagaggatctctactctggacagaggaacgccctgaacatggcatcagagatccacatgccaggcccagtgtgcctcactgagaacactaaagggcatctggtggtgaattcagaagctctggaaatcctgtctgccattacacagcctgtagtagtggtggcaattgtgggcctctaccgcacaggcaaatcctacctaatgaacaagctggctgggaagaacaaaggcttccctctgggctgcacagtgaagtctgaaaccaaaggcatctggatgtggtgtgtgccccacccctccaagccaaaccacaccctgatccttctggacacggagggcctgggtgatatggaaaagagtgaccctaagagtgactcgtggatctttgccctggctgtgcttctaagcagcagctttgtctacaacagcatgggcaccatcaaccaccaggccctggagcagctgcactacgtgactgagctaacagagctaatcagggcaaaatcgtgccccagacctgatgaagttgaggactccagcgagtttgtgagtttctttccagactttatttggactgttcgagattttaccctggagctgaagttagatggacaccccatcacagaagatgagtacctggagaatgccttgaagctgatttcaggcaagaatccccaaatccaaaattctaacaagcccagggagtggatcaggcatttctttccaaaacagaagtgctttgtctttgaccggccaataaatgacaaaaaactcttactccatgttgaagaagtacgagaagaccaactggatagtaatttccagatgcaatcagaaaatttctgttcttatatcttcacccatgcaaagaccaagaccctgagagagggaatccttgtcactggaaaccggctggggatgctggtggagacctacctggatgccatcaacagtggagcgactccttgtctggagaatgcaatggcagttctggcccagtgtgagaactcagcagccgtgcagagggcagccaaccactacagccagcagatggcccagcaagtgagattccccacagacacactccaggagctgctggacgtgcatgcagtttgtgagagggaagccattgcagtcttcatggagtactccttcaaagataaaagccaggaatttcagaagaagcttgtggacaccatggagaaaaagaaggaagactttgtgctgcagaatgaagaggcatctgccaaatattgtcaggctgagcttaagcggctttcagagctcttgacagaaagtatttcaagaggaactttctttgttccgggggggcacaatatctacttagaagcaaaaaagaagattgaacaggactatacactagtgcccagaaaaggagttaaggcagacgaggtcctccagagcttcctgcagtcacaggtggttatagaggaatccatcctgcagtcagacaaagccctcactgctggagagaaggccatagcagctaagcaggctaagaaggaggcagctgaaaaggaacaggagctgctaagacaaaaacagaaggaacagcagcaaatgatggaggctcaagagagaagtttccaggaaaacatagctcaactcaagaagaagatggagagggaaagggaaaactatatgagagaactgagaaagatgttgagtcacaagatgaaggtcctagaagaactgcttactgaaggatttaaagagatatttgagtcgttaaatgaagagattaatcgactgaaagaacaaattgaagcagctgaaaatgaagagccctcagtgttttcacagattcttgatgtggctggcagtatatttattgcagcactacctggggctgctaagctagttgatttaggaatgaaaattcttagctcattatgtaataggctgagaaatcctggtaagaaaattataagctgaggtttcttttgttaaaatggtataacgctgttgctcattttaaaagtatatgtgttattgcagtttcatttaagaaaagtttaaaattaaaaagcaaatttcaaagaatattatggcctgaagttcataaaaacaaacttaattttgactaaagtaataattaatagaaatggggaacaagttagaagataaaattattcctagaaaagatttaagtaaagcaaaaggacaaatggtaatataaagaaattattttcaattaatgttatagtcacagagataatttaagttataattagctcttgcaaatcagtgagaagagagtaacgccacatattttaaacaggcaaaaatatgataataaaaatgtttaattttactgacaataaaagttgtgc

SEQ ID NO: 139413 - DNA, 2987 bp, Homo sapiens
  Payload ID: 7328
  Gene Symbol: GBP6
  Gene Name: guanylate binding protein family, member 6
  Uniprot ID: Q6ZN66
  ENST ID: ENST00000370456
  CDS Start-End: 94-1995
ggaggaaagaaaacaagaggtgagtgaggcaactgaaaactgttcttggacctgcggtgctatagagcaggctcttctaggttggcagttgccatggaatctggacccaaaatgttggcccccgtttgcctggtggaaaataacaatgagcagctattggtgaaccagcaagctatacagattcttgaaaagatttctcagccagtggtggtggtggccattgtaggactgtaccgtacagggaaatcctacttgatgaaccatctggcaggacagaatcatggcttccctctgggctccacggtgcagtctgaaaccaagggcatctggatgtggtgcgtgccccacccatccaagccaaaccacaccctggtccttctggacaccgaaggtctgggcgatgtggaaaagggtgaccctaagaatgactcctggatctttgccctggctgtgctcctgtgcagcacctttgtctacaacagcatgagcaccatcaaccaccaggccctggagcagctgcattatgtgacggagctcacagaactaattaaggcaaagtcctccccaaggcctgatggagtagaagattccacagagtttgtgagtttcttcccagactttctttggacagtacgggatttcactctggagctgaagttgaacggtcaccctatcacagaagatgaatacctggagaatgccttgaagctgattcaaggcaataatcccagagttcaaacatccaattttcccagggagtgcatcaggcgtttctttccaaaacggaagtgtttcgtctttgaccggccaacaaatgacaaagaccttctagccaatattgagaaggtgtcagaaaagcaactggatcccaaattccaggaacaaacaaacattttctgttcttacatcttcactcatgcaagaaccaagaccctcagggagggaatcacagtcactgggaatcgtctgggaactctggcagtgacttatgtagaggccatcaacagtggagcagtgccttgtctggagaatgcagtgataactctggcccagcgtgagaactcagcggccgtgcagagggcagctgactactacagccagcagatggcccagcgagtgaagctccccacagacacgctccaggagctgctggacatgcatgcggcctgtgagagggaagccattgcaatcttcatggagcactccttcaaggatgaaaatcaggaattccagaagaagttcatggaaaccacaatgaataagaagggggatttcttgctgcagaatgaagagtcatctgttcaatactgccaggctaaactcaatgagctctcaaagggactaatggaaagtatctcagcaggaagtttctctgttcctggagggcacaagctctacatggaaacaaaggaaaggattgaacaggactattggcaagttcccaggaaaggagtaaaggcaaaagaggtcttccagaggttcctggagtcacagatggtgatagaggaatccatcttgcagtcagataaagccctcactgatagagagaaggcagtagcagtggatcgggccaagaaggaggcagctgagaaggaacaggaacttttaaaacagaaattacaggagcagcagcaacagatggaggctcaagataagagtcgcaaggaaaacatagcccaactgaaggagaagctgcagatggagagagaacacctactgagagagcagattatgatgttggagcacacgcagaaggtccaaaatgattggcttcatgaaggatttaagaagaagtatgaggagatgaatgcagagataagtcaatttaaacgtatgattgatactacaaaaaatgatgatactccctggattgcacgaaccttggacaaccttgccgatgagctaactgcaatattgtctgctcctgctaaattaattggtcatggtgtcaaaggtgtgagctcactctttaaaaagcataagctccccttttaaggatattatagattgtacatatatgctttggactatttttgatctgtatgtttttcattttcattcagcaagttttttttttttttcagagtcttactctgttgcccaggctggagtacagtggtgcaatctcagctcactgcaacctctgcctcctgggttcaagagattcacctgcctcagccccctagtagctgggattataggtgtacaccaccacacccagctaatttttgtatttttagtagagatggggtttcactatgttggccaggctggtctcgaactcttgacctcaaatgatccacccgcctcggcctcccaaagtgctgggtttacaggcatgagccaccatgcccagccctcatttagcaaagttttaaacataaaaagtgcttattagaggatatcagtgcctggcccacatgagagaacagatccatacacactttgaaaaactttgttcacttttaggaaatataattttgaaaaatcatttacatacaagaggtccactgaggcattgcttttaatggcaaaatattgcaatgtacttgaatgtccttcacattagattggtaagataaattttagtatgtgcatgtactggaatattatatagccagtaaacaaattgacaatgaagctctatttgtaccagtaaagaatggtcttgaagagacattgtaaaatgaaaaaaaaaaaaaccaagttgtaaagcaatgtagattatcttatcagcatggaaaaaatgcaattattatatggaagcatgcaaatatatctctggaaagattaatcaaaatctattattattggctccttctgggaagaaccaagtgaatgtaggggttgaaggaacacatactcttcactttatactcttgaattttgtaaagaaatcttattttaccgattcagaaataaataagaaaatgtaagagacaatgctaataatgataacaataaaaaaatagtgaaattggctatca

SEQ ID NO: 139414 - DNA, 3047 bp, Homo sapiens
  Payload ID: 7329
  Gene Symbol: GUCY1A2
  Gene Name: guanylate cyclase 1, soluble, alpha 2
  Uniprot ID: P33402
  ENST ID: ENST00000282249
  CDS Start-End: 391-2682
tgggccgcagccctccccgccccgccgaccgcggtcacacactctcggagcctccccgtgagcgggagcgcggcgcacggcgatgcgccgaggcgggcgctgaggcggcgccgcgcgagcagcagcagaggcggcggcggcccccagcccagcccggcgccgccgccgagcccgggccccaaggtgcggcggcgccccaagttcccgccatgagcagccggctcggggggctccgcggccccggggactcccgccccgccgggcgcgaccgcagcgccccgcggccccgacgcgcttaacgttgtcgcttgccggtcccgccaccgccgcctccgccgccgctcgcgtcctcgccgccaccgcctcggccgctgcagctccgccggcagcatgtctcgaaggaagatttcgtccgagtccttcagctccctgggctccgactacctggagaccagcccggaggaggagggggagtgccccctgtctaggctctgctggaatggcagccggagcccgcccgggccgctggagcccagcccggccgcagctgccgctgccgccgccccggccccgaccccggctgcttctgccgccgccgccgctgccactgccggggccaggagggtgcagcgccggaggcgggtcaacctggactcgctgggcgagagcatcagccgcctgacggcgccctcgcctcagacgatacagcagactctcaagaggacactgcagtattatgaacatcaagttattggttacagggatgcagaaaagaatttccacaatatctctaacagatgctcctatgcagaccactccaacaaagaagaaattgaagatgtctcaggaattcttcagtgtactgctaatatactcggtttgaagtttgaggaaattcaaaaaagatttggtgaagagttctttaatatatgctttcatgagaatgagagagtccttcgagctgtaggtggcactttgcaggacttttttaacggctttgatgctttgttggaacacattagaacttcttttggaaaacaggccactctggagtcaccatctttcctatgcaaagagctccctgaaggtactctcatgctccactacttccaccctcaccatattgtggggtttgcaatgctggggatgattaaggctgcaggaaagaagatctatcggctggatgtggaagtggaacaggttgcaaatgagaagctatgctctgatgtttcaaacccaggcaattgtagctgtcttactttccttatcaaagaatgtgaaaatactaatatcatgaagaaccttccacagggaacctcccaagttcctgcggacctcagaattagcatcaacaccttctgtagagccttccctttccacttgatgtttgatcccagcatgtcagtccttcagttgggggaaggtctaaggaagcagcttcgatgtgacactcacaaagtgctcaagtttgaggactgcttcgagattgtatctccaaaggttaatgccacctttgaaagggtcctgctgcgactgtctaccccgtttgtgattagaaccaagcctgaggcttctggctctgaaaataaagacaaggtgatggaagtcaaaggacaaatgatccatgttccagaatcaaattccattttatttttgggctctccatgtgtggacaagttggatgaactcatgggccgagggctacatctctcagacatccctatccatgatgccacccgagatgtcattttggttggtgagcaggcaaaggcccaagatgggttgaagaaaaggatggataaattaaaggcaactttagaaagaactcaccaggccctggaagaagagaaaaagaagacagtggatcttctatattctattttccctggtgatgtagcccagcaattatggcaagggcagcaagtacaggccagaaagtttgatgatgtcaccatgctcttttcagacattgttggcttcacagccatatgtgcccagtgtactcccatgcaagtaatcagcatgctgaatgaactgtacaccagatttgaccaccagtgtggatttttggatatttataaggtggaaacaataggtgatgcctactgtgttgcagcagggctccacagaaaaagcctctgccatgctaaacccattgctctgatggccttgaagatgatggaactttcagaagaggtgctgacacctgatggaagaccgattcagccccagaggagtgaactccttttctcctttcctgtttccatccagctggttccagatcagcatcaaagtgaaacggatttgggtactgaaaagatgaggataggaattcactcaggctccgtgctggctggagttgttggggtgcgaatgccacgttattgcctgtttggaaataatgtcacactggcaagcaaattcgagtcgggaagtcaccctcggcgcatcaatgtcagcccaaccacttaccaattattaaaacgagaagaaagtttcacattcattccgcggtctcgtgaagagcttccagacaactttccaaaggaaattcctgggatctgctatttcctggaggtaaggactggtccaaagccaccaaagccttctctttcttcgtcgagaataaaaaaggtttcctacaacatcggcaccatgttcctccgggagacaagcctctgagacctgctacagatcaaagactcctccaaaaagcacaagcccagaacatgggtcaccaatggggggtggaaagagattgtgtctctttcattgctttgttgagaacaagcagcaaaatttctgtattatgtcaggcaataatcctactaaaaggtggaggtgaccgctgtcaataaaaagccggaggatgagggaaataagatgtgtccattcatatgagtggttttggtcatatatatacacatatattttaattacaagtgtgggtcccctttcagaactaaccaataaatagattccatgttttcttgtttatcacacatacaagtatctttccctatatatttgtaccacttttgagagcc

SEQ ID NO: 139415 - DNA, 2532 bp, Homo sapiens
  Payload ID: 7329
  Gene Symbol: GUCY1A2
  Gene Name: guanylate cyclase 1, soluble, alpha 2
  Uniprot ID: P33402
  ENST ID: ENST00000347596
  CDS Start-End: 97-2358
cttaacgttgtcgcttgccggtcccgccaccgccgcctccgccgccgctcgcgtcctcgccgccaccgcctcggccgctgcagctccgccggcagcatgtctcgaaggaagatttcgtccgagtccttcagctccctgggctccgactacctggagaccagcccggaggaggagggggagtgccccctgtctaggctctgctggaatggcagccggagcccgcccgggccgctggagcccagcccggccgcagctgccgctgccgccgccccggccccgaccccggctgcttctgccgccgccgccgctgccactgccggggccaggagggtgcagcgccggaggcgggtcaacctggactcgctgggcgagagcatcagccgcctgacggcgccctcgcctcagacgatacagcagactctcaagaggacactgcagtattatgaacatcaagttattggttacagggatgcagaaaagaatttccacaatatctctaacagatgctcctatgcagaccactccaacaaagaagaaattgaagatgtctcaggaattcttcagtgtactgctaatatactcggtttgaagtttgaggaaattcaaaaaagatttggtgaagagttctttaatatatgctttcatgagaatgagagagtccttcgagctgtaggtggcactttgcaggacttttttaacggctttgatgctttgttggaacacattagaacttcttttggaaaacaggccactctggagtcaccatctttcctatgcaaagagctccctgaaggtactctcatgctccactacttccaccctcaccatattgtggggtttgcaatgctggggatgattaaggctgcaggaaagaagatctatcggctggatgtggaagtggaacaggttgcaaatgagaagctatgctctgatgtttcaaacccaggcaattgtagctgtcttactttccttatcaaagaatgtgaaaatactaatatcatgaagaaccttccacagggaacctcccaagttcctgcggacctcagaattagcatcaacaccttctgtagagccttccctttccacttgatgtttgatcccagcatgtcagtccttcagttgggggaaggtctaaggaagcagcttcgatgtgacactcacaaagtgctcaagtttgaggactgcttcgagattgtatctccaaaggttaatgccacctttgaaagggtcctgctgcgactgtctaccccgtttgtgattagaaccaagcctgaggcttctggctctgaaaataaagacaagagcaagcatgtcaccgaggggcatctgacgcagttatcagtggcaggattcaacagtcttgaggtgatggaagtcaaaggacaaatgatccatgttccagaatcaaattccattttatttttgggctctccatgtgtggacaagttggatgaactcatgggccgagggctacatctctcagacatccctatccatgatgccacccgagatgtcattttggttggtgagcaggcaaaggcccaagatgggttgaagaaaaggatggataaattaaaggcaactttagaaagaactcaccaggccctggaagaagagaaaaagaagacagtggatcttctatattctattttccctggtgatgtagcccagcaattatggcaagggcagcaagtacaggccagaaagtttgatgatgtcaccatgctcttttcagacattgttggcttcacagccatatgtgcccagtgtactcccatgcaagtaatcagcatgctgaatgaactgtacaccagatttgaccaccagtgtggatttttggatatttataaggtggaaacaataggtgatgcctactgtgttgcagcagggctccacagaaaaagcctctgccatgctaaacccattgctctgatggccttgaagatgatggaactttcagaagaggtgctgacacctgatggaagaccgattcagatgaggataggaattcactcaggctccgtgctggctggagttgttggggtgcgaatgccacgttattgcctgtttggaaataatgtcacactggcaagcaaattcgagtcgggaagtcaccctcggcgcatcaatgtcagcccaaccacttaccaattattaaaacgagaagaaagtttcacattcattccgcggtctcgtgaagagcttccagacaactttccaaaggaaattcctgggatctgctatttcctggaggtaaggactggtccaaagccaccaaagccttctctttcttcgtcgagaataaaaaaggtttcctacaacatcggcaccatgttcctccgggagacaagcctctgagacctgctacagatcaaagactcctccaaaaagcacaagcccagaacatgggtcaccaatggggggtggaaagagattgtgtctctttcattgctttgttgagaacaagcagcaaaatttctgtattatgtcaggcaataatcctactaaaaggtggaggtgaccgctgtcaat

SEQ ID NO: 139416 - DNA, 16205 bp, Homo sapiens
  Payload ID: 7329
  Gene Symbol: GUCY1A2
  Gene Name: guanylate cyclase 1, soluble, alpha 2
  Uniprot ID: P33402
  ENST ID: ENST00000526355
  CDS Start-End: 470-2668
gaggcgggagcagagagggaaagggggcgagataggcgcgcaggcggcagaagcctctgcctctgcctccccttctgcttgggccgcagccctccccgccccgccgaccgcggtcacacactctcggagcctccccgtgagcgggagcgcggcgcacggcgatgcgccgaggcgggcgctgaggcggcgccgcgcgagcagcagcagaggcggcggcggcccccagcccagcccggcgccgccgccgagcccgggccccaaggtgcggcggcgccccaagttcccgccatgagcagccggctcggggggctccgcggccccggggactcccgccccgccgggcgcgaccgcagcgccccgcggccccgacgcgcttaacgttgtcgcttgccggtcccgccaccgccgcctccgccgccgctcgcgtcctcgccgccaccgcctcggccgctgcagctccgccggcagcatgtctcgaaggaagatttcgtccgagtccttcagctccctgggctccgactacctggagaccagcccggaggaggagggggagtgccccctgtctaggctctgctggaatggcagccggagcccgcccgggccgctggagcccagcccggccgcagctgccgctgccgccgccccggccccgaccccggctgcttctgccgccgccgccgctgccactgccggggccaggagggtgcagcgccggaggcgggtcaacctggactcgctgggcgagagcatcagccgcctgacggcgccctcgcctcagacgatacagcagactctcaagaggacactgcagtattatgaacatcaagttattggttacagggatgcagaaaagaatttccacaatatctctaacagatgctcctatgcagaccactccaacaaagaagaaattgaagatgtctcaggaattcttcagtgtactgctaatatactcggtttgaagtttgaggaaattcaaaaaagatttggtgaagagttctttaatatatgctttcatgagaatgagagagtccttcgagctgtaggtggcactttgcaggacttttttaacggctttgatgctttgttggaacacattagaacttcttttggaaaacaggccactctggagtcaccatctttcctatgcaaagagctccctgaaggtactctcatgctccactacttccaccctcaccatattgtggggtttgcaatgctggggatgattaaggctgcaggaaagaagatctatcggctggatgtggaagtggaacaggttgcaaatgagaagctatgctctgatgtttcaaacccaggcaattgtagctgtcttactttccttatcaaagaatgtgaaaatactaatatcatgaagaaccttccacagggaacctcccaagttcctgcggacctcagaattagcatcaacaccttctgtagagccttccctttccacttgatgtttgatcccagcatgtcagtccttcagttgggggaaggtctaaggaagcagcttcgatgtgacactcacaaagtgctcaagtttgaggactgcttcgagattgtatctccaaaggttaatgccacctttgaaagggtcctgctgcgactgtctaccccgtttgtgattagaaccaagcctgaggcttctggctctgaaaataaagacaaggtgatggaagtcaaaggacaaatgatccatgttccagaatcaaattccattttatttttgggctctccatgtgtggacaagttggatgaactcatgggccgagggctacatctctcagacatccctatccatgatgccacccgagatgtcattttggttggtgagcaggcaaaggcccaagatgggttgaagaaaaggatggataaattaaaggcaactttagaaagaactcaccaggccctggaagaagagaaaaagaagacagtggatcttctatattctattttccctggtgatgtagcccagcaattatggcaagggcagcaagtacaggccagaaagtttgatgatgtcaccatgctcttttcagacattgttggcttcacagccatatgtgcccagtgtactcccatgcaagtaatcagcatgctgaatgaactgtacaccagatttgaccaccagtgtggatttttggatatttataaggtggaaacaataggtgatgcctactgtgttgcagcagggctccacagaaaaagcctctgccatgctaaacccattgctctgatggccttgaagatgatggaactttcagaagaggtgctgacacctgatggaagaccgattcagatgaggataggaattcactcaggctccgtgctggctggagttgttggggtgcgaatgccacgttattgcctgtttggaaataatgtcacactggcaagcaaattcgagtcgggaagtcaccctcggcgcatcaatgtcagcccaaccacttaccaattattaaaacgagaagaaagtttcacattcattccgcggtctcgtgaagagcttccagacaactttccaaaggaaattcctgggatctgctatttcctggaggtaaggactggtccaaagccaccaaagccttctctttcttcgtcgagaataaaaaaggtttcctacaacatcggcaccatgttcctccgggagacaagcctctgagacctgctacagatcaaagactcctccaaaaagcacaagcccagaacatgggtcaccaatggggggtggaaagagattgtgtctctttcattgctttgttgagaacaagcagcaaaatttctgtattatgtcaggcaataatcctactaaaaggtggaggtgaccgctgtcaataaaaagccggaggatgagggaaataagatgtgtccattcatatgagtggttttggtcatatatatacacatatattttaattacaagtgtgggtcccctttcagaactaaccaataaatagattccatgttttcttgtttatcacacatacaagtatctttccctatatatttgtaccacttttgagagccagttttgattatatattcctacatttagtgagttggtgggtgaggaatattttctaagtttctttttctgaacagacatttcatacatgtatcatggcagtgtggtaaacttcccaactggaagaattgtaactcggcaaaatattttagggatattacctatttttatacatatctcttctagataactacatttcgcacaacattattagattttcagaatctgcttctgtattgttagtatattatatataatgctaacctattaatctaatatagtttcccttatttagagagatcagtgcttcgactgagaatacatataaccaaggatttcagataccaagaaagcattatatgtctgcttagtaaatatatcttttagatttaactaatgtagcatggaatccagaggaaatggaatttcctaacaccagatgtatctgtaaccaagattaaagaaaggtctttttgccaccttctaacaaatatcagttaaaatgaaatgctttgctacactggatccttttcaacttagcacttacaaatataggtagcttttgcaacactaaactgcattctaataaacagcattcagctaaatgacatgttagttacccccttcctcttccccagttgatgcctcctaagagccgactgctattcttgagaacaaattcctggatactggcattagtgacaaagaagtgtcaggacagtttgccaagaatgttgtttcttcttgtacaacacaaagcaaggaaacctctgtattttatggctttgaggttttaaaaaatgttctgcagtttgattgatatggcttttaaattcagtgaatcactttcatgaatactgaagtaggtataatcttcagaactagtaatcattatagttacagataggattccatcgcatgtcctgctcaaatgaagacctgttctcattaatcaatactgcatgaaaatattactggctcacactaaaattaggagcatcaggtgtccagagttttcctgtttgggttcagatataaaatctaagtttctattgaggttaataagctggaagcatttgtttcctttaagccttggagaggtcattttcttactcattgatagcttatgtctactgaatgcaatattcttttctgttcagggattttggctgcattatgatttggttatgacataactcagttaaggaatatatttactaatttccaatgtagtctatgaggttcatttaatgtttttaaattttctatgtgtgtggctagaaggcatttgtagatatgcaaatatttgttataatcctgatcccttttataatttgagttattttcttgccctgggggtttacaaggacacgagtgcaacactctttatatggagaagacaggaaatagaccttgagctctaaacctttgcctgaccccctcttctgtgggcctgtgtttctggacaatggggaggtttacagccagtatgagcagagcagactgggagcacctcaatcctcatgcttatattagaaaatgccttagcaatgttgatgggctccttgtagcactggagcatggggagggaacaagctcactgatgtcatttatgcctattgtcttcagtaacttagaacttattatggtatattaaatcaataaaatgttggtgatgaacaatgtgttttgtaaccataaggctgaaagggacttccaggaatatccaatctatttctctcactttttataaagatttgtctaagcaactactctaaacacatatttattatctccatacttaagaatatctacgggaagcatatttgaaaagcatcattggaaatccacctcaatactagtgataggcctggagagaagtattgtatttatatatctcaatttatcagaagaatcacaaattctgtattagtttatatgattttacttagagaataagtatccatttacattgccataaatgtcacgatgaagaacgtgccagagatttcttatttatcactgacaggatgtcaactacatttttcatacattataacctaagtgtattttcacagctatagtccgagataatggtccaatttgttatcattttgctaatctattatagttgattattgtagttacaatgttgctatatatgtttatgaggtactatataaaatgtctgttcattcaaacttcaatcacagaagttagaagatggagaaaaaattatatttttatttgtcctacacaatgccatctacatctcttctcttaggaattgtgattgtaacaatgtggtggcatttgttatttcatatgacttttatctatacagtattctcacttacttacaaactattaccaacagcatgcattttagtatggcagatacaagaaatttgtgtgatgttcccttagaaaccaaatgatattaaattggggaaatggttttaacccactctgcaagggatactttaaaatataatttggcacctatagctcttgcattttaatattcttttaagctgctgtttggaagaaggcaccttataactagccattagcaccaaagcatcacgttggtatcaggattattttgatggagagaatgtcatcatttgcaaataaatcagttatctaacaaaatcagaatcccccaatatgtactcagaatgtactaccctgtatcttctttgtggaccttaatcattaggtaacattggccataataaaaaataataatatgcttcagaaacatagtagttggatctcttgtctatataacgtagagaaggggaagaagacatagcttccaggtaacatgggacccaattgcgtacaatctgcctttatattcatctcttgctctatattttaagtaatttcagattttccttttaatatctgattatgtggaatcaagtgagctttgatctgggactctgagacagacattgatgcctgagacttgagagtgggtctgtaggttcagcacttcaaatgttgtttcttacagtcttgcactccttcctcttgtccagtaacaacggtgtcaggacacagtagtttagtgtgaatatgtgtgtctttccaggaaaaacaaagcaaaagaggataataacaacttaaacaaaatctcattcacaaggggagcaagacttttaattttgcaaatgcctccaaagagttccagcaataaagcaaaattaaattgatagataacaaaaggcaaagccatggagaattctgaaaaccccaccaggctctgtgttttgtatagaatcatactgctgctgaatgaaattgtgtatctaaagtcgtaaggcatcaggtaggagctcaaaattatgaccataattaaatatatttgttgaaggctccttgggtccctgactttctgagagcaggtgttgtggatggttaaggcaaaaagtaaaacttttacacacaggtttctgtcttgtcattttgagaatgactcagtccattctggaccctttcttactccattctgtcactagaaaccatctcaccccctcacgcctggccacagcaaacagcattctctcttcacttctgaacccagaatggctacagaaagggttgctggtgcctcattcaggcggataggaaggaccacacacagtcaggcctgagcaacaatgtacttctgaagtgtagtaatgaactggatgtgccggggcattgattatatctgcagcttcaccctctgctctttcttcaaaacacagtctgactccaagcacttcatacagcttcactgaatgttcctttgaaattaattataaatgactctgaataggctttgggtagcaccaggcgtctttcagctgacaatatctagaaactcaagttcaagaaccaagccctatatcgtagcttagttttttctactattagattatagaccttcagctacaaaaattatgtcatttcagaggcttctataatcatagcttaataatagatataacccaaaaatcatgatgcatgagactgaattattgaagtttaacatatttctaaacgatttatgggcagctcttgatatgaatgttcctaaaccacaaccagctggtttaacatacacataaattgtgttcatgtgattgaacaaaatttattgttaaatgggtaagttgacctcagctatggactcaatttcaagatcctcgtagtggtgaatgaagagcagacactgatattacatacagattaacaatcttgtcaggctatactgagatagtgtgcaaaattccttcctcacacttgatccaaacaattgaaacctgcgtatgactgttcttccatcccttgttttcttccttcctttgttccttctttcctttaattaaaaaaggtcactgatacatttataacacaggaagtatcacagctaatcccatattctaaaatagttttataaagtgattaatatttttagtttgtgtgtatgcatctgtgtttattgaatgtagatgtttcatgattgaaagaagtaagtttctttggaaggacttgggaatgcagagaagtaaagtttgtgtctttatttctaatatgttataaccagatcacggtttcagttaagtacctcattgccatcccatccttaagaaatgacctagttcagtggttcagctgatctgcttggaagtatctggctggcttcataagaattccgtagggagttttaggaatacagaagactagtctttaccttcagagatttggattcagtaggtctcaggtagggcctaggaatctgtgtttagaaaatcactctaagtaatgctaatatacagccagacttgggaatcattgaaaagtattcaaataatcccaattactaggaataaatacaagttgactgggatagtgatgttatttcatttgtagttattttgaaaagttaaatactctaggcctcataccattatttctttcacaaattttaattttagctttgatttccaatttgtggtcttctttctgagcatgaatcttcaaacttagagacagacgtcaacactgataagcatgagggatgaatattgctcactatagggctattaggcatactagatacagtaccattttcttagttactgccagagctgtgcagtatattacaacatttgctaatcctcaccaccgaggtaaaaactatgacctttgggacacagaagcaaatatcaaagtgacagccttacttctgaatgctttgatttttatgtcatgaaaagacatcaacttaatacttagtctcactatgtacttttcatattgaattgtacattatctgaaaactgatttccaagcaataccgtgtaacaacctttcaagcaataatttaagccatggtgatgatgccatatgaagcttgcacttctttgcatttcatagagcctttgtgaaaacagaaacatgttttatacaagcaataatatagctggtgtggactttttaaagatactcattattctgtagcaaaatgagcagcaagtaatgactcagattaaaaatattcgggcaaatgacatgtttaatctatctcagaagttattcatttgcaaacatgctgtaaagtgattaatatacatcagattatttctggtgcataattttaaacatggctataaaaatatgatttctattcctgtcaaagagatttgtgtattatttataatgttgcccaatttttggatctttgtagtatataatagtaaggaagaagttaaggatggataaatgagtggaagtagagcataggttggaagaggtgattgagaaagtaggctttgcaaaaatatagatgggtcttgcggcagatttattcaaatgttggtttgatatggtcttggaagatgaaagagtaaagataaaagagctcattattactgttttcaatgatagctacacaagtttttggtaagtatgatagtattttgacttcagaatatgattgactgaaagtcacctgtagcacaataaataaaagtctgaaaatgattattcagtaatactgaaaaaacactaaagctttcagatttcgaaatgaaaaaatcatgtttttagtctacttaaaatacaattttaatagaatgtggcatagtcaatgataatcagttctttagtagttaaatttacttcatcatttagaataatgtataaggattacagctaaaatcaactagtaaatttatgtttatactgaacagtatctaaacatcagattatgatttagcatataagcttaggattcattcctaagcatctaaataagatgacagctcctattattgccctgcaaggtaaacaatcccctaaacatgaatatgaacccatttgaatggtgggtgtgttcgatattttgtctttacctttctattactcatagcaaaacttaattttagcattctcctgcccacagtttggaaaatttccctatcaaaatcaaaccggattgttgatttactgaggctttgacaattatcctcttgtatatcactggatccttaaatccttagtaagaatggttttgggttaaataaataatggaaaatatttaatttgaatctattaaattacactgaagttatccttccagttaattcagctagttgctgatcagatcattctttatattagacttaagtattgttgcttattatttaaaagcagaaaagaaaaaccaaatggcaggtctgagtaatagttactttttgattcttttgatacatatttttaaactgaagaaatcactttatattcagtcttcttctgtggactttttgctatttgcagataaagaaggaattctacttaatatatttttactgtggtctattaaatgtcattaaacctatatctaagaggaaagtaataactgaaataaaatcaggaatgtgcaaaattgtttcttcatacctcactttctgaagacacttctttgcattctgctgcctggcatttacacagcagactcaggacaaagggacaaatggagtgagtgaggtgggcaggagctttagaagagatgaagcaaagagagttagttttttattcaggaagatgtagagactcttaaaggagaggcaatttccgtaacaaacacctctggtttaatggaagccacatgatttatttgactactggtcactcatttttaaaaagaaaagagaaagacaaaaaaagagaaacccttcacaagccatttttagttttcctaggaggtagtgccaacctctcggcagctgcacatctcagtgaagctgggatagaagcttacagagctacaaatagatgctttctgaaggtggcagatagaactagtcttggttacaatgattaaggtaaatgaaagtgtcagaacatctgggttgaaggaacaaagaaggcccaataccagctctgccatatgccacagaaaaccctgctaaaattagcatagaaaaacagactaacactatgcaagtgatattaaaacaaactatattttttccttttataacatgcctggctgagctagcattcagtgagaagaatatacttttgtcttatgaatcatttaaaaacatttgttgttgttctgacattaaataaattacatattcccttagttgaaaaatttaatcacaaataataggaaatatttattttgtgtcctgaaatttttaaacttttggcggctgtactctacgccatattcttcttcacattcttctcaaattgggtttggctgctagcaaaacaagtgtggaactttagagcagaaaaatgtccatctgtctcttacagaatgtgccagagtatttgagctggagagagaatcaccccatagcatttaatggtattctgtgagacacgaagactctagtcttctaaacttaaaagtggttaggtagtaccttaatcatcaaagatttttcacttacatgtaactggttaattcatatagagtttgtttagaacagaaactttaaaaggagggaacaaacctgagcaatttttaatcaaaattatcagttagaaaaagaatttaagacaaagatttattgtcctgaaagagtcaactcactcatatccaaaacttagaatgtcagagacttttgaaagttttctgaatgtgtcaacttcttcagcaatgagagattcaattaatgttgtttctaggttccttagagttttatcctctgatgataacacttaattgtgaattacatttaagtgatttttactttatattttccatttgttacagaaaaaaagtcataaatatgacagacttaaaaattgtggcattgagccagggtttgcaaatttggcaatattattttacttaaaatattacactttttaaaataacataaacattaaggataatagtcaaataatactgtattttcagcttgttcacattagaatatagaacaacgcattgtaaacttctcggaataaaatctaagtcaaaaccaatttatgttcaaatcatttgaacaacaaatatgaatattgttacatcacctctgactctctgactagtaagaaactatgcatttccatacccaatgaaacctcaattcctacagcaattctacttttattgcctcccaagaactatttcttcatggtcaatatcactctttaaaagctagcaaaatatgactttcttctgaggtttgggcaatctggatcaatatttatgtatctaaccacttgaaaggctgtctccttttttggccttttaaattaaaacttccataaaatgaagcaaaatatgaaaacagctagttgatttatcaataatgtgaaaccctccttctgaatttttttggtaaaaattaccacactgaaaccaaaacttaaccttggcttggactctcagataaattgcttttgtattctttgactacaaagtattctcaaaaagaagaaattatttctgatggtagatcaaactctagccaagaaggtctagataaactagaggactgtataattatctaaagtaattcagggggacttttagaaaaattctttaatttttgttcctgtgtaaaaattattattaatggatggcagcccaaattactattcttcttttaaaatttgtttcaagtgtgtcaccaggcactcataaaattcatttatttgttatataactcaatgacctgaaataataggtgctcattgctttttcatttgatccttaaaaacaattttattctgtctaaaaaaaattctcctgctaaaatccaaatgattacctggctataggaggagtcccattttatgaacatgtatgaaatatttagttggattcagatgaaatgcaacttagagaaaggaatggataccagtagagaagatggaaagagacacaaaaatcagactttgcttacatcaaaattaggtctgttgtctaatcctgttaacctagaggcaagctgaaaatagatggtaaggataaatagatttttaaacacagtatttatatttaacagaatgtcataaaaatgacagaatgccatgaaattcagcatgtcaaaactttgataaaacaaacaagaaatttaataaatatgctaattagagtgaatatttaaagggacaaaaataacttgtcacatcatagatgtctccccagtgcagaatttattatctgctgggaaaatttggttttatgtcttcaatcaatatttgctgcattatctaattaaacattagtatattttttgtgctaatgagaaaccatgcaagagtccaaatatcaagtgtggtgacagcttgaatcagttgagtttggtgttcatgaataaaattcttgatgaatgtgaaatgaatggtttatatacataagttttatgtgcagtaaattaattaggctttaaaacttgttagcatgcttagctcctcttttttccattgaattatcttcctatcttccttccttccttcctttccttcctttccttccctccctctttgctttatttctttctagctcttataagataaatgacaatagtactttactatttgggctggagcctccctttttcactttcacatgattgaacactttgtggatttgtgagaaaaggggaaagaagatgagcacgtagatgcagatcagttgaggatagaagtgactgagagaattgggaccttgacttccagagactgtcagtcaagagaaatgtgggtctataaaaatctatgtgtgttcattttcattgaatttaaacactttttcaagaagtatcagggtcaatctgtttggacaatctcctatttttacccccttacaaatgtcttaagttagaaaaacctcttattttcaagtagtcatttttttttatgtgagtaccacactgctaaagactgaaatagaaaaaaaaaatgctttttctgtttgtagggaaattgctttctgaaaactactcccaataagatgtatacatcaaatgcaacttgattttactggctctttatctagagataactgatgcactgtcttctttcttagatacccttctgtaattcagcttggcatagtatgatgttttgagttcttattgagggtttggaaacatttgtcatcaattttatgtctactctattgaaaaagcaatatacaatgtattccatatttcttagctctgtgtctttgaggttttaaacctatattcagatagctgtttttagctacaattttgagtattcaccagaatttacaaattgccattttattaaatacaaaaaaaaaaaaagtacagcttggatcaagagatcaaacatttacaaatctcaatccaaagccattatttttcagggaaaattaaatcatttctagcagagtatttgactcctaagggaaaataagtcaaatatcttctttaagagtaagggcattcttccattgtaggtatttctaattgactttataataatttgaacaaatcttgaacaagatttaaagaatttataatctcccaaacttaaaattgtattctttctggttttttatttttatgtattaagattatattcaaaccacttaattatcttcatgacataagtttgtgttaatagaaaattatacagaaaaaaacatgatttgttcctctgtggaaagatatgcttcaatgagttaaatacccttgaattttggttctcatttcttatttggacttttctgttatgtacctcaggggtcttaaattctaacagatgaagtagtcaaaggggtataaaatacttgaaaaaaattaaaacttcaaaagggacgaatttctctgttaacttttgtttatcctatactgacttattttgaaattgtgaaaaaacaggcagctaccatataaattggtatctatgaaaatactgattactttcttcctgtgattttcactgttaagaaaacctttgtcttgaaatgatggacaatcttaatacttgttcagataaagaaatgtgactttcaatacctttaccatttgtatttctttagggaaatattttaataatgattgtaaaaatagaagaaatatggttgagaaaaatagaagaaattaagatgaaatttgaacagttgtaatccacagtcccatttttccctctattttattgccttctactaagttattgaaggcccagatctgcaaaatttacaagctactaattcattgtctcctttaagaatttggagcaaaaattattccgactatgcggaaatgaattcacatcatcatggcaggttttgactatgagggaattcaggttaggttcaaatagaataatggtccatggagaaaaatactttctgatttttcttcaagttggatggaaaggtttttctttatttaaaaaaaaaaaaaaaaagtcctcctgagaattttgccttcgaaaaagaagttttataacagctgcctgtagctacattataacttcggtaattaagtgacaaaactgtctcattatgcttttaaaatactgattaagtgcattccagaaataatacatatcattcatttcaaaatcaacctacctgaattctgactcttcaatcatgagtagccattttacaaaaccaaagggtctcatttcccaaacagtactttaaatatcatcctaatagtaatatcctaatagtaataatcctattaatactcacttcaatgcataaaataaacagccaatgcacttccatcaagtctgcaggcactatataataataaataggtttccaaaatcacttaataaaaacacacagttataatgtgctcggccttcattagcatcctctgcatggggtggttttcatttaacctgaattattttaacattttggctaatttgtttgctgcaatttcatgggtctaaatttttggtttggtttgcaatgtaaatcatattgtatatctgctcctttgttattagatttactttgtgaataatatcttttaaaaattgagttatcaaaaacttaaattataatgtcatcaactaataccaggtaaatatactaatatatatgtagggcatgattaaattgcatatattttgaaatgtcaaactattttttgtttttttaaaaaaatgaatgcatctcttaaacctgtaccattaattttaaaaaagtttcatttggtatttcatattatattttaaaatatttttctttatctagtagtacaggtttaaagaaactttttctgattgaaatgataaaatatgcctcatttcactagaattttaagaataatacatgtaaaagtataactcatataagattataaatatccacaatatcttctttgattttcatgtaacaccactttttactcattcttttatttgttattattcgaaatcattcacaatgtaaatagcatgtttcatgatgtaaaatgtctttgcatttacagactgcagaacaaggtgaatttgtatatgaaaaataagtgatggaaacgtgggattcttataaaacaaagtggaaatgatagttctgtgttatatttacataattcattacaaaattgtctagttaagtcatgcatttatttaccttaaaagtgtccaaactgtcacttataaaatatttaaatcaataaataataccaaaaaggagtctgaa

SEQ ID NO: 139417 - DNA, 4400 bp, Homo sapiens
  Payload ID: 7330
  Gene Symbol: GUCY1A3
  Gene Name: guanylate cyclase 1, soluble, alpha 3
  Uniprot ID: Q02108
  ENST ID: ENST00000296518
  CDS Start-End: 210-2282
aggtagacatgagcgacccaagctgcggatttgcgaggcgcgccctggagctgctagagatccggaagcacagccccgaggtgtgcgaagccaccaaacatcccagttaccagtgtccttgaattgatagtggcttctgtttgtcagtctcatataagaactacagctcatcaggaggagatcgcagcagggtaagagacaccaacaccatgttctgcacgaagctcaaggatctcaagatcacaggagagtgtcctttctccttactggcaccaggtcaagttcctaacgagtcttcagaggaggcagcaggaagctcagagagctgcaaagcaaccgtgcccatctgtcaagacattcctgagaagaacatacaagaaagtcttcctcaaagaaaaaccagtcggagccgagtctatcttcacactttggcagagagtatttgcaaactgattttcccagagtttgaacggctgaatgttgcacttcagagaacattggcaaagcacaaaataaaagaaagcaggaaatctttggaaagagaagactttgaaaaaacaattgcagagcaagcagttgcagcaggagttccagtggaggttatcaaagaatctcttggtgaagaggtttttaaaatatgttacgaggaagatgaaaacatccttggggtggttggaggcacccttaaagattttttaaacagcttcagtacccttctgaaacagagcagccattgccaagaagcaggaaaaaggggcaggcttgaggacgcctccattctatgcctggataaggaggatgattttctacatgtttactacttcttccctaagagaaccacctccctgattcttcccggcatcataaaggcagctgctcacgtattatatgaaacggaagtggaagtgtcgttaatgcctccctgcttccataatgattgcagcgagtttgtgaatcagccctacttgttgtactccgttcacatgaaaagcaccaagccatccctgtcccccagcaaaccccagtcctcgctggtgattcccacatcgctattctgcaagacatttccattccatttcatgtttgacaaagatatgacaattctgcaatttggcaatggcatcagaaggctgatgaacaggagagactttcaaggaaagcctaattttgaagaatactttgaaattctgactccaaaaatcaaccagacgtttagcgggatcatgactatgttgaatatgcagtttgttgtacgagtgaggagatgggacaactctgtgaaaaaatcttcaagggttatggacctcaaaggccaaatgatctacattgttgaatccagtgcaatcttgtttttggggtcaccctgtgtggacagattagaagattttacaggacgagggctctacctctcagacatcccaattcacaatgcactgagggatgtggtcttaataggggaacaagcccgagctcaagatggcctgaagaagaggctggggaagctgaaggctacccttgagcaagcccaccaagccctggaggaggagaagaaaaagacagtagaccttctgtgctccatatttccctgtgaggttgctcagcagctgtggcaagggcaagttgtgcaagccaagaagttcagtaatgtcaccatgctcttctcagacatcgttgggttcactgccatctgctcccagtgctcaccgctgcaggtcatcaccatgctcaatgcactgtacactcgcttcgaccagcagtgtggagagctggatgtctacaaggtggagaccattggcgatgcctattgtgtagctgggggattacacaaagagagtgatactcatgctgttcagatagcgctgatggccctgaagatgatggagctctctgatgaagttatgtctccccatggagaacctatcaagatgcgaattggactgcactctggatcagtttttgctggcgtcgttggagttaaaatgccccgttactgtctttttggaaacaatgtcactctggctaacaaatttgagtcctgcagtgtaccacgaaaaatcaatgtcagcccaacaacttacagattactcaaagactgtcctggtttcgtgtttacccctcgatcaagggaggaacttccaccaaacttccctagtgaaatccccggaatctgccattttctggatgcttaccaacaaggaacaaactcaaaaccatgcttccaaaagaaagatgtggaagatggcaatgccaattttttaggcaaagcatcaggaatagattagcaacctatatacctatttataagtctttggggtttgactcattgaagatgtgtagagcctctgaaagcactttagggattgtagatggctaacaagcagtattaaaatttcaggagccaagtcacaatctttctcctgtttaacatgacaaaatgtatgtactcacttcagtacttcagctcttcaagaaaaaaaaaaaaaaccttaaaaagctacttttgtgggagtatttctattatataaccagcacttactacctgtactcaaaattcagcaccttgtacatatatcagataattgtagtcaattgtacaaactgatggagtcacctgcaatctcatatcctggtggaatgccatggttattaaagtgtgtttgtgatagtgtcgtcaaaaaaaaggtttttgaatagaaattacattctttgacaccctcagttctttcaaactttcaactctgcattttattgcattttctcatttaactgttagtatatgtttgaatataggctgactttttttctctattgcactttcttctttttttctttttagaaaataagcaattaggggttagatgcaatatgaatataaaatagttctgtaaataccaaatattatttttagttctggaagttaaaaatactctccatagtaacgtgtgttataataataaatatttcttttgtttgacttttttaaaattctacaatggtaaaagctattttaatccatgttagcaatttaattcctattaattcattttactatcataatagcaaagtattcagaataaaagaggtttatatcttctattaaaatgcagtaatactattcaaatctaatttagctggaagcaacatgggagtaaagtaatcatccaggggacccaccataaaggacattggtaaaacatttacacacgtaaacacacgtgcaggcacacttggaacaatatggacccacttcagcagacatcttctattgccatgctgagctgtttaaagttttaagaagaaaatctaagtatggaagtagaaaataagacttgttcttttggtggatatctcatttttcttgagtatttgtgctgaacattttggtgtatgtctatgaactaagaatcaagtttttgtctcattaaatatacatatatgaagtgtttttattctacttgaaatatcttgacttaaaaaaaacgactgttagtattgatgaagcaaatgaggcagtgactacattatggaaatgtctaagtattttttccggaacttcaactttttctttttgttttacataaacatttaagcagctaggaacttttagttttagttaggtcagttgaagttctctggtgaactaaaaaatctacattttggttggggataaagatttgattttaaaaacagcttgaatttaaagcaagaaaaagatgaacgttatagttttaaaatcaatattagcagagccatagataggctgagctcttatttggggttctgagaaataactcagtttaaaacttctttaactgcctcccttagtacccaggctagcccatggtgacatcagggatattcattactgattggcctctagtattccaagggtactactatagatattacaatgatgctgtttactaagtgataaccccgtatcttacaggactgactttgactcaataaaccactcagcctattattggaaagtgccataggccttgagaaagtatagttacatcctcacaaatatatgaagttaagtcactacttacaaggaaaaaaaatgtaaatacatttttctttctggaaccgaactcttattatggggaaataatagaaataaagaaaatgtaaaagcatgaaatggaatgtagtcttgatcaaacatttcagcagacctcaatttgcttacaatctgtactcaaaaagtttataattcaatcagaattcaaaaagtattttgtgtgtttgtgatgtattagcatatacacaaaacaaatgaggggaatgtatataatcttggtgaaaagttgtatgggagttttttgtacgattcctgcaacttttctataaacgtggcattatatctaaataaaaaattaccaaaaaacata

SEQ ID NO: 139418 - DNA, 4286 bp, Homo sapiens
  Payload ID: 7330
  Gene Symbol: GUCY1A3
  Gene Name: guanylate cyclase 1, soluble, alpha 3
  ENST ID: ENST00000393832
  CDS Start-End: 874-2172
ggactgtctgggagccacgcgggcgatacagtttccgaggcacgccgcgtcccgcctagcctgttgaacaggtagacatgagcgacccaagctgcggatttgcgaggcgcgccctggagctgctagagatccggaagcacagccccgaggtgtgcgaagccaccaagtcaagttcctaacgagtcttcagaggaggcagcaggaagctcagagagctgcaaagcaaccgtgcccatctgtcaagacattcctgagaagaacatacaagaaagtcttcctcaaagaaaaaccagtcggagccgagtctatcttcacactttggcagagagtatttgcaaactgattttcccagagtttgaacggctgaatgttgcacttcagagaacattggcaaagcacaaaataaaagaaagcaggaaatctttggaaagagaagactttgaaaaaacaattgcagagcaagcagttgcagcaggagttccagtggaggttatcaaagaatctcttggtgaagaggtttttaaaatatgttacgaggaagatgaaaacatccttggggtggttggaggcacccttaaagattttttaaacagcttcagtacccttctgaaacagagcagccattgccaagaagcaggaaaaaggggcaggcttgaggacgcctccattctatgcctggataaggaggatgattttctacatgtttactacttcttccctaagagaaccacctccctgattcttcccggcatcataaaggcagctgctcacgtattatatgaaacggaagtggaagtgtcgttaatgcctccctgcttccataatgattgcagcgagtttgtgaatcagccctacttgttgtactccgttcacatgaaaagcaccaagccatccctgtcccccagcaaaccccagtcctcgctggtgattcccacatcgctattctgcaagacatttccattccatttcatgtttgacaaagatatgacaattctgcaatttggcaatggcatcagaaggctgatgaacaggagagactttcaaggaaagcctaattttgaagaatactttgaaattctgactccaaaaatcaaccagacgtttagcgggatcatgactatgttgaatatgcagtttgttgtacgagtgaggagatgggacaactctgtgaaaaaatcttcaagggttatggacctcaaaggccaaatgatctacattgttgaatccagtgcaatcttgtttttggggtcaccctgtgtggacagattagaagattttacaggacgagggctctacctctcagacatcccaattcacaatgcactgagggatgtggtcttaataggggaacaagcccgagctcaagatggcctgaagaagaggctggggaagctgaaggctacccttgagcaagcccaccaagccctggaggaggagaagaaaaagacagtagaccttctgtgctccatatttccctgtgaggttgctcagcagctgtggcaagggcaagttgtgcaagccaagaagttcagtaatgtcaccatgctcttctcagacatcgttgggttcactgccatctgctcccagtgctcaccgctgcaggtcatcaccatgctcaatgcactgtacactcgcttcgaccagcagtgtggagagctggatgtctacaaggtggagaccattggcgatgcctattgtgtagctgggggattacacaaagagagtgatactcatgctgttcagatagcgctgatggccctgaagatgatggagctctctgatgaagttatgtctccccatggagaacctatcaagatgcgaattggactgcactctggatcagtttttgctggcgtcgttggagttaaaatgccccgttactgtctttttggaaacaatgtcactctggctaacaaatttgagtcctgcagtgtaccacgaaaaatcaatgtcagcccaacaacttacagattactcaaagactgtcctggtttcgtgtttacccctcgatcaagggaggaacttccaccaaacttccctagtgaaatccccggaatctgccattttctggatgcttaccaacaaggaacaaactcaaaaccatgcttccaaaagaaagatgtggaagatggcaatgccaattttttaggcaaagcatcaggaatagattagcaacctatatacctatttataagtctttggggtttgactcattgaagatgtgtagagcctctgaaagcactttagggattgtagatggctaacaagcagtattaaaatttcaggagccaagtcacaatctttctcctgtttaacatgacaaaatgtatgtactcacttcagtacttcagctcttcaagaaaaaaaaaaaaaaccttaaaaagctacttttgtgggagtatttctattatataaccagcacttactacctgtactcaaaattcagcaccttgtacatatatcagataattgtagtcaattgtacaaactgatggagtcacctgcaatctcatatcctggtggaatgccatggttattaaagtgtgtttgtgatagtgtcgtcaaaaaaaaggtttttgaatagaaattacattctttgacaccctcagttctttcaaactttcaactctgcattttattgcattttctcatttaactgttagtatatgtttgaatataggctgactttttttctctattgcactttcttctttttttctttttagaaaataagcaattaggggttagatgcaatatgaatataaaatagttctgtaaataccaaatattatttttagttctggaagttaaaaatactctccatagtaacgtgtgttataataataaatatttcttttgtttgacttttttaaaattctacaatggtaaaagctattttaatccatgttagcaatttaattcctattaattcattttactatcataatagcaaagtattcagaataaaagaggtttatatcttctattaaaatgcagtaatactattcaaatctaatttagctggaagcaacatgggagtaaagtaatcatccaggggacccaccataaaggacattggtaaaacatttacacacgtaaacacacgtgcaggcacacttggaacaatatggacccacttcagcagacatcttctattgccatgctgagctgtttaaagttttaagaagaaaatctaagtatggaagtagaaaataagacttgttcttttggtggatatctcatttttcttgagtatttgtgctgaacattttggtgtatgtctatgaactaagaatcaagtttttgtctcattaaatatacatatatgaagtgtttttattctacttgaaatatcttgacttaaaaaaaacgactgttagtattgatgaagcaaatgaggcagtgactacattatggaaatgtctaagtattttttccggaacttcaactttttctttttgttttacataaacatttaagcagctaggaacttttagttttagttaggtcagttgaagttctctggtgaactaaaaaatctacattttggttggggataaagatttgattttaaaaacagcttgaatttaaagcaagaaaaagatgaacgttatagttttaaaatcaatattagcagagccatagataggctgagctcttatttggggttctgagaaataactcagtttaaaacttctttaactgcctcccttagtacccaggctagcccatggtgacatcagggatattcattactgattggcctctagtattccaagggtactactatagatattacaatgatgctgtttactaagtgataaccccgtatcttacaggactgactttgactcaataaaccactcagcctattattggaaagtgccataggccttgagaaagtatagttacatcctcacaaatatatgaagttaagtcactacttacaaggaaaaaaaatgtaaatacatttttctttctggaaccgaactcttattatggggaaataatagaaataaagaaaatgtaaaagcatgaaatggaatgtagtcttgatcaaacatttcagcagacctcaatttgcttacaatctgtactcaaaaagtttataattcaatcagaattcaaaaagtattttgtgtgtttgtgatgtattagcatatacacaaaacaaatgaggggaatgtatataatcttggtgaaaagttgtatgggagttttttgtacgattcctgcaacttttctataaacgtggcattatatctaaataaaaaattaccaaaaaa

SEQ ID NO: 139419 - DNA, 4352 bp, Homo sapiens
  Payload ID: 7330
  Gene Symbol: GUCY1A3
  Gene Name: guanylate cyclase 1, soluble, alpha 3
  ENST ID: ENST00000443668
  CDS Start-End: 304-720
agacacagagagacaaaggcaaggaggactgtctgggagccacgcgggcgatacagtttccgaggcacgccgcgtcccgcctagcctgttgaacaggtagacatgagcgacccaagctgcggatttgcgaggcgcgccctggagctgctagagatccggaagcacagccccgaggtgtgcgaagccaccaaacatcccagttaccagtgtccttgaattgatagtggcttctgtttgtcagtctcatataagaactacagctcatcaggaggagatcgcagcagggtaagagacaccaacaccatgttctgcacgaagctcaaggatctcaagatcacaggagagtgtcctttctccttactggcaccaggtcaagttcctaacgagtcttcagaggaggcagcaggaagctcagagagctgcaaagcaaccgtgcccatctgtcaagacattcctgagaagaacatacaagaaagtcttcctcaaagaaaaaccagtcggagccgagtctatcttcacactttggcagagagtatttgcaaactgattttcccagagtttgaacggctgaatgttgcacttcagagaacattggcaaagcacaaaataaaagaaagcaggaaatctttggaaagagaagactttgaaaaaacaattgcagagcaagcagttgcagcagagcagccattgccaagaagcaggaaaaaggggcaggcttgaggacgcctccattctatgcctggataaggaggatgattttctacatgtttactacttcttccctaagagaaccacctccctgattcttcccggcatcataaaggcagctgctcacgtattatatgaaacggaagtggaagtgtcgttaatgcctccctgcttccataatgattgcagcgagtttgtgaatcagccctacttgttgtactccgttcacatgaaaagcaccaagccatccctgtcccccagcaaaccccagtcctcgctggtgattcccacatcgctattctgcaagacatttccattccatttcatgtttgacaaagatatgacaattctgcaatttggcaatggcatcagaaggctgatgaacaggagagactttcaaggaaagcctaattttgaagaatactttgaaattctgactccaaaaatcaaccagacgtttagcgggatcatgactatgttgaatatgcagtttgttgtacgagtgaggagatgggacaactctgtgaaaaaatcttcaagggttatggacctcaaaggccaaatgatctacattgttgaatccagtgcaatcttgtttttggggtcaccctgtgtggacagattagaagattttacaggacgagggctctacctctcagacatcccaattcacaatgcactgagggatgtggtcttaataggggaacaagcccgagctcaagatggcctgaagaagaggctggggaagctgaaggctacccttgagcaagcccaccaagccctggaggaggagaagaaaaagacagtagaccttctgtgctccatatttccctgtgaggttgctcagcagctgtggcaagggcaagttgtgcaagccaagaagttcagtaatgtcaccatgctcttctcagacatcgttgggttcactgccatctgctcccagtgctcaccgctgcaggtcatcaccatgctcaatgcactgtacactcgcttcgaccagcagtgtggagagctggatgtctacaaggtggagaccattggcgatgcctattgtgtagctgggggattacacaaagagagtgatactcatgctgttcagatagcgctgatggccctgaagatgatggagctctctgatgaagttatgtctccccatggagaacctatcaagatgcgaattggactgcactctggatcagtttttgctggcgtcgttggagttaaaatgccccgttactgtctttttggaaacaatgtcactctggctaacaaatttgagtcctgcagtgtaccacgaaaaatcaatgtcagcccaacaacttacagattactcaaagactgtcctggtttcgtgtttacccctcgatcaagggaggaacttccaccaaacttccctagtgaaatccccggaatctgccattttctggatgcttaccaacaaggaacaaactcaaaaccatgcttccaaaagaaagatgtggaagatggcaatgccaattttttaggcaaagcatcaggaatagattagcaacctatatacctatttataagtctttggggtttgactcattgaagatgtgtagagcctctgaaagcactttagggattgtagatggctaacaagcagtattaaaatttcaggagccaagtcacaatctttctcctgtttaacatgacaaaatgtatgtactcacttcagtacttcagctcttcaagaaaaaaaaaaaaaaccttaaaaagctacttttgtgggagtatttctattatataaccagcacttactacctgtactcaaaattcagcaccttgtacatatatcagataattgtagtcaattgtacaaactgatggagtcacctgcaatctcatatcctggtggaatgccatggttattaaagtgtgtttgtgatagtgtcgtcaaaaaaaaggtttttgaatagaaattacattctttgacaccctcagttctttcaaactttcaactctgcattttattgcattttctcatttaactgttagtatatgtttgaatataggctgactttttttctctattgcactttcttctttttttctttttagaaaataagcaattaggggttagatgcaatatgaatataaaatagttctgtaaataccaaatattatttttagttctggaagttaaaaatactctccatagtaacgtgtgttataataataaatatttcttttgtttgacttttttaaaattctacaatggtaaaagctattttaatccatgttagcaatttaattcctattaattcattttactatcataatagcaaagtattcagaataaaagaggtttatatcttctattaaaatgcagtaatactattcaaatctaatttagctggaagcaacatgggagtaaagtaatcatccaggggacccaccataaaggacattggtaaaacatttacacacgtaaacacacgtgcaggcacacttggaacaatatggacccacttcagcagacatcttctattgccatgctgagctgtttaaagttttaagaagaaaatctaagtatggaagtagaaaataagacttgttcttttggtggatatctcatttttcttgagtatttgtgctgaacattttggtgtatgtctatgaactaagaatcaagtttttgtctcattaaatatacatatatgaagtgtttttattctacttgaaatatcttgacttaaaaaaaacgactgttagtattgatgaagcaaatgaggcagtgactacattatggaaatgtctaagtattttttccggaacttcaactttttctttttgttttacataaacatttaagcagctaggaacttttagttttagttaggtcagttgaagttctctggtgaactaaaaaatctacattttggttggggataaagatttgattttaaaaacagcttgaatttaaagcaagaaaaagatgaacgttatagttttaaaatcaatattagcagagccatagataggctgagctcttatttggggttctgagaaataactcagtttaaaacttctttaactgcctcccttagtacccaggctagcccatggtgacatcagggatattcattactgattggcctctagtattccaagggtactactatagatattacaatgatgctgtttactaagtgataaccccgtatcttacaggactgactttgactcaataaaccactcagcctattattggaaagtgccataggccttgagaaagtatagttacatcctcacaaatatatgaagttaagtcactacttacaaggaaaaaaaatgtaaatacatttttctttctggaaccgaactcttattatggggaaataatagaaataaagaaaatgtaaaagcatgaaatggaatgtagtcttgatcaaacatttcagcagacctcaatttgcttacaatctgtactcaaaaagtttataattcaatcagaattcaaaaagtattttgtgtgtttgtgatgtattagcatatacacaaaacaaatgaggggaatgtatataatcttggtgaaaagttgtatgggagttttttgtacgattcctgcaacttttctataaacgtggcattatatctaaataaaaaattaccaaaaaaca

SEQ ID NO: 139420 - DNA, 2631 bp, Homo sapiens
  Payload ID: 7330
  Gene Symbol: GUCY1A3
  Gene Name: guanylate cyclase 1, soluble, alpha 3
  Uniprot ID: Q02108
  ENST ID: ENST00000455639
  CDS Start-End: 374-2446
atggtgcgttttggctgctactttctttttcagtctttcggtgcggagaaggggaggaggcgggcagaggtctgaaaaaatcgaatgccttatggaaaggaactgcaagggttcctttggggtgatcaaagagggagacacagacacagagagacaaaggcaaggaggactgtctgggagccacgcgggcgatacagtttccgaggcacgccgcgtcccgcctagcctgttgaacagtgcggatttgcgaggcgcgccctggagctgctagagatccggaagcacagccccgaggtgtgcgaagccaccaatctcatataagaactacagctcatcaggaggagatcgcagcagggtaagagacaccaacaccatgttctgcacgaagctcaaggatctcaagatcacaggagagtgtcctttctccttactggcaccaggtcaagttcctaacgagtcttcagaggaggcagcaggaagctcagagagctgcaaagcaaccgtgcccatctgtcaagacattcctgagaagaacatacaagaaagtcttcctcaaagaaaaaccagtcggagccgagtctatcttcacactttggcagagagtatttgcaaactgattttcccagagtttgaacggctgaatgttgcacttcagagaacattggcaaagcacaaaataaaagaaagcaggaaatctttggaaagagaagactttgaaaaaacaattgcagagcaagcagttgcagcaggagttccagtggaggttatcaaagaatctcttggtgaagaggtttttaaaatatgttacgaggaagatgaaaacatccttggggtggttggaggcacccttaaagattttttaaacagcttcagtacccttctgaaacagagcagccattgccaagaagcaggaaaaaggggcaggcttgaggacgcctccattctatgcctggataaggaggatgattttctacatgtttactacttcttccctaagagaaccacctccctgattcttcccggcatcataaaggcagctgctcacgtattatatgaaacggaagtggaagtgtcgttaatgcctccctgcttccataatgattgcagcgagtttgtgaatcagccctacttgttgtactccgttcacatgaaaagcaccaagccatccctgtcccccagcaaaccccagtcctcgctggtgattcccacatcgctattctgcaagacatttccattccatttcatgtttgacaaagatatgacaattctgcaatttggcaatggcatcagaaggctgatgaacaggagagactttcaaggaaagcctaattttgaagaatactttgaaattctgactccaaaaatcaaccagacgtttagcgggatcatgactatgttgaatatgcagtttgttgtacgagtgaggagatgggacaactctgtgaaaaaatcttcaagggttatggacctcaaaggccaaatgatctacattgttgaatccagtgcaatcttgtttttggggtcaccctgtgtggacagattagaagattttacaggacgagggctctacctctcagacatcccaattcacaatgcactgagggatgtggtcttaataggggaacaagcccgagctcaagatggcctgaagaagaggctggggaagctgaaggctacccttgagcaagcccaccaagccctggaggaggagaagaaaaagacagtagaccttctgtgctccatatttccctgtgaggttgctcagcagctgtggcaagggcaagttgtgcaagccaagaagttcagtaatgtcaccatgctcttctcagacatcgttgggttcactgccatctgctcccagtgctcaccgctgcaggtcatcaccatgctcaatgcactgtacactcgcttcgaccagcagtgtggagagctggatgtctacaaggtggagaccattggcgatgcctattgtgtagctgggggattacacaaagagagtgatactcatgctgttcagatagcgctgatggccctgaagatgatggagctctctgatgaagttatgtctccccatggagaacctatcaagatgcgaattggactgcactctggatcagtttttgctggcgtcgttggagttaaaatgccccgttactgtctttttggaaacaatgtcactctggctaacaaatttgagtcctgcagtgtaccacgaaaaatcaatgtcagcccaacaacttacagattactcaaagactgtcctggtttcgtgtttacccctcgatcaagggaggaacttccaccaaacttccctagtgaaatccccggaatctgccattttctggatgcttaccaacaaggaacaaactcaaaaccatgcttccaaaagaaagatgtggaagatggcaatgccaattttttaggcaaagcatcaggaatagattagcaacctatatacctatttataagtctttggggtttgactcattgaagatgtgtagagcctctgaaagcactttagggattgtagatggctaacaagcagtattaaaatttcaggagccaagtcacaatctttctcctgtttaacatgacaaaatgtatgtactcacttcagtacttcagctcttc

SEQ ID NO: 139421 - DNA, 2992 bp, Homo sapiens
  Payload ID: 7330
  Gene Symbol: GUCY1A3
  Gene Name: guanylate cyclase 1, soluble, alpha 3
  Uniprot ID: Q02108
  ENST ID: ENST00000511108
  CDS Start-End: 521-2593
ttatggcgattgggcggctgcagagaccaggactcagttcccctgccctagtctgagcctagtgggtgggactcagctcagagtcagttttccagaagcaggtttcagtgcagagttttcctacacttttcctgcgctagagcagcgagcagcctggaacagacccaggcggaggacacctgtgggggagggagcgcctggaggagcttagagaccccagccgggcgtgatctcaccatgtgcggatttgcgaggcgcgccctggagctgctagagatccggaagcacagccccgaggtgtgcgaagccaccaagactgcggctcttggagaaagcgtgagcagggggccaccgcggtctccgcgcctgtctgcaccctgtcgcctgagctgcctgacagtgacaatgacatcccagttaccagtgtccttgaattgatagtggcttctgtttgtcagtctcatataagaactacagctcatcaggaggagatcgcagcagggtaagagacaccaacaccatgttctgcacgaagctcaaggatctcaagatcacaggagagtgtcctttctccttactggcaccaggtcaagttcctaacgagtcttcagaggaggcagcaggaagctcagagagctgcaaagcaaccgtgcccatctgtcaagacattcctgagaagaacatacaagaaagtcttcctcaaagaaaaaccagtcggagccgagtctatcttcacactttggcagagagtatttgcaaactgattttcccagagtttgaacggctgaatgttgcacttcagagaacattggcaaagcacaaaataaaagaaagcaggaaatctttggaaagagaagactttgaaaaaacaattgcagagcaagcagttgcagcaggagttccagtggaggttatcaaagaatctcttggtgaagaggtttttaaaatatgttacgaggaagatgaaaacatccttggggtggttggaggcacccttaaagattttttaaacagcttcagtacccttctgaaacagagcagccattgccaagaagcaggaaaaaggggcaggcttgaggacgcctccattctatgcctggataaggaggatgattttctacatgtttactacttcttccctaagagaaccacctccctgattcttcccggcatcataaaggcagctgctcacgtattatatgaaacggaagtggaagtgtcgttaatgcctccctgcttccataatgattgcagcgagtttgtgaatcagccctacttgttgtactccgttcacatgaaaagcaccaagccatccctgtcccccagcaaaccccagtcctcgctggtgattcccacatcgctattctgcaagacatttccattccatttcatgtttgacaaagatatgacaattctgcaatttggcaatggcatcagaaggctgatgaacaggagagactttcaaggaaagcctaattttgaagaatactttgaaattctgactccaaaaatcaaccagacgtttagcgggatcatgactatgttgaatatgcagtttgttgtacgagtgaggagatgggacaactctgtgaaaaaatcttcaagggttatggacctcaaaggccaaatgatctacattgttgaatccagtgcaatcttgtttttggggtcaccctgtgtggacagattagaagattttacaggacgagggctctacctctcagacatcccaattcacaatgcactgagggatgtggtcttaataggggaacaagcccgagctcaagatggcctgaagaagaggctggggaagctgaaggctacccttgagcaagcccaccaagccctggaggaggagaagaaaaagacagtagaccttctgtgctccatatttccctgtgaggttgctcagcagctgtggcaagggcaagttgtgcaagccaagaagttcagtaatgtcaccatgctcttctcagacatcgttgggttcactgccatctgctcccagtgctcaccgctgcaggtcatcaccatgctcaatgcactgtacactcgcttcgaccagcagtgtggagagctggatgtctacaaggtggagaccattggcgatgcctattgtgtagctgggggattacacaaagagagtgatactcatgctgttcagatagcgctgatggccctgaagatgatggagctctctgatgaagttatgtctccccatggagaacctatcaagatgcgaattggactgcactctggatcagtttttgctggcgtcgttggagttaaaatgccccgttactgtctttttggaaacaatgtcactctggctaacaaatttgagtcctgcagtgtaccacgaaaaatcaatgtcagcccaacaacttacagattactcaaagactgtcctggtttcgtgtttacccctcgatcaagggaggaacttccaccaaacttccctagtgaaatccccggaatctgccattttctggatgcttaccaacaaggaacaaactcaaaaccatgcttccaaaagaaagatgtggaagatggcaatgccaattttttaggcaaagcatcaggaatagattagcaacctatatacctatttataagtctttggggtttgactcattgaagatgtgtagagcctctgaaagcactttagggattgtagatggctaacaagcagtattaaaatttcaggagccaagtcacaatctttctcctgtttaacatgacaaaatgtatgtactcacttcagtacttcagctcttcaagaaaaaaaaaaaaaaccttaaaaagctacttttgtgggagtatttctattatataaccagcacttactacctgtactcaaaattcagcaccttgtacatatatcagataattgtagtcaattgtacaaactgatggagtcacctgcaatctcatatcctggtggaatgccatggttattaaagtgtgtttgtgatagtgtcgtcaaaaaaaa

SEQ ID NO: 139422 - DNA, 1282 bp, Homo sapiens
  Payload ID: 7330
  Gene Symbol: GUCY1A3
  Gene Name: guanylate cyclase 1, soluble, alpha 3
  ENST ID: ENST00000515201
  CDS Start-End: 195-626
attcgcagtgcggatttgcgaggcgcgccctggagctgctagagatccggaagcacagccccgaggtgtgcgaagccaccaaacatcccagttaccagtgtccttgaattgatagtggcttctgtttgtcagtctcatataagaactacagctcatcaggaggagatcgcagcagggtaagagacaccaacaccatgttctgcacgaagctcaaggatctcaagatcacaggagagtgtcctttctccttactggcaccaggtcaagttcctaacgagtcttcagaggaggcagcaggaagctcagagagctgcaaagcaaccgtgcccatctgtcaagacattcctgagaagaacatacaagaaagtcttcctcaaagaaaaaccagtcggagccgagtctatcttcacactttggcagagagtatttgcaaactgattttcccagagtttgaacggctgaatgttgcacttcagagaacattggcaaagcacaaaataaaagaaagcaggaaatctttggaaagagaagactttgaaaaaacaattgcagagcaagcagttgcagcaggtggagaccattggcgatgcctattgtgtagctgggggattacacaaagagagtgatactcatgctgttcagatagcgctgatggccctgaagatgatggagctctctgatgaagttatgtctccccatggagaacctatcaagatgcgaattggactgcactctggatcagtttttgctggcgtcgttggagttaaaatgccccgttactgtctttttggaaacaatgtcactctggctaacaaatttgagtcctgcagtgtaccacgaaaaatcaatgtcagcccaacaacttacagattactcaaagactgtcctggtttcgtgtttacccctcgatcaagggaggaacttccaccaaacttccctagtgaaatccccggaatctgccattttctggatgcttaccaacaaggaacaaactcaaaaccatgcttccaaaagaaagatgtggaagatggcaatgccaattttttaggcaaagcatcaggaatagattagcaacctatatacctatttataagtctttggggtttgactcattgaagatgtgtagagcctctgaaagcactttagggattgtagatggctaacaagcagtattaaaatttcaggagccaagtcacaatctttctcctgtttaacatgacaaaatgtatgtactcacttcagtacttcagctcttcaagaaaaaaaaaaaaaaccttaaaaa

SEQ ID NO: 139423 - DNA, 2715 bp, Homo sapiens
  Payload ID: 7330
  Gene Symbol: GUCY1A3
  Gene Name: guanylate cyclase 1, soluble, alpha 3
  Uniprot ID: Q02108
  ENST ID: ENST00000506455
  CDS Start-End: 442-2514
acacagtgatttctgttatggcgattgggcggctgcagagaccaggactcagttcccctgccctagtctgagcctagtgggtgggactcagctcagagtcagttttccagaagcaggtttcagtgcagagttttcctacacttttcctgcgctagagcagcgagcagcctggaacagacccaggcggaggacacctgtgggggagggagcgcctggaggagcttagagaccccagccgggcgtgatctcaccatgtgcggatttgcgaggcgcgccctggagctgctagagatccggaagcacagccccgaggtgtgcgaagccaccaaacatcccagttaccagtgtccttgaattgatagtggcttctgtttgtcagtctcatataagaactacagctcatcaggaggagatcgcagcagggtaagagacaccaacaccatgttctgcacgaagctcaaggatctcaagatcacaggagagtgtcctttctccttactggcaccaggtcaagttcctaacgagtcttcagaggaggcagcaggaagctcagagagctgcaaagcaaccgtgcccatctgtcaagacattcctgagaagaacatacaagaaagtcttcctcaaagaaaaaccagtcggagccgagtctatcttcacactttggcagagagtatttgcaaactgattttcccagagtttgaacggctgaatgttgcacttcagagaacattggcaaagcacaaaataaaagaaagcaggaaatctttggaaagagaagactttgaaaaaacaattgcagagcaagcagttgcagcaggagttccagtggaggttatcaaagaatctcttggtgaagaggtttttaaaatatgttacgaggaagatgaaaacatccttggggtggttggaggcacccttaaagattttttaaacagcttcagtacccttctgaaacagagcagccattgccaagaagcaggaaaaaggggcaggcttgaggacgcctccattctatgcctggataaggaggatgattttctacatgtttactacttcttccctaagagaaccacctccctgattcttcccggcatcataaaggcagctgctcacgtattatatgaaacggaagtggaagtgtcgttaatgcctccctgcttccataatgattgcagcgagtttgtgaatcagccctacttgttgtactccgttcacatgaaaagcaccaagccatccctgtcccccagcaaaccccagtcctcgctggtgattcccacatcgctattctgcaagacatttccattccatttcatgtttgacaaagatatgacaattctgcaatttggcaatggcatcagaaggctgatgaacaggagagactttcaaggaaagcctaattttgaagaatactttgaaattctgactccaaaaatcaaccagacgtttagcgggatcatgactatgttgaatatgcagtttgttgtacgagtgaggagatgggacaactctgtgaaaaaatcttcaagggttatggacctcaaaggccaaatgatctacattgttgaatccagtgcaatcttgtttttggggtcaccctgtgtggacagattagaagattttacaggacgagggctctacctctcagacatcccaattcacaatgcactgagggatgtggtcttaataggggaacaagcccgagctcaagatggcctgaagaagaggctggggaagctgaaggctacccttgagcaagcccaccaagccctggaggaggagaagaaaaagacagtagaccttctgtgctccatatttccctgtgaggttgctcagcagctgtggcaagggcaagttgtgcaagccaagaagttcagtaatgtcaccatgctcttctcagacatcgttgggttcactgccatctgctcccagtgctcaccgctgcaggtcatcaccatgctcaatgcactgtacactcgcttcgaccagcagtgtggagagctggatgtctacaaggtggagaccattggcgatgcctattgtgtagctgggggattacacaaagagagtgatactcatgctgttcagatagcgctgatggccctgaagatgatggagctctctgatgaagttatgtctccccatggagaacctatcaagatgcgaattggactgcactctggatcagtttttgctggcgtcgttggagttaaaatgccccgttactgtctttttggaaacaatgtcactctggctaacaaatttgagtcctgcagtgtaccacgaaaaatcaatgtcagcccaacaacttacagattactcaaagactgtcctggtttcgtgtttacccctcgatcaagggaggaacttccaccaaacttccctagtgaaatccccggaatctgccattttctggatgcttaccaacaaggaacaaactcaaaaccatgcttccaaaagaaagatgtggaagatggcaatgccaattttttaggcaaagcatcaggaatagattagcaacctatatacctatttataagtctttggggtttgactcattgaagatgtgtagagcctctgaaagcactttagggattgtagatggctaacaagcagtattaaaatttcaggagccaagtcacaatctttctcctgtttaacatgacaaaatgtatgtactcacttcagtacttcagctcttcaagaaaaaaaaaaaaa

SEQ ID NO: 139424 - DNA, 1273 bp, Homo sapiens
  Payload ID: 7330
  Gene Symbol: GUCY1A3
  Gene Name: guanylate cyclase 1, soluble, alpha 3
  ENST ID: ENST00000509901
  CDS Start-End: 366-614
atcgaatgccttatggaaaggaactgcaagggttcctttggggtgatcaaagagggagacacagacacagagagacaaaggcaaggaggactgtctgggagccacgcgggcgatacagtttccgaggcacgccgcgtcccgcctagcctgttgaacaggtagacatgagcgacccaagctgcggatttgcgaggcgcgccctggagctgctagagatccggaagcacagccccgaggtgtgcgaagccaccaaacatcccagttaccagtgtccttgaattgatagtggcttctgtttgtcagtctcatataagaactacagctcatcaggaggagatcgcagcagggtaagagacaccaacaccatgttctgcacgaagctcaaggatctcaagatcacaggagagtgtcctttctccttactggcaccaggtcaagttcctaacgagtcttcagaggaggcagcaggaagctcagagagctgcaaagcaaccgtgcccatctgtcaagacattcctgagaagaacatacaagaaagtcttcctcaaagaaaaaccagtggagaccattggcgatgcctattgtgtagctgggggattacacaaagagagtgatactcatgctgttcagatagcgctgatggccctgaagatgatggagctctctgatgaagttatgtctccccatggagaacctatcaagatgcgaattggactgcactctggatcagtttttgctggcgtcgttggagttaaaatgccccgttactgtctttttggaaacaatgtcactctggctaacaaatttgagtcctgcagtgtaccacgaaaaatcaatgtcagcccaacaacttacagattactcaaagactgtcctggtttcgtgtttacccctcgatcaagggaggaacttccaccaaacttccctagtgaaatccccggaatctgccattttctggatgcttaccaacaaggaacaaactcaaaaccatgcttccaaaagaaagatgtggaagatggcaatgccaattttttaggcaaagcatcaggaatagattagcaacctatatacctatttataagtctttggggtttgactcattgaagatgtgtagagcctctgaaagcactttagggattgtagatggctaacaagcagtattaaaatttcaggagccaagtcacaatctttctcctgtttaacatgacaaaatgtatgtactcacttcagtacttcagctcttcaagaaaaaaaaaaaaaaccttaaaaagct

SEQ ID NO: 139425 - DNA, 2656 bp, Homo sapiens
  Payload ID: 7330
  Gene Symbol: GUCY1A3
  Gene Name: guanylate cyclase 1, soluble, alpha 3
  Uniprot ID: Q02108
  ENST ID: ENST00000513574
  CDS Start-End: 383-2455
gacgggggtgggcgccgagcagcgccgcgccggctgctgagctcgcggggccgggccgtgagaacgcgcggggcgcgccggggccgctggtctcccacggccagggcgcctgggccccagagcccatcagccgcgtgcagcgctgcggcctccggcgcgccggcaggcaagcgagcgggcgcagctgggggatgcctggaccccggaggcagcagggctggaggcggtggcgggcttcagggcaacttcacccggccggctgcggcgtggacatcccagttaccagtgtccttgaattgatagtggcttctgtttgtcagtctcatataagaactacagctcatcaggaggagatcgcagcagggtaagagacaccaacaccatgttctgcacgaagctcaaggatctcaagatcacaggagagtgtcctttctccttactggcaccaggtcaagttcctaacgagtcttcagaggaggcagcaggaagctcagagagctgcaaagcaaccgtgcccatctgtcaagacattcctgagaagaacatacaagaaagtcttcctcaaagaaaaaccagtcggagccgagtctatcttcacactttggcagagagtatttgcaaactgattttcccagagtttgaacggctgaatgttgcacttcagagaacattggcaaagcacaaaataaaagaaagcaggaaatctttggaaagagaagactttgaaaaaacaattgcagagcaagcagttgcagcaggagttccagtggaggttatcaaagaatctcttggtgaagaggtttttaaaatatgttacgaggaagatgaaaacatccttggggtggttggaggcacccttaaagattttttaaacagcttcagtacccttctgaaacagagcagccattgccaagaagcaggaaaaaggggcaggcttgaggacgcctccattctatgcctggataaggaggatgattttctacatgtttactacttcttccctaagagaaccacctccctgattcttcccggcatcataaaggcagctgctcacgtattatatgaaacggaagtggaagtgtcgttaatgcctccctgcttccataatgattgcagcgagtttgtgaatcagccctacttgttgtactccgttcacatgaaaagcaccaagccatccctgtcccccagcaaaccccagtcctcgctggtgattcccacatcgctattctgcaagacatttccattccatttcatgtttgacaaagatatgacaattctgcaatttggcaatggcatcagaaggctgatgaacaggagagactttcaaggaaagcctaattttgaagaatactttgaaattctgactccaaaaatcaaccagacgtttagcgggatcatgactatgttgaatatgcagtttgttgtacgagtgaggagatgggacaactctgtgaaaaaatcttcaagggttatggacctcaaaggccaaatgatctacattgttgaatccagtgcaatcttgtttttggggtcaccctgtgtggacagattagaagattttacaggacgagggctctacctctcagacatcccaattcacaatgcactgagggatgtggtcttaataggggaacaagcccgagctcaagatggcctgaagaagaggctggggaagctgaaggctacccttgagcaagcccaccaagccctggaggaggagaagaaaaagacagtagaccttctgtgctccatatttccctgtgaggttgctcagcagctgtggcaagggcaagttgtgcaagccaagaagttcagtaatgtcaccatgctcttctcagacatcgttgggttcactgccatctgctcccagtgctcaccgctgcaggtcatcaccatgctcaatgcactgtacactcgcttcgaccagcagtgtggagagctggatgtctacaaggtggagaccattggcgatgcctattgtgtagctgggggattacacaaagagagtgatactcatgctgttcagatagcgctgatggccctgaagatgatggagctctctgatgaagttatgtctccccatggagaacctatcaagatgcgaattggactgcactctggatcagtttttgctggcgtcgttggagttaaaatgccccgttactgtctttttggaaacaatgtcactctggctaacaaatttgagtcctgcagtgtaccacgaaaaatcaatgtcagcccaacaacttacagattactcaaagactgtcctggtttcgtgtttacccctcgatcaagggaggaacttccaccaaacttccctagtgaaatccccggaatctgccattttctggatgcttaccaacaaggaacaaactcaaaaccatgcttccaaaagaaagatgtggaagatggcaatgccaattttttaggcaaagcatcaggaatagattagcaacctatatacctatttataagtctttggggtttgactcattgaagatgtgtagagcctctgaaagcactttagggattgtagatggctaacaagcagtattaaaatttcaggagccaagtcacaatctttctcctgtttaacatgacaaaatgtatgtactcacttcagtacttcagctcttcaagaaaaaaaaaaaaa

SEQ ID NO: 139426 - DNA, 2552 bp, Homo sapiens
  Payload ID: 7330
  Gene Symbol: GUCY1A3
  Gene Name: guanylate cyclase 1, soluble, alpha 3
  Uniprot ID: Q02108
  ENST ID: ENST00000511507
  CDS Start-End: 305-2179
acacttttcctgcgctagagcagcgagcagcctggaacagacccaggcggaggacacctgtgggggagggagcgcctggaggagcttagagaccccagccgggcgtgatctcaccatgtgcggatttgcgaggcgcgccctggagctgctagagatccggaagcacagccccgaggtgtgcgaagccaccaaacatcccagttaccagtgtccttgaattgatagtggcttctgtttgtcagtctcatataagaactacagctcatcaggaggagatcgcagcagggtaagagacaccaacaccatgttctgcacgaagctcaaggatctcaagatcacaggagagtgtcctttctccttactggcaccaggtcaagttcctaacgagtcttcagaggaggcagcaggaagctcagagagctgcaaagcaaccgtgcccatctgtcaagacattcctgagaagaacatacaagaaagtcttcctcaaagaaaaaccagtcggagccgagtctatcttcacactttggcagagagtatttgcaaactgattttcccagagtttgaacggctgaatgttgcacttcagagaacattggcaaagcacaaaataaaagaaagcaggaaatctttggaaagagaagactttgaaaaaacaattgcagagcaagcagttgcagcaggagttccagtggaggttatcaaagaatctcttggtgaagaggtttttaaaatatgttacgaggaagatgaaaacatccttggggtggttggaggcacccttaaagattttttaaacagcttcagtacccttctgaaacagagcagccattgccaagaagcaggaaaaaggggcaggcttgaggacgcctccattctatgcctggataaggaggatgattttctacatgtttactacttcttccctaagagaaccacctccctgattcttcccggcatcataaaggcagctgctcacgtattatatgaaacggaagtggaagtgtcgttaatgcctccctgcttccataatgattgcagcgagtttgtgaatcagccctacttgttgtactccgttcacatgaaaagcaccaagccatccctgtcccccagcaaaccccagtcctcgctggtgattcccacatcgctattctgcaagacatttccattccatttcatgtttgacaaagatatgacaattctgcaatttggcaatggcatcagaaggctgatgaacaggagagactttcaaggaaagcctaattttgaagaatactttgaaattctgactccaaaaatcaaccagacgtttagcgggatcatgactatgttgaatatgcagtttgttgtacgagtgaggagatgggacaactctgtgaaaaaatcttcaagggttatggacctcaaaggccaaatgatctacattgttgaatccagtgcaatcttgtttttggggtcaccctgtgtggacagattagaagattttacaggacgagggctctacctctcagacatcccaattcacaatgcactgagggatgtggtcttaataggggaacaagcccgagctcaagatggcctgaagaagaggctggggaagctgaaggctacccttgagcaagcccaccaagccctggaggaggagaagaaaaagacagtagaccttctgtgctccatatttccctgtgaggttgctcagcagctgtggcaagggcaagttgtgcaagccaagaagttcagtaatgtcaccatgctcttctcagacatcgttgggttcactgccatctgctcccagtgctcaccgctgcaggtcatcaccatgctcaatgcactgtacactcgcttcgaccagcagtgtggagagctggatgtctacaaggtggagaccattggcgatgcctattgtgtagctgggggattacacaaagagagtgatactcatgctgttcagatagcgctgatggccctgaagatgatggagctctctgatgaagttatgtctccccatggagaacctatcaagatgcgaattggactgcactctggatcagtttttgctggcgtcgttggagttaaaatgccccgttactgtctttttggaaacaatgtcactctggctaacaaatttgagtcctgcagtgtaccacgaaaaatcaatgtcagcccaacaacttacaggtagtaattatgttaaacacctaaaatctcttgtttttatttatatacaattgccatttgccccactgatttgattcattcttcataacttttttcttccttagtcgtaaggaaaaaagaaacgtgataacttttatcatcctcactttaacttttttacactgcttattagcctcctaagaatgacttgcctgaggtgtttgtggcccagccataaatccatgacagatattacatagtcttccatcattcttcttttagaagcacatattaatactcttagtatgttgataggtgttctgacatcaactagtacactgcagtgcagttctggcagtaaacacccagactcagcacagtcataaccacaagttaca

SEQ ID NO: 139427 - DNA, 1788 bp, Homo sapiens
  Payload ID: 7330
  Gene Symbol: GUCY1A3
  Gene Name: guanylate cyclase 1, soluble, alpha 3
  ENST ID: ENST00000621234
  CDS Start-End: 521-952
ttatggcgattgggcggctgcagagaccaggactcagttcccctgccctagtctgagcctagtgggtgggactcagctcagagtcagttttccagaagcaggtttcagtgcagagttttcctacacttttcctgcgctagagcagcgagcagcctggaacagacccaggcggaggacacctgtgggggagggagcgcctggaggagcttagagaccccagccgggcgtgatctcaccatgtgcggatttgcgaggcgcgccctggagctgctagagatccggaagcacagccccgaggtgtgcgaagccaccaagactgcggctcttggagaaagcgtgagcagggggccaccgcggtctccgcgcctgtctgcaccctgtcgcctgagctgcctgacagtgacaatgacatcccagttaccagtgtccttgaattgatagtggcttctgtttgtcagtctcatataagaactacagctcatcaggaggagatcgcagcagggtaagagacaccaacaccatgttctgcacgaagctcaaggatctcaagatcacaggagagtgtcctttctccttactggcaccaggtcaagttcctaacgagtcttcagaggaggcagcaggaagctcagagagctgcaaagcaaccgtgcccatctgtcaagacattcctgagaagaacatacaagaaagtcttcctcaaagaaaaaccagtcggagccgagtctatcttcacactttggcagagagtatttgcaaactgattttcccagagtttgaacggctgaatgttgcacttcagagaacattggcaaagcacaaaataaaagaaagcaggaaatctttggaaagagaagactttgaaaaaacaattgcagagcaagcagttgcagcaggtggagaccattggcgatgcctattgtgtagctgggggattacacaaagagagtgatactcatgctgttcagatagcgctgatggccctgaagatgatggagctctctgatgaagttatgtctccccatggagaacctatcaagatgcgaattggactgcactctggatcagtttttgctggcgtcgttggagttaaaatgccccgttactgtctttttggaaacaatgtcactctggctaacaaatttgagtcctgcagtgtaccacgaaaaatcaatgtcagcccaacaacttacagattactcaaagactgtcctggtttcgtgtttacccctcgatcaagggaggaacttccaccaaacttccctagtgaaatccccggaatctgccattttctggatgcttaccaacaaggaacaaactcaaaaccatgcttccaaaagaaagatgtggaagatggcaatgccaattttttaggcaaagcatcaggaatagattagcaacctatatacctatttataagtctttggggtttgactcattgaagatgtgtagagcctctgaaagcactttagggattgtagatggctaacaagcagtattaaaatttcaggagccaagtcacaatctttctcctgtttaacatgacaaaatgtatgtactcacttcagtacttcagctcttcaagaaaaaaaaaaaaaaccttaaaaagctacttttgtgggagtatttctattatataaccagcacttactacctgtactcaaaattcagcaccttgtacatatatcagataattgtagtcaattgtacaaactgatggagtcacctgcaatctcatatcctggtggaatgccatggttattaaagtgtgtttgtgatagtgtcgtc

SEQ ID NO: 139428 - DNA, 3124 bp, Homo sapiens
  Payload ID: 7331
  Gene Symbol: GUCY1B3
  Gene Name: guanylate cyclase 1, soluble, beta 3
  Uniprot ID: Q02153
  ENST ID: ENST00000264424
  CDS Start-End: 83-1942
gtagccgctgccgcctctgcctgggtcccttcggccgtacctctgcgtgggggctgcctccccggctcccggtgcagacaccatgtacggatttgtgaatcacgccctggagttgctggtgatccgcaattacggccccgaggtgtgggaagacatcaaaaaagaggcacagttagatgaagaaggacagtttcttgtcagaataatatatgatgactccaaaacttatgatttggttgctgctgcaagcaaagtcctcaatctcaatgctggagaaatcctccaaatgtttgggaagatgtttttcgtcttttgccaagaatctggttatgatacaatcttgcgtgtcctgggctctaatgtcagagaatttctacagaaccttgatgctctgcacgaccaccttgctaccatctacccaggaatgcgtgcaccttcctttaggtgcactgatgcagaaaagggcaaaggactcattttgcactactactcagagagagaaggacttcaggatattgtcattggaatcatcaaaacagtggcacaacaaatccatggcactgaaatagacatgaaggttattcagcaaagaaatgaagaatgtgatcatactcaatttttaattgaagaaaaagagtcaaaagaagaggatttttatgaagatcttgacagatttgaagaaaatggtacccaggaatcacgcatcagcccatatacattctgcaaagcttttccttttcatataatatttgaccgggacctagtggtcactcagtgtggcaatgctatatacagagttctcccccagctccagcctgggaattgcagccttctgtctgtcttctcgctggttcgtcctcatattgatattagtttccatgggatcctttctcacatcaatactgtttttgtattgagaagcaaggaaggattgttggatgtggagaaattagaatgtgaggatgaactgactgggactgagatcagctgcttacgtctcaagggtcaaatgatctacttacctgaagcagatagcatactttttctatgttcaccaagtgtcatgaacctggacgatttgacaaggagagggctgtatctaagtgacatccctctgcatgatgccacgcgcgatcttgttcttttgggagaacaatttagagaggaatacaaactcacccaagaactggaaatcctcactgacaggctacagctcacgttaagagccctggaagatgaaaagaaaaagacagacacattgctgtattctgtccttcctccgtctgttgccaatgagctgcggcacaagcgtccagtgcctgccaaaagatatgacaatgtgaccatcctctttagtggcattgtgggcttcaatgctttctgtagcaagcatgcatctggagaaggagccatgaagatcgtcaacctcctcaacgacctctacaccagatttgacacactgactgattcccggaaaaacccatttgtttataaggtggagactgttggtgacaagtatatgacagtgagtggtttaccagagccatgcattcaccatgcacgatccatctgccacctggccttggacatgatggaaattgctggccaggttcaagtagatggtgaatctgttcagataacaatagggatacacactggagaggtagttacaggtgtcataggacagcggatgcctcgatactgtctttttgggaatactgtcaacctcacaagccgaacagaaaccacaggagaaaagggaaaaataaatgtgtctgaatatacatacagatgtcttatgtctccagaaaattcagatccacaattccacttggagcacagaggcccagtgtccatgaagggcaaaaaagaaccaatgcaagtttggtttctatccagaaaaaatacaggaacagaggaaacaaagcaggatgatgactgaatcttggattatggggtgaagaggagtacagactaggttccagttttctcctaacacgtgccaagcccaggagcagttcttccctatggatacagattttcttttgtccttgtccattaccccaagactttcttctagatatatctctcactatccgttattcaaccttagctctgctttctattactttttaggctttagtatattatctaaagtttggcttttgatgtggatgatgtgagcttcatgtgtcttaaaatctactacaagcattacctaacatggtgatctgcaagtagtaggcacccaataaatatttgttgaatttagttaaatgaaactgaacagtgtttggccatgtgtatatttatatcatgtttaccaaatctgtttagtgttccacatatatgtatatgtatattttaatgactataatgtaataaagtttatatcatgttggtgtatatcattatagaaatcattttctaaaggagtgaattctaagttttaggggaaaaaatgcaatttattttcagactcccaaagtaagaattaacatatcatgctaagaaaatagtgactattttgaagtatgctacttccctttcagaaatatagaatacacgtttctgttattaaagtatttgattactaattcaaatcatatggcaattataattcttctaaaatgctatcatttgtaactgtatcccctgtattaaatctcattaaccacaggcagctgttacagaaagctgcattgtttcacattgagctgttacattagttcaggctaaatgttgggagctccaaccacatccaagaataaatctggaaacacactgctgggatactgctgttagagcccttcttggccttgtattcccagaaatgagctccctttccttagcttagaagaatgtgattatatccaggacatcatgttcagaaaacttagtttactttcagcatagaatgcattactgttggaataattggcctctagctcttaaatgtctctgataacttattaatatctatctttataaaatagagtgcaactacttttgtgtaaaaatgtttgcctttaaatttagtatttcatatcagcacatcgatatatgtataaatgttccatgttaatgtgtaaaagagtctgtaataaattatttttttcacgtg

SEQ ID NO: 139429 - DNA, 1951 bp, Homo sapiens
  Payload ID: 7331
  Gene Symbol: GUCY1B3
  Gene Name: guanylate cyclase 1, soluble, beta 3
  Uniprot ID: Q02153
  ENST ID: ENST00000503520
  CDS Start-End: 52-1812
cggccgtacctctgcgtgggggctgcctccccggctcccggtgcagacaccatgtacggatttgtgaatcacgccctggagttgctggtgatccgcaattacggccccgaggtgtgggaagacatcaaaaaagaggcacagttagatgaagaaggacagtttcttgtcagaataatatatgatgactccaaaacttatgatttggttgctgctgcaagcaaagtcctcaatctcaatgctggagaaatcctccaaatgtttgggaagatgtttttcgtcttttgccaagaatctggttatgatacaatcttgcgtgtcctgggctctaatgtcagagaatttctacagaaccttgatgctctgcacgaccaccttgctaccatctacccaggaatgcgtgcaccttcctttaggtgcactgatgcagaaaagggcaaaggactcattttgcactactactcagagagagaaggacttcaggatattgtcattggaatcatcaaaacagtggcacaacaaatccatggcactgaaatagacatgaaggttattcagcaaagaaatgaagaatgtgatcatactcaatttttaattgaagaaaaagagtcaaaagaagaggatttttatgaagatcttgacagatttgaagaaaatggtacccaggaatcacgcatcagcccatatacattctgcaaagcttttccttttcatataatatttgaccgggacctagtggtcactcagtgtggcaatgctatatacagagttctcccccagctccagcctgggaattgcagccttctgtctgtcttctcgctggttcgtcctcatattgatattagtttccatgggatcctttctcacatcaatactgtttttgtattgagaagcaaggaaggattgttggatgtggagaaattagaatgtgaggatgaactgactgggactgagatcagctgcttacgtctcaagggtcaaatgatctacttacctgaagcagatagcatactttttctatgttcaccaagtgtcatgaacctggacgatttgacaaggagagggctgtatctaagtgacatccctctgcatgatgccacgcgcgatcttgttcttttgggagaacaatttagagaggaatacaaactcacccaagaactggaaatcctcactgacaggctacagctcacgttaagagccctggaagatgaaaagaaaaagacagacactggcattgtgggcttcaatgctttctgtagcaagcatgcatctggagaaggagccatgaagatcgtcaacctcctcaacgacctctacaccagatttgacacactgactgattcccggaaaaacccatttgtttataaggtggagactgttggtgacaagtatatgacagtgagtggtttaccagagccatgcattcaccatgcacgatccatctgccacctggccttggacatgatggaaattgctggccaggttcaagtagatggtgaatctgttcagataacaatagggatacacactggagaggtagttacaggtgtcataggacagcggatgcctcgatactgtctttttgggaatactgtcaacctcacaagccgaacagaaaccacaggagaaaagggaaaaataaatgtgtctgaatatacatacagatgtcttatgtctccagaaaattcagatccacaattccacttggagcacagaggcccagtgtccatgaagggcaaaaaagaaccaatgcaagtttggtttctatccagaaaaaatacaggaacagaggaaacaaagcaggatgatgactgaatcttggattatggggtgaagaggagtacagactaggttccagttttctcctaacacgtgccaagcccaggagcagttcttccctatggatacagattttcttttgtccttgtccattaccccaagactttcttctaga

SEQ ID NO: 139430 - DNA, 2709 bp, Homo sapiens
  Payload ID: 7331
  Gene Symbol: GUCY1B3
  Gene Name: guanylate cyclase 1, soluble, beta 3
  ENST ID: ENST00000507146
  CDS Start-End: 501-2285
gatgctgcctccccggcccggttgcgctgtagccgctgccgcctctgcctgggtcccttcggccgtacctctgcgtgggggctgcctccccggctcccggtgcagacaccatggcgggtttgccgctccacaccgcagcttcctgagctcgggaaggggaggtgcggcggaggcgtggggtcttcccggctctggccggccccaccagtgtgggaggctgagcgccagcggaagggaaggctccgggttcgcgtccccgcgctgcccccgatgcccagcctctcccggagcggtgacagtacggatttgtgaatcacgccctggagttgctggtgatccgcaattacggccccgaggtgtgggaagacatcaaaaaagaggcacagttagatgaagaaggacagtttcttgtcagaataatatatgatgactccaaaacttatgatttggttgctgctgcaagcaaagtcctcaatctcaatgctggagaaatcctccaaatgtttgggaagatgtttttcgtcttttgccaagaatctggttatgatacaatcttgcgtgtcctgggctctaatgtcagagaatttctacagaaccttgatgctctgcacgaccaccttgctaccatctacccaggaatgcgtgcaccttcctttaggtgcactgatgcagaaaagggcaaaggactcattttgcactactactcagagagagaaggacttcaggatattgtcattggaatcatcaaaacagtggcacaacaaatccatggcactgaaatagacatgaaggttattcagcaaagaaatgaagaatgtgatcatactcaatttttaattgaagaaaaagagtcaaaagaagaggatttttatgaagatcttgacagatttgaagaaaatggtacccaggaatcacgcatcagcccatatacattctgcaaagcttttccttttcatataatatttgaccgggacctagtggtcactcagtgtggcaatgctatatacagagttctcccccagctccagcctgggaattgcagccttctgtctgtcttctcgctggttcgtcctcatattgatattagtttccatgggatcctttctcacatcaatactgtttttgtattgagaagcaaggaaggattgttggatgtggagaaattagaatgtgaggatgaactgactgggactgagatcagctgcttacgtctcaagggtcaaatgatctacttacctgaagcagatagcatactttttctatgttcaccaagtgtcatgaacctggacgatttgacaaggagagggctgtatctaagtgacatccctctgcatgatgccacgcgcgatcttgttcttttgggagaacaatttagagaggaatacaaactcacccaagaactggaaatcctcactgacaggctacagctcacgttaagagccctggaagatgaaaagaaaaagacagacacaggatgtcctgctagaatccaggcctttaaagtacaaacgacactgatgctgtgtgaaaaggacagcagaagcactaaaggctttcccagtatttcttacagtggctttctgctgatcccactgaacagattgctgtattctgtccttcctccgtctgttgccaatgagctgcggcacaagcgtccagtgcctgccaaaagatatgacaatgtgaccatcctctttagtggcattgtgggcttcaatgctttctgtagcaagcatgcatctggagaaggagccatgaagatcgtcaacctcctcaacgacctctacaccagatttgacacactgactgattcccggaaaaacccatttgtttataaggtggagactgttggtgacaagtatatgacagtgagtggtttaccagagccatgcattcaccatgcacgatccatctgccacctggccttggacatgatggaaattgctggccaggttcaagtagatggtgaatctgttcagataacaatagggatacacactggagaggtagttacaggtgtcataggacagcggatgcctcgatactgtctttttgggaatactgtcaacctcacaagccgaacagaaaccacaggagaaaagggaaaaataaatgtgtctgaatatacatacagatgtcttatgtctccagaaaattcagatccacaattccacttggagcacagaggcccagtgtccatgaagggcaaaaaagaaccaatgcaagtttggtttctatccagaaaaaatacaggaacagaggaaacaaagcaggatgatgactgaatcttggattatggggtgaagaggagtacagactaggttccagttttctcctaacacgtgccaagcccaggagcagttcttccctatggatacagattttcttttgtccttgtccattaccccaagactttcttctagatatatctctcactatccgttattcaaccttagctctgctttctattactttttaggctttagtatattatctaaagtttggcttttgatgtggatgatgtgagcttcatgtgtcttaaaatctactacaagcattacctaacatggtgatctgcaagtagtaggcacccaataaatatttgttgaatttagttaaatgaaactgaacagtgtttggccatgtgtatatttatatcatgtttaccaaatctgtttagtgttccacatatatgtatatgtatatttt

SEQ ID NO: 139431 - DNA, 2355 bp, Homo sapiens
  Payload ID: 7331
  Gene Symbol: GUCY1B3
  Gene Name: guanylate cyclase 1, soluble, beta 3
  ENST ID: ENST00000513437
  CDS Start-End: 285-1940
gctgagcgccagcggaagggaaggctccgggttcgcgtccccgcgctgcccccgatgcccagcctctcccggagcggtgacagtacggatttgtgaatcacgccctggagttgctggtgatccgcaattacggccccgaggtgtgggaagacatcaaaaaagaggcacagttagatgaagaaggacagtttcttgtcagaataatatatgatgactccaaaacttatgatttggttgctgctgcaagcaaagtcctcaatctcaatgctggagaaatcctccaaatgtttgggaagatgtttttcgtcttttgccaagaatctggttatgatacaatcttgcgtgtcctgggctctaatgtcagagaatttctacagaaccttgatgctctgcacgaccaccttgctaccatctacccaggaatgcgtgcaccttcctttaggtgcactgatgcagaaaagggcaaaggactcattttgcactactactcagagagagaaggacttcaggatattgtcattggaatcatcaaaacagtggcacaacaaatccatggcactgaaatagacatgaaggttattcagcaaagaaatgaagaatgtgatcatactcaatttttaattgaagaaaaagagtcaaaagaagaggatttttatgaagatcttgacagatttgaagaaaatggtacccaggaatcacgcatcagcccatatacattctgcaaagcttttccttttcatataatatttgaccgggacctagtggtcactcagtgtggcaatgctatatacagagttctcccccagctccagcctgggaattgcagccttctgtctgtcttctcgctggttcgtcctcatattgatattagtttccatgggatcctttctcacatcaatactgtttttgtattgagaagcaaggaaggattgttggatgtggagaaattagaatgtgaggatgaactgactgggactgagatcagctgcttacgtctcaagggtcaaatgatctacttacctgaagcagatagcatactttttctatgttcaccaagtgtcatgaacctggacgatttgacaaggagagggctgtatctaagtgacatccctctgcatgatgccacgcgcgatcttgttcttttgggagaacaatttagagaggaatacaaactcacccaagaactggaaatcctcactgacaggctacagctcacgttaagagccctggaagatgaaaagaaaaagacagacacattgctgtattctgtccttcctccgtctgttgccaatgagctgcggcacaagcgtccagtgcctgccaaaagatatgacaatgtgaccatcctctttagtggcattgtgggcttcaatgctttctgtagcaagcatgcatctggagaaggagccatgaagatcgtcaacctcctcaacgacctctacaccagatttgacacactgactgattcccggaaaaacccatttgtttataaggtggagactgttggtgacaagtatatgacagtgagtggtttaccagagccatgcattcaccatgcacgatccatctgccacctggccttggacatgatggaaattgctggccaggttcaagtagatggtgaatctgttcagataacaatagggatacacactggagaggtagttacaggtgtcataggacagcggatgcctcgatactgtctttttgggaatactgtcaacctcacaagccgaacagaaaccacaggagaaaagggaaaaataaatgtgtctgaatatacatacagatgtcttatgtctccagaaaattcagatccacaattccacttggagcacagaggcccagtgtccatgaagggcaaaaaagaaccaatgcaagtttggtttctatccagaaaaaatacaggaacagaggaaacaaagcaggatgatgactgaatcttggattatggggtgaagaggagtacagactaggttccagttttctcctaacacgtgccaagcccaggagcagttcttccctatggatacagattttcttttgtccttgtccattaccccaagactttcttctagatatatctctcactatccgttattcaaccttagctctgctttctattactttttaggctttagtatattatctaaagtttggcttttgatgtggatgatgtgagcttcatgtgtcttaaaatctactacaagcattacctaacatggtgatctgcaagtagtaggcacccaataaatatttgttgaatttagttaaatgaaactgaacagtgtttggccatgtgtatatttatatcatgtttaccaaatctgtttagtgttccacatatatgtatat

SEQ ID NO: 139432 - DNA, 2456 bp, Homo sapiens
  Payload ID: 7331
  Gene Symbol: GUCY1B3
  Gene Name: guanylate cyclase 1, soluble, beta 3
  Uniprot ID: Q02153
  ENST ID: ENST00000505764
  CDS Start-End: 328-2127
agctcgatgctgcctccccggcccggttgcgctgtagccgctgccgcctctgcctgggtcccttcggccgtacctctgcgtgggggctgcctccccggctcccggtgcagacaccatgtacggatttgtgaatcacgccctggagttgctggtgatccgcaattacggccccgaggtgtgggaagacatcaagagagaagaggtcttggtatgtcgcccaggctgttctcaaattcctgagctcaacggatcctcccacctgggcttcccaaagtgctgggataacaggcatgagccaacctgcccagccagaaaagagagattttaatgcttatgtgctttataaaagaggcacagttagatgaagaaggacagtttcttgtcagaataatatatgatgactccaaaacttatgatttggttgctgctgcaagcaaagtcctcaatctcaatgctggagaaatcctccaaatgtttgggaagatgtttttcgtcttttgccaagaatctggttatgatacaatcttgcgtgtcctgggctctaatgtcagagaatttctacagaaccttgatgctctgcacgaccaccttgctaccatctacccaggaatgcgtgcaccttcctttaggtgcactgatgcagaaaagggcaaaggactcattttgcactactactcagagagagaaggacttcaggatattgtcattggaatcatcaaaacagtggcacaacaaatccatggcactgaaatagacatgaaggttattcagcaaagaaatgaagaatgtgatcatactcaatttttaattgaagaaaaagagtcaaaagaagaggatttttatgaagatcttgacagatttgaagaaaatggtacccaggaatcacgcatcagcccatatacattctgcaaagcttttccttttcatataatatttgaccgggacctagtggtcactcagtgtggcaatgctatatacagagttctcccccagctccagcctgggaattgcagccttctgtctgtcttctcgctggttcgtcctcatattgatattagtttccatgggatcctttctcacatcaatactgtttttgtattgagaagcaaggaaggattgttggatgtggagaaattagaatgtgaggatgaactgactgggactgagatcagctgcttacgtctcaagggtcaaatgatctacttacctgaagcagatagcatactttttctatgttcaccaagtgtcatgaacctggacgatttgacaaggagagggctgtatctaagtgacatccctctgcatgatgccacgcgcgatcttgttcttttgggagaacaatttagagaggaatacaaactcacccaagaactggaaatcctcactgacaggctacagctcacgttaagagccctggaagatgaaaagaaaaagacagacacattgctgtattctgtccttcctccgtctgttgccaatgagctgcggcacaagcgtccagtgcctgccaaaagatatgacaatgtgaccatcctctttagtggcattgtgggcttcaatgctttctgtagcaagcatgcatctggagaaggagccatgaagatcgtcaacctcctcaacgacctctacaccagatttgacacactgactgattcccggaaaaacccatttgtttataaggtggagactgttggtgacaagtatatgacagtgagtggtttaccagagccatgcattcaccatgcacgatccatctgccacctggccttggacatgatggaaattgctggccaggttcaagtagatggtgaatctgttcagataacaatagggatacacactggagaggtagttacaggtgtcataggacagcggatgcctcgatactgtctttttgggaatactgtcaacctcacaagccgaacagaaaccacaggagaaaagggaaaaataaatgtgtctgaatatacatacagatgtcttatgtctccagaaaattcagatccacaattccacttggagcacagaggcccagtgtccatgaagggcaaaaaagaaccaatgcaagtttggtttctatccagaaaaaatacaggaacagaggaaacaaagcaggatgatgactgaatcttggattatggggtgaagaggagtacagactaggttccagttttctcctaacacgtgccaagcccaggagcagttcttccctatggatacagattttcttttgtccttgtccattaccccaagactttcttctagatatatctctcactatccgttattcaaccttagctctgctttctattactttttaggctttagtatattatctaaagtttggcttttgatgtggatgatgtgagcttcatgtgtcttaaaatctactacaagcattacctaacatggtgatctgcaagtagtaggcacccaataaatatttgttgaattta

SEQ ID NO: 139433 - DNA, 2255 bp, Homo sapiens
  Payload ID: 7331
  Gene Symbol: GUCY1B3
  Gene Name: guanylate cyclase 1, soluble, beta 3
  ENST ID: ENST00000502959
  CDS Start-End: 121-2046
gctccagctcgatgctgcctccccggcccggttgcgctgtagccgctgccgcctctgcctgggtcccttcggccgtacctctgcgtgggggctgcctccccggctcccggtgcagacaccatgtacggatttgtgaatcacgccctggagttgctggtgatccgcaattacggccccgaggtgtgggaagacatcaaaaaagaggcacagttagatgaagaaggacagtttcttgtcagaataatatatgatgactccaaaacttatgatttggttgctgctgcaagcaaagtcctcaatctcaatgctggagaaatcctccaaatgtttgggaagatgtttttcgtcttttgccaagaatctggttatgatacaatcttgcgtgtcctgggctctaatgtcagagaatttctacagaagaatgaatcaaagcatatttcagatttacatcattgtttcctgggaatctacttgtgctgcaataaccttgatgctctgcacgaccaccttgctaccatctacccaggaatgcgtgcaccttcctttaggtgcactgatgcagaaaagggcaaaggactcattttgcactactactcagagagagaaggacttcaggatattgtcattggaatcatcaaaacagtggcacaacaaatccatggcactgaaatagacatgaaggttattcagcaaagaaatgaagaatgtgatcatactcaatttttaattgaagaaaaagagtcaaaagaagaggatttttatgaagatcttgacagatttgaagaaaatggtacccaggaatcacgcatcagcccatatacattctgcaaagcttttccttttcatataatatttgaccgggacctagtggtcactcagtgtggcaatgctatatacagagttctcccccagctccagcctgggaattgcagccttctgtctgtcttctcgctggttcgtcctcatattgatattagtttccatgggatcctttctcacatcaatactgtttttgtattgagaagcaaggaaggattgttggatgtggagaaattagaatgtgaggatgaactgactgggactgagatcagctgcttacgtctcaagggtcaaatgatctacttacctgaagcagatagcatactttttctatgttcaccaagtgtcatgaacctggacgatttgacaaggagagggctgtatctaagtgacatccctctgcatgatgccacgcgcgatcttgttcttttgggagaacaatttagagaggaatacaaactcacccaagaactggaaatcctcactgacaggctacagctcacgttaagagccctggaagatgaaaagaaaaagacagacacattgctgtattctgtccttcctccgtctgttgccaatgagctgcggcacaagcgtccagtgcctgccaaaagatatgacaatgtgaccatcctctttagtggcattgtgggcttcaatgctttctgtagcaagcatgcatctggagaaggagccatgaagatcgtcaacctcctcaacgacctctacaccagatttgacacactgactgattcccggaaaaacccatttgtttataaggtggagactgttggtgacaagtatatgacagtgagtggtttaccagagccatgcattcaccatgcacgatccatctgccacctggccttggacatgatggaaattgctggccaggttcaagtagatggtgaatctgttcagataacaatagggatacacactggagaggtagttacaggtgtcataggacagcggatgcctcgatactgtctttttgggaatactgtcaacctcacaagccgaacagaaaccacaggagaaaagggaaaaataaatgtgtctgaatatacatacagatgtcttatgtctccagaaaattcagatccacaattccacttggagcacagaggcccagtgtccatgaagggcaaaaaagaaccaatgcaagtttggtttctatccagaaaaaatacaggaacagaggaaacaaagcaggatgatgactgaatcttggattatggggtgaagaggagtacagactaggttccagttttctcctaacacgtgccaagcccaggagcagttcttccctatggatacagattttcttttgtccttgtccattaccccaagactttcttctagatatatctctcactatccgttattcaaccttagctctgctttctattactttttaggctttagtatattat

SEQ ID NO: 139434 - DNA, 2316 bp, Homo sapiens
  Payload ID: 7331
  Gene Symbol: GUCY1B3
  Gene Name: guanylate cyclase 1, soluble, beta 3
  ENST ID: ENST00000505154
  CDS Start-End: 280-1935
aatcagggcgggccaaggcggctgttctcgctccagctcgatgctgcctccccggcccggttgcgctgtagccgctgccgcctctgcctgggtcccttcggccgtacctctgcgtgggggctgcctccccggctcccggtgcagacaccatgaaaagaggcacagttagatgaagaaggacagtttcttgtcagaataatatatgatgactccaaaacttatgatttggttgctgctgcaagcaaagtcctcaatctcaatgctggagaaatcctccaaatgtttgggaagatgtttttcgtcttttgccaagaatctggttatgatacaatcttgcgtgtcctgggctctaatgtcagagaatttctacagaaccttgatgctctgcacgaccaccttgctaccatctacccaggaatgcgtgcaccttcctttaggtgcactgatgcagaaaagggcaaaggactcattttgcactactactcagagagagaaggacttcaggatattgtcattggaatcatcaaaacagtggcacaacaaatccatggcactgaaatagacatgaaggttattcagcaaagaaatgaagaatgtgatcatactcaatttttaattgaagaaaaagagtcaaaagaagaggatttttatgaagatcttgacagatttgaagaaaatggtacccaggaatcacgcatcagcccatatacattctgcaaagcttttccttttcatataatatttgaccgggacctagtggtcactcagtgtggcaatgctatatacagagttctcccccagctccagcctgggaattgcagccttctgtctgtcttctcgctggttcgtcctcatattgatattagtttccatgggatcctttctcacatcaatactgtttttgtattgagaagcaaggaaggattgttggatgtggagaaattagaatgtgaggatgaactgactgggactgagatcagctgcttacgtctcaagggtcaaatgatctacttacctgaagcagatagcatactttttctatgttcaccaagtgtcatgaacctggacgatttgacaaggagagggctgtatctaagtgacatccctctgcatgatgccacgcgcgatcttgttcttttgggagaacaatttagagaggaatacaaactcacccaagaactggaaatcctcactgacaggctacagctcacgttaagagccctggaagatgaaaagaaaaagacagacacattgctgtattctgtccttcctccgtctgttgccaatgagctgcggcacaagcgtccagtgcctgccaaaagatatgacaatgtgaccatcctctttagtggcattgtgggcttcaatgctttctgtagcaagcatgcatctggagaaggagccatgaagatcgtcaacctcctcaacgacctctacaccagatttgacacactgactgattcccggaaaaacccatttgtttataaggtggagactgttggtgacaagtatatgacagtgagtggtttaccagagccatgcattcaccatgcacgatccatctgccacctggccttggacatgatggaaattgctggccaggttcaagtagatggtgaatctgttcagataacaatagggatacacactggagaggtagttacaggtgtcataggacagcggatgcctcgatactgtctttttgggaatactgtcaacctcacaagccgaacagaaaccacaggagaaaagggaaaaataaatgtgtctgaatatacatacagatgtcttatgtctccagaaaattcagatccacaattccacttggagcacagaggcccagtgtccatgaagggcaaaaaagaaccaatgcaagtttggtttctatccagaaaaaatacaggaacagaggaaacaaagcaggatgatgactgaatcttggattatggggtgaagaggagtacagactaggttccagttttctcctaacacgtgccaagcccaggagcagttcttccctatggatacagattttcttttgtccttgtccattaccccaagactttcttctagatatatctctcactatccgttattcaaccttagctctgctttctattactttttaggctttagtatattatctaaagtttggcttttgatgtggatgatgtgagcttcatgtgtcttaaaatctactacaagcattacctaacatggtgatctgcaagtagtaggcacccaataaatatttgttgaatttagttaaatgaaactgaacagtgtttggccatgtgtatatttatatcatgttta

SEQ ID NO: 139435 - DNA, 3844 bp, Homo sapiens
  Payload ID: 7332
  Gene Symbol: GUCY2C
  Gene Name: guanylate cyclase 2C
  Uniprot ID: P25092
  ENST ID: ENST00000261170
  CDS Start-End: 138-3359
gaccagagagaagcgtggggaagagtgggctgagggactccactagaggctgtccatctggattccctgcctccctaggagcccaacagagcaaagcaagtgggcacaaggagtatggttctaacgtgattggggtcatgaagacgttgctgttggacttggctttgtggtcactgctcttccagcccgggtggctgtcctttagttcccaggtgagtcagaactgccacaatggcagctatgaaatcagcgtcctgatgatgggcaactcagcctttgcagagcccctgaaaaacttggaagatgcggtgaatgaggggctggaaatagtgagaggacgtctgcaaaatgctggcctaaatgtgactgtgaacgctactttcatgtattcggatggtctgattcataactcaggcgactgccggagtagcacctgtgaaggcctcgacctactcaggaaaatttcaaatgcacaacggatgggctgtgtcctcatagggccctcatgtacatactccaccttccagatgtaccttgacacagaattgagctaccccatgatctcagctggaagttttggattgtcatgtgactataaagaaaccttaaccaggctgatgtctccagctagaaagttgatgtacttcttggttaacttttggaaaaccaacgatctgcccttcaaaacttattcctggagcacttcgtatgtttacaagaatggtacagaaactgaggactgtttctggtaccttaatgctctggaggctagcgtttcctatttctcccacgaactcggctttaaggtggtgttaagacaagataaggagtttcaggatatcttaatggaccacaacaggaaaagcaatgtgattattatgtgtggtggtccagagttcctctacaagctgaagggtgaccgagcagtggctgaagacattgtcattattctagtggatcttttcaatgaccagtactttgaggacaatgtcacagcccctgactatatgaaaaatgtccttgttctgacgctgtctcctgggaattcccttctaaatagctctttctccaggaatctatcaccaacaaaacgagactttgctcttgcctatttgaatggaatcctgctctttggacatatgctgaagatatttcttgaaaatggagaaaatattaccacccccaaatttgctcatgctttcaggaatctcacttttgaagggtatgacggtccagtgaccttggatgactggggggatgttgacagtaccatggtgcttctgtatacctctgtggacaccaagaaatacaaggttcttttgacctatgatacccacgtaaataagacctatcctgtggatatgagccccacattcacttggaagaactctaaacttcctaatgatattacaggccggggccctcagatcctgatgattgcagtcttcaccctcactggagctgtggtgctgctcctgctcgtcgctctcctgatgctcagaaaatatagaaaagattatgaacttcgtcagaaaaaatggtcccacattcctcctgaaaatatctttcctctggagaccaatgagaccaatcatgttagcctcaagatcgatgatgacaaaagacgagatacaatccagagactacgacagtgcaaatacgacaaaaagcgagtgattctcaaagatctcaagcacaatgatggtaatttcactgaaaaacagaagatagaattgaacaagttgcttcagattgactattacaacctgaccaagttctacggcacagtgaaacttgataccatgatcttcggggtgatagaatactgtgagagaggatccctccgggaagttttaaatgacacaatttcctaccctgatggcacattcatggattgggagtttaagatctctgtcttgtatgacattgctaagggaatgtcatatctgcactccagtaagacagaagtccatggtcgtctgaaatctaccaactgcgtagtggacagtagaatggtggtgaagatcactgattttggctgcaattccattttacctccaaaaaaggacctgtggacagctccagagcacctccgccaagccaacatctctcagaaaggagatgtgtacagctatgggatcatcgcacaggagatcatcctgcggaaagaaaccttctacactttgagctgtcgggaccggaatgagaagattttcagagtggaaaattccaatggaatgaaacccttccgcccagatttattcttggaaacagcagaggaaaaagagctagaagtgtacctacttgtaaaaaactgttgggaggaagatccagaaaagagaccagatttcaaaaaaattgagactacacttgccaagatatttggactttttcatgaccaaaaaaatgaaagctatatggataccttgatccgacgtctacagctatattctcgaaacctggaacatctggtagaggaaaggacacagctgtacaaggcagagagggacagggctgacagacttaactttatgttgcttccaaggctagtggtaaagtctctgaaggagaaaggctttgtggagccggaactatatgaggaagttacaatctacttcagtgacattgtaggtttcactactatctgcaaatacagcacccccatggaagtggtggacatgcttaatgacatctataagagttttgaccacattgttgatcatcatgatgtctacaaggtggaaaccatcggtgatgcgtacatggtggctagtggtttgcctaagagaaatggcaatcggcatgcaatagacattgccaagatggccttggaaatcctcagcttcatggggacctttgagctggagcatcttcctggcctcccaatatggattcgcattggagttcactctggtccctgtgctgctggagttgtgggaatcaagatgcctcgttattgtctatttggagatacggtcaacacagcctctaggatggaatccactggcctccctttgagaattcacgtgagtggctccaccatagccatcctgaagagaactgagtgccagttcctttatgaagtgagaggagaaacatacttaaagggaagaggaaatgagactacctactggctgactgggatgaaggaccagaaattcaacctgccaacccctcctactgtggagaatcaacagcgtttgcaagcagaattttcagacatgattgccaactctttacagaaaagacaggcagcagggataagaagccaaaaacccagacgggtagccagctataaaaaaggcactctggaatacttgcagctgaataccacagacaaggagagcacctatttttaaacctaaatgaggtataaggactcacacaaattaaaatacagctgcactgaggcagcgacctcaagtgtcctgaaagcttacattttcctgagacctcaatgaagcagaaatgtacttaggcttggctgccctgtctggaacatggactttcttgcatgaatcagatgtgtgttctcagtgaaataactaccttccactctggaaccttattccagcagttgttccagggagcttctacctggaaaagaaaagaaatgaatagactatctagaacttgagaagattttattcttatttcatttattttttgtttgtttatttttatcgtttttgtttactggctttccttctgtattcataagattttttaaattgtcataattatattttaaatacccatcttcattaaagtatatttaactcataatttttgcagaaaatatgctatatattaggcaagaataaaagctaaaggtttcccaaaa

SEQ ID NO: 139436 - DNA, 3698 bp, Homo sapiens
  Payload ID: 7333
  Gene Symbol: GUCY2D
  Gene Name: guanylate cyclase 2D, membrane (retina-specific)
  Uniprot ID: Q02846
  ENST ID: ENST00000254854
  CDS Start-End: 151-3462
gattaagggctctggccggctgtacccacgcccccgccctggcctgggctggcaaggaagacctgtgggcgggcgtcaaaagggggaccggccctgtgacccctcaccgggggccgtgggcccgagcccccggacttccctaagccggcaatgaccgcctgcgcccgccgagcgggtgggcttccggaccccgggctctgcggtcccgcgtggtgggctccgtccctgccccgcctcccccgggccctgccccggctcccgctcctgctgctcctgcttctgctgcagccccccgccctctccgccgtgttcacggtgggggtcctgggcccctgggcttgcgaccccatcttctctcgggctcgcccggacctggccgcccgcctggccgccgcccgcctgaaccgcgaccccggcctggcaggcggtccccgcttcgaggtagcgctgctgcccgagccttgccggacgccgggctcgctgggggccgtgtcctccgcgctggcccgcgtgtcgggcctcgtgggtccggtgaaccctgcggcctgccggccagccgagctgctcgccgaagaagccgggatcgcgctggtgccctggggctgcccctggacgcaggcggagggcaccacggcccctgccgtgacccccgccgcggatgccctctacgccctgcttcgcgcattcggctgggcgcgcgtggccctggtcaccgccccccaggacctgtgggtggaggcgggacgctcactgtccacggcactcagggcccggggcctgcctgtcgcctccgtgacttccatggagcccttggacctgtctggagcccgggaggccctgaggaaggttcgggacgggcccagggtcacagcagtgatcatggtgatgcactcggtgctgctgggtggcgaggagcagcgctacctcctggaggccgcagaggagctgggcctgaccgatggctccctggtcttcctgcccttcgacacgatccactacgccttgtccccaggcccggaggccttggccgcactcgccaacagctcccagcttcgcagggcccacgatgccgtgctcaccctcacgcgccactgtccctctgaaggcagcgtgctggacagcctgcgcagggctcaagagcgccgcgagctgccctctgacctcaatctgcagcaggtctccccactctttggcaccatctatgacgcggtcttcttgctggcaaggggcgtggcagaagcgcgggctgccgcaggtggcagatgggtgtccggagcagctgtggcccgccacatccgggatgcgcaggtccctggcttctgcggggacctaggaggagacgaggagcccccattcgtgctgctagacacggacgcggcgggagaccggctttttgccacatacatgctggatcctgcccggggctccttcctctccgccggtacccggatgcacttcccgcgtgggggatcagcacccggacctgacccctcgtgctggttcgatccaaacaacatctgcggtggaggactggagccgggcctcgtctttcttggcttcctcctggtggttgggatggggctggctggggccttcctggcccattatgtgaggcaccggctacttcacatgcaaatggtctccggccccaacaagatcatcctgaccgtggacgacatcacctttctccacccacatgggggcacctctcgaaaggtggcccaggggagtcgatcaagtctgggtgcccgcagcatgtcagacattcgcagcggccccagccaacacttggacagccccaacattggtgtctatgagggagacagggtttggctgaagaaattcccaggggatcagcacatagctatccgcccagcaaccaagacggccttctccaagctccaggagctccggcatgagaacgtggccctctacctggggcttttcctggctcggggagcagaaggccctgcggccctctgggagggcaacctggctgtggtctcagagcactgcacgcggggctctcttcaggacctcctcgctcagagagaaataaagctggactggatgttcaagtcctccctcctgctggaccttatcaagggaataaggtatctgcaccatcgaggcgtggctcatgggcggctgaagtcacggaactgcatagtggatggcagattcgtactcaagatcactgaccacggccacgggagactgctggaagcacagaaggtgctaccggagcctcccagagcggaggaccagctgtggacagccccggagctgcttagggacccagccctggagcgccggggaacgctggccggcgacgtctttagcttggccatcatcatgcaagaagtagtgtgccgcagtgccccttatgccatgctggagctcactcccgaggaagtggtgcagagggtgcggagcccccctccactgtgtcggcccttggtgtccatggaccaggcacctgtcgagtgtatcctcctgatgaagcagtgctgggcagagcagccggaacttcggccctccatggaccacaccttcgacctgttcaagaacatcaacaagggccggaagacgaacatcattgactcgatgcttcggatgctggagcagtactctagtaacctggaggatctgatccgggagcgcacggaggagctggagctggaaaagcagaagacagaccggctgcttacacagatgctgcctccgtctgtggctgaggccttgaagacggggacaccagtggagcccgagtactttgagcaagtgacactgtactttagtgacattgtgggcttcaccaccatctctgccatgagtgagcccattgaggttgtggacctgctcaacgatctctacacactctttgatgccatcattggttcccacgatgtctacaaggtggagacaataggggacgcctatatggtggcctcggggctgccccagcggaatgggcagcgacacgcggcagagatcgccaacatgtcactggacatcctcagtgccgtgggcactttccgcatgcgccatatgcctgaggttcccgtgcgcatccgcataggcctgcactcgggtccatgcgtggcaggcgtggtgggcctcaccatgccgcggtactgcctgtttggggacacggtcaacaccgcctcgcgcatggagtccaccgggctgccttaccgcatccacgtgaacttgagcactgtggggattctccgtgctctggactcgggctaccaggtggagctgcgaggccgcacggagctgaagggcaagggcgccgaggacactttctggctagtgggcagacgcggcttcaacaagcccatccccaaaccgcctgacctgcaaccggggtccagcaaccacggcatcagcctgcaggagatcccacccgagcggcgacggaagctggagaaggcgcggccgggccagttctcttgagaagtgaggcccggccccggacagggtctgggccctgctccctgtcccatctgcagtggaccccaggcacccccctttgaggaggtggggtgaactgctccttggcagggatttgtgacactgcattgctgggctgtgttcctcgggctcttctggaccttgcaccgtggataccaggccatgtgccatggtatttgggtcctgggagggtgggtgaaataaaggcatgctgtctt

SEQ ID NO: 139437 - DNA, 3714 bp, Homo sapiens
  Payload ID: 7334
  Gene Symbol: GUCY2F
  Gene Name: guanylate cyclase 2F, retinal
  Uniprot ID: P51841
  ENST ID: ENST00000218006
  CDS Start-End: 293-3619
tctgcggatgctgaagagtgattttcaaaacatttactaacgctttcaattatttaccccattaatggaatttgtcaacagactggagtccttgacaggattgtgaatgcatagaggatgcaaagaaatggacacactgaggtagctatgccagtggtctgcatgcgcaggcagtaaactgaagacatttgagcggtgaattacttggcatttggaaacaccaccgtctgtgtcgggaaagcagaataactctccagtatctcgtcattagcttgctggaagcaggagggctatgttcctgggactcgggcgcttttctcgccttgttctctggtttgcggctttcaggaaactgctgggacaccatggccttgcatctgccaagttcctgtggtgcttgtgccttctgtctgtcatgtcccttccgcagcaggtgtggacactcccctacaagataggggtggtgggcccttgggcttgtgattcgctgttttcaaaggccctgcctgaggttgctgcgcgattagccattgagcgaatcaaccgggacccatcttttgacctgagttattcttttgaatacgtgattctcaatgaagactgccagacttcgagggctctctccagtttcatttcccaccaccagatggcctcaggatttattggacctaccaaccctggctactgcgaggcagcctcgctcctgggaaacagctgggacaaaggaattttctcttgggcttgtgtgaattatgaattagacaataaaattagctacccgaccttttctcggacactcccttctcccatccgggtgcttgtaactgtcatgaaatatttccagtgggctcatgctggagtcatttcctcagatgaagacatttgggtgcatacagccaatcgagtcgcaagtgctcttcggagccacggcttacctgtaggggtcgtcctgaccacaggacaagacagccaaagcatgcggaaagccctccagaggattcaccaggcagacagaattcgcataatcatcatgtgtatgcattcagctttgattgggggagagactcagatgcatctcttggaatgtgctcatgatctgaaaatgactgatggaacctacgtctttgttccttatgatgccctgctctacagtttaccttataagcacaccccctaccgggtcctaaggaacaacccaaagctccgggaagcctatgatgcagtgttgaccattacagtggagtcccaagaaaagaccttctatcaagccttcacagaggcagcagcaagaggtgaaattcctgagaagctggagttcgatcaagtttcaccgttgtttggaaccatctacaattcaatttactttatcgcacaagccatgaataatgctatgaaagaaaatggacaggctggtgctgccagcctggttcagcattccagaaacatgcagttccatggattcaaccagttgatgaggacagattcaaatggaaatggaatttcagaatatgtaatcctggacaccaacttgaaagaatgggaactccatagcacctacactgtggacatggaaatggagctgctacgtttcggagggacccctattcacttccctggtggcaggccccctagagcagatgcaaaatgctggtttgcagaagggaagatctgccatggaggcatcgaccctgcctttgccatgatggtctgccttactttgcttatagccctgctgtctattaatggatttgcttactttataaggcgtcgtataaataaaatccagttgatcaaaggacccaatagaattctactgactttggaggatgtaacgtttatcaatccccactttggcagtaagagaggaagtcgtgccagtgtaagcttccagattacctcagaggtccaaagtgggaggtccccaagactctccttttcttcagggagtctaactccagctacctatgaaaactccaacatagcgatttatgagggtgattgggtgtggctgaaaaagttctcccttggagattttggagaccttaagtccatcaaatcaagagcaagtgatgtgttcgaaatgatgaaggacttgcgtcatgagaatattaaccctttattgggtttcttctatgattcggggatgtttgccattgtgacagaattctgttcccgagggagcctagaagacatactgacaaatcaagatgtgaaacttgactggatgtttaaatcatcactcttgctggatctcataaagggcatgaagtacttacaccacagagagtttgttcatgggaggctaaagtctcgaaactgtgtggtagatgggcgttttgtactaaaagtgacagattatggctttaacgacatcttagaaatgctgagactctctgaagaggaatcttctatggaagagctgctgtggacggcccctgaactgttgagagctccaagaggcagcaggttaggttcttttgcaggagatgtctatagctttgccatcatcatgcaagaagtgatggtccggggtaccccattctgcatgatggatctgccagctcaagaaatcataaacagacttaagaagcctcctcctgtgtacagaccagtagttcctcctgagcatgcccctccagaatgtctccagctgatgaagcagtgctgggctgaggctgcagaacaacgaccaacttttgatgaaatatttaaccagtttaaaacttttaataaagggaagaagaccaatattattgattctatgcttcggatgttggagcaatattctagcaacttggaagatttgattcgggagcggactgaagagctggaaattgaaaaacagaaaacggaaaagcttctaacacagatgctaccaccatcagttgctgaatctctcaaaaagggctgcacagttgaacctgagggctttgacttggtcaccttgtacttcagcgacattgtgggcttcacaaccatttcagccatgagtgagcccattgaggtcgtggatcttctgaatgacctgtacacactctttgatgcaataattggcagtcatgatgtctacaaggtagagaccattggagatgcctacatggtggcttcaggcctcccaaagaggaatggcagtaggcatgcagctgagattgcaaacatgtccttagatatcctgagctctgtgggcactttcaagatgcggcacatgccagaagtgccggtccgaattcgaattggccttcactcagggccggttgttgctggagtggtgggcctcaccatgcccagatactgcttgtttggagacactgtgaacacagcttctcggatggaatctacaggcttaccttatcgcattcatgtcagtctcagcactgttacaattcttcaaaatctgagtgagggctatgaagtggagcttcgaggaagaacagagctcaagggcaaaggcacagaggaaaccttctggctgattgggaaaaaaggcttcatgaagccccttcctgtgcccccaccagtggacaaagatgggcaagtgggccatggcctgcaaccagtggagattgcagccttccaaagaagaaaagcagaaaggcagttggtgagaaacaagccataaggggcaaagggctccaggatttgaatcttctcttggtgaggcaatgggaaagctcacttcagttcaagaaattgttctgcctgggcaagaaatta

SEQ ID NO: 139438 - DNA, 1874 bp, Homo sapiens
  Payload ID: 7335
  Gene Symbol: GUCA1A
  Gene Name: guanylate cyclase activator 1A (retina)
  Uniprot ID: P43080
  ENST ID: ENST00000053469
  CDS Start-End: 616-1221
cagaagttccacctcaccatcaagaaaggccctggtccaggatgtgcaaggtgtgatgaaatcacagggctggggaaggtcagctcggggtcacaagaagcctgatgggcaggaaagagcatgaaagccccagccagcctcacatgtgcggctgggaggactcacagaaaccctctgtacccagtcatgggccaaagacaccgtcatgcaagggggtgaaggctccacactcgtcccggccccgggcgtggaagcaggacctcgagcagtctctggcagcagcctatgtgccggtcgttgtggactctaaggggcagaatccggacaagctcagggtacagtctcccctggggctgcaaggatttagtggagactcttaacaccagttctctggcatctgtgagtttgagtgtgggccatcatcttcttccttctgctctctccctctccacatttcccggtaccatctgatccatcaggcccttctttgctcaggcctgaaggactcaggcctgtgagagaggacggccccgttgtcggccaagacacctttgggcgaggagcagcgaacagggcctgtccatctcagacgtcagccccctgaaggcctgagcaatgggcaacgtgatggagggaaagtcagtggaggagctgagcagcaccgagtgccaccagtggtacaagaagttcatgactgagtgcccctctggccaactcaccctctatgagttccgccagttcttcggcctcaagaacctgagcccgtcggccagccagtacgtggaacagatgtttgagacttttgacttcaacaaggacggctacattgatttcatggagtacgtggcagcgctcagcttggtcctcaaggggaaggtggaacagaagctccgctggtacttcaagctctatgatgtagatggcaacggctgcattgaccgcgatgagctgctcaccatcatccaggccattcgcgccattaacccctgcagcgataccaccatgactgcagaggagttcaccgatacagtgttctccaagattgacgtcaacggggatggggaactctccctggaagagtttatagagggcgtccagaaggaccagatgctcctggacacactgacacgaagcctggaccttacccgcatcgtgcgcaggctccagaatggcgagcaagacgaggagggggctgacgaggccgctgaggcagccggctgagtgcaccgcccggctgcttctgcactagcgggtggggtggtatggtggtgcctgttggtggtgttcttgtcttaaccctagatagaatctaatgaactcagaggcttagctcgcctctttagggtccatggtggcagcagagaggcagaagtgggagtccagagccaggaacagtgaaggatggttcctggcccctctgagtgacagctggtggcagcactccttgctggggggcactgttcaacatccctctgccgtcgggtgaccccctagcccttctgactcctctcccagcttttcccagctttccccactgagcttctccagtccatgctcttctggacgtggactctctgaggcagaactgagcttttccaggcctcttatggaatcctgcagatccagtggctgcagcttcaatcccagtgctgcaatcacacatccattctgccctgggggaccctggagcctacttgtgcgctttgcatttcattgattgacgcctcccttcaacaagcatttactgagcgcctactatgtactaatgctagatgttagatgtacaaagaagacagttttcatcctctaggaactcataggctaatggtgagacacacagacaaacatcattataataaaatatgctaagagaa

SEQ ID NO: 139439 - DNA, 1575 bp, Homo sapiens
  Payload ID: 7335
  Gene Symbol: GUCA1A
  Gene Name: guanylate cyclase activator 1A (retina)
  Uniprot ID: P43080
  ENST ID: ENST00000372958
  CDS Start-End: 324-929
tgcttctctaagccttgttctattttcaactcttttctccagggtacagtctcccctggggctgcaaggatttagtggagactcttaacaccagttctctggcatctgtgagtttgagtgtgggccatcatcttcttccttctgctctctccctctccacatttcccggtaccatctgatccatcaggcccttctttgctcaggcctgaaggactcaggcctgtgagagaggacggccccgttgtcggccaagacacctttgggcgaggagcagcgaacagggcctgtccatctcagacgtcagccccctgaaggcctgagcaatgggcaacgtgatggagggaaagtcagtggaggagctgagcagcaccgagtgccaccagtggtacaagaagttcatgactgagtgcccctctggccaactcaccctctatgagttccgccagttcttcggcctcaagaacctgagcccgtcggccagccagtacgtggaacagatgtttgagacttttgacttcaacaaggacggctacattgatttcatggagtacgtggcagcgctcagcttggtcctcaaggggaaggtggaacagaagctccgctggtacttcaagctctatgatgtagatggcaacggctgcattgaccgcgatgagctgctcaccatcatccaggccattcgcgccattaacccctgcagcgataccaccatgactgcagaggagttcaccgatacagtgttctccaagattgacgtcaacggggatggggaactctccctggaagagtttatagagggcgtccagaaggaccagatgctcctggacacactgacacgaagcctggaccttacccgcatcgtgcgcaggctccagaatggcgagcaagacgaggagggggctgacgaggccgctgaggcagccggctgagtgcaccgcccggctgcttctgcactagcgggtggggtggtatggtggtgcctgttggtggtgttcttgtcttaaccctagatagaatctaatgaactcagaggcttagctcgcctctttagggtccatggtggcagcagagaggcagaagtgggagtccagagccaggaacagtgaaggatggttcctggcccctctgagtgacagctggtggcagcactccttgctggggggcactgttcaacatccctctgccgtcgggtgaccccctagcccttctgactcctctcccagcttttcccagctttccccactgagcttctccagtccatgctcttctggacgtggactctctgaggcagaactgagcttttccaggcctcttatggaatcctgcagatccagtggctgcagcttcaatcccagtgctgcaatcacacatccattctgccctgggggaccctggagcctacttgtgcgctttgcatttcattgattgacgcctcccttcaacaagcatttactgagcgcctactatgtactaatgctagatgttagatgtacaaagaagacagttttcatcctctaggaactcataggctaatggtgagacacacagacaaacatcattataataaaatatgct

SEQ ID NO: 139440 - DNA, 2233 bp, Homo sapiens
  Payload ID: 7335
  Gene Symbol: GUCA1A
  Gene Name: guanylate cyclase activator 1A (retina)
  Uniprot ID: P43080
  ENST ID: ENST00000394237
  CDS Start-End: 977-1582
acctcaccatcaagaaaggccctggtccaggatgtgcaaggtgtgatgaaatcacagggctggggaaggtcagctcggggtcacaagaagcctgatgggcaggaaagagcatgaaagccccagccagcctcacatgtgcggctgggaggactcacagaaaccctctgtacccagtcatgggccaaagacaccgtcatgcaagggggtgaaggctccacactcgtcccggccccgggcgtggaagcaggacctcgagcagtctctggcagcagcctatgtgccggtcgttgtggactctaaggggcagaatccggacaagctcaggttcaatttctacacctcccagtactccaactccctgaaccccttctacactttgcagaagcctacctgtggctacctgtaccgccgggacactgaccacacccgcaagcgctttgatgtgcctcctgccaacttggtcttgtggcgctcctaggcctgagccaaacggaagcccccgacccttcaccctcacccctgtgacctcaggtccccaaggggaagggctgctcactgcaggaggagtgacctatattcgggctaagacagctgtgccatgcccacctattgacaatgataaagggaggtctctcttctcagcagcagttaaagtttgtccttcctttccctggcatctgaatgggtggctgtggggtacagtctcccctggggctgcaaggatttagtggagactcttaacaccagttctctggcatctgtgagtttgagtgtgggccatcatcttcttccttctgctctctccctctccacatttcccggtaccatctgatccatcaggcccttctttgctcaggcctgaaggactcaggcctgtgagagaggacggccccgttgtcggccaagacacctttgggcgaggagcagcgaacagggcctgtccatctcagacgtcagccccctgaaggcctgagcaatgggcaacgtgatggagggaaagtcagtggaggagctgagcagcaccgagtgccaccagtggtacaagaagttcatgactgagtgcccctctggccaactcaccctctatgagttccgccagttcttcggcctcaagaacctgagcccgtcggccagccagtacgtggaacagatgtttgagacttttgacttcaacaaggacggctacattgatttcatggagtacgtggcagcgctcagcttggtcctcaaggggaaggtggaacagaagctccgctggtacttcaagctctatgatgtagatggcaacggctgcattgaccgcgatgagctgctcaccatcatccaggccattcgcgccattaacccctgcagcgataccaccatgactgcagaggagttcaccgatacagtgttctccaagattgacgtcaacggggatggggaactctccctggaagagtttatagagggcgtccagaaggaccagatgctcctggacacactgacacgaagcctggaccttacccgcatcgtgcgcaggctccagaatggcgagcaagacgaggagggggctgacgaggccgctgaggcagccggctgagtgcaccgcccggctgcttctgcactagcgggtggggtggtatggtggtgcctgttggtggtgttcttgtcttaaccctagatagaatctaatgaactcagaggcttagctcgcctctttagggtccatggtggcagcagagaggcagaagtgggagtccagagccaggaacagtgaaggatggttcctggcccctctgagtgacagctggtggcagcactccttgctggggggcactgttcaacatccctctgccgtcgggtgaccccctagcccttctgactcctctcccagcttttcccagctttccccactgagcttctccagtccatgctcttctggacgtggactctctgaggcagaactgagcttttccaggcctcttatggaatcctgcagatccagtggctgcagcttcaatcccagtgctgcaatcacacatccattctgccctgggggaccctggagcctacttgtgcgctttgcatttcattgattgacgcctcccttcaacaagcatttactgagcgcctactatgtactaatgctagatgttagatgtacaaagaagacagttttcatcctctaggaactcataggctaatggtgagacacacagacaaacatcattataataaaatatgctaagag

SEQ ID NO: 139441 - DNA, 801 bp, Homo sapiens
  Payload ID: 7335
  Gene Symbol: GUCA1A
  Gene Name: guanylate cyclase activator 1A (retina)
  ENST ID: ENST00000418175
  CDS Start-End: 538-801
agtatcctgccaagagtcctccctgaccaccagaagttccacctcaccatcaagaaaggccctggtccaggatgtgcaaggactcacagaaaccctctgtacccagtcatgggccaaagacaccgtcatgcaagggggtgaaggctccacactcgtcccggccccgggcgtggaagcaggacctcgagcagtctctggcagcagcctatgtgccggtcgttgtggactctaaggggcagaatccggacaagctcagggtacagtctcccctggggctgcaaggatttagtggagactcttaacaccagttctctggcatctgtgagtttgagtgtgggccatcatcttcttccttctgctctctccctctccacatttcccggtaccatctgatccatcaggcccttctttgctcaggcctgaaggactcaggcctgtgagagaggacggccccgttgtcggccaagacacctttgggcgaggagcagcgaacagggcctgtccatctcagacgtcagccccctgaaggcctgagcaatgggcaacgtgatggagggaaagtcagtggaggagctgagcagcaccgagtgccaccagtggtacaagaagttcatgactgagtgcccctctggccaactcaccctctatgagttccgccagttcttcggcctcaagaacctgagcccgtcggccagccagtacgtggaacagatgtttgagacttttgacttcaacaaggacggctacattgatttcatggagtacgtggcagcgctcagcttggtcctcaaggggaaggtg

SEQ ID NO: 139442 - DNA, 1921 bp, Homo sapiens
  Payload ID: 7335
  Gene Symbol: GUCA1A
  Gene Name: guanylate cyclase activator 1A (retina)
  ENST ID: ENST00000541991
  CDS Start-End: 658-1275
agtatcctgccaagagtcctccctgaccaccagaagttccacctcaccatcaagaaaggccctggtccaggatgtgcaaggtgtgatgaaatcacagggctggggaaggtcagctcggggtcacaagaagcctgatgggcaggaaagagcatgaaagccccagccagcctcacatgtgcggctgggaggactcacagaaaccctctgtacccagtcatgggccaaagacaccgtcatgcaagggggtgaaggctccacactcgtcccggccccgggcgtggaagcaggacctcgagcagtctctggcagcagcctatgtgccggtcgttgtggactctaaggggcagaatccggacaagctcagggtacagtctcccctggggctgcaaggatttagtggagactcttaacaccagttctctggcatctgtgagtttgagtgtgggccatcatcttcttccttctgctctctccctctccacatttcccggtaccatctgatccatcaggcccttctttgctcaggcctgaaggactcaggcctgtgagagaggacggccccgttgtcggccaagacacctttgggcgaggagcagcgaacagggcctgtccatctcagacgtcagccccctgaaggcctgagcaatgggcaacgtgatggagggaaagtcagtggaggagctgagcagcaccgagtgccaccagtggtacaagaagttcatgactgagtgcccctctggccaactcaccctctatgagttccgccagttcttcggcctcaagaacctgagcccgtcggccagccagtacgtggaacagatgtttgagacttttgacttcaacaaggacggctacattgatttcatggagtacgtggcagcgctcagcttggtcctcaaggggaaggtggaacagaagctccgctggtacttcaagctctatgatgtagatggcaacggctgcattgaccgcgatgagctgctcaccatcatccagtttcctcatcaataccaaaagacggccattcgcgccattaacccctgcagcgataccaccatgactgcagaggagttcaccgatacagtgttctccaagattgacgtcaacggggatggggaactctccctggaagagtttatagagggcgtccagaaggaccagatgctcctggacacactgacacgaagcctggaccttacccgcatcgtgcgcaggctccagaatggcgagcaagacgaggagggggctgacgaggccgctgaggcagccggctgagtgcaccgcccggctgcttctgcactagcgggtggggtggtatggtggtgcctgttggtggtgttcttgtcttaaccctagatagaatctaatgaactcagaggcttagctcgcctctttagggtccatggtggcagcagagaggcagaagtgggagtccagagccaggaacagtgaaggatggttcctggcccctctgagtgacagctggtggcagcactccttgctggggggcactgttcaacatccctctgccgtcgggtgaccccctagcccttctgactcctctcccagcttttcccagctttccccactgagcttctccagtccatgctcttctggacgtggactctctgaggcagaactgagcttttccaggcctcttatggaatcctgcagatccagtggctgcagcttcaatcccagtgctgcaatcacacatccattctgccctgggggaccctggagcctacttgtgcgctttgcatttcattgattgacgcctcccttcaacaagcatttactgagcgcctactatgtactaatgctagatgttagatgtacaaagaagacagttttcatcctctaggaactcataggctaatggtgagacacacagacaaacatcattataataaaatatgct

SEQ ID NO: 139443 - DNA, 1113 bp, Homo sapiens
  Payload ID: 7336
  Gene Symbol: GUCA1B
  Gene Name: guanylate cyclase activator 1B (retina)
  Uniprot ID: Q9UMX6
  ENST ID: ENST00000230361
  CDS Start-End: 97-699
ggaaagggaggaagagggccctagttggagagatccatcagcagaagccagggaggagatacagacccttgctccctgatgctcctcagggctagcatggggcaggagtttagctgggaggaggcggaggcagctggcgagatagatgtggcggagctccaggagtggtacaagaagtttgtgatggagtgccccagcggcacactctttatgcatgagtttaagcgcttcttcaaggtcacagacgatgaggaggcctcccagtatgtagagggcatgttccgagccttcgacaagaatggggacaacaccatcgacttcctggagtacgtggcagctctgaatctcgtgctgaggggcaccctggagcacaagctgaagtggacattcaagatctatgataaggatggcaatggctgcatcgaccgcctggagctactcaacattgtggagggaatttaccagctgaagaaagcctgccggcgagagctacaaactgagcaaggccagctgctcacacccgaggaggtcgtggacaggatcttcctcctggtggatgagaatggagatggccagctgtctctgaacgagtttgttgaaggtgcccgtcgggacaagtgggtgatgaagatgctgcagatggacatgaatcccagcagctggctcgctcagcagagacggaaaagtgccatgttctgaggagtctggggcccctccacgactccaggctcacccaggtttccagggtagtaggagggtccctggctcagcctgctcatgcccactcttcccctggtgttgacttcctggcaccccctgtgcagggctgagtggggatggggaagggctgctgggtttgaagtggccaacagggcatagtccattttggaggagtccctgggatggtgaagggaattcagttacttttcctgttcagccgctcctgggaggactgtgccttggctgggtggttgtggggctcccacagtttctgggtgttctcagttggaagcaagagccaactgaggggtgagggtcccacagaccaaatcagaaatgagaacacaaagactggtaggaggcaggggtgggagggtgttgagactgaagaaa

SEQ ID NO: 139444 - DNA, 982 bp, Homo sapiens
  Payload ID: 7337
  Gene Symbol: GUCA1C
  Gene Name: guanylate cyclase activator 1C
  Uniprot ID: O95843
  ENST ID: ENST00000261047
  CDS Start-End: 134-763
ttgctgtaagaggtttagagtagctttctgagggcatatgttagccttcagttttagtgaggagtaagggactaaatccagcaaaaacttaagtgaaaacaacctgaggaaaagctgtagactgtgagtcaagatggggaatggcaaatctatagctggtgatcagaaagcagttcctacacaagagacccatgtgtggtacagaacatttatgatggaatatccatccggcctgcaaacactacatgaatttaagacacttttgggtctgcaaggtctgaatcagaaggccaataaacatattgatcaagtttataatacctttgacacgaacaaggatggatttgttgactttttggagtttattgctgctgtaaatctaatcatgcaagaaaaaatggagcaaaaattaaaatggtattttaagctgtatgatgctgatggaaatggttctattgacaaaaatgaactactggacatgttcatggcggtacaagccctcaatggccagcaaactctgagtcctgaagaattcatcaacttggtgttccataagatcgatataaacaatgatggggaattgactttagaagaatttatcaatggcatggcaaaagatcaggatctcctggagattgtttacaagagcttcgacttctccaatgtgctgagagtaatctgtaatgggaagcagccagacatggagacagactcctccaaatctcctgacaaggctggtctagggaaggtgaaaatgaagtagctgtgagaatacctgtcccagctatcaatgagcacaacatttcagtagagaagaaatagaatcttccccatgtacatgctgttgatttcaggtctttgttataattcatataggcttgtgaatatagcacttattttaatccagtagagacttgcataaagatcctaaacagatgcattgttgcttttctgtgctgtctctgcagattaaaacataatg

SEQ ID NO: 139445 - DNA, 900 bp, Homo sapiens
  Payload ID: 7337
  Gene Symbol: GUCA1C
  Gene Name: guanylate cyclase activator 1C
  ENST ID: ENST00000393963
  CDS Start-End: 1-591
atggggaatggcaaatctatagctggtgatcagaaagcagttcctacacaagagacccatgtgtggtacagaacatttatgatggaatatccatccggcctgcaaacactacatgaatttaagacacttttgggtctgcaaggtctgaatcagaaggccaataaacatattgatcaagtttataatacctttgacacgaacaaggatggatttgttgactttttggagtttattgctgctgtaaatctaatcatgcaagaaaaaatggagcaaaaattaaaatggtattttaagctgtatgatgctgatggaaatggttctattgacaaaaatgaactactggacatgttcatggcggtacaagccctcaatggccagcaaactctgagtcctgaagaattcatcaacttggtgttccataagatcgatataaacaatgatggtaatggagctactctctactggatcacttttcctacaaagggaattgactttagaagaatttatcaatggcatggcaaaagatcaggatctcctggagattgtttacaagagcttcgacttctccaatgtgctgagagtaatctgtaatgggaagcagccagacatggagacagactcctccaaatctcctgacaaggctggtctagggaaggtgaaaatgaagtagctgtgagaatacctgtcccagctatcaatgagcacaacatttcagtagagaagaaatagaatcttccccatgtacatgctgttgatttcaggtctttgttataattcatataggcttgtgaatatagcacttattttaatccagtagagacttgcataaagatcctaaacagatgcattgttgcttttctgtgctgtctctgcagattaaaacataatgattacactaaa

SEQ ID NO: 139446 - DNA, 633 bp, Homo sapiens
  Payload ID: 7337
  Gene Symbol: GUCA1C
  Gene Name: guanylate cyclase activator 1C
  ENST ID: ENST00000471108
  CDS Start-End: 5-490
caagatggggaatggcaaatctatagctggtgatcagaaagcagttcctacacaagagacccatgtgtggtacagaacatttatgatggaatatccatccggcctgcaaacactacatgaatttaagacacttttgggtctgcaaggtctgaatcagaaggccaataaacatattgatcaagtttataatacctttgacacgaacaaggatggatttgttgactttttggagtttattgctgctgtaaatctaatcatgcaagaaaaaatggagcaaaaattaaaatggtattttaagctgtatgatgctgatggaaatggttctattgacaaaaatgaactactggacatgttcatggcggtacaagccctcaatggccagcaaactctgagtcctgaagaattcatcaacttggtgttccataagatcgatataaacaatgatggtaatggagctactctctactggatcacttttcctacaaagtaggagatggtggtagtggggagtgttatttagacaaaagcaggaaccattcaagagaaccctagttgtgacttaggcttcataatgggaccaatccaatgttctcagtatgattcaattgagtaaatatttattgatcatattca

SEQ ID NO: 139447 - DNA, 569 bp, Homo sapiens
  Payload ID: 7338
  Gene Symbol: GUCA2A
  Gene Name: guanylate cyclase activator 2A (guanylin)
  Uniprot ID: Q02747
  ENST ID: ENST00000357001
  CDS Start-End: 7-354
gctgccatgaatgccttcctgctctccgcactgtgcctccttggggcctgggccgccttggcaggaggggtcaccgtgcaggatggaaatttctccttttctctggagtcagtgaagaagctcaaagacctccaggagccccaggagcccagggttgggaaactcaggaactttgcacccatccctggtgaacctgtggttcccatcctctgtagcaacccgaactttccagaagaactcaagcctctctgcaaggagcccaatgcccaggagatacttcagaggctggaggaaatcgctgaggacccgggcacatgtgaaatctgtgcctacgctgcctgtaccggatgctaggggggcttgcccactgcctgcctcccctccgcagcagggaagctcttttctcctgcagaaagggccacccatgatactccactcccagcagctcaacctaccctggtccagtcgggaggagcagcccggggaggaactgggtgactggaggcctcgccccaacactgtccttccctgccacttcaacccccagctaataaaccagattccagagt

SEQ ID NO: 139448 - DNA, 597 bp, Homo sapiens
  Payload ID: 7339
  Gene Symbol: GUCA2B
  Gene Name: guanylate cyclase activator 2B (uroguanylin)
  Uniprot ID: Q16661
  ENST ID: ENST00000372581
  CDS Start-End: 31-369
gacagcggcagggggaacccagggagcgcgatgggctgcagggctgcatcagggctcctgccaggagtggccgtggtcctcctgctgctgctgcagagcacacagtcagtctacatccagtaccaaggcttccgggtccagctggaatccatgaagaagctgagtgacctggaggcacagtgggcacccagcccccgcctgcaggcccagagcctcctgcccgccgtgtgccaccaccctgctctgcctcaggaccttcagcctgtctgcgcctcgcaggaggcttccagcatcttcaagaccctgaggaccatcgctaacgacgactgtgagctgtgtgtgaacgttgcgtgtaccggctgcctctgagatagccctgggtaccctgagcccaccagggacacctcgcccttcagcccaccaccctggcaggcttccatccccgtccatgctcaagatgggtccctggccaccatggtcatcaccacccttccagggcctgagcagctggatctggtacaaagcaatcggacatagagttggagggggaggcccctgaggcagcccagctcctgaataaagattctacaacacacg

SEQ ID NO: 139449 - DNA, 1084 bp, Homo sapiens
  Payload ID: 7340
  Gene Symbol: GUK1
  Gene Name: guanylate kinase 1
  Uniprot ID: Q16774
  ENST ID: ENST00000312726
  CDS Start-End: 242-835
gaggtggccccggatgctgcggcgcccgctggccgggctggctgcggccgccctgggccgggccccaccggacggcttgctctgctctttacctggggttgctgtcgaggaccctgtgcaagactcggccggtttttctttctccctgatggacagacccaaacatagccgcgcagcatcgtgaagggctggggccttcactcctctgtggctctggaagagcccgatttcctcaggaggcatgtcgggccccaggcctgtggtgctgagcgggccttcgggagctgggaagagcaccctgctgaagaggctgctccaggagcacagcggcatctttggcttcagcgtgtcccataccacgaggaacccgaggcccggcgaggagaacggcaaagattactactttgtaaccagggaggtgatgcagcgtgacatagcagccggcgacttcatcgagcatgccgagttctcggggaacctgtatggcacgagcaaggtggcggtgcaggccgtgcaggccatgaaccgcatctgtgtgctggacgtggacctgcagggtgtgcggaacatcaaggccaccgatctgcggcccatctacatctctgtgcagccgccttcactgcacgtgctggagcagcggctgcggcagcgcaacactgaaaccgaggagagcctggtgaagcggctggctgctgcccaggccgacatggagagcagcaaggagcccggcctgtttgatgtggtcatcattaacgacagcctggaccaggcctacgcagagctgaaggaggcgctctctgaggaaatcaagaaagctcaaaggaccggcgcctgaggcttgctgtctgttctcggcaccccgggcccatacaggaccagggcagcagcattgagccacccccttggcaggcgatacggcagctctgtgcccttggccagcatgtggagtggaggagatgctgcccctgtggttggaacatcctggggtgacccccgacccagcctcgctgggctgtcccctgtccctatctctcactctggacccagggctgacatcctaataaaataactgttggattagaaa

SEQ ID NO: 139450 - DNA, 940 bp, Homo sapiens
  Payload ID: 7340
  Gene Symbol: GUK1
  Gene Name: guanylate kinase 1
  Uniprot ID: Q16774
  ENST ID: ENST00000366716
  CDS Start-End: 60-653
cagcagatggggactagaggccgcactgctatccacagcctctcttctcacccccaggcatgtcgggccccaggcctgtggtgctgagcgggccttcgggagctgggaagagcaccctgctgaagaggctgctccaggagcacagcggcatctttggcttcagcgtgtcccataccacgaggaacccgaggcccggcgaggagaacggcaaagattactactttgtaaccagggaggtgatgcagcgtgacatagcagccggcgacttcatcgagcatgccgagttctcggggaacctgtatggcacgagcaaggtggcggtgcaggccgtgcaggccatgaaccgcatctgtgtgctggacgtggacctgcagggtgtgcggaacatcaaggccaccgatctgcggcccatctacatctctgtgcagccgccttcactgcacgtgctggagcagcggctgcggcagcgcaacactgaaaccgaggagagcctggtgaagcggctggctgctgcccaggccgacatggagagcagcaaggagcccggcctgtttgatgtggtcatcattaacgacagcctggaccaggcctacgcagagctgaaggaggcgctctctgaggaaatcaagaaagctcaaaggaccggcgcctgaggcttgctgtctgttctcggcaccccgggcccatacaggaccagggcagcagcattgagccacccccttggcaggcgatacggcagctctgtgcccttggccagcatgtggagtggaggagatgctgcccctgtggttggaacatcctggggtgacccccgacccagcctcgctgggctgtcccctgtccctatctctcactctggacccagggctgacatcctaataaaataactgttggattagaaactccataaatgagtggaatgtggccccaaggttggtgg

SEQ ID NO: 139451 - DNA, 1275 bp, Homo sapiens
  Payload ID: 7340
  Gene Symbol: GUK1
  Gene Name: guanylate kinase 1
  Uniprot ID: Q16774
  ENST ID: ENST00000366718
  CDS Start-End: 428-1021
cgcctcgcctgagttgtgtccaaggtgtgcgtgtggccaggggtccatccgcttccctctagcccagcccctgaacacagctgcagtgcacggccccactcctcagctctgctccccatcccaactcgaagacgctgccctggccctgtgtgtgcagctcatgtggactgggagggcagggcaggtgcaggtcttggggcaagagctggagctgtcttttccttcctgcacagccgcagagcaggtggatggggctgcttccctgcaagggcccagggccaggccccctggggatttattcgtggcttagaagggtggggccagaagcaggcgtagtggggattagggactcagcacccccagctctcagtccagcagacagacccaccccaggctgactacagaggctgcacctcagcaaacaggcatgtcgggccccaggcctgtggtgctgagcgggccttcgggagctgggaagagcaccctgctgaagaggctgctccaggagcacagcggcatctttggcttcagcgtgtcccataccacgaggaacccgaggcccggcgaggagaacggcaaagattactactttgtaaccagggaggtgatgcagcgtgacatagcagccggcgacttcatcgagcatgccgagttctcggggaacctgtatggcacgagcaaggtggcggtgcaggccgtgcaggccatgaaccgcatctgtgtgctggacgtggacctgcagggtgtgcggaacatcaaggccaccgatctgcggcccatctacatctctgtgcagccgccttcactgcacgtgctggagcagcggctgcggcagcgcaacactgaaaccgaggagagcctggtgaagcggctggctgctgcccaggccgacatggagagcagcaaggagcccggcctgtttgatgtggtcatcattaacgacagcctggaccaggcctacgcagagctgaaggaggcgctctctgaggaaatcaagaaagctcaaaggaccggcgcctgaggcttgctgtctgttctcggcaccccgggcccatacaggaccagggcagcagcattgagccacccccttggcaggcgatacggcagctctgtgcccttggccagcatgtggagtggaggagatgctgcccctgtggttggaacatcctggggtgacccccgacccagcctcgctgggctgtcccctgtccctatctctcactctggacccagggctgacatcctaataaaataactgttggattagaaactcca

SEQ ID NO: 139452 - DNA, 689 bp, Homo sapiens
  Payload ID: 7340
  Gene Symbol: GUK1
  Gene Name: guanylate kinase 1
  ENST ID: ENST00000366721
  CDS Start-End: 35-634
tgcggccgccctgggccgggccccaccggacggcatgtcgggccccaggcctgtggtgctgagcgggccttcgggagctgggaagagcaccctgctgaagaggctgctccaggagcacagcggcatctttggcttcagcgtgtcccgtgagtccagggctctcgtggagggataccacgaggaacccgaggcccggcgaggagaacggcaaagggaggtgatgcagcgtgacatagcagccggcgacttcatcgagcatgccgagttctcggggaacctgtatggcacgagcaaggtggcggtgcaggccgtgcaggccatgaaccgcatctgtgtgctggacgtggacctgcagggtgtgcggaacatcaaggccaccgatctgcggcccatctacatctctgtgcagccgccttcactgcacgtgctggagcagcggctgcggcagcgcaacactgaaaccgaggagagcctggtgaagcggctggctgctgcccaggccgacatggagagcagcaaggagcccggcctgtttgatgtggtcatcattaacgacagcctggaccaggcctacgcagagctgaaggaggcgctctctgaggaaatcaagaaagctcaaaggaccggcgcctgaggcttgctgtctgttctcggcaccccgggcccatacaggaccagggcagcagcat

SEQ ID NO: 139453 - DNA, 850 bp, Homo sapiens
  Payload ID: 7340
  Gene Symbol: GUK1
  Gene Name: guanylate kinase 1
  ENST ID: ENST00000366722
  CDS Start-End: 69-797
gctggccgggctggctgcggccgccctgggccgggccccaccggacgcctctcttctcacccccaggcatgtcgggccccaggcctgtggtgctgagcgggccttcgggagctgggaagagcaccctgctgaagaggctgctccaggagcacagcggcatctttggcttcagcgtgtcccataccacgaggaacccgaggcccggcgaggagaacggcaaagattactactttgtaaccagggaggtgatgcagcgtgacatagcagccggcgacttcatcgagcatgccgagttctcggggaacctgtatggcacgagcaaggtggcggtgcaggccgtgcaggccatgaaccgcatctgtgtgctggacgtggacctgcagggtgtgcggaacatcaaggccaccgatctgcggcccatctacatctctgtgcagccgccttcactgcacgtgctgcggctgcggcagcgcaacactgaaaccgaggagagcctggtgaagcggctggctgctgcccaggccgacatggagagcagcaaggagcccggcctgtttgatgtggtcatcattaacgacagcctggaccaggcctacgcagagctgaaggaggcgctctctgaggtgggcccatccttgtgcctacctgggcaaggcccaaggggaggcctgggggccaggcctttgttgtccatgaggccactgaggaaatcaagaaagctcaaaggaccggcgcctgaggcttgctgtctgttctcggcaccccgggcccatacaggaccagggcagcagcattgagccacccccttggcaggcgatacggcagctctgtgcccttggccagcatgtgg

SEQ ID NO: 139454 - DNA, 845 bp, Homo sapiens
  Payload ID: 7340
  Gene Symbol: GUK1
  Gene Name: guanylate kinase 1
  ENST ID: ENST00000366723
  CDS Start-End: 2-709
gatgctgcggcgcccgctggccgggctggctgcggccgccctgggccgggccccaccggacggcatgtcgggccccaggcctgtggtgctgagcgggccttcgggagctgggaagagcaccctgctgaagaggctgctccaggagcacagcggcatctttggcttcagcgtgtcccataccacgaggaacccgaggcccggcgaggagaacggcaaagattactactttgtaaccagggaggtgatgcagcgtgacatagcagccggcgacttcatcgagcatgccgagttctcggggaacctgtatggcacgagcaaggtggcggtgcaggccgtgcaggccatgaaccgcatctgtgtgctggacgtggacctgcagggtgtgcggaacatcaaggccaccgatctgcggcccatctacatctctgtgcagccgccttcactgcacgtgctggagcagcggctgcggcagcgcaacactgaaaccgaggagagcctggtgaagcggctggctgctgcccaggccgacatggagagcagcccggctgggctggaaagctgtcccacagccgcagtgaggacagccgcaggcaaggagcccggcctgtttgatgtggtcatcattaacgacagcctggaccaggcctacgcagagctgaaggaggcgctctctgaggaaatcaagaaagctcaaaggaccggcgcctgaggcttgctgtctgttctcggcaccccgggcccatacaggaccagggcagcagcattgagccacccccttggcaggcgatacggcagctctgtgcccttggccagcatgtggagtggaggagatgctgcccctgtgg

SEQ ID NO: 139455 - DNA, 873 bp, Homo sapiens
  Payload ID: 7340
  Gene Symbol: GUK1
  Gene Name: guanylate kinase 1
  Uniprot ID: Q16774
  ENST ID: ENST00000366726
  CDS Start-End: 97-690
agaggtggccccggatgctgcggcgcccgctggccgggctggctgcggccgccctgggccgggccccaccggacgcctctcttctcacccccaggcatgtcgggccccaggcctgtggtgctgagcgggccttcgggagctgggaagagcaccctgctgaagaggctgctccaggagcacagcggcatctttggcttcagcgtgtcccataccacgaggaacccgaggcccggcgaggagaacggcaaagattactactttgtaaccagggaggtgatgcagcgtgacatagcagccggcgacttcatcgagcatgccgagttctcggggaacctgtatggcacgagcaaggtggcggtgcaggccgtgcaggccatgaaccgcatctgtgtgctggacgtggacctgcagggtgtgcggaacatcaaggccaccgatctgcggcccatctacatctctgtgcagccgccttcactgcacgtgctggagcagcggctgcggcagcgcaacactgaaaccgaggagagcctggtgaagcggctggctgctgcccaggccgacatggagagcagcaaggagcccggcctgtttgatgtggtcatcattaacgacagcctggaccaggcctacgcagagctgaaggaggcgctctctgaggaaatcaagaaagctcaaaggaccggcgcctgaggcttgctgtctgttctcggcaccccgggcccatacaggaccagggcagcagcattgagccacccccttggcaggcgatacggcagctctgtgcccttggccagcatgtggagtggaggagatgctgcccctgtggttggaacatcctggggtgacccccgacccagcctcgctgggctgtcc

SEQ ID NO: 139456 - DNA, 842 bp, Homo sapiens
  Payload ID: 7340
  Gene Symbol: GUK1
  Gene Name: guanylate kinase 1
  Uniprot ID: Q16774
  ENST ID: ENST00000366728
  CDS Start-End: 14-739
gaggtggccccggatgctgcggcgcccgctggccgggctggctgcggccgccctgggccgggccccaccggacggcatgtcgggccccaggcctgtggtgctgagcgggccttcgggagctgggaagagcaccctgctgaagaggctgctccaggagcacagcggcatctttggcttcagcgtgtcccataccacgaggaacccgaggcccggcgaggagaacggcaaagattactactttgtaaccagggaggtgatgcagcgtgacatagcagccggcgacttcatcgagcatgccgagttctcggggaacctgtatggcacgagcaaggtggcggtgcaggccgtgcaggccatgaaccgcatctgtgtgctggacgtggacctgcagggtgtgcggaacatcaaggccaccgatctgcggcccatctacatctctgtgcagccgccttcactgcacgtgctggagcagcggctgcggcagcgcaacactgaaaccgaggagagcctggtgaagcggctggctgctgcccaggccgacatggagagcagaaatcaagaaagctcaaaggaccggcgcctgaggcttgctgtctgttctcggcaccccgggcccatacaggaccagggcagcagcattgagccacccccttggcaggcgatacggcagctctgtgcccttggccagcatgtggagtggaggagatgctgcccctgtggttggaacatcctggggtgacccccgacccagcctcgctgggctgtcccctgtccctatctctcactctggacccagggctgacatcctaataaaataactgttggattagaaactccataaa

SEQ ID NO: 139457 - DNA, 937 bp, Homo sapiens
  Payload ID: 7340
  Gene Symbol: GUK1
  Gene Name: guanylate kinase 1
  Uniprot ID: Q16774
  ENST ID: ENST00000366730
  CDS Start-End: 201-794
cttctctgagtgacaagcgggacaagtacgccgtgggcggggccggcgggtcgtgatgttagttcgcgctgtgtggaggcgggccggcgtggcgctgtgacgcagcgggagaagacgggctgggagggcgctgtgctgaacgcccctgcggtcgcgacaggccagcgcaggtggaggcggggctagcgaggcactgaggcatgtcgggccccaggcctgtggtgctgagcgggccttcgggagctgggaagagcaccctgctgaagaggctgctccaggagcacagcggcatctttggcttcagcgtgtcccataccacgaggaacccgaggcccggcgaggagaacggcaaagattactactttgtaaccagggaggtgatgcagcgtgacatagcagccggcgacttcatcgagcatgccgagttctcggggaacctgtatggcacgagcaaggtggcggtgcaggccgtgcaggccatgaaccgcatctgtgtgctggacgtggacctgcagggtgtgcggaacatcaaggccaccgatctgcggcccatctacatctctgtgcagccgccttcactgcacgtgctggagcagcggctgcggcagcgcaacactgaaaccgaggagagcctggtgaagcggctggctgctgcccaggccgacatggagagcagcaaggagcccggcctgtttgatgtggtcatcattaacgacagcctggaccaggcctacgcagagctgaaggaggcgctctctgaggaaatcaagaaagctcaaaggaccggcgcctgaggcttgctgtctgttctcggcaccccgggcccatacaggaccagggcagcagcattgagccacccccttggcaggcgatacggcagctctgtgcccttggccagcatgtggagtggaggagatgctgcccctgtggttggaac

SEQ ID NO: 139458 - DNA, 990 bp, Homo sapiens
  Payload ID: 7340
  Gene Symbol: GUK1
  Gene Name: guanylate kinase 1
  Uniprot ID: Q16774
  ENST ID: ENST00000391865
  CDS Start-End: 76-732
agtctcgcgcgcgggcggaggtgggccggtgcggcgctgtcacgtaggttcagtgggcggaagaggtggccccggatgctgcggcgcccgctggccgggctggctgcggccgccctgggccgggccccaccggacggcatgtcgggccccaggcctgtggtgctgagcgggccttcgggagctgggaagagcaccctgctgaagaggctgctccaggagcacagcggcatctttggcttcagcgtgtcccataccacgaggaacccgaggcccggcgaggagaacggcaaagattactactttgtaaccagggaggtgatgcagcgtgacatagcagccggcgacttcatcgagcatgccgagttctcggggaacctgtatggcacgagcaaggtggcggtgcaggccgtgcaggccatgaaccgcatctgtgtgctggacgtggacctgcagggtgtgcggaacatcaaggccaccgatctgcggcccatctacatctctgtgcagccgccttcactgcacgtgctggagcagcggctgcggcagcgcaacactgaaaccgaggagagcctggtgaagcggctggctgctgcccaggccgacatggagagcagcaaggagcccggcctgtttgatgtggtcatcattaacgacagcctggaccaggcctacgcagagctgaaggaggcgctctctgaggaaatcaagaaagctcaaaggaccggcgcctgaggcttgctgtctgttctcggcaccccgggcccatacaggaccagggcagcagcattgagccacccccttggcaggcgatacggcagctctgtgcccttggccagcatgtggagtggaggagatgctgcccctgtggttggaacatcctggggtgacccccgacccagcctcgctgggctgtcccctgtccctatctctcactctggacccagggctgacatcctaataaaataactgttggattagaaactccataaa

SEQ ID NO: 139459 - DNA, 656 bp, Homo sapiens
  Payload ID: 7340
  Gene Symbol: GUK1
  Gene Name: guanylate kinase 1
  ENST ID: ENST00000453943
  CDS Start-End: 6-656
cccggatgctgcggcgcccgctggccgggctggctgcggccgccctgggccgggccccaccggacggcatgtcgggccccaggcctgtggtgctgagcgggccttcgggagctgggaagagcaccctgctgaagaggctgctccaggagcacagcggcatctttggcttcagcgtgtcccataccacgaggaacccgaggcccggcgaggagaacggcaaagattactactttgtaaccagggaggtgatgcagcgtgacatagcagccggcgacttcatcgagcatgccgagttctcggggaacctgtatggcacgagcaaggtggcggtgcaggccgtgcaggccatgaaccgcatctgtgtgctggacgtggacctgcagggtgtgcggaacatcaaggccaccgatctgcggcccatctacatctctgtgcagccgccttcactgcacgtgctggagcagcggctgcggcagcgcaacactgaaaccgaggagagcctggtgaagcggctggctgctgcccaggccgacatggagagcagcaaggagcccggcctgtttgatgtggtcatcattaacgacagcctggaccaggcctacgcagagctgaaggaggcgctctctgaggaaatcaagaaagctcaaaggaccggc

SEQ ID NO: 139460 - DNA, 865 bp, Homo sapiens
  Payload ID: 7340
  Gene Symbol: GUK1
  Gene Name: guanylate kinase 1
  ENST ID: ENST00000435153
  CDS Start-End: 48-865
ctggccgggctggctgcggccgccctgggccgggccccaccggacggatggctggaagccagaaggaggagattatgccgccacagcagggagtgcctttccaggaaagcggctgctggggcagcatgggagcccagtccagggagcgttctggcagagaccattccggaacatggatctgcgccggcggctcccaggagaccttccatctcggagctcctgtggagaccacgtgcctggcagcctctcttctcacccccaggcatgtcgggccccaggcctgtggtgctgagcgggccttcgggagctgggaagagcaccctgctgaagaggctgctccaggagcacagcggcatctttggcttcagcgtgtcccataccacgaggaacccgaggcccggcgaggagaacggcaaagggaggtgatgcagcgtgacatagcagccggcgacttcatcgagcatgccgagttctcggggaacctgtatggcacgagcaaggtggcggtgcaggccgtgcaggccatgaaccgcatctgtgtgctggacgtggacctgcagggtgtgcggaacatcaaggccaccgatctgcggcccatctacatctctgtgcagccgccttcactgcacgtgctggagcagcggctgcggcagcgcaacactgaaaccgaggagagcctggtgaagcggctggctgctgcccaggccgacatggagagcagaaatcaagaaagctcaaaggaccggcgcctgaggcttgctgtctgttctcggcaccccgggcccatacaggaccagggcagcagcattgagccacccccttggcaggcgatacggcagctctgtgcccttggccagcatgtgga

SEQ ID NO: 139461 - DNA, 1012 bp, Homo sapiens
  Payload ID: 7340
  Gene Symbol: GUK1
  Gene Name: guanylate kinase 1
  ENST ID: ENST00000412265
  CDS Start-End: 253-1012
tgaaggccaggatgcgtgctacccggatgtgtgcccagaaaccctgcagccaagagcagccgcctggaccaccagcctccccttcatccacctggcccagcccagagcccaggcccacgtctggtggtttgtgtcttacgagaggccaggcgggggctgaattctctcggttctcagaaggtcaagccctctgttagcatctcctcgaacagtgggccgggggcaaggtggtgactctgttcagtccttaggatggctggaagccagaaggaggagattatgccgccacagcagggagtgcctttccaggaaagcggctgctggggcagcatgggagcccagtccagggagcgttctggcagagaccattccggaacatggatctgcgccggcggctcccaggagaccttccatctcggagctcctgtggagaccacgtgcctggcaggcatgtcgggccccaggcctgtggtgctgagcgggccttcgggagctgggaagagcaccctgctgaagaggctgctccaggagcacagcggcatctttggcttcagcgtgtcccataccacgaggaacccgaggcccggcgaggagaacggcaaagattactactttgtaaccagggaggtgatgcagcgtgacatagcagccggcgacttcatcgagcatgccgagttctcggggaacctgtatggcacgagcaaggtggcggtgcaggccgtgcaggccatgaaccgcatctgtgtgctggacgtggacctgcagggtgtgcggaacatcaaggccaccgatctgcggcccatctacatctctgtgcagccgccttcactgcacgtgctggagcagcggctgcggcagcgcaacactgaaaccgaggagagcctggtgaagcggctggctgctgcccaggccgacatggagagcagcaaggagcccggcctgtttgatgtggtcatcattaacgacagcctggaccaggcctacgcagagctgaaggaggcgctctctgagg

SEQ ID NO: 139462 - DNA, 1593 bp, Homo sapiens
  Payload ID: 7341
  Gene Symbol: GUCD1
  Gene Name: guanylyl cyclase domain containing 1
  Uniprot ID: Q96NT3
  ENST ID: ENST00000398245
  CDS Start-End: 181-900
ctggaagggctggggcggcgcttggggcggcccagccgccgcctcccgttctctcctccgcagcggcggcggtggcggagaaggaactcgacacgcaccgaccgccctcccgccccagccgaagcggaagctgtagcccgctctgggccggggccatgggcgccccgcgccgcccgggtcatgaggacggaggcggaggcagcggggccgccgctcgagcccggggactttgtgcaactgcctgtgcccgtcatccagcagctctaccactgggactgtggcctggcctgctccaggatggtgctgcggtacctgggccagctggacgacagtgagtttgagagagccctgcagaagctgcagctgaccaggagcatctggaccatcgacctggcctacctgatgcaccactttggcgtgaggcaccgcttctgtacccagaccctgggtgtcgacaagggctacaagaaccagtccttctacaggaagcactttgacacagaagagacccgggtgaatcagctgtttgcacaagcaaaggcctgcaaggtgctggtggagaaatgcacagtgagtgtgaaggacatccaggcgcacctggctcagggccatgtggccatcgtgctggtgaactcgggggtgctgcactgtgacctgtgctccagccctgtcaagtactgctgcttcacccccagtggccaccactgcttctgccgcactcctgactaccagggccacttcatcgtgctgcgtggctacaaccgggccactggctgcatcttctacaacaacccagcctatgccgaccgaatgtgcagcaccagcatcagtaactttgaggaggccagaaccagctatggcacagatgaggacatcctctttgtctacttggacagctgacagcaggagcctggtgcgcctaggccctcggaccccatccccaccccagccgggcccgctcaggatgccctggagtacccatgcacagcagctgtggggtgtgggcatcttcaggtggtgttctggtaaaattgttagaatagctgtatgaaggaaaccagtgggaggaaatgaagttttcaggatggtgggatgtgatttagacagtgcacatgctgttagggctgtcactagggagtggccttcatggagggtggtaacagcacctcagtccagccaaaatgtttagaaacactcagtctctggtcccagaggatggcttctcagggcatgccacaagttaaaggtcaccttcctgaaagatgaatgagaaagctgcccattctcaagactcatctgcctagggagggtcacagaggcaggatgtaagacacactgtgttgcattcttgcacaagtcatgaaaatggagccagagagcctggacatcagggacttttgcccacagcacatgacaccgacagctgcccagcctgttcacatgctggggaccagcacagcacctgaagccatgtgggacagttgggctttgttcattctagccacggggatgaaagggatcttttgcattgcagagattttatatatattttgtttgtaatgagccattctcaataaacattattctcactgc

SEQ ID NO: 139463 - DNA, 1606 bp, Homo sapiens
  Payload ID: 7341
  Gene Symbol: GUCD1
  Gene Name: guanylyl cyclase domain containing 1
  Uniprot ID: Q96NT3
  ENST ID: ENST00000404664
  CDS Start-End: 111-998
cctttccccagtgttgagcgcggtctcgcctccgcttcctcctcactccgcctgccggctgggaaactagggcaccagtacgatagttccggcaccggaaaagagggctgatgactgggcccgggggccgccgcaacgacccttggggccggcaaagagccagagagggtgctcacacttccaagcaccccacaccaaggacaggctggacggcaaggcggagacgcggggcttgggccctcagaccggggacagcaggaggttgggccaagggccaggacttcccgtcacaatttcatttgttgatcccggcaccgccaggggactttgtgcaactgcctgtgcccgtcatccagcagctctaccactgggactgtggcctggcctgctccaggatggtgctgcggtacctgggccagctggacgacagtgagtttgagagagccctgcagaagctgcagctgaccaggagcatctggaccatcgacctggcctacctgatgcaccactttggcgtgaggcaccgcttctgtacccagaccctgggtgtcgacaagggctacaagaaccagtccttctacaggaagcactttgacacagaagagacccgggtgaatcagctgtttgcacaagcaaaggcctgcaaggtgctggtggagaaatgcacagtgagtgtgaaggacatccaggcgcacctggctcagggccatgtggccatcgtgctggtgaactcgggggtgctgcactgtgacctgtgctccagccctgtcaagtactgctgcttcacccccagtggccaccactgcttctgccgcactcctgactaccagggccacttcatcgtgctgcgtggctacaaccgggccactggctgcatcttctacaacaacccagcctatgccgaccgaatgtgcagcaccagcatcagtaactttgaggaggccagaaccagctatggcacagatgaggacatcctctttgtctacttggacagctgacagcaggagcctggtgcgcctaggccctcggaccccatccccaccccagccgggcccgctcaggatgccctggcccaggcttggggctgctggggttggaatgtggaactgcagcctcagcccatctggcagagtcccaggaactcggagactggcacagctgctttgtctgccagtgccgtgtgttgtcatgtcactcaccccaagcacctgctggctgctggaagcataccccaagaccccaagccttgactccagctgcgcccacaggaagtccagtcccgacagtgcccttgttgcctttgagccagatccatggcaatggtctccccacagaccgcaggactgagcctggagagagaagttgcttgacggatgccacttgtcaggacagtatgtgagtgtctggagacagcatagctgaccccaatcccccagggctgaggacccctccaggcccctctctcctggaagtgctgcatatgcccctgtgcccagtggttgatgataccaccaccacctgcctacccatgggcccaagtttctgtggctcattacagggcatctgacccctgccacccagcatagacacacctcacagctgccct

SEQ ID NO: 139464 - DNA, 865 bp, Homo sapiens
  Payload ID: 7341
  Gene Symbol: GUCD1
  Gene Name: guanylyl cyclase domain containing 1
  ENST ID: ENST00000402766
  CDS Start-End: 135-548
cgttctctcctccgcagcggcggcggtggcggagaaggaactcgacacgcaccgaccgccctcccgccccagccgaagcggaagctgtagcccgctctgggccggggccatgggcgccccgcgccgcccgggtcatgaggacggaggcggaggcagcggggccgccgctcgagcccggggactttgtgcaactgcctgtgcccgtcatccagcagctctaccactgggactgtggcctggcctgctccaggatggtgctgcggtacctgggccagctggacgacagtgagtttgagagagccctgcagaagctgcagctgaccaggagcatctggaccatcgacctggcctacctgatgcaccactttggcgtgaggcaccgcttctgtacccagaccctgggtgtcgacaagggctacaagaaccagtccttctacaggaagcactttgacacagaagagacccgggtgaatcagctgtttgcacaagcaaaggcctgcaaggtgctggtggagaaatgcaggaatgtgcagcaccagcatcagtaactttgaggaggccagaaccagctatggcacagatgaggacatcctctttgtctacttggacagctgacagcaggagcctggtgcgcctaggccctcggaccccatccccaccccagccgggcccgctcaggatgccctggcccaggcttggggctgctggggttggaatgtggaactgcagcctcagcccatctggcagagtcccaggaactcggagactggcacagctgctttgtctgccagtgccgtgtgttgtcatgtcactcaccccaagcacctgctggctgctggaagcataccccaagaccccaagcctt

SEQ ID NO: 139465 - DNA, 773 bp, Homo sapiens
  Payload ID: 7341
  Gene Symbol: GUCD1
  Gene Name: guanylyl cyclase domain containing 1
  ENST ID: ENST00000407973
  CDS Start-End: 391-773
agtacgatagttccggcaccggaaaagagggctgatgactgggcccgggggccgccgcaacgacccttggggccggcaaagagccagagagggtgctcacacttccaagcaccccacaccaaggacaggctggacggcaaggcggagacgcggggcttgggccctcagaccggggacagcaggaggttgggccaagggccaggacttcccgtcacaatttcatttgttgatcccggcaccgccagccgccgcctcccgttctctcctccgcagcggcggcggtggcggagaaggaactcgacacgcaccgaccgccctcccgccccagccgaagcggaagctgtagcccgctctgggccggggccatgggcgccccgcgccgcccgggtcatgaggacggaggcggaggcagcggggccgccgctcgagcccggggactttgtgcaactgcctgtgcccgtcatccagcagctctaccactgggactgtggcctggcctgctccaggatggtgctgcggtacctgggccagctggacgacagtgagtttgagagagccctgcagaagctgcagctgaccaggagcatctggaccatcgacctggcctacctgatgcaccactttggcgtgaggcaccgcttctgtacccagaccctgggtgtcgacaagggctacaagaaccagtccttctacaggaagcactttgacacagaagagacccgggtgaatcagctgtttgcacaagcaaaggcctgcaaggtgctggtggagaa

SEQ ID NO: 139466 - DNA, 3482 bp, Homo sapiens
  Payload ID: 7341
  Gene Symbol: GUCD1
  Gene Name: guanylyl cyclase domain containing 1
  Uniprot ID: Q96NT3
  ENST ID: ENST00000407471
  CDS Start-End: 192-914
agattcgagacctggaagggctggggcggcgcttggggcggcccagccgccgcctcccgttctctcctccgcagcggcggcggtggcggagaaggaactcgacacgcaccgaccgccctcccgccccagccgaagcggaagctgtagcccgctctgggccggggccatgggcgccccgcgccgcccgggtcatgaggacggaggcggaggcagcggggccgccgctcgagcccggggactttgtgcaactgcctgtgcccgtcatccagcagctctaccactgggactgtggcctggcctgctccaggatggtgctgcggtacctgggccagctggacgacagtgagtttgagagagccctgcagaagctgcagctgaccaggagcatctggaccatcgacctggcctacctgatgcaccactttggcgtgaggcaccgcttctgtacccagaccctgggtgtcgacaagggctacaagaaccagtccttctacaggaagcactttgacacagaagagacccgggtgaatcagctgtttgcacaagcaaaggcctgcaaggtgctggtggagaaatgcacagtgagtgtgaaggacatccaggcgcacctggctcagggccatgtggccatcgtgctggtgaactcgggggtgctgcactgtgacctgtgctccagccctgtcaagtactgctgcttcacccccagtggccaccactgcttctgccgcactcctgactaccagggccacttcatcgtgctgcgtggctacaaccgggccactggctgcatcttctacaacaacccagcctatgccgacccaggaatgtgcagcaccagcatcagtaactttgaggaggccagaaccagctatggcacagatgaggacatcctctttgtctacttggacagctgacagcaggagcctggtgcgcctaggccctcggaccccatccccaccccagccgggcccgctcaggatgccctggcccaggcttggggctgctggggttggaatgtggaactgcagcctcagcccatctggcagagtcccaggaactcggagactggcacagctgctttgtctgccagtgccgtgtgttgtcatgtcactcaccccaagcacctgctggctgctggaagcataccccaagaccccaagccttgactccagctgcgcccacaggaagtccagtcccgacagtgcccttgttgcctttgagccagatccatggcaatggtctccccacagaccgcaggactgagcctggagagagaagttgcttgacggatgccacttgtcaggacagtatgtgagtgtctggagacagcatagctgaccccaatcccccagggctgaggacccctccaggcccctctctcctggaagtgctgcatatgcccctgtgcccagtggttgatgataccaccaccacctgcctacccatgggcccaagtttctgtggctcattacagggcatctgacccctgccacccagcatagacacacctcacagctgccctgccatgcagagccctggccgctggagactcttaaagcccccacagccctccaggtcctccagctctgtcagatggagggctctcgggcctagatcccactggtaggcctcgtggctggcagcagtgctctgggaataaacagctgccctagccccagagggatccctgcacccaggaggcctcctgacaccagccaaaatcctgacagcagggtctgccctcttgagtgtggggagcccctagtcctttaaggttggctgctaaggcctgtgctccaaagcaacgggctggggcagcctgcagctgcccacccaacctggtcttcacaccagattgcacaggatactgggtcttgtctatcttgatggagaagaggggttcctgcccaggatcttacaacacagcaagtagcatagagctctttccttcctcttttttggggaggttggggtcaggggttgtttctttgagatttaagttttcatttttgaggggtaatcaccttcaagtaaaacagtaatagcaagagtgaaggtactttggaaccactaacacctctgcacagggcagttagccagctcaagttctttttcagagaaagggacttggccagtggtttaagtacctgccccttcacctctcagacgaggcagctgacgaggcagctggcccagtcttgggagtctgctcaggacagtggtggagctgggtcttgaaccccagtctgcacctaaaaaactaaaggaaatggatttttttttttttttttgagacggagactcactctgttgcccagactggagtgcagtggcacgatcttggcttactacaacctccgcctcctgggttcaagcgatcctcctgcctcagccccccactagctgggactacaggcacatgccaccatgcccggctaatttttttgtatttttagtagagaccaggcttcgccatgttggccaggctggtctcgaacccctgagctcaggtgatccacctgcctcggcctcccaaagtgggaaatgggtcattttcaaaggggcaacagtgataccatccctgcactcctgggtcctgctcttccaatgcccaaggcatggcatggtggcagctgtgcccccgcccattgctttggagcacagatgactctgggggcagaggtgggctctgtttaggagggcagtgagaccacccagccaaattgcttctcaaccctagacaaagcctttggccaagagggaggtgctgttagttgggcagcccttctgggtttcagagaccggtgttggctctagactggtctcatctccattgccttaatgccaggtggcccaggagtacccatgcacagcagctgtggggtgtgggcatcttcaggtggtgttctggtaaaattgttagaatagctgtatgaaggaaaccagtgggaggaaatgaagttttcaggatggtgggatgtgatttagacagtgcacatgctgttagggctgtcactagggagtggccttcatggagggtggtaacagcacctcagtccagccaaaatgtttagaaacactcagtctctggtcccagaggatggcttctcagggcatgccacaagttaaaggtcaccttcctgaaagatgaatgagaaagctgcccattctcaagactcatctgcctagggagggtcacagaggcaggatgtaagacacactgtgttgcattcttgcacaagtcatgaaaatggagccagagagcctggacatcagggacttttgcccacagcacatgacaccgacagctgcccagcctgttcacatgctggggaccagcacagcacctgaagccatgtgggacagttgggctttgttcattctagccacggggatgaaagggatcttttgcattgcagagattttatatatattttgtttgtaatgagccattctcaataaacattattctcactgcaaaa

SEQ ID NO: 139467 - DNA, 895 bp, Homo sapiens
  Payload ID: 7341
  Gene Symbol: GUCD1
  Gene Name: guanylyl cyclase domain containing 1
  ENST ID: ENST00000447813
  CDS Start-End: 99-509
ggaactcgacacgcaccgaccgccctcccgccccagccgaagcggaagctgtagcccgctctgggccggggccatgggcgccccgcgccgcccgggtcatgaggacggaggcggaggcagcggggccgccgctcgagcccggggactttgtgcaactgcctgtgcccgtcatccagcagctctaccactgggactgtggcctggcctgctccaggatggtgctgcggtacctgggccagctggacgacagtgagtttgagagagccctgcagaagctgcagctgaccaggagcatctggaccatcgacctggcctacctgatgcaccactttggcgtgaggcaccgcttctgtacccagaccctgggtgtcgacaagggctacaagaaccagtccttctacaggaagcactttgacacagaagagacccgggtgaatcagctgtttgcacaagcaaaggcctgcaaggtgctggtggagaaatggaatgtgcagcaccagcatcagtaactttgaggaggccagaaccagctatggcacagatgaggacatcctctttgtctacttggacagctgacagcaggagcctggtgcgcctaggccctcggaccccatccccaccccagccgggcccgctcaggatgccctggcccaggcttggggctgctggggttggaatgtggaactgcagcctcagcccatctggcagagtcccaggaactcggagactggcacagctgctttgtctgccagtgccgtgtgttgtcatgtcactcaccccaagcacctgctggctgctggaagcataccccaagaccccaagccttgactccagctgcgcccacaggaagtccagtcccgacagtgcccttgttgcctttgagccagatccatgg

SEQ ID NO: 139468 - DNA, 3613 bp, Homo sapiens
  Payload ID: 7341
  Gene Symbol: GUCD1
  Gene Name: guanylyl cyclase domain containing 1
  Uniprot ID: Q96NT3
  ENST ID: ENST00000435822
  CDS Start-End: 326-1045
gcgcgaggattgggcgagagggtggggccactcaacgctgaggcggcgaatggccggagcagacttaaatcaagaggctggggacctctaagatcaaagtttggggcggggcctaaggagggggcggggcctccagattcgagacctggaagggctggggcggcgcttggggcggcccagccgccgcctcccgttctctcctccgcagcggcggcggtggcggagaaggaactcgacacgcaccgaccgccctcccgccccagccgaagcggaagctgtagcccgctctgggccggggccatgggcgccccgcgccgcccgggtcatgaggacggaggcggaggcagcggggccgccgctcgagcccggggactttgtgcaactgcctgtgcccgtcatccagcagctctaccactgggactgtggcctggcctgctccaggatggtgctgcggtacctgggccagctggacgacagtgagtttgagagagccctgcagaagctgcagctgaccaggagcatctggaccatcgacctggcctacctgatgcaccactttggcgtgaggcaccgcttctgtacccagaccctgggtgtcgacaagggctacaagaaccagtccttctacaggaagcactttgacacagaagagacccgggtgaatcagctgtttgcacaagcaaaggcctgcaaggtgctggtggagaaatgcacagtgagtgtgaaggacatccaggcgcacctggctcagggccatgtggccatcgtgctggtgaactcgggggtgctgcactgtgacctgtgctccagccctgtcaagtactgctgcttcacccccagtggccaccactgcttctgccgcactcctgactaccagggccacttcatcgtgctgcgtggctacaaccgggccactggctgcatcttctacaacaacccagcctatgccgaccgaatgtgcagcaccagcatcagtaactttgaggaggccagaaccagctatggcacagatgaggacatcctctttgtctacttggacagctgacagcaggagcctggtgcgcctaggccctcggaccccatccccaccccagccgggcccgctcaggatgccctggcccaggcttggggctgctggggttggaatgtggaactgcagcctcagcccatctggcagagtcccaggaactcggagactggcacagctgctttgtctgccagtgccgtgtgttgtcatgtcactcaccccaagcacctgctggctgctggaagcataccccaagaccccaagccttgactccagctgcgcccacaggaagtccagtcccgacagtgcccttgttgcctttgagccagatccatggcaatggtctccccacagaccgcaggactgagcctggagagagaagttgcttgacggatgccacttgtcaggacagtatgtgagtgtctggagacagcatagctgaccccaatcccccagggctgaggacccctccaggcccctctctcctggaagtgctgcatatgcccctgtgcccagtggttgatgataccaccaccacctgcctacccatgggcccaagtttctgtggctcattacagggcatctgacccctgccacccagcatagacacacctcacagctgccctgccatgcagagccctggccgctggagactcttaaagcccccacagccctccaggtcctccagctctgtcagatggagggctctcgggcctagatcccactggtaggcctcgtggctggcagcagtgctctgggaataaacagctgccctagccccagagggatccctgcacccaggaggcctcctgacaccagccaaaatcctgacagcagggtctgccctcttgagtgtggggagcccctagtcctttaaggttggctgctaaggcctgtgctccaaagcaacgggctggggcagcctgcagctgcccacccaacctggtcttcacaccagattgcacaggatactgggtcttgtctatcttgatggagaagaggggttcctgcccaggatcttacaacacagcaagtagcatagagctctttccttcctcttttttggggaggttggggtcaggggttgtttctttgagatttaagttttcatttttgaggggtaatcaccttcaagtaaaacagtaatagcaagagtgaaggtactttggaaccactaacacctctgcacagggcagttagccagctcaagttctttttcagagaaagggacttggccagtggtttaagtacctgccccttcacctctcagacgaggcagctgacgaggcagctggcccagtcttgggagtctgctcaggacagtggtggagctgggtcttgaaccccagtctgcacctaaaaaactaaaggaaatggatttttttttttttttttgagacggagactcactctgttgcccagactggagtgcagtggcacgatcttggcttactacaacctccgcctcctgggttcaagcgatcctcctgcctcagccccccactagctgggactacaggcacatgccaccatgcccggctaatttttttgtatttttagtagagaccaggcttcgccatgttggccaggctggtctcgaacccctgagctcaggtgatccacctgcctcggcctcccaaagtgggaaatgggtcattttcaaaggggcaacagtgataccatccctgcactcctgggtcctgctcttccaatgcccaaggcatggcatggtggcagctgtgcccccgcccattgctttggagcacagatgactctgggggcagaggtgggctctgtttaggagggcagtgagaccacccagccaaattgcttctcaaccctagacaaagcctttggccaagagggaggtgctgttagttgggcagcccttctgggtttcagagaccggtgttggctctagactggtctcatctccattgccttaatgccaggtggcccaggagtacccatgcacagcagctgtggggtgtgggcatcttcaggtggtgttctggtaaaattgttagaatagctgtatgaaggaaaccagtgggaggaaatgaagttttcaggatggtgggatgtgatttagacagtgcacatgctgttagggctgtcactagggagtggccttcatggagggtggtaacagcacctcagtccagccaaaatgtttagaaacactcagtctctggtcccagaggatggcttctcagggcatgccacaagttaaaggtcaccttcctgaaagatgaatgagaaagctgcccattctcaagactcatctgcctagggagggtcacagaggcaggatgtaagacacactgtgttgcattcttgcacaagtcatgaaaatggagccagagagcctggacatcagggacttttgcccacagcacatgacaccgacagctgcccagcctgttcacatgctggggaccagcacagcacctgaagccatgtgggacagttgggctttgttcattctagccacggggatgaaagggatcttttgcattgcagagattttatatatattttgtttgtaatgagccattctcaataaacattattctcactgcaaaa

SEQ ID NO: 139469 - DNA, 3584 bp, Homo sapiens
  Payload ID: 7341
  Gene Symbol: GUCD1
  Gene Name: guanylyl cyclase domain containing 1
  ENST ID: ENST00000621833
  CDS Start-End: 111-1001
cctttccccagtgttgagcgcggtctcgcctccgcttcctcctcactccgcctgccggctgggaaactagggcaccagtacgatagttccggcaccggaaaagagggctgatgactgggcccgggggccgccgcaacgacccttggggccggcaaagagccagagagggtgctcacacttccaagcaccccacaccaaggacaggctggacggcaaggcggagacgcggggcttgggccctcagaccggggacagcaggaggttgggccaagggccaggacttcccgtcacaatttcatttgttgatcccggcaccgccaggggactttgtgcaactgcctgtgcccgtcatccagcagctctaccactgggactgtggcctggcctgctccaggatggtgctgcggtacctgggccagctggacgacagtgagtttgagagagccctgcagaagctgcagctgaccaggagcatctggaccatcgacctggcctacctgatgcaccactttggcgtgaggcaccgcttctgtacccagaccctgggtgtcgacaagggctacaagaaccagtccttctacaggaagcactttgacacagaagagacccgggtgaatcagctgtttgcacaagcaaaggcctgcaaggtgctggtggagaaatgcacagtgagtgtgaaggacatccaggcgcacctggctcagggccatgtggccatcgtgctggtgaactcgggggtgctgcactgtgacctgtgctccagccctgtcaagtactgctgcttcacccccagtggccaccactgcttctgccgcactcctgactaccagggccacttcatcgtgctgcgtggctacaaccgggccactggctgcatcttctacaacaacccagcctatgccgacccaggaatgtgcagcaccagcatcagtaactttgaggaggccagaaccagctatggcacagatgaggacatcctctttgtctacttggacagctgacagcaggagcctggtgcgcctaggccctcggaccccatccccaccccagccgggcccgctcaggatgccctggcccaggcttggggctgctggggttggaatgtggaactgcagcctcagcccatctggcagagtcccaggaactcggagactggcacagctgctttgtctgccagtgccgtgtgttgtcatgtcactcaccccaagcacctgctggctgctggaagcataccccaagaccccaagccttgactccagctgcgcccacaggaagtccagtcccgacagtgcccttgttgcctttgagccagatccatggcaatggtctccccacagaccgcaggactgagcctggagagagaagttgcttgacggatgccacttgtcaggacagtatgtgagtgtctggagacagcatagctgaccccaatcccccagggctgaggacccctccaggcccctctctcctggaagtgctgcatatgcccctgtgcccagtggttgatgataccaccaccacctgcctacccatgggcccaagtttctgtggctcattacagggcatctgacccctgccacccagcatagacacacctcacagctgccctgccatgcagagccctggccgctggagactcttaaagcccccacagccctccaggtcctccagctctgtcagatggagggctctcgggcctagatcccactggtaggcctcgtggctggcagcagtgctctgggaataaacagctgccctagccccagagggatccctgcacccaggaggcctcctgacaccagccaaaatcctgacagcagggtctgccctcttgagtgtggggagcccctagtcctttaaggttggctgctaaggcctgtgctccaaagcaacgggctggggcagcctgcagctgcccacccaacctggtcttcacaccagattgcacaggatactgggtcttgtctatcttgatggagaagaggggttcctgcccaggatcttacaacacagcaagtagcatagagctctttccttcctcttttttggggaggttggggtcaggggttgtttctttgagatttaagttttcatttttgaggggtaatcaccttcaagtaaaacagtaatagcaagagtgaaggtactttggaaccactaacacctctgcacagggcagttagccagctcaagttctttttcagagaaagggacttggccagtggtttaagtacctgccccttcacctctcagacgaggcagctgacgaggcagctggcccagtcttgggagtctgctcaggacagtggtggagctgggtcttgaaccccagtctgcacctaaaaaactaaaggaaatggatttttttttttttttttgagacggagactcactctgttgcccagactggagtgcagtggcacgatcttggcttactacaacctccgcctcctgggttcaagcgatcctcctgcctcagccccccactagctgggactacaggcacatgccaccatgcccggctaatttttttgtatttttagtagagaccaggcttcgccatgttggccaggctggtctcgaacccctgagctcaggtgatccacctgcctcggcctcccaaagtgggaaatgggtcattttcaaaggggcaacagtgataccatccctgcactcctgggtcctgctcttccaatgcccaaggcatggcatggtggcagctgtgcccccgcccattgctttggagcacagatgactctgggggcagaggtgggctctgtttaggagggcagtgagaccacccagccaaattgcttctcaaccctagacaaagcctttggccaagagggaggtgctgttagttgggcagcccttctgggtttcagagaccggtgttggctctagactggtctcatctccattgccttaatgccaggtggcccaggagtacccatgcacagcagctgtggggtgtgggcatcttcaggtggtgttctggtaaaattgttagaatagctgtatgaaggaaaccagtgggaggaaatgaagttttcaggatggtgggatgtgatttagacagtgcacatgctgttagggctgtcactagggagtggccttcatggagggtggtaacagcacctcagtccagccaaaatgtttagaaacactcagtctctggtcccagaggatggcttctcagggcatgccacaagttaaaggtcaccttcctgaaagatgaatgagaaagctgcccattctcaagactcatctgcctagggagggtcacagaggcaggatgtaagacacactgtgttgcattcttgcacaagtcatgaaaatggagccagagagcctggacatcagggacttttgcccacagcacatgacaccgacagctgcccagcctgttcacatgctggggaccagcacagcacctgaagccatgtgggacagttgggctttgttcattctagccacggggatgaaagggatcttttgcattgcagagattttatatatattttgtttgtaatgagccattctcaataaacattattctcactgcaaaatggtggtagcccctg

SEQ ID NO: 139470 - DNA, 4449 bp, Homo sapiens
  Payload ID: 7342
  Gene Symbol: GUF1
  Gene Name: GUF1 homolog, GTPase
  Uniprot ID: Q8N442
  ENST ID: ENST00000281543
  CDS Start-End: 195-2204
caagctgcgccgccgcttcgggttgcttccggatctggtacttgggcagagctccccggggttcattgtcttcgcttcacaggatctgtttgagtcctgtccaccggatcctacggggggtaccttcgaaaaaaaacgggctatgctgctgttgcgtgtgggtaccctctcctgacgcctccgccgcccgggtcatgtggaccctcgtgggtcggggctgggggtgcgcacgcgctctcgcgccacgagccactggggccgcgcttctggtggccccggggccccggtccgcgccgacccttggggctgctccagagtcctgggctaccgacaggctctacagctccgcagaattcaaggaaaaacttgacatgtctaggtttcctgttgaaaatattagaaatttcagtattgttgcacacgtggatcatggcaaaagtactttagctgacaggctcctagaacttacagggacaattgataaaacaaagaataataagcaggttcttgataaattgcaagtggaacgagaaagaggaatcactgttaaagcacagacagcatctctcttttacaattgtgaaggaaagcagtaccttttaaatctcattgatacaccgggccatgttgattttagttatgaagtatccaggtcactttctgcttgccagggtgttttacttgtggttgatgcaaatgagggaattcaagcccaaactgtagcaaacttctttcttgccttcgaagcacagctatcggtaattccagttataaataagatagatctgaagaatgctgatcctgaaagggttgaaaaccaaattgagaaagtgtttgatattccaagtgatgaatgtattaagatttctgctaaacttggaacaaatgttgagagtgttcttcaggcaattattgaaagaatcccccctcctaaagtgcatcgcaaaaatcctctgagagctttggtatttgactccacctttgaccagtatagaggtgtgatagccaatgtagcattatttgacggagtggtttccaaaggagataaaattgtatctgcacatactcaaaagacatacgaagttaatgaagtaggagtcttgaatcctaatgagcagccaactcataaattatatgcaggacaggtgggctatctgattgctgggatgaaagatgtcactgaagcgcaaataggagatacattatgtttacataagcaaccagtggagcccttgcctgggtttaaatcagcgaaaccaatggtatttgcaggaatgtatcctctagaccaatctgaatataacaatctgaagagtgctatagaaaaactgactttaaatgattccagtgtgaccgttcatcgggatagtagccttgctctgggtgctggctggaggctaggatttcttggacttttgcacatggaagttttcaaccagcgactggagcaagaatataatgcttctgttattttaacaacccctactgttccatataaagctgtactgtcatcatcaaaattgataaaggaacatagagaaaaagaaattacaattatcaatcctgcacaattccccgataaatcaaaagtaacagaatatttggagccagttgttttgggcactattatcacaccagatgaatacactggaaaaataatgatgctttgcgaggctcgaagagcagttcagaagaatatgatatttattgatcaaaatagagttatgcttaaatatctctttcctttgaatgaaattgtggtagatttttatgactctttgaaatccctatcttctggatatgctagttttgattacgaagatgcaggctaccagactgcagaacttgtaaaaatggatattctactgaatggaaatactgtagaggagctagtaactgttgtacacaaagacaaagctcattcaattggcaaagccatatgtgaacggctgaaggattctcttcctaggcaactgtttgagatagcaattcaagctgctattggaagtaaaatcattgcaagagaaactgtgaaagcctataggaaaaacgttttggcaaaatgttatggtggtgatattacccgaaaaatgaagcttttgaagagacaagcagaagggaaaaaaaagctgaggaaaattggcaacgttgaagttccaaaagatgcttttataaaagttctgaaaacacaatcttctaaataattggtgggaaaacaaagaattttcattgcaatttgtaatatgctgacaacagaaagaaaattataaaatttgcttgttactttcagggtattcaggttcaaataacctactagtctttcgttgaaagggagtagttagtgggtaggcaagagcttagattttgaagccatgttgcctgttctcaaatatctgttccaaccactcactagtaaggtgaccgtggccagattaacctttgtttcctcttcagtaaaatcgagattatactactacctacataagttgttgttgtgaagattaaatgaggtaatacgttaaatattcagaggtgcaagacacatagtaagcactcaattgtaactacagttaagtccttaaatgccatcgaaaggttcttagaaactgactttaagcaaaatgacacgtagcacaatgttcttgaatgatgtcatttccttaagtggtttgtaacatcgatgaggaaaaaaaattggtttatgcgtcatttcattttatttttatttattttttgagacagagtcttgccctgtcgcccaggctggagtgcaatggcacaatctcgactcactgcaacctctgcctcctgggttcaagagattctcctgcctcagcctccattacaggcgtgcaccaccatgctcggctaattttttgtatctttagtagagtcggggtttcaccatgttggccaggctggtcttgaactcctgacctcgtgatccacccaccgtggcctcccaaagtgctgattacaggtgtgagccaccatgcccagccatgtcatttcatttaaagtcacaatttccatgaatctcaacaagtgaggacctgctatattttgttgcatgcagtttttctttacggacactaaaaggccccatacttaagattccatctactttaagtttaaaggattttcagaatcaccttaagtgtcaaatttgttagcaggattaattgatatgaattcacttattaaacagtaaactcaaataacatagacatcaaataacagacatctgctctagttaatgataaaatgtttatagattttatcaggtggttagtttgaaactaaatggtttacatctaaattaagggcaggagctgtctttcagacattcaaaacgcatttgtgtaaaatgacaggtgtttggtattaccaggaactcataatgacattttaataattattgtctaaatttcataatcgaagcgattttagagtagttaacttgagatttcacagccagtaaatggctgtatttctccagagctctcagctcccatgtttattcagccaacgaacaaaccagactgcagactgtattagagcaagacaacatcatttagccattgatttttatcttctaccttgaatgaattgaatgaagaaaatgtcttttagggataaacactatcaaggatgaattttatactaaggttatatgaaagaaaaatctcaaaaccactaagccaaagggaagtcaagctgggaactgattgaggcaaacctgcctcccattttattcctaaataagacagccacaaagataaaatttgctcacaagggaattccttatggacaaagaactcaaagtcttcacatgaaacaaatgcataaatgattgctttctctgtttcatgtttcactaagccagattaaggtataactgactattcctctactctcctctcacatgtaaattgtatattcagtgaaaggctaatcagaaactcaaaaaaatgcaaccctttctctcttacctgcctatgcttgaagcccccgcccctcttcaagttgtcctgcctttcaagaccaatgtacaccttacacatactgattgatgtctcatgtctctctaaaatgtgtaaaaccaagctgtgccccaaccaccttgggcacatgtggtgaggacctcctgaggctgtgtcatgggcacaccttaaccctgggaaaataaactttctaaactgacttgagagctgtctcagatattttgagcttacagttattgtgaaatcattttaattataaattaagtggagatttacttaaaatcatgtgtagaagtagcctgtgatatagtcctagatacatacattatcatcttatgtatcttccctccctcttccaggttctgataaaaacagatgaaatctgaaagaccatgacagtagtattttgaaaatgacagtatttgaaattaaaaaattgtaaaag

SEQ ID NO: 139471 - DNA, 1219 bp, Homo sapiens
  Payload ID: 7342
  Gene Symbol: GUF1
  Gene Name: GUF1 homolog, GTPase
  ENST ID: ENST00000513775
  CDS Start-End: 130-426
ttgtcttcgcttcacaggatctgtttgagtcctgtccaccggatcctacggggggtaccttcgaaaaaaaacgggctatgctgctgttgcgtgtgggtaccctctcctgacgcctccgccgcccgggtcatgtggaccctcgtgggtcggggctgggggtgcgcacgcgctctcgcgccacgagccactggggccgcgcttctggtggccccggggccccggtccgcgccgacccttggggctgctccagagtcctgggctaccgacaggctctacagctccgcagaattcaagggacaattgataaaacaaagaataataagcaggttcttgataaattgcaagtggaacgagaaagaggaatcactgttaaagcacagacagcatctctcttttacaattgtgaaggaaagcagtaccttttaaatctcattgatacaccgggccatgttgattttagttatgaagtatccaggtcactttctgcttgccagggtgttttacttgtggttgatgcaaatgagggaattcaagcccaaactgtagcaaacttctttcttgccttcgaagcacagctatcggtaattccagttataaataagatagatctgaagaatgctgatcctgaaagggttgaaaaccaaattgagaaagtgtttgatattccaagtgatgaatgtattaagatttctgctaaacttggaacaaatgttgagagtgttcttcaggcaattattgaaagaatcccccctcctaaagtgcatcgcaaaaatcctctgagagctttggtatttgactccacctttgaccagtatagaggtgtgatagccaatgtagcattatttgacggagtggtttccaaaggagataaaattgtatctgcacatactcaaaagacatacgaagttaatgaagtaggagtcttgaatcctaatgagcagccaactcataaattatatgcaggacaggtgggctatctgattgctgggatgaaagatgtcactgaagcgcaaataggagatacattatgtttacataagcaaccagtggagcccttgcctgggtttaaatcagcgaaaccaatggtatttgcaggaatgtatcctctagaccaatctgaatataacaatctgaagagtgctatagaaaaactgactttaaatgattccagtgtgaccgttcatcgggatagtagccttgctctgggtgctggctggag

SEQ ID NO: 139472 - DNA, 3347 bp, Homo sapiens
  Payload ID: 7343
  Gene Symbol: GULP1
  Gene Name: GULP, engulfment adaptor PTB domain containing 1
  Uniprot ID: Q9UBP9
  ENST ID: ENST00000359135
  CDS Start-End: 513-1427
aaaggaaggggcggcgtccacatggttacccttctgctgcgcgggtcaagtagcttcttctggagggcgcaaggcgcggcgggggtgatgagcccttgggttctcgctccgactgctaaattcgcttggccgggtccaccttctcgtggcctcactcgccacacggatcagaatccggagcaggcagttctctctattctgaggctcctgcggctgccgcgctgacttccctgtgtgcgggagggaactctgggcaggctggttttcttggaatgtgtttacgatgttgaatgggacttgaacaggaagctggacgctgcagctggaactagcgtgccaagttatttatgattccatctgatatacataggagagaaactgatagaagaattctgatggcaactgtatgatagaagctatataaagtcaagtgtccattttctttcaactatatttgagcatacccaggatttaagtcgtggaactgaacatttatttggctgatcctcatcatgaaccgtgcttttagcaggaagaaagacaaaacatggatgcatacacctgaagctttatcaaaacatttcattccctataatgcaaagtttcttggcagtacagaagtggaacagccaaaaggaacagaagttgtgagagatgctgtaaggaaactaaagtttgcaagacatatcaagaaatctgaaggccagaaaattcctaaagtggagttgcaaatatcaatttatggagtaaaaattctagaacccaaaacaaaggaagttcaacacaattgccagcttcatagaatatctttttgtgcagatgataaaactgacaagaggatattcactttcatatgcaaagattctgagtcaaataaacatttgtgctatgtatttgacagcgaaaagtgtgctgaagagatcactttaacaattggccaagcatttgacctggcatacaggaaatttctagaatcaggaggaaaagatgttgaaacaagaaaacagatcgcagggttacaaaaaagaatccaagacttagaaacagaaaatatggaacttaaaaataaagtacaagatttggaaaaccaactgagaataactcaagtatcagcacctccagcaggcagtatgacacctaagtcgccctccactgacatctttgatatgattccattttctccaatatcacaccagtcttcgatgcctactcgcaatggcacacagccacctccagtacctagtagatctactgagattaaacgggacctgtttggagcagaaccttttgacccatttaactgtggagcagcagatttccctccagatattcaatcaaaattagatgagatgcaggaggggttcaaaatgggactaactcttgaaggcacagtattttgtctcgacccgttagacagtaggtgctgacatcaagaacaagaaatcctgattcatgttaaatgtgtttgtatacacatgtcatttattattattactttaagataggtattattcatgtgtcaatgtttttgaatattttaatattttgaaaattttctcagttaaatttcctcaccttcactattgatctgtaatttttattttaaaaacagcttactgtaaagtagatcatacttttatgttcctttctgtttctactgtagatgaatttgtaattgaaagacatattatacaaatacctgccttgtgtctgagttctatttagttagcatcttgaaatttgtattcattttccagatggctagtttattaatgatttcccaaaagccataccttaaagataactttttaaattctgaagagacatgccaatgtcaaactaaacatgttctgtttttaaaccaacaaacatgttactattcattggacagatatcattttatgtataaatactgttcacatcactgggaaaatgtaaactttaaacataatgccacaaggtcactaatttctagcaggtaaaattataaggatataaattccaataataaaccaaatgtatttagagtatttattagtaaatgcaaggtgatgttagttatgatcagttatactctaaatatttaatttgttttataaaggtagtgaaaaaatgaaaatttgctatttattaaaaaacattaaatttcattccaaatgagataagtgatattactataacatctaagcatcatctgatttgatattccctaaaaaacatttggaatatatgctatctatagattcagtatctactacccatatttactttaccaaatatatttctcctcactgcataaggactactcttctcatattttcttctttgatgaagatatttttcaccaaagtttattttgtgatgccctcttggttttgatactttaaaatctgtggcacccgttctacatgaattatcaatatttggtaaattcaatctgtatttgttttgttaaagtcaaaaatctcattttccaaaaaaaaaaaaaaaacccagttactgctcagtttagtcttgaacatgagcaataaaattctcttgcatttcattattgatgtgctgatgaacctggacttttaaaaatatttgtttcctatacctttaccctttacctaacagactaatttgtactcagtaaaacaaaaatttatggtcaaaatttctaacttggttcatcacattataagataaataaattaaattaatgaaaatgtgacttagagtaggggtagccctcaaaaatagatttatcatttactcattggaattttcttcaagtgttaaaggtacattttcactaggaaaagaaatcaaatatgcttatgcaatatatatttgtgtgtttttccttaatgttatatggtatatatgagccttcttgtttagtttcttttatctgctaagttgtaccttaattagagggcaatatatgtttcataaagaagagtctttataattttgtttgtcagatagtattttggaatttgtataataaggatgtttagaagccatataagtggctttttttaacagatagaatttgtatttttattgtactttaaaaagatttatgtaataggtatatatttagtggccatttattatcaatggtaacacaatggagtactaagatggtatttgcacatttaagatatgttactttaccaatttttaatggtaatcaactctgctactggcatgatgaaatagtacataactggtcattaattatgaacatttatttctccagtgcgtttttatgaagatctggttgaaaattgtatttctatgtaaactcaacgatatgtttggttttcctgaaaataaatgattttaaataaattaaa

SEQ ID NO: 139473 - DNA, 3544 bp, Homo sapiens
  Payload ID: 7343
  Gene Symbol: GULP1
  Gene Name: GULP, engulfment adaptor PTB domain containing 1
  Uniprot ID: Q9UBP9
  ENST ID: ENST00000409580
  CDS Start-End: 715-1629
tggagggcgcaaggcgcggcgggggtgatgagcccttgggttctcgctccgactgctaaattcgcttggccgggtccaccttctcgtggcctcactcgccacacggatcagaatccggagcaggcagttctctctattctgaggctcctgcggctgccgcgctgacttccctgtgtgcgggagggaactctgggcaggctggttttcttggaatgtgtttacgatgttgaatgggacttgaacaggaagctggacgctgcagctggaactagcgtgccaaggtagagtaaggaagacttagctggtgttgggcttggcgggtccacttggtacgctgggcaaactccaacagcaagaattgaagacttaagggtttgagcagatggttttctacctaaattgaataattcaattacgtattctcagctagcatggatttgggtcatggaattaaagtagaaacgtatccggcatgacttctttgtgcttatcaaaagtgatcctgataaacagatcttgctctttcatgtaaagaagtaaaagttatttatgattccatctgatatacataggagagaaactgatagaagaattctgatggcaactgtatgatagaagctatataaagtcaagtgtccattttctttcaactatatttgagcatacccaggatttaagtcgtggaactgaacatttatttggctgatcctcatcatgaaccgtgcttttagcaggaagaaagacaaaacatggatgcatacacctgaagctttatcaaaacatttcattccctataatgcaaagtttcttggcagtacagaagtggaacagccaaaaggaacagaagttgtgagagatgctgtaaggaaactaaagtttgcaagacatatcaagaaatctgaaggccagaaaattcctaaagtggagttgcaaatatcaatttatggagtaaaaattctagaacccaaaacaaaggaagttcaacacaattgccagcttcatagaatatctttttgtgcagatgataaaactgacaagaggatattcactttcatatgcaaagattctgagtcaaataaacatttgtgctatgtatttgacagcgaaaagtgtgctgaagagatcactttaacaattggccaagcatttgacctggcatacaggaaatttctagaatcaggaggaaaagatgttgaaacaagaaaacagatcgcagggttacaaaaaagaatccaagacttagaaacagaaaatatggaacttaaaaataaagtacaagatttggaaaaccaactgagaataactcaagtatcagcacctccagcaggcagtatgacacctaagtcgccctccactgacatctttgatatgattccattttctccaatatcacaccagtcttcgatgcctactcgcaatggcacacagccacctccagtacctagtagatctactgagattaaacgggacctgtttggagcagaaccttttgacccatttaactgtggagcagcagatttccctccagatattcaatcaaaattagatgagatgcaggaggggttcaaaatgggactaactcttgaaggcacagtattttgtctcgacccgttagacagtaggtgctgacatcaagaacaagaaatcctgattcatgttaaatgtgtttgtatacacatgtcatttattattattactttaagataggtattattcatgtgtcaatgtttttgaatattttaatattttgaaaattttctcagttaaatttcctcaccttcactattgatctgtaatttttattttaaaaacagcttactgtaaagtagatcatacttttatgttcctttctgtttctactgtagatgaatttgtaattgaaagacatattatacaaatacctgccttgtgtctgagttctatttagttagcatcttgaaatttgtattcattttccagatggctagtttattaatgatttcccaaaagccataccttaaagataactttttaaattctgaagagacatgccaatgtcaaactaaacatgttctgtttttaaaccaacaaacatgttactattcattggacagatatcattttatgtataaatactgttcacatcactgggaaaatgtaaactttaaacataatgccacaaggtcactaatttctagcaggtaaaattataaggatataaattccaataataaaccaaatgtatttagagtatttattagtaaatgcaaggtgatgttagttatgatcagttatactctaaatatttaatttgttttataaaggtagtgaaaaaatgaaaatttgctatttattaaaaaacattaaatttcattccaaatgagataagtgatattactataacatctaagcatcatctgatttgatattccctaaaaaacatttggaatatatgctatctatagattcagtatctactacccatatttactttaccaaatatatttctcctcactgcataaggactactcttctcatattttcttctttgatgaagatatttttcaccaaagtttattttgtgatgccctcttggttttgatactttaaaatctgtggcacccgttctacatgaattatcaatatttggtaaattcaatctgtatttgttttgttaaagtcaaaaatctcattttccaaaaaaaaaaaaaaaacccagttactgctcagtttagtcttgaacatgagcaataaaattctcttgcatttcattattgatgtgctgatgaacctggacttttaaaaatatttgtttcctatacctttaccctttacctaacagactaatttgtactcagtaaaacaaaaatttatggtcaaaatttctaacttggttcatcacattataagataaataaattaaattaatgaaaatgtgacttagagtaggggtagccctcaaaaatagatttatcatttactcattggaattttcttcaagtgttaaaggtacattttcactaggaaaagaaatcaaatatgcttatgcaatatatatttgtgtgtttttccttaatgttatatggtatatatgagccttcttgtttagtttcttttatctgctaagttgtaccttaattagagggcaatatatgtttcataaagaagagtctttataattttgtttgtcagatagtattttggaatttgtataataaggatgtttagaagccatataagtggctttttttaacagatagaatttgtatttttattgtactttaaaaagatttatgtaataggtatatatttagtggccatttattatcaatggtaacacaatggagtactaagatggtatttgcacatttaagatatgttactttaccaatttttaatggtaatcaactctgctactggcatgatgaaatagtacataactggtcattaattatgaacatttatttctccagtgcgtttttatgaagatctggttgaaaattgtatttctatgtaaactcaacgatatgtttggttttcctgaaaataaatgattttaaataaa

SEQ ID NO: 139474 - DNA, 1242 bp, Homo sapiens
  Payload ID: 7343
  Gene Symbol: GULP1
  Gene Name: GULP, engulfment adaptor PTB domain containing 1
  Uniprot ID: Q9UBP9
  ENST ID: ENST00000409637
  CDS Start-End: 446-949
cgcaaggcgcggcgggggtgatgagcccttgggttctcgctccgactgctaaattcgcttggccgggtccaccttctcgtggcctcactcgccacacggatcagaatccggagcaggcagttctctctattctgaggctcctgcggctgccgcgctgacttccctgtgtgcgggagggaactctgggcaggctggttttcttggaatgtgtttacgatgttgaatgggacttgaacaggaagctggacgctgcagctggaactagcgtgccaagttatttatgattccatctgatatacataggagagaaactgatagaagaattctgatggcaactgtatgatagaagctatataaagtcaagtgtccattttctttcaactatatttgagcatacccaggatttaagtcgtggaactgaacatttatttggctgatcctcatcatgaaccgtgcttttagcaggaagaaagacaaaacatggatgcatacacctgaagctttatcaaaacatttcattccctataatgcaaagtttcttggcagtacagaagtggaacagccaaaaggaacagaagttgtgagagatgctgtaaggaaactaaagtttgcaagacatatcaagaaatctgaaggccagaaaattcctaaagtggagttgcaaatatcaatttatggagtaaaaattctagaacccaaaacaaaggaagttcaacacaattgccagcttcatagaatatctttttgtgcagatgataaaactgacaagaggatattcactttcatatgcaaagattctgagtcaaataaacatttgtgctatgtatttgacagcgaaaagtgtgtaagtatcccagatgttgtagggtggtttgttctgttttataagccaggaattgtcttgcttctggcattggcaaagtatttgaaaatgaataattttctgtaaattattctgtaaaaagtctgtaaatacttagctgtactaatagatttattttgtcatgagaatatgcttcaggatttcatctgtaactaaattctcatggtcatgagcataaacttacatgtaaatttcttttattagaatgccatgcctgcttatgttatgcatgtattttataataatttaatctattttacaattttaaactcaaatatgatttagtattatgcacataatacaaacagtagtggtgagcaaacgtgtgtttcccccacatgtgcagaatatgatggatt

SEQ ID NO: 139475 - DNA, 1376 bp, Homo sapiens
  Payload ID: 7343
  Gene Symbol: GULP1
  Gene Name: GULP, engulfment adaptor PTB domain containing 1
  Uniprot ID: Q9UBP9
  ENST ID: ENST00000409830
  CDS Start-End: 462-1376
cccggccgggagcgacccggagtccccagccccgcgtcccagctgccgccagcgccagttttggattcggcggattaggaagaggagggaggggggagagagcgcgaagagggaggggaccgaagctggagggtcccgagtccagcgccgtgttggcgtagagaaactttccctctcggcctcggagacggcgccccggccgtgccggagtggagatcgccaggctcggaggaaccggcagctctccacgcccctgcccgaagcctgacccgactgcctctctcagtgagttatttatgattccatctgatatacataggagagaaactgatagaagaattctgatggcaactgtatgatagaagctatataaagtcaagtgtccattttctttcaactatatttgagcatacccaggatttaagtcgtggaactgaacatttatttggctgatcctcatcatgaaccgtgcttttagcaggaagaaagacaaaacatggatgcatacacctgaagctttatcaaaacatttcattccctataatgcaaagtttcttggcagtacagaagtggaacagccaaaaggaacagaagttgtgagagatgctgtaaggaaactaaagtttgcaagacatatcaagaaatctgaaggccagaaaattcctaaagtggagttgcaaatatcaatttatggagtaaaaattctagaacccaaaacaaaggaagttcaacacaattgccagcttcatagaatatctttttgtgcagatgataaaactgacaagaggatattcactttcatatgcaaagattctgagtcaaataaacatttgtgctatgtatttgacagcgaaaagtgtgctgaagagatcactttaacaattggccaagcatttgacctggcatacaggaaatttctagaatcaggaggaaaagatgttgaaacaagaaaacagatcgcagggttacaaaaaagaatccaagacttagaaacagaaaatatggaacttaaaaataaagtacaagatttggaaaaccaactgagaataactcaagtatcagcacctccagcaggcagtatgacacctaagtcgccctccactgacatctttgatatgattccattttctccaatatcacaccagtcttcgatgcctactcgcaatggcacacagccacctccagtacctagtagatctactgagattaaacgggacctgtttggagcagaaccttttgacccatttaactgtggagcagcagatttccctccagatattcaatcaaaattagatgagatgcaggaggggttcaaaatgggactaactcttgaaggcacagtattttgtctcgacccgttagacagtaggtgctga

SEQ ID NO: 139476 - DNA, 583 bp, Homo sapiens
  Payload ID: 7343
  Gene Symbol: GULP1
  Gene Name: GULP, engulfment adaptor PTB domain containing 1
  ENST ID: ENST00000409927
  CDS Start-End: 378-583
gagtccagcgccgtgttggcgtagagaaactttccctctcggcctcggagacggcgccccggccgtgccggagtggagatcgccaggctcggaggaaccggcagctctccacgcccctgcccgaagcctgacccgactgcctctctcagtgaggtacggagatttatctaggctcttccctggctgcgaacccaggctccctccagttatttatgattccatctgatatacataggagagaaactgatagaagaattctgatggcaactgtatgatagaagctatataaagtcaagtgtccattttctttcaactatatttgagcatacccaggatttaagtcgtggaactgaacatttatttggctgatcctcatcatgaaccgtgcttttagcaggaagaaagacaaaacatggatgcatacacctgaagctttatcaaaacatttcattccctataatgcaaagtttcttggcagtacagaagtggaacagccaaaaggaacagaagttgtgagagatgctgtaaggaaactaaagtttgcaagacatatcaagaaatctgaaggccagaaaattcctaa

SEQ ID NO: 139477 - DNA, 1932 bp, Homo sapiens
  Payload ID: 7343
  Gene Symbol: GULP1
  Gene Name: GULP, engulfment adaptor PTB domain containing 1
  Uniprot ID: Q9UBP9
  ENST ID: ENST00000409609
  CDS Start-End: 748-1662
agactgagctcagtagccaggcatgaaagagactgggcaagttgcaggggctaattggaaaggggctgtcggttgcacttggggtttaaacaagaggtttcttttgcaatgagaatttttaggtggctaagatcagtcttcttggcaaaaaaataaactaagcatagagtgcagttggatatgaccgaggaaattacaaaaagggctccaggagcaaagtctgaactttccttatcagtgttgcagtggaatagctgggggcctgatgctgtttgtgctgatcatactttgcaaatgcccacactttgttgctgtttgtctccttggacgaggtttgctgcaacttcaattccttgacttcggccttactttgttttcatagcagcaagaattgaagacttaagggtttgagcagatggttttctacctaaattgaataattcaattacgtattctcagctagcatggatttgggtcatggaattaaagtagaaacgtatccggcatgacttctttgtgcttatcaaaagtgatcctgataaacagatcttgctctttcatgtaaagaagtaaaagttatttatgattccatctgatatacataggagagaaactgatagaagaattctgatggcaactgtatgatagaagctatataaagtcaagtgtccattttctttcaactatatttgagcatacccaggatttaagtcgtggaactgaacatttatttggctgatcctcatcatgaaccgtgcttttagcaggaagaaagacaaaacatggatgcatacacctgaagctttatcaaaacatttcattccctataatgcaaagtttcttggcagtacagaagtggaacagccaaaaggaacagaagttgtgagagatgctgtaaggaaactaaagtttgcaagacatatcaagaaatctgaaggccagaaaattcctaaagtggagttgcaaatatcaatttatggagtaaaaattctagaacccaaaacaaaggaagttcaacacaattgccagcttcatagaatatctttttgtgcagatgataaaactgacaagaggatattcactttcatatgcaaagattctgagtcaaataaacatttgtgctatgtatttgacagcgaaaagtgtgctgaagagatcactttaacaattggccaagcatttgacctggcatacaggaaatttctagaatcaggaggaaaagatgttgaaacaagaaaacagatcgcagggttacaaaaaagaatccaagacttagaaacagaaaatatggaacttaaaaataaagtacaagatttggaaaaccaactgagaataactcaagtatcagcacctccagcaggcagtatgacacctaagtcgccctccactgacatctttgatatgattccattttctccaatatcacaccagtcttcgatgcctactcgcaatggcacacagccacctccagtacctagtagatctactgagattaaacgggacctgtttggagcagaaccttttgacccatttaactgtggagcagcagatttccctccagatattcaatcaaaattagatgagatgcaggaggggttcaaaatgggactaactcttgaaggcacagtattttgtctcgacccgttagacagtaggtgctgacatcaagaacaagaaatcctgattcatgttaaatgtgtttgtatacacatgtcatttattattattactttaagataggtattattcatgtgtcaatgtttttgaatattttaatattttgaaaattttctcagttaaatttcctcaccttcactattgatctgtaatttttattttaaaaacagcttactgtaaagtagatcatacttttatgttcctttctgtttctactgtagatgaatttgtaattgaaagacatattatacaaat

SEQ ID NO: 139478 - DNA, 1595 bp, Homo sapiens
  Payload ID: 7343
  Gene Symbol: GULP1
  Gene Name: GULP, engulfment adaptor PTB domain containing 1
  Uniprot ID: Q9UBP9
  ENST ID: ENST00000410051
  CDS Start-End: 393-896
gcggattaggaagaggagggaggggggagagagcgcgaagagggaggggaccgaagctggagggtcccgagtccagcgccgtgttggcgtagagaaactttccctctcggcctcggagacggcgccccggccgtgccggagtggagatcgccaggctcggaggaaccggcagctctccacgcccctgcccgaagcctgacccgactgcctctctcagtgagttatttatgattccatctgatatacataggagagaaactgatagaagaattctgatggcaactgtatgatagaagctatataaagtcaagtgtccattttctttcaactatatttgagcatacccaggatttaagtcgtggaactgaacatttatttggctgatcctcatcatgaaccgtgcttttagcaggaagaaagacaaaacatggatgcatacacctgaagctttatcaaaacatttcattccctataatgcaaagtttcttggcagtacagaagtggaacagccaaaaggaacagaagttgtgagagatgctgtaaggaaactaaagtttgcaagacatatcaagaaatctgaaggccagaaaattcctaaagtggagttgcaaatatcaatttatggagtaaaaattctagaacccaaaacaaaggaagttcaacacaattgccagcttcatagaatatctttttgtgcagatgataaaactgacaagaggatattcactttcatatgcaaagattctgagtcaaataaacatttgtgctatgtatttgacagcgaaaagtgtgtaagtatcccagatgttgtagggtggtttgttctgttttataagccaggaattgtcttgcttctggcattggcaaagtatttgaaaatgaataattttctgtaaattattctgtaaaaagtctgtaaatacttagctgtactaatagatttattttgtcatgagaatatgcttcaggatttcatctgtaactaaattctcatggtcatgagcataaacttacatgtaaatttcttttattagaatgccatgcctgcttatgttatgcatgtattttataataatttaatctattttacaattttaaactcaaatatgatttagtattatgcacataatacaaacagtagtggtgagcaaacgtgtgtttcccccacatgtgcagaatatgatggattttatgaaaataaatattcttaactccaggaaatatgatctatatggttccttaaaagattttccaatacactgaaaatttagttccttatgttcattgtataaaaatcttaggccaggcgcggtggctcacgcctgtaatcccagcacttcgggaggccgaggcgggcagatcatgaggtgaagagatcgagaccatcctgaccaaaatggtgaaactctgtctctactaaaaatacaaaaattagctgggtgtggtggtgtgtgccagtggtcccagctactagggaggctgaggcaggaaatcacttgaacctgggaggcagaggttgcagtgagccaagatcgcgccactgaattccagcctggcggcagagtgagactccatctcaagagaaaaaaaaaaaa

SEQ ID NO: 139479 - DNA, 2643 bp, Homo sapiens
  Payload ID: 7343
  Gene Symbol: GULP1
  Gene Name: GULP, engulfment adaptor PTB domain containing 1
  Uniprot ID: Q9UBP9
  ENST ID: ENST00000409843
  CDS Start-End: 670-1545
attccaccctccacccacctccggttccgcgtgcacgcgcgagatagtccagtgggcccacagataacgaccatcagagattaaagaaggaaagtcagcgagcttgaacacaggcgtcccgtgtggaaatgtccaaggagaccgccagaagtgcgcaagccggagtcggctagagtttccttctcaccgagagggggagcccggcgttcccggccgggagcgacccggagtccccagccccgcgtcccagctgccgccagcgccagttttggattcggcggattaggaagaggagggaggggggagagagcgcgaagagggaggggaccgaagctggagggtcccgagtccagcgccgtgttggcgtagagaaactttccctctcggcctcggagacggcgccccggccgtgccggagtggagatcgccaggctcggaggaaccggcagctctccacgcccctgcccgaagcctgacccgactgcctctctcagtgagttatttatgattccatctgatatacataggagagaaactgatagaagaattctgatggcaactgtatgatagaagctatataaagtcaagtgtccattttctttcaactatatttgagcatacccaggatttaagtcgtggaactgaacatttatttggctgatcctcatcatgaaccgtgcttttagcaggaagaaagacaaaacatggatgcatacacctgaagctttatcaaaacatttcattccctataatgcaaagtttcttggcagtacagaagtggaacagccaaaaggaacagaagttgtgagagatgctgtaaggaaactaaagtttgcaagacatatcaagaaatctgaaggccagaaaattcctaaagtggagttgcaaatatcaatttatggagtaaaaattctagaacccaaaacaaaggaagttcaacacaattgccagcttcatagaatatctttttgtgcagatgataaaactgacaagaggatattcactttcatatgcaaagattctgagtcaaataaacatttgtgctatgtatttgacagcgaaaagtgtgctgaagagatcactttaacaattggccaagcatttgacctggcatacaggaaatttctagaatcaggaggaaaagatgttgaaacaagaaaacagatcgcagggttacaaaaaagaatccaagacttagaaacagaaaatatggaacttaaaaataaagtacaagatttggaaaaccaactgagaataactcaagtatcagcacctccagcaggcagtatgacacctaagtcgccctccactgacatctttgatatgattccattttctccaatatcacaccagtcttcgatgcctactcgcaatggcacacagccacctccagtacctagtagatctactgagattaaacgggacctgtttggagcagaaccttttgacccatttaactgtggagcagcagatttccctccagatattcaatcaaaattagatgagatgcagcgccagagatggaggggttcaaaatgggactaactcttgaaggcacagtattttgtctcgacccgttagacagtaggtgctgacatcaagaacaagaaatcctgattcatgttaaatgtgtttgtatacacatgtcatttattattattactttaagataggtattattcatgtgtcaatgtttttgaatattttaatattttgaaaattttctcagttaaatttcctcaccttcactattgatctgtaatttttattttaaaaacagcttactgtaaagtagatcatacttttatgttcctttctgtttctactgtagatgaatttgtaattgaaagacatattatacaaatacctgccttgtgtctgagttctatttagttagcatcttgaaatttgtattcattttccagatggctagtttattaatgatttcccaaaagccataccttaaagataactttttaaattctgaagagacatgccaatgtcaaactaaacatgttctgtttttaaaccaacaaacatgttactattcattggacagatatcattttatgtataaatactgttcacatcactgggaaaatgtaaactttaaacataatgccacaaggtcactaatttctagcaggtaaaattataaggatataaattccaataataaaccaaatgtatttagagtatttattagtaaatgcaaggtgatgttagttatgatcagttatactctaaatatttaatttgttttataaaggtagtgaaaaaatgaaaatttgctatttattaaaaaacattaaatttcattccaaatgagataagtgatattactataacatctaagcatcatctgatttgatattccctaaaaaacatttggaatatatgctatctatagattcagtatctactacccatatttactttaccaaatatatttctcctcactgcataaggactactcttctcatattttcttctttgatgaagatatttttcaccaaagtttattttgtgatgccctcttggttttgatactttaaaatctgtggcacccgttctacatgaattatcaatatttggtaaattcaatctgtatttgttttgttaaagtcaaaaatctcattttcc

SEQ ID NO: 139480 - DNA, 983 bp, Homo sapiens
  Payload ID: 7343
  Gene Symbol: GULP1
  Gene Name: GULP, engulfment adaptor PTB domain containing 1
  Uniprot ID: Q9UBP9
  ENST ID: ENST00000409805
  CDS Start-End: 299-904
aaactttccctctcggcctcggagacggcgccccggccgtgccggagtggagatcgccaggctcggaggaaccggcagctctccacgcccctgcccgaagcctgacccgactgcctctctcagtgagttatttatgattccatctgatatacataggagagaaactgatagaagaattctgatggcaactgtatgatagaagctatataaagtcaagtgtccattttctttcaactatatttgagcatacccaggatttaagtcgtggaactgaacatttatttggctgatcctcatcatgaaccgtgcttttagcaggaagaaagacaaaacatggatgcatacacctgaagctttatcaaaacatttcattccctataatgcaaaggctgaagagatcactttaacaattggccaagcatttgacctggcatacaggaaatttctagaatcaggaggaaaagatgttgaaacaagaaaacagatcgcagggttacaaaaaagaatccaagacttagaaacagaaaatatggaacttaaaaataaagtacaagatttggaaaaccaactgagaataactcaagtatcagcacctccagcaggcagtatgacacctaagtcgccctccactgacatctttgatatgattccattttctccaatatcacaccagtcttcgatgcctactcgcaatggcacacagccacctccagtacctagtagatctactgagattaaacgggacctgtttggagcagaaccttttgacccatttaactgtggagcagcagatttccctccagatattcaatcaaaattagatgagatgcaggaggggttcaaaatgggactaactcttgaaggcacagtattttgtctcgacccgttagacagtaggtgctgacatcaagaacaagaaatcctgattcatgttaaatgtgtttgtatacacatgtcatttattattattactttaagatagg

SEQ ID NO: 139481 - DNA, 767 bp, Homo sapiens
  Payload ID: 7343
  Gene Symbol: GULP1
  Gene Name: GULP, engulfment adaptor PTB domain containing 1
  ENST ID: ENST00000433052
  CDS Start-End: 1-569
aaaaccaactgagaataactcaagtatcagcacctccactgctgcacaatatgtctgatcatgaacaacatgtgtttcagagatgctcatcctctttctggcgtagtaatggtgattcatctccctgtctcaatatttcttccatctctgtcactcctatcaactcgcctgattccagactatcactgggactgttaataccaccaccttctaaatgtggctttcccaagccagtcagtgagagcagcatcccaagacctcatgcaggcagtatgacacctaagtcgccctccactgacatctttgatatgattccattttctccaatatcacaccagtcttcgatgcctactcgcaatggcacacagccacctccagtacctagtagatctactgagattaaacgggacctgtttggagcagaaccttttgacccatttaactgtggagcagcagatttccctccagatattcaatcaaaattagatgagatgcaggaggggttcaaaatgggactaactcttgaaggcacagtattttgtctcgacccgttagacagtaggtgctgacatcaagaacaagaaatcctgattcatgttaaatgtgtttgtatacacatgtcatttattattattactttaagataggtattattcatgtgtcaatgtttttgaatattttaatattttgaaaattttctcagttaaatttcctcaccttcactattgatctgtaatttttattttaaaaacagcttactgtaaagt

SEQ ID NO: 139482 - DNA, 7427 bp, Homo sapiens
  Payload ID: 7343
  Gene Symbol: GULP1
  Gene Name: GULP, engulfment adaptor PTB domain containing 1
  ENST ID: ENST00000451191
  CDS Start-End: 1-443
tagaaacagaaaatatggaacttaaaaataaagtacaagatttggaaaaccaactgagaataactcaagtatcagcacctccagcaggcagtatgacacctaagtcgccctccactgacatctttgatatgattccattttctccaatatcacaccagtcttcgatgcctactcgcaatggcacacagccacctccagtacctagtagatctactgagattaaacgggacctgtttggagcagaaccttttgacccatttaactgtggagcagcagatttccctccagatattcaatcaaaattagatgagatgcaggtgactattttgatagactggcccataaatgatttatttcattttgatatgggacaaagagaatgttatgtaccaaaactatggtttccttcaattattttcgctataaaaactcgcttaaaataattactttaaaataataatgtacagttagtcctaaaaatactcctacatatgctaaggataaggttgttggttttttaaatggttcaatttataatgtcaataagatggttcattttttaaatacaaaatggcatggattctaatggttcattgttctgaaatctagagttaaacagtcactgcattagatttataagatttgatctcagtcttaacaattatgaatttgaaaattgtaaatgggtagatgaaggaaaatctttgtaagagtgaaattattctctctgaaaagaagcattgtagctgtagttcataacttttgggcttttatttaaaaagcaaacaaccagtgacaacttatttaggaatgtagttcagttgggttttcatttctctctcttccttttacttttttgttctaaattggtctgaagtttacagaaattggttttaaatgctttgcactatgggccatgatttaaaaatagtcttataaaccctagaataaagtcttctctttatatttgccctttacattttggtgaagttattatatcctatttttcatcaaaaagtttatatatggtagaatccagacagacaccaattatatgaagctgattgagaagagacaatgaagacactaaagtaaggagaaggaggtatttttgtttattagtcttgggttaatacattaattctctatgcctcacttcctagaaaaaacaattatgggtgaacactgatctatcactgataattgcaatccttcttagaaagttaatttaaatgcccttttactcatttttgactgcagctgtgtagctatcttattttctaggtagtacatgaattcattattgttctagatgtaataacatgcctgaatttaaaagttgaattacttaacatatgtcttgaggttttcaaagaatctattaaaacagtgtttctcaagttgaatgattcttaatccccttttacataaaaattgttttagatccttagtattaacttacaatttttaaatattgacaaaaatgttataaacaacttgtccttatggtttttataaaattatgaattcaataaattataaattaaatgaaagccaaattgcaacaccaatacaggacggatgatcttatttggttaaagctaaaaccaccttatcaaatttctattgatttcaacatgtattctatctgatggcacagatttcctagttcttttctatatttcaaacgctatgaaactttcaaatggcgcatgataatttagcaagaatgctgtatttcatatgaaatcaattccttttcttttacattagttttacccattggacatgtactatctggtactaatgcttttgtagtaacaaagaaatatttatgtggtagtatttattctcaagggttgcacaggtcatacagagtacttctctaaaaattttttagattttcccaaaattggaaaaaaaattatggagttttaaggataagcctctatttccagattttgttgaaaccaagtgtgagacacaatgtattgggatgattgagtgatggtgacactcaatgttaaaccgtggtgtttttgcttttgctgtttctaatattttcttaatgtctttttaaattctttactgctttcatggtgggtagcgccagagatggttggtatattatttttataataattttaaacaacttacaaatttttaaagctgaaaccttaaaatttgcatgccttatttaataaaaattcaaacaacagcttcatatgggtatatctgataattagttatgtttagagaggttttataaaccacattttaagattatttttcagtgacttagtcactattgcattgttcacttcattgtttcctttcttttctttttttttttgaggcagagtctcactctatcgccctacccaagctggagtgcagtggcatgatcttggctcactgcaacctccaccgcccgggctcaagcaatcttccctcctcagcttcctgagtagctgagactacaagtgtgcactaccacgcgtggctaatttttgtattttttgttaaaaacagggtttcatcatgttgtccagactgggcttgaactgctgggctcaagcgatctacccacttagacctcccaaagtgcttggaccacaggcatgagccaccatacttggccatgattgtttcttttagtccaatatttacttgcaaggtcactttaacaaaagtaaaataatattttcttcatctaaagtctatgatggcttttattattaatcgtgctagcctaatgaatctaatgcagacatttagctatctttgcatatcatataaaaacttaatatagtacaatgggttgtgaacaccatattgagttaataagcctagtgagacatttagttttcatctttcatttacagagtattgtgactaagctatttttaagagaatcgaattattaagtttgaaatcacagaaacatctcatgcatgtaagcatttatgcagaaatgttagaccatatttcagtataagcagttagaaaattaaacatctatttgaaatcaataatgtagctatttgatttgacataatttaaactgtccagtacatgtcaccaacaggaaaataagtggaatagtattgatagcccacactgtaacatgtgagctataataatttaatacattaaaaaacaagcatggcaagttcatgaatgatgaaagaatcatgtatgagtggtgttaagtcagctagctagtactctgggagaagatcaatgtactgctgaaacttacagcaaatgccgagataaatttcagaagtaatcaacattttaaaatatttaaaatattattgaatattcatcagacttttgaattgaaaagaaaattttataaggaaaagaaaaatacggacatatagtatccaattttttaaaatttactgtctaaaaatatataaatacattacatatacataattaaagcaattagacaaatggctaggaaactaaagaatcaacagataaataaaaaagcactagttcacaaaagaagaccacaagtggcttacacatatgtagacatgttctgtctaatcaaagtaaacatataaatcaaataaagaactgtaatgctattttaatctagcagattattttttaaactaataatcaatcaatacaactgaaagtgtgataaaacaagcactgtaaattgttggcagtccagagttagttcagaggtaactatggcctagcagtctctttaaagggtagcttgttattaatacttttatttctgtttgatatcaaaactttaaagcaatctattctgatgaaaaaataagtatgaatgtgttcaatctctgcgaataaaaatacctagtcaacattattcataattttaaaatgctgaacgattttttttcaaatcaacgtaaaatgcatttttacgatggaaacaatcataaaaattaatagcattttatatagtcataataaattagttttgtgggaatttaaaataatcagggtctgcaaagatgaaaagaggaagatagaaaactatatgtaatatattacttacataagaaaattatatggcataaatatatattcatattatcattaaaatcatttttaaaaatgtatagatagaaaaaaagacatacctcaaaatgtagtgatttttctttccttgatatgcttttctatttcaaaataagaaaattcatcaaaatctttcgtataaaaagcatatggtgaataatactttaattatttaatcattcttttgtgtgacgttagcttatgataattcccatcactacataagtaaataaagtctcatttttattaagaagtttgaagctcaacaggtgtgggaaattttatctgaggaagaaagaaaatcaagaaaccttataatatgtaaggatccttaaaaagtcaatatggagatagatattattgtaagtcatatactaacactttattattaaaatagtgattgacctctgttttactttggctgctattctgcttttccaatattgataacacattgacaaatagtattttcagggtaattgaagtgatactggtttactagcagaatgaactgataaaatttaaaagtaccgtatggtatcaaacatttccacatgtaactctctttctatctgtcattatctatcaatgtatcatctatttaccatttgtaatataccagaagatgacataatatacagatcttcagatatccaaataaaataattttaaagaaaagtttacttacagtattttagtttaaagtatttatttttctaagtatttgctggctgtttgaaaaatataaataaatatggcaaaatgtattttgtgataagaatagatttttaaaaaataatgataagtagtctcatatttactcaactaaataaagattgtattccaagtactggaaagacattttgaaaaactttcacaatgattacatcactgtaattgctatatagtagtagtctctgtgctgtaaacataaagaatattctttgaacattaataacaaataaagtatggcttacagctttgtaactaccttcctcctctatatgatgatgtttacattggatttatagaaagataagaacatttacataattattctaaataaaagtaatttggagagatgcaaaaagatacccaattagctaacatacaagtagatatagtcagtccaattaaataaaacacccaaagcagaggtgaaaaccaatggttacctttaggagacattttgttttctttaggaatacactgctatctgcatattatttgccaataatgtgttgcatggccactccaaattacaaattacctttctgaaacatttcagttctgttagtaagaaaaaaaaggtagagtatgtagagagcactaccacatttgcttctacaaggagacctacaatgtaacctccactttcattgatcagtgcaagtctgtgcttttcatctttttgtaggccaatgtgtatagatttacaggaaagggtaggaatggggagaggtggcaagactggagatggcccacagttcaattatcttatgcaataaaaaaaaaagagattggagtgaaggaggacagactcctatgccattattttaattcaaaatcttggtggaaaaacactttcttagcaattgtgttcttatactcaataaatcatagacaacttaacttctaaaatatgcaaggaagagtaggagtcaaagaagccagtccgctacaagcaacagcaaggctagtaggggaagttttctccatggcaaagtaatctgcagttgtgtgttccacagaggatacggcattgcatttaaaagaagtattttacccgggctctggtcagtgctaaccaggaataaggtgaaaatcatcaggctatcttgaacctctcatcaatttgaagcctaactatcttaataatatttaaattaataataatttttaaagctaacagatttcatttacaatagaatgatgtagtaactagccttttctgaaaaagaaacctttatcttaattttatgttttctcttctgtctctcatgcatgctaacctcacatagatttaaaacattaaagtgttaatgggtctgaaagaactaccagtgctatacacctatataaaaattcagcaagtcaacatttgacatatagttatttattagttgatcaaagcatgaatatttcaactttagtgcatagtcttttttattcactgattttattttgctgtaagcatttcagatattaattattttattctgttttacaggaggggttcaaaatgggactaactcttgaaggcacagtattttgtctcgacccgttagacagtaggtgctgacatcaagaacaagaaatcctgattcatgttaaatgtgtttgtatacacatgtcatttattattattactttaagataggtattattcatgtgtcaatgtttttgaatattttaatattttgaaaattttctcagttaaatttcctcaccttcactattgatctgtaatttttattttaaaaacagcttactgtaaagtagatcatacttttatgttcctttctgtttctactgtagatgaatttgtaattgaaagacatattatacaaatacctgccttgtgtctgagttctatttagttagcatcttgaaatttgtattcattttccagatggctagtttattaatgatttcccaaaagccataccttaaagataactttttaaattctgaagagacatgccaatgtcaaactaaacatgttctgtttttaaaccaacaaacatgttactattcattggacagatatcattttatgtataaatactgttcacatcactgggaaaatgtaaactttaaacataatgccacaaggtcactaatttctagcaggtaaaattataaggatataaattccaataataaaccaaatgtatttagagtatttattagtaaatgcaaggtgatgttagttatgatcagttatactctaaatatttaatttgttttataaaggtagtgaaaaaatgaaaatttgctatttattaaaaaacattaaatttcattccaaatgagataagtgatattactataacatctaagcatcatctgatttgatattccctaaaaaacatttggaatatatgctatctatagattcagtatctactacccatatttactttaccaaatatatttctcctcactgcataaggactactcttctcatattttcttctttgatgaagatatttttcaccaaagtttattttgtgatgccctcttggttttgatactttaaaatctgtggcacccgttctacatgaattatcaatatttggtaaattcaatctgtatttgttttgttaaagtcaaaaatctcattttcc

SEQ ID NO: 139483 - DNA, 1833 bp, Homo sapiens
  Payload ID: 7344
  Gene Symbol: GVQW1
  Gene Name: GVQW motif containing 1
  Uniprot ID: Q8N7I0
  ENST ID: ENST00000451672
  CDS Start-End: 277-864
gtacaggaggtcggccagcagtctctgcctctgtgggggcctgctcatcacacagtagctgccgggcggcctggatgagccacgcgtgcggctggcgaaaagcactgaggaagcacccgatgtcactcacatagccctgccaggcctggcgtgaggtgagcagcaccagctcggcatcgtcgaggacgcttcggtcagctccatgccatcctcgtacgagggagctagaagcagaggtagcccttgcgcagcatctcccggcagctcctgcccgccatgccaaacttcctcgggctgcacagggcccgcagcttcacagtcttgtgcttctggagcactgcagatgtactcaacgcctctgggccccgcaggcagtggcacccgctggccagctgctcaagctggtccaggccccagtcacagggctctacaccaggtgtgctctgcaaaactggcatgggccgggaaccgatcccagaaactcagtgccattttgctaacagcatgtgttcacttcacgtctctgtgccatattttggtaattctcccaatatttcaaactttttcagatggagtctcgctctgtcacccaggcagtggtgcgatcttggctcactgcaacctccttctcccaggttcaagggattctcctgcctcagcctccccagtagctgggactacagacgtgcaccaagcccggctaatttttgtattttagtagagatggggtttcaccatgttggccaggctgatcttgaactcctcacctcagctgatttgcccacctcagcctcccaaagtgctgggattacaggtgtgagccaccatgcctggcctcaaactttgtcactattgttatattaatatttgttatggtaatctgcactcagtgatttttgatgttactactacaaattttaggggcaacacaaatcacacccatataagatagtgaatttaataagtaaatgttgtgtgttgtgactgttccaccaactggccattccccacctctctccctctccttggactgtcctattccctgagacacaacaatactgaaattaggccaatttaataacactacaatgacctctaactgttcaaataaaagaaagagctgcatgtttctcacttcatatcaaaagctacttggtaggctgaggcaggagaattgcttgaacctgggaggcggaggttgcagtgagtcgagatggcaccaccgcactccagcctgagtgacacagcaagaccttgtctcaaaaagaaaaaaaaaagatagtgattcctctgatggatctaggcaaagaaaatggaaaatcttctgggaaagaatttactatcctatatgccattaagaagatttgtgattaacaggaggaggtcaaagtatcaacatgaacaagagtttggaagaagttgatttcaactctcgtggatgactttgaggggttcaggaattcggtgcaggaaggaactcgatgtagtggatatagcaaaagaactagaattagaagtggagcctgaccatgtgactgaagtgcctccatcacatgataaagcttgatagatgagaaggtgctccttttggatgagcaaacaaagtggtttcttgagatggaatctgctcctggtgaagatgctatgaacattgttgaaatgacaacaaagaatttcgaatattacataatcttagttgataaagcagcggcatggtttgaaaggcctgactccaattttgaaagttatactgtgggtaaaatgctatgctatcaaacagcatctcatgctacagagatatctttcgtgaaaataaaagtcaatcgatgtggc

SEQ ID NO: 139484 - DNA, 2685 bp, Homo sapiens
  Payload ID: 7345
  Gene Symbol: GVQW2
  Gene Name: GVQW motif containing 2
  ENST ID: ENST00000624173
  CDS Start-End: 103-429
ctttagctgtaactccggcgggcgtgttgggtgtgtcgttttaggctctgtgacccaggagcaagacgcaataagcgggtgcagtggaggtagaaacgggaaatgcagtaccctttccggaagctactccgcccctcgacagagtcttgctgtgtcgcccaagctagagtgcagtggtgtcatctgggctcattgcaacctccgcttcctggattcaagcaattctcatgccacagcctcccaagtagctgggactacagatggaatctcactctgtcacccaggctggagtgcagtggcgcaatctcagctcactgcaacctctgcctccctgatttaagcgattctcctgcttcaacctcccgagtagctgggacgacaggcgcgcaccaccatgcccaggaacctgtggtgataaggaagatgtgagcctggagatacagaagctaccacatgaatgttaaaaatgaagctgacgcagcaaaaggcagtgccaaggaactaaaagaaaacaaattttgattacatttttggagttcctgggtcaagcagttcatgacactgaggcttttccgctacatgaataagtactttttctttcccgttaaagtgggtttgtgctggcttctctatcactcacaacaactggatactaactgaggcaacacttcctacctcttacacacattacacccataaaacagaaacaacatctaaaattagatttcaacacagctaccaagcagaaaagttcaaatcaacaagttatggataatgttttattgaaactacatttctcctcccaatgtgagtatggtgttggccaacatgttgcgtgttgattctgcttgcctttgtgtcctacatataggatgtgtactgtgtaatgaatcgtttcttcattatttttctcagcttgcatggttgcctccctcacctccattcacagagctcactgtgacagcattcaaccttgtcttggtacaagtgtgtaatttacataatagtcgcctctgtactttcctcagtaacttaaacaaagaagaccatcactcactgtgcttgcctttcaaattagatttgatatcaaattaaagtctcattttattaagtttctgaagccaaagtctttgacctatgaaagtatgtttcaattatgaatggaaaagagaagctttgtgttattaacaggaaaagaattcaagtgtgatggttgtgtcaatgccattgggacatgccagtagtcagtaactcaacagacaagcctgctagacctgctttactcatttgtggcgctgtttcttcactttctactgactcccacctgtgtttcataattctctacattgatatggtttattacttctcatagggatcttaaattaattgtgcaactcgttagagtctctttatgtaaaatacatagtcttcatactattagaatgttacaatctggacctaccaatgtgaacaagtgaaaaaatgtgctgtttattttaaccagcagtggtgttttagttagctatttatctccttatctcccaaatctcaaaaacactcagtagtttacaacatgaagcttttttttttttttttttgcttacaggtctgtgggtcagctgggataactctgcttcagactgtgggtcatcttggcttggcagactttaggttaaacataagactgtgtgtctcattctggggcccagactgaagggatagcagctagctggtgcatgctgtcttcgtggcaatcacaggggtgcgagaggcggagctgaaggacgcaagcacatttaagtcttttgcgtgtgtcatgttcaatgacattccatgtccagagccagctacatgggtggatcatgaatagaggggagaaatacaccccacccacttcagtgagctttaggtttacatgactgagggatggagggaagaattttggacaataatctcatctagtacatatggcttcaatttgtatgaaccctatctctactcctccaaccttctgatctcaactgctattgctaatatgacctgtgggagcgagaggactttctataactaggctgaattttaaaggaagagaatgacttccagatagcttattggctatcaatctaggagctcttacagctgagaaacattttgacccaaccctctggcttctttgttgatttatttttctgataaaattcatttttttaaatattaagctttaagaagtacatgtgttttaatgcagtaaaaaataaagcatatatgattcaatcatttgtaaatatacagtataactagtaagaaataaggggtctcattcacacccagatttataggagccagcactatgtgctcggtatataatagaagctcagttagtatttgttgattgaagtaccttttcttatttactaatgattattattaacagataataatttgggcctgaaatagacatttccttttttaatataattatatatatgtgcatatatatatcatcaatatcctctgactttattagtgactgttaaccacgtcgaaaaaagtaaaggtgtttattatgcatgcatagaaaaatgatatgtttgtgttcgctctttttaggaccaagaaaaaattattggttgctgttttctcagttttggttttttttaaaataaattttactgtgtgtatttg

SEQ ID NO: 139485 - DNA, 3229 bp, Homo sapiens
  Payload ID: 7346
  Gene Symbol: GIN1
  Gene Name: gypsy retrotransposon integrase 1
  Uniprot ID: Q9NXP7
  ENST ID: ENST00000399004
  CDS Start-End: 96-1664
aaaggacccgggtagttccgcttccggcagcgcgagataaatcacgagaggaagcttaaatctgtcgtttgaatttaggaccacctcggttcacaatggtccgtagtggaaaaaatggtgaccttcatcttaaacagattgcatattacaaacgaactggtgaatatcattcaactacactgccaagtgagagaagtggcataagaagagcagcaaaaaaatttgtcttcaaagaaaaaaagctgttttatgttggaaaagacagaaaacaaaatcgtttggtaattgtttcagaagaggaaaaaaagaaagtcttaagagaatgccatgaaaatgacagtggagctcatcatggtatatccaggaccctcactctggtagaatccaattattattggacatctgtgaccaatgatgtcaaacagtgggtatatgcttgtcagcattgccaagtggcaaaaaatacagttattgtagcaccgaaacagcaccttctcaaggtggaaaatccatggagtttagttactgttgatctgatggggccttttcatacaagcaacagaagtcatgtatatgctataatcatgacagatttgttcaccaaatggattgtgattttgcctctatgtgatgtttcagcatcagaagtttctaaagctattatcaatatatttttcttatatggacctcctcagaaaataataatggaccaaagagatgaattcattcaacagatcaatattgaactgtacagattgtttggcataaagcaaattgtaatttctcacacctctggaactgttaacccaacggaaagtacacctaacacaatcaaagcatttctctccaaacactgtgctgaccacccaaacaattgggatgatcacctatcagctgtttcatttgccttcaatgtaactcacttggaacctactaaaaatacaccatattttcaaatgtttagtcgaaatccttatatgcctgagacttcagatagtcttcatgaagtggatggtgataatacaagtatgtttgccaaaattctagatgcaattaaagaagctgataaaataatggagaataagacaacttcactgggccagatggagaacaacaatttggatgaactaaataaaagcaagatcattgttaaaaagaaacccaaacaattaaatccatttcatttaaaagtgggtcatgaagttttaagacaaaggaaaaattggtggaaggatggtcgttttcagtctgaatgggttggtccttgtgtcatagactatattacagaaagtggatgtgctgtcctgagagacaacactggggttagactgaaaagacctatcaaaatgtcccaccttaagccctacataagagaatccagtgaacaagaaagtctttatctcttgcaaggttcagtagtggcagatcatgactacattggattgcctgaaattccgattggagcatatcaagcaaatattctggtggaagatgcaactattggtatagtcgataatgaattactgacatcaagcaaggatcgtgaactattagaatatagaaatacgaaaatctctccattgatagacgatcatagttctcttgaaaagcagactttcagtctgttggactcttcaaaccaggttcttgaatacttaagttagtaaataccaaaatttatttaaattgtttgtttagaatataaattcttaatgatatcttattcattaaaaacgttgtatagaagaagtatcttgacacattcttaatgactatattctgaaggtttattttatagttcttatctaaaattatgccacatttgaatatcagtatacgtacatatgaaggcaaaggaagcatgtaatatatagaattcactttttcttctaaaaagagaacaggcaaagcacccctacttcttgggaaataaattccagcccaaatctctcaaacctttgtatggttttggcaccgtttctaagttttaaattttctgaaattctctaccatttaaacagtaagtttgaactaccttgaatggaattgataaatactgaatcaactgtaacaatgaatgaaatgaagcttctttctgtttcattagaacttctaaaaacaagattgtatgaaaaaatatagggttatttaataggctttcacagaatattggtaatttcaaattatctaattggttagatagggtcaggattagggtctgaaactatgtattggttgggaaacaatttgtttattttcatactatatattaaagataaaaccatcgaccaggcatggtggcccacacctgtaatcccagcgctttgggaagccaaggcaggatgatcacttgaccccaggagttcgagaccagcctgggcaacacagggagaccctatctctacagaaaaatgtttaaaaattagccaggtgtggtggcacatgcctgcggtcccagctactcaggaggctgaagtaggagcattgcttgaccccaggaggtcgaggctgcagtgagccgcgctcatgccacagctctccagcctgggcgacagggcaagacctgtctcaacaacaacaacaaaagtatccgttaagaattttttctgcaatcataaaatcataaaataaccagtatcaaagattttaaactgtaatttctatgatattcataaatataaaataaatattgttcaataaatatttattctaaagcactatgaaaagaactgtgggaaaagtaaaagatgagtcaaacgtgtacctcattcttataaaggacttactgtctggtaggtaataaactatgtaagccatgtacagcacaagttaaggcatgctaaattgcagaagacaggtgtagataatgtacttagggaggcaaaaagagagaagttgtttttacataggaaatttgtgtttatccttatggaagaaggatcatttaagcttgaccttgaagaatgtataggatttggtaaatggatacaaaagaattaggggagaagtaatacacagaaatggaaaagtattgtaatgattcataaaaaggcagggcttcttgttgtctacactgcctcgggtataaagtgaagaagcaagataatgagggataaagctgaaaaggtaagtaggaaaccttatggagagctttgaatactattaaggattgatatgtgcccctcccaaaatttgtgttgaagtcttaacccccaccacctcaaaatgt

SEQ ID NO: 139486 - DNA, 3325 bp, Homo sapiens
  Payload ID: 7346
  Gene Symbol: GIN1
  Gene Name: gypsy retrotransposon integrase 1
  Uniprot ID: Q9NXP7
  ENST ID: ENST00000512248
  CDS Start-End: 53-295
acgagaggaagcttaaatctgtcgtttgaatttaggaccacctcggttcacaatggtccgtagtggaaaaaatggtgaccttcatcttaaacagattgcatattacaaacgaactggtgaatatcattcaactacactgccaagtgagagaagtggcataagaagagcagcaaaaaaatttgtcttcaaaggtatatgcttgtcagcattgccaagtggcaaaaaatacagttattgtagcaccgaaacagcaccttctcaaggtggaaaatccatggagtttagttactgttgatctgatggggccttttcatacaagcaacagaagtcatgtatatgctataatcatgacagatttgttcaccaaatggattgtgattttgcctctatgtgatgtttcagcatcagaagtttctaaagctattatcaatatatttttcttatatggacctcctcagaaaataataatggaccaaagagatgaattcattcaacagatcaatattgaactgtacagattgtttggcataaagcaaattgtaatttctcacacctctggaactgttaacccaacggaaagtacacctaacacaatcaaagcatttctctccaaacactgtgctgaccacccaaacaattgggatgatcacctatcagctgtttcatttgccttcaatgtaactcacttggaacctactaaaaatacaccatattttcaaatgtttagtcgaaatccttatatgcctgagacttcagatagtcttcatgaagtggatggtgataatacaagtatgtttgccaaaattctagatgcaattaaagaagctgataaaataatggagaataagacaacttcactgggccagatggagaacaacaatttggatgaactaaataaaagcaagatcattgttaaaaagaaacccaaacaattaaatccatttcatttaaaagtgggtcatgaagttttaagacaaaggaaaaattggtggaaggatggtcgttttcagtctgaatgggttggtccttgtgtcatagactatattacagaaagtggatgtgctgtcctgagagacaacactggggttagactgaaaagacctatcaaaatgtcccaccttaagccctacataagagaatccagtgaacaagaaagtctttatctcttgcaaggttcagtagtggcagatcatgactacattggattgcctgaaattccgattggagcatatcaagcaaatattctggtggaagatgcaactattggtatagtcgataatgaattactgacatcaagcaaggatcgtgaactattagaatatagaaatacgaaaatctctccattgatagacgatcatagttctcttgaaaagcagactttcagtctgttggactcttcaaaccaggttcttgaatacttaagttagtaaataccaaaatttatttaaattgtttgtttagaatataaattcttaatgatatcttattcattaaaaacgttgtatagaagaagtatcttgacacattcttaatgactatattctgaaggtttattttatagttcttatctaaaattatgccacatttgaatatcagtatacgtacatatgaaggcaaaggaagcatgtaatatatagaattcactttttcttctaaaaagagaacaggcaaagcacccctacttcttgggaaataaattccagcccaaatctctcaaacctttgtatggttttggcaccgtttctaagttttaaattttctgaaattctctaccatttaaacagtaagtttgaactaccttgaatggaattgataaatactgaatcaactgtaacaatgaatgaaatgaagcttctttctgtttcattagaacttctaaaaacaagattgtatgaaaaaatatagggttatttaataggctttcacagaatattggtaatttcaaattatctaattggttagatagggtcaggattagggtctgaaactatgtattggttgggaaacaatttgtttattttcatactatatattaaagataaaaccatcgaccaggcatggtggcccacacctgtaatcccagcgctttgggaagccaaggcaggatgatcacttgaccccaggagttcgagaccagcctgggcaacacagggagaccctatctctacagaaaaatgtttaaaaattagccaggtgtggtggcacatgcctgcggtcccagctactcaggaggctgaagtaggagcattgcttgaccccaggaggtcgaggctgcagtgagccgcgctcatgccacagctctccagcctgggcgacagggcaagacctgtctcaacaacaacaacaaaagtatccgttaagaattttttctgcaatcataaaatcataaaataaccagtatcaaagattttaaactgtaatttctatgatattcataaatataaaataaatattgttcaataaatatttattctaaagcactatgaaaagaactgtgggaaaagtaaaagatgagtcaaacgtgtacctcattcttataaaggacttactgtctggtaggtaataaactatgtaagccatgtacagcacaagttaaggcatgctaaattgcagaagacaggtgtagataatgtacttagggaggcaaaaagagagaagttgtttttacataggaaatttgtgtttatccttatggaagaaggatcatttaagcttgaccttgaagaatgtataggatttggtaaatggatacaaaagaattaggggagaagtaatacacagaaatggaaaagtattgtaatgattcataaaaaggcagggcttcttgttgtctacactgcctcgggtataaagtgaagaagcaagataatgagggataaagctgaaaaggtaagtaggaaaccttatggagagctttgaatactattaaggattgatatgtgcccctcccaaaatttgtgttgaagtcttaacccccaccacctcaaaatgtgaccttatttggaaatgaggttgttgcaagtgtaattagttgagatcatatttcaatagggtgggctctaatacagtattactggtgttctgataaaaggggaaaatttgaacacagactcaaggagaatgccatgtgaagataaaggcagagtttaagattatgtttctatatgccaagaaatgacagagattgccagaaaactaccagaagttaggggagaggcattgaatacatttttcctcattcctcagaagaccaaccctgtcaataccttatctcagacttttgcctccagaactgtgagacaataaaattctattgtttcagcca

SEQ ID NO: 139487 - DNA, 525 bp, Homo sapiens
  Payload ID: 7346
  Gene Symbol: GIN1
  Gene Name: gypsy retrotransposon integrase 1
  Uniprot ID: Q9NXP7
  ENST ID: ENST00000513747
  CDS Start-End: 34-276
tgtcgtttgaatttaggaccacctcggttcacaatggtccgtagtggaaaaaatggtgaccttcatcttaaacagattgcatattacaaacgaactggtgaatatcattcaactacactgccaagtgagagaagtggcataagaagagcagcaaaaaaatttgtcttcaaaggtatatgcttgtcagcattgccaagtggcaaaaaatacagttattgtagcaccgaaacagcaccttctcaaggtggaaaatccatggagtttagttactgttgatctgatggggccttttcatacaagcaacagaagtcatgtatatgctataatcatgacagatttgttcaccaaatggattgtgattttgcctctatgtgatgtttcagcatcagaagtttctaaagctattatcaatatatttttcttatatggacctcctcagaaaataataatggaccaaagagatgaattcattcaacagaaagtctttatctcttgcaaggttcagtagtggcagatcatgactac

SEQ ID NO: 139488 - DNA, 1040 bp, Homo sapiens
  Payload ID: 7346
  Gene Symbol: GIN1
  Gene Name: gypsy retrotransposon integrase 1
  Uniprot ID: Q9NXP7
  ENST ID: ENST00000508629
  CDS Start-End: 42-710
cttaaatctgtcgtttgaatttaggaccacctcggttcacaatggtccgtagtggaaaaaatggtgaccttcatcttaaacagattgcatattacaaacgaactggtgaatatcattcaactacactgccaagtgagagaagtggcataagaagagcagcaaaaaaatttgtcttcaaagaaaaaaagctgttttatgttggaaaagacagaaaacaaaatcgtttggtaattgtttcagaagaggaaaaaaagaaagtcttaagagaatgccatgaaaatgacagtggagctcatcatggtatatccaggaccctcactctggtagaatccaattattattggacatctgtgaccaatgatgtcaaacagtgggtatatgcttgtcagcattgccaagtggcaaaaaatacagttattgtagcaccgaaacagcaccttctcaaggtggaaaatccatggagtttagttactgttgatctgatggggccttttcatacaagcaacagaagtcatgtatatgctataatcatgacagatttgttcaccaaatggattgtgattttgcctctatgtgatgtttcagcatcagaagtttctaaagctattatcaatatatttttcttatatggacctcctcagaaaataataatggaccaaagagatgaattcattcaacagaaagtctttatctcttgcaaggttcagtagtggcagatcatgactacattggattgcctgaaattccgattggagcatatcaagcaaatattctggtggaagatgcaactattggtatagtcgataatgaattactgacatcaagcaaggatcgtgaactattagaatatagaaatacgaaaatctctccattgatagacgatcatagttctcttgaaaagcagactttcagtctgttggactcttcaaaccaggttcttgaatacttaagttagtaaataccaaaatttatttaaattgtttgtttagaatataaattcttaatgatatcttattcattaaaaacgttgtatagaagaa

SEQ ID NO: 139489 - DNA, 2344 bp, Homo sapiens
  Payload ID: 7347
  Gene Symbol: H1F0
  Gene Name: H1 histone family, member 0
  Uniprot ID: P07305
  ENST ID: ENST00000340857
  CDS Start-End: 453-1037
cggatttgctcggcggaagaaacacagatggcggcggcgcagcgccattccgggccgggagcaggcagccagcagccctgtcctcaccgcggtccgcccgccgccgctaaatacccggatgcgccgcccaagcgccagacgcggagctgggaaaagggaggcagaggaggcggaggcagaggcagaggcagaggcagagcccgagcccggtgccgagaccaagcgacagaccggcggggctgggcctcgcaaagccggctcggcgagctctcccgacacccgagccggggaggaaaagcagcgactcctcgctcgcatccccgggagccgcactccagactggcccggtagtcaggggctcaggagcagatcccgaggcaggctttgctcagcctccgacgagggctggccctttggaaggcgccttcaacagccggaccagacaggccaccatgaccgagaattccacgtccgcccctgcggccaagcccaagcgggccaaggcctccaagaagtccacagaccaccccaagtattcagacatgatcgtggctgccatccaggccgagaagaaccgcgctggctcctcgcgccagtccattcagaagtatatcaagagccactacaaggtgggtgagaacgctgactcgcagatcaagttgtccatcaagcgcctggtcaccaccggtgtcctcaagcagaccaaaggggtgggggcctcggggtccttccggctagccaagagcgacgaacccaagaagtcagtggccttcaagaagaccaagaaggaaatcaagaaggtagccacgccaaagaaggcatccaagcccaagaaggctgcctccaaagccccaaccaagaaacccaaagccaccccggtcaagaaggccaagaagaagctggctgccacgcccaagaaagccaaaaaacccaagactgtcaaagccaagccggtcaaggcatccaagcccaaaaaggccaaaccagtgaaacccaaagcaaagtccagtgccaagagggccggcaagaagaagtgacaatgaagtcttttcttgcggacactccctcctgtctcctattttctgtaaataattttctccttttttctctcttgatgctcaccaccaccttttgcccccttctgttctgactttataagagacaggatttggattcttcagaaattacagaataattcatttttccttaaccagttgtgcaaggacagcaacaaccaatctaatgatgagaatgtacttatattttgttttgctattaacctacttacggggttagggatttgcggggggggcttgtgtgttttgttggcttgtttgccatgaaggtagatgtgggtggggagaagacacaaggcagtttgttctggctagatgagagggaacccaggaattgtgaggttagcaggaatatctttagggtgagtgagttttctttgagttgggcacccgttgtgagagtttcagaacctttggccagcaggagagaggtggtagggagcagccagccggcaaaggaaggagggggaaaaaaaccgccaccgggctgacttccacctcccagtggtgagcagtgggggcccaaacccagtttccttctcatttttgttagtttgcgctttcggcctccctattttcttagggaaggggagtggggtccaagtgacagctggatgggagaagccatagtttctcccagtcagctaggatgtagccattgggggatctttgtggcttcagcaaattctcttgttaaaccggagtgaaaacttcaggggaagggtggggagtcagccaagtgcctcagtgtgccctgttgaaacttaggtttttccacgcaatcgatggattgtgtcctaggaagacttttcttttcctctggatttttgttcctcctgtacaagaggtgtctttgcttggtttggtggggctgcggccacttaaaacctcccgatctctttttgagtcctttattataagtagttgtagctgcgggagggggagggggagtgggcgggcagtggatagtaagacttactgcagtcgatttgggatttgctaagtagttttacagagctagatctgtgtgcatgtgtgtgtttgtgtatatatacatatctagggctagtacttagtttcacacccgggagctgggagaaaaaacctgtacagttgtctttctcttatttttaataaaatagaaaaatcgcgcacttgcgcgtcccccccccacccccttttttaaacaagtgttacttgtgccgggaaaattttgctgtctttgtaattttaaaactttaaaataaattggaaaagggagaaactga

SEQ ID NO: 139490 - DNA, 1300 bp, Homo sapiens
  Payload ID: 7348
  Gene Symbol: H1FNT
  Gene Name: H1 histone family, member N, testis-specific
  Uniprot ID: Q75WM6
  ENST ID: ENST00000335017
  CDS Start-End: 313-1080
taaggaactgtgggtagatggtttgcaggaccacatacacacacaaaatagccgactaaagaaagcggtggagatcgagatcagtaagtttgatttgggaacaaaaccctggagactctataggtaggtgactgttgggggtggacaggcgctgaagacttggattggtttagacctagaaggaagtggcatttgattggttattataagtgaaaagggcccctccccgggtgagatatgccagccccataattaggacctgaaaatctctgccaggcctgcctttgtgacgtggcccagtctacctcagctatggaacaggccttgactggtgaggcccaaagccggtggccccgcagaggcgggagtggggccatggctgaggcgcctgggcccagtggcgaatcccgaggacactcagccactcagctgccagcggaaaaaactgtcgggggaccatcgaggggctgctcaagctccgtgctcagagtgtcccagttggtgctccaggccatctccactcacaaagggctgactctggcagctctcaagaaggagctccgaaacgccggctacgaagtgcgcaggaagagcggccgccacgaagcgcccagggggcaggccaaggccacgctcctccgggtcagcggcagcgacgccgccggctacttcagggtctggaaggttcccaagcccaggagaaagccgggacgcgcgaggcaagaggagggcacgcgcgctccctggaggaccccagccgcgccccggagctcccggaggcgccgccagccccttcgcaaggcggccaggaaggccagagaagtgtggagacggaacgcgagggcgaaagccaaggccaatgccagggcgaggaggaccaggagggcaaggccgagagccaaggagccgccgtgtgccagagccaaggaggaagcgggagcgacagcggcagacgaggggcgaggacaggccgtgaaggaagacaccacgccgaggtcagggaaggacaagaggcgaagctccaagcccagggaagagaagcaggagcccaagaagcccgcacagcggaccatccagtagccaacgcgggctaaaaccgaccggacatctagcgggcaggggaagactccactaaagacttccacaaagacctcccctaaatctgaaggtcttcctgatccagttgggaatgcatcttgtgggagcagcttcactcccaccacggaccaatgcctttcccccataggccccaagaagagcggctgtcacactcattgaaatgaaatggacctctagacca

SEQ ID NO: 139491 - DNA, 1067 bp, Homo sapiens
  Payload ID: 7349
  Gene Symbol: H1FOO
  Gene Name: H1 histone family, member O, oocyte-specific
  Uniprot ID: Q8IZA3
  ENST ID: ENST00000324382
  CDS Start-End: 6-1046
gtctcatggctcctgggagcgtcaccagcgacatctcaccctcctcgacttccacagcaggatcatccaggtctcctgaatctgaaaagccaggcccgagccacggcggtgtcccaccaggaggcccgagccacagcagcctcccggtgggacgccgccaccccccggtgctacgcatggtgctggaggcgctgcaggctggggagcagcgccggggcacgtcggtggcagctatcaagctctacatcctgcacaagtacccaacagtggacgtcctccgcttcaagtacctgctgaagcaggcgctggccactggcatgcgccgtggcctcctcgccaggcccctcaactccaaagccaggggggccactggcagcttcaaattagttcccaagcacaagaagaaaatccagcccaggaagatggcccccgcgacggctcccaggagagcgggtgaggccaaggggaagggccccaagaaaccaagtgaggccaaggaggaccctcccaacgtgggcaaggtgaaaaaggcagccaagaggccagcaaaggtgcagaagcctcctcccaagccaggcgcagccacagagaaggctcgcaagcaaggcggcgcggccaaggacaccagggcacagtcgggagaggctaggaaggtgccccccaagccagacaaggccatgcgggcaccttccagtgctggtgggctcagcaggaaggcaaaggccaaaggcagcaggagcagccaaggagatgctgaggcctacaggaaaaccaaagctgagagtaagagttcaaaacccacggccagcaaggtcaagaatggtgctgcttccccgaccaaaaagaaggtggtggccaaggccaaggcccctaaagctgggcaggggccaaacaccaaggctgctgctcctgctaagggcagtgggtccaaggtggtacctgcacatttgtccaggaagacagaggcccccaagggccctagaaaggctgggctgcccatcaaggcctcatcatccaaagtgtccagccagagggctgaagcttagggccagaggcaggggcggaga

SEQ ID NO: 139492 - DNA, 881 bp, Homo sapiens
  Payload ID: 7349
  Gene Symbol: H1FOO
  Gene Name: H1 histone family, member O, oocyte-specific
  Uniprot ID: Q8IZA3
  ENST ID: ENST00000503977
  CDS Start-End: 131-754
gcgtcacagcaggaccaggcggctaagcagggagaagagccagaggggcgtcaggtgtctgatgcggtgtgctggcagttgaggggtgaagttagttcccaagcacaagaagaaaatccagcccaggaagatggcccccgcgacggctcccaggagagcgggtgaggccaaggggaagggccccaagaaaccaagtgaggccaaggaggaccctcccaacgtgggcaaggtgaaaaaggcagccaagaggccagcaaaggtgcagaagcctcctcccaagccaggcgcagccacagagaaggctcgcaagcaaggcggcgcggccaaggacaccagggcacagtcgggagaggctaggaaggtgccccccaagccagacaaggccatgcgggcaccttccagtgctggtgggctcagcaggaaggcaaaggccaaaggcagcaggagcagccaaggagatgctgaggcctacaggaaaaccaaagctgagagtaagagttcaaaacccacggccagcaaggtcaagaatggtgctgcttccccgaccaaaaagaaggtggtggccaaggccaaggcccctaaagctgggcaggggccaaacaccaaggctgctgctcctgctaagggcagtgggtccaaggtggtacctgcacatttgtccaggaagacagaggcccccaagggccctagaaaggctgggctgcccatcaaggcctcatcatccaaagtgtccagccagagggctgaagcttagggccagaggcaggggcggagagagaccgagcctctgccctagtttttattcttcaactaaccactgctctatttatttcattgtaagctatttatcaataaagacttttgtttctttttcctcacaa

SEQ ID NO: 139493 - DNA, 1507 bp, Homo sapiens
  Payload ID: 7350
  Gene Symbol: H1FX
  Gene Name: H1 histone family, member X
  Uniprot ID: Q92522
  ENST ID: ENST00000333762
  CDS Start-End: 376-1017
cgcgcacgcccagcgagttccagaggcgccagtggaagctgcggcggcggtgtctcgcgttcggcgggatttctcttcgctccggctcggcctaggtctacgtccccagctccagccgccggctcggactcggtctctgacccccaactcggtcccctagtccggccccggctccgggccccccaaccctcgctccggcccggcccggcccccaccccagccctgccgcccggccccaggcccggccgcggccgctcccgcctggagccgccgcgcgcccccagcccccctgcaccccctcggcccctcgccttcctcttcccggcgcggccccccggcttccgcgcgccgcccgccaccaatcctcttgctaccatgtccgtggagctcgaggaggccctgccagtgacgaccgccgagggaatggccaagaaggtgaccaaggctggcggctcggcggcgttgtccccatctaagaagaggaagaatagcaagaagaagaaccagccgggcaagtacagccagctggtggtggagaccatccgtaggctgggcgagcgcaacggctcgtcgctggccaagatctacaccgaggccaagaaggttccgtggttcgaccagcagaatgggcgcacctacctcaagtactcgatcaaggcgctggtgcagaacgacacgcttctgcaggtgaagggcaccggcgccaacggttccttcaagctcaaccgcaagaagctggagggcggcggggagcggcgcggagccccggcggccgccaccgccccggcccccaccgcgcacaaagcgaagaaggcagccccgggcgcggccggctcccggcgcgcggacaagaagcccgccaggggccagaagccggagcagcgctcgcacaagaagggcgctggcgccaagaaggacaaaggcggcaaggccaagaagacggcggccgccgggggcaagaaggtgaagaaggcggccaagcccagcgtccccaaagtgcccaagggccgcaagtgagcgtgtcggccggtcagagcggccggcgtgggcttttcggtgtttttgtttttctaccccaagtgacgtagattttgtacggctcacgccggccggggccgcgaggcctggtctgagcctcagggaggggccccgggtcctctcagtctttcccctcccccaacgatgtagcgtttttcgttgtttgctttaggtttttgaaacagccccggcgacgcctctattggctctcggccttggcaacggccgtcgtcatggttactggcccctaggcgccgatggccgaggccgcgcctgcccaccgggcggggtcgctggttggccgggcccaggcgcgcggggacgcggaggccgcgcatcctttcccagctccccaccctccttgcctttgggtgcgcgacaaacaatcgctccgggctcagggctgcgcggctcttcccttcattccatgggcctttttttgggcacaataaagcgtttaaacctttca

SEQ ID NO: 139494 - DNA, 2280 bp, Homo sapiens
  Payload ID: 7351
  Gene Symbol: HLX
  Gene Name: H2.0-like homeobox
  Uniprot ID: Q14774
  ENST ID: ENST00000366903
  CDS Start-End: 459-1925
caaaactttgggagtttttagagacgagtttttttttttttctattacttttccccccccctaactaacggactattattgttgttgttttaaatttagctcttagggcttagctatttgggttttcttgcggtgtccggctcccgtctccctggctcccccgcccgccctgcggccccagcgcccctcgctctcatccagcccgcgaggagtgcgggcgccgcgccgcctttaaagcgaggccagggagcgaggcggtgaccggccgagatccggccctcgcctcctccctcggtggcgctagggctcccggcctctcttcctcagtgcgggcggagaagcgaaagcggatcgtcctcggctgccgccgccttctccgggactcgcgcgcccctccccgcgcgcccacccacccagtccggctggactgcggcagccgcgcggctcaccccggcaggatgttcgcagccgggctggctcccttctacgcctccaacttcagcctctggtcggccgcttactgctcctcggccggcccaggcggctgctccttccccttggaccccgccgccgtcaaaaagccctccttctgcatcgcagacattctgcacgccggcgtgggggatctgggggcggccccggagggcctggcaggggcctcggccgccgccctcaccgcgcacttgggctcggttcacccgcacgcctctttccaagcggcggccagatccccgcttcgacccaccccagtggtggcgccctccgaagtcccggctggcttcccgcagcggctgtctccgctctcagccgcctaccaccaccatcacccgcaacaacaacagcagcagcaacagccgcagcagcaacagcctccgcctccgccccgggctggcgccctgcagcccccggcctcggggacgcgagtggttccgaacccccaccacagtggctctgccccggccccctccagcaaagacctcaaatttggaattgaccgcattttatctgcagaatttgacccaaaagtcaaagaaggcaacacgctgagagatctcacttccctgctaaccggtgggcggcccgccggggtgcacctctcaggcctgcagccctcggccggccagttcttcgcatctctagatcccattaacgaggcttctgcaatcctgagtcccttaaactcgaacccaagaaattcagttcagcatcagttccaagacacgtttccaggtccctatgctgtgctcacgaaggacaccatgccgcagacgtacaaaaggaagcgttcatggtcgcgcgctgtgttctccaacctgcagaggaaaggcctggagaaaaggtttgagattcagaagtacgtgaccaagccggaccgaaagcagctggcggcgatgctgggcctcacggacgcacaggtgaaggtgtggttccagaaccggcggatgaagtggcggcactccaaggaggcccaggcccaaaaggacaaggacaaggaggctggcgagaagccatcaggtggagccccggctgcggatggcgagcaggacgagaggagccccagccgttctgaaggcgaggctgagagcgagagcagcgactccgagtccctggacatggcccccagcgacacggagcggactgaggggagtgagcgttctctgcaccaaacaacagttattaaggccccggtcactggcgccctcattaccgccagcagtgctgggagtggtgggagcagcggcggcggcggcaatagtttcagcttcagcagcgccagcagtcttagtagcagcagcaccagtgcgggttgcgccagcagccttggcggcggcggcgcctcggagcttctccctgcaacacagcccacagccagcagcgctcccaaaagccccgagccagcccaaggcgcgcttggctgcttatagactgtactagggcggaggggatccgggccttgcgtgcagcctcccaaccatgggctgggttttgtgcttactgtatgttggcgacttggtagggcaggagacgcagcgtggagcctacctcccgacattcacgcttcgccccacgctgctccgactggctgcagcggacactgcccaaagcagaggggagtctcagtgtcctgctagccagccgaacacttctctccggaagcaggctggttcgactgtgaggtgtttgactaaactgtttctctgactcgccccagaggtcgtggctcaaaggcacttaggacgccttaaatttgtaaataaaatgtttactacggtttgtaaa

SEQ ID NO: 139495 - DNA, 695 bp, Homo sapiens
  Payload ID: 7351
  Gene Symbol: HLX
  Gene Name: H2.0-like homeobox
  ENST ID: ENST00000427693
  CDS Start-End: 241-695
acgggttctctcttgacttcgctcaataaaaatctcacttccctgctaaccggtgggcggcccgccggggtgcacctctcaggcctgcagccctcggccggccagttcttcgcatctctagatcccattaacgaggcttctgcaatcctgagtcccttaaactcgaacccaagaaattcagttcagcatcagttccaagacacgtttccaggtccctatgctgtgctcacgaaggacaccatgccgcagacgtacaaaaggaagcgttcatggtcgcgcgctgtgttctccaacctgcagaggaaaggcctggagaaaaggtttgagattcagaagtacgtgaccaagccggaccgaaagcagctggcggcgatgctgggcctcacggacgcacaggtgaaggtgtggttccagaaccggcggatgaagtggcggcactccaaggaggcccaggcccaaaaggacaaggacaaggaggctggcgagaagccatcaggtggagccccggctgcggatggcgagcaggacgagaggagccccagccgttctgaaggcgaggctgagagcgagagcagcgactccgagtccctggacatggcccccagcgacacggagcggactgaggggagtgagcgttctctgcaccaaacaacagttattaaggccccggtcactggcgccctcattaccgccag

SEQ ID NO: 139496 - DNA, 587 bp, Homo sapiens
  Payload ID: 7352
  Gene Symbol: H2AFB1
  Gene Name: H2A histone family, member B1
  Uniprot ID: P0C5Y9
  ENST ID: ENST00000620016
  CDS Start-End: 79-426
actggacgcggtaactgtcctcttgagagccatcttgcctagctgggccaagccgagatagcacactcaacgcccagcatgccgaggaggaggagacgccgagggtcctccggtgctggcggccgggggcggacctgctctcgcaccgtccgagcggagctttcgttttcagtgagccaggtggagcgcagtctacgggagggccactacgctcagcgcctgagtcgcacggcgccggtctacctcgctgcggttattgagtacctgacggccaaggtcccggagctggcgggcaacgaggcccagaacagcggagagcggaacatcactcccctgctgctggacatggtggttcacaacgacaggctactgagcacccttttcaacacgaccaccatctctcaagtggcccctggcgaggactagcttctgacacccggcccctgggacctgacaggtccactcgtccacccacccggccccaaatcccccggcctgaacccccggccttaaacaccctccccccacaacccaggccccaaagtcttgggccttcattaattctgtcaataaaatgtttcaaggaa

SEQ ID NO: 139497 - DNA, 348 bp, Homo sapiens
  Payload ID: 7353
  Gene Symbol: H2AFB2
  Gene Name: H2A histone family, member B2
  Uniprot ID: P0C5Z0
  ENST ID: ENST00000354514
  CDS Start-End: 1-348
atgccgaggaggaggagacgccgagggtcctccggtgctggcggccgggggcggacctgctctcgcaccgtccgagcggagctttcgttttcagtgagccaggtggagcgcagtctacgggagggccactacgctcagcgcctgagtcgcacggcgccggtctacctcgctgcggttattgagtacctgacggccaaggtcctggagctggcgggcaacgaggcccagaacagcggagagcggaacatcactcccctgctgctggacatggtggttcacaacgacaggctactgagcacccttttcaacacgaccaccatctctcaagtggcccctggcgaggactag

SEQ ID NO: 139498 - DNA, 591 bp, Homo sapiens
  Payload ID: 7354
  Gene Symbol: H2AFB3
  Gene Name: H2A histone family, member B3
  Uniprot ID: P0C5Z0
  ENST ID: ENST00000615853
  CDS Start-End: 79-426
actggacgcggtaactgtcctcttgagagccatcttgcctagctgggccaagccgagatagcacactcaacgcccagcatgccgaggaggaggagacgccgagggtcctccggtgctggcggccgggggcggacctgctctcgcaccgtccgagcggagctttcgttttcagtgagccaggtggagcgcagtctacgggagggccactacgctcagcgcctgagtcgcacggcgccggtctacctcgctgcggttattgagtacctgacggccaaggtcctggagctggcgggcaacgaggcccagaacagcggagagcggaacatcactcccctgctgctggacatggtggttcacaacgacaggctactgagcacccttttcaacacgaccaccatctctcaagtggcccctggcgaggactagcttctgacacccggcccctgggacctgacaggtccactcgtccacccacccggccccaaatcccccggcctgaacccccggccttaaacaccctccccccacaacccaggccccaaagtcttgggccttcattaattctgtcaataaaatgtttcaaggaagcca

SEQ ID NO: 139499 - DNA, 785 bp, Homo sapiens
  Payload ID: 7355
  Gene Symbol: H2AFJ
  Gene Name: H2A histone family, member J
  Uniprot ID: Q9BTM1
  ENST ID: ENST00000389078
  CDS Start-End: 53-442
gacgccgagagcggtttgtctccgtctctggagttgtaggcgagaggtgatcatgtccggtcgcgggaaacagggcggcaaagtgcgagcaaaggccaaatcccgctcctcccgcgcgggcctgcagttcccggtgggccgagtgcacagactgctgcgcaaagggaactacgcggagcgagtgggcgccggggcgccggtgtacctggcggcggtgttggagtaccttacggcggagatcctggagctggctggcaacgccgcgcgtgacaacaagaagaccaggataattccccgccacctgcagctcgccatccgcaacgacgaggagttaaacaagctgctgggcaaagtgaccatcgctcagggcggcgtcctgcccaacatccaggccgtgctgctgcccaagaagacggagagtcagaagacgaagagcaaatgaccctgacgccgccctcagggagctggctcccccagcaaaggcccttttcatgagccttcgctctcctgccagtttgtgagcactcaggaccaagttctgggaagataccgtcggatcgagctgagctcggggcaggaagtgtctgcggccatatttttcaaaaagtggagtaactttccgtcttggaagggtggctctgatggcacgatgtcaacttgagattcttcctagcctagtagctgctgtgctttcatgctttggatatcagatatctttatatagcacttttatgttcatattttttttttaatgaaggaaacgttcaataagtgagtcatgaggt

SEQ ID NO: 139500 - DNA, 644 bp, Homo sapiens
  Payload ID: 7355
  Gene Symbol: H2AFJ
  Gene Name: H2A histone family, member J
  Uniprot ID: Q9BTM1
  ENST ID: ENST00000544848
  CDS Start-End: 89-478
ggcagttcgggtgcggtacgttgcattccggtaccggacgccgagagcggtttgtctccgtctctggagttgtaggcgagaggtgatcatgtccggtcgcgggaaacagggcggcaaagtgcgagcaaaggccaaatcccgctcctcccgcgcgggcctgcagttcccggtgggccgagtgcacagactgctgcgcaaagggaactacgcggagcgagtgggcgccggggcgccggtgtacctggcggcggtgttggagtaccttacggcggagatcctggagctggctggcaacgccgcgcgtgacaacaagaagaccaggataattccccgccacctgcagctcgccatccgcaacgacgaggagttaaacaagctgctgggcaaagtgaccatcgctcagggcggcgtcctgcccaacatccaggccgtgctgctgcccaagaagacggagagtcagaagacgaagagcaaatgaccctgacgccgccctcagggagctggctcccccagcaaaggcccttttcatggtcgtcccgcaatgcttttgaatgtgctggatgtcatggagggccggtgacatctagcggggaggtgggcggcgagggtcccggcgggagccaataaagttggtgaaaatcgtt

SEQ ID NO: 139501 - DNA, 3107 bp, Homo sapiens
  Payload ID: 7355
  Gene Symbol: H2AFJ
  Gene Name: H2A histone family, member J
  ENST ID: ENST00000501744
  CDS Start-End: 1-279
gggaactacgcggagcgagtgggcgccggggcgccggtgtacctggcggcggtgttggagtaccttacggcggagatcctggagctggctggcaacgccgcgcgtgacaacaagaagaccaggataattccccgccacctgcagctcgccatccgcaacgacgaggagttaaacaagctgctgggcaaagtgaccatcgctcagggcggcgtcctgcccaacatccaggccgtgctgctgcccaagaagacggagagtcagaagacgaagagcaaatgaccctgacgccgccctcagggagctggctcccccagcaaaggcccttttcatggtcgtcccgcaatgcttttgaatgtgctggatgtcatggagggccggtgacatctagcggggagagccttcgctctcctgccagtttgtgagcactcaggaccaagttctgggaagataccgtcggatcgagctgagctcggggcaggaagtgtctgcggccatatttttcaaaaagtggagtaactttccgtcttggaagggtggctctgatggcacgatgtcaacttgagattcttcctagcctagtagctgctgtgctttcatgctttggatatcagatatctttatatagcacttttatgttcatattttttttttaatgaaggaaacgttcaataagtgagtcatgaggttggaaattcgttcccctgacagtcatattgcataacattgcagcgcctttagtcgtgggttacatatgcttgagcttttaaagtgatgttgtcaagtttctagcttcataatgatcctgtcttcatcatatcatattcactttgagaatcggtttgactttgctttcaaacaaaacaaaaacctcttgcttttaggggttcttacccaacaaataacctgtttgaactctcttatattctcccactagcctgaagcaatgacctcattccagtaatgtctttgggagttgcattgcctaatggcacaatattgctttaataaacatgtaaggaaagataggaccaaatatgtaagtgcagggggaaacacatttcagaccaggaatccacattgaaaagttaacactagtaatcatcttctgcccttaattgacactcctatttatttcatcctcagcaaatttcatcctggctcacagaccccacaaaaaagatcccagtacagatttcacatctttggattcatctttcctgtgagtcggaattgaagtcttccccaaaaatatatgtatatattgtatgtcttcatccttggtagcggctggcccattttcccacatggactttattttgtccccagtatttattgaacagctgtctatgccaggctctgtacaaagtgataggagtagagctgtgaatgaggccaaccagatttccactctctcggagctcactttatttttattggttcctgaagacgggacaaggaacaaatacatacgttaatatgagagatcagcttctgttagtacttgtacctctctgctgtgtgtggatgaatgatggaattacttctcccatgttgccatttttgaggtgtacaaaggtcaggccgtacacacctctgttaggaggcaaattattgggcaggttcgagatgttctgctatttactctgtggttttgtcatatgtaaaagtcataacacctgttttaaggattgagattgttcatttactgtgtgccacatattagacaataaatggaaaaaagtaccatgttcaatgggggtatgggtttatccttataggttaaattataggtaaacattaataggactttttaaaaaatgcctcattgttagaactactactcacagttaccacttggggtcagtggaacaaaatgcatatatggttttgacatttgagtctaaatttcttaaagggatgaggcatctgagggattgttaccaaaatgatgaagaaataaggacaagggacatcaagacattcataagaaaaagcacctttgccttcccctgggaagattcacaggaatctgtccagctcttgttacatgatgagcaacatagacaagatacgaggcattgtaactgccctgtcgccacccgcctctcccaccactacccaaaggattcttagcatcccctcacatactctgcctgcctcaacgttcagtcagcccctcaccatttttgtttttgagagttttttttttaacccgaatagtttacgggctgtttaaaatgcatactcctacaaaatcagctcagcccatgatccatgatgaacaaacagtagttcttgctgatgtgtgattatgaatttaaaaggccagtatttctttaagcataagaccatatggaaaaaggcctaagacaaaatctgatgggaactgaattccagtttttaatagagttataatccatagttttatttacacacaaacacacacacacacactctttcctgcagagataagcaagccgttcagtgtggctgtggcttggccaggatttgtttgatctttgtttttcctgcagggccagtcttgtctttgtgtccccgaggactggtctgtttagttgtgcctgcctggaatcaaaaggcttagtcaggccccataattggtgatgactggcatactatatgcaaacttcacaatgccccttccagtggttgaaaggtcgcataccatgctgtgtaagaactttagctctctgcaatgagacttaaattcagattcactctactccttattagttatctgatttttggaaacttaatctctttaaacctcagtttcatctctaaaatgggcataatagtttacctcatagagtttggggagaattgagtgaattaatgtgtgtgaggacactaagattcccatatagaaataggctcaatgaatagtagctgtttttatttctatgtaaagtgagtagcggtagttgatgggagctgttgaaacaggtaaacagcattctagcaatccttcgacttttgtgatagcaaaccataaaaacaattttagtggctgttttactaattaaaggacatccacaattcaatgtataacagaaaaagtaatgattaaagcttgtgaatctgaa

SEQ ID NO: 139502 - DNA, 3804 bp, Homo sapiens
  Payload ID: 7356
  Gene Symbol: H2AFV
  Gene Name: H2A histone family, member V
  Uniprot ID: Q71UI9
  ENST ID: ENST00000222690
  CDS Start-End: 107-451
gtccggctccggcggcggcggtcggtgctgcgagagcggcggcggcggcgcgggtcggcagcgggagggcgcgcggccgagcggaggcggagtcggcgccgagaacatggctggaggcaaagctggaaaggacagtgggaaggccaaggctaaggcagtatctcgctcacagagagctgggctacagtttcctgtgggccgcatccacagacacttgaagactcgcaccacaagccatggaagggtgggtgccactgctgccgtgtacagtgctgcgattctggagtacctcactgcagaggtgctggagctggcaggtaatgcttctaaggatctcaaagtaaagcgtatcactccgcgtcacttgcagcttgcaatccgtggtgatgaagagttggattctcttatcaaggctaccatagctgggggtgagaagagaaggtgttcttagatcagaagatgccattgtattaggtgacggcaaggttttgctgatttagtggaacaagattctactgggatgtgtgctgagctgaaccaaggaactgcccgaatgtgctgaacaaggacatttgcttctcagatacgtgaattcaattttaagcaagattcttgatctgcttcagagcagctttgatttaaagtaatttcagagcgcttttccttgcatgagtaattttctgaatgtataaaatattctatttatgtttgaccttttggataaactgtgttgctgcagtgttggtccacactaccatcctaagtgaagacttagtaagtctgaggatctccaggcactggaaagagtgagaacctgggagtgaaagggttatagttagtgttcatttttcgggttttgtttcatagggagtcctgagtggggtaacctgaaatgttttaacagttgaagatcatcctattcctatccccagtaaaaataggcctttccacaatcttctaccagttaacttagctttttttttttttttttcctttaatagagtctcattcttgtcacccagactggagtgcgatggcacgatcttggctcactgcaaccctccctcccgggttccagcgattctcctgcctcagcctcccaagtagctgggattacaggcgcacgccaccatgcccagctaatttttgtatttttagtagacgtggggtttcaccatgttggccagactggtctcaaactcctgacctcaggcgatccgcccgtctaagccttccaaagtgctgggattactggcaggaaccaccaggcccagccaaccagcatttcttaaggtgaaaatacatggtgttaatttatattttgagtgagacccagtccagctgctataactgcttggacacttggcagaggacagagtactgcaaaagtgtctaagggagacagcattttgccttgggtgctgtagatgtacaagagaggttccaggagggggtgataggcagaattttggtccccatcaccttccctgcccagtgttatgcctatgaatgtgttacattatgtggtaaaagggactttgcagatgtaactaaaatttctaaaatagagatattatcctggattacctgggggaacccagtgtaattacatgaacccttaaaaatggaagaggatgcaggagtcagattcaaaggaaggcccaaggtgctattgctgacttgaagatagaggggccatgtggaaatcaagagaaggaagtgaatccttccagtgagcttggaagaaagcaccttgaggcacagatgagaagcttggccttacctgatgccttgattttagcctggtgagaccctgagcatataaatttgctgtgctatgccacacttctcacctacagaaacttagtttaaagccactaagtttgtggtaatttgttggctttaggcccctgagggtagagatttatggcttgtgttacaagtagagagcagtggagagttgggctttgtaattctttcaagggtgattgtagttctggagtcctatctacctgggttcagatctttgttggccagtccctggctgtgtgacttcactgctttaagcctctgtcttcatccttaaagtggtgatgatagtacctacctcactctgatctctgaatgagaacacatgtaagacacttagcacagttcctggtgctcaaagagttccaacacctgaaagcaccatggccctgtttgtttttcagtcaagatttctaaaagccgttattaccagaggttcagtgagaacatgggcagggtaaactcaaaatggagaacataaaaactgggactcccagaccagtcacttagaagactgctgcaggaagtaccaaggtcgttaagaatcagtaataataataagtaatgtgtgaatccattagaatgttgagaagtagacctttgacatttcagaaaaatgtatatctcagacacagccatatgtattgttatccctgagttggaagagcatcacagggcatagtttcacaaaagcttcaaaaaatatactaattgctggtaatatgtgaactaacagaaaaaaatagccatgttaaaataggagtgcctgacaattagctctattcatcttgtctcctagctgtaagcaccctagattcaaattatgcacctagaaaactaaattactatgtatgttataggcctttgaaatggatacatgaaaattagtgaaatcagaatgaacgtttcgcctgccaaagatatgtatttttataagtgatacaagggccccatgagctccatggccacatctgtacaaaacaggccctcctttcaggaactggtctcgagagagcaaaggggtcaactccctaaatggcagctgagacagtcctccctggtggcatggccctgtttcctgttgatatggtgatagttggagagtcaaatttttaccagaatttgtgaatatcatctctggttaatgattacacaaaaccttttaaaattttaaaaaattatttctaattctataaataaactctgcagttgtacagccactgtacagctaacatctcaacactggaaatgaggctggtttcttccagtttggctcagattcttcagggaagcccagttaagacaaacagctctctatactcaatccttactttgctgagaagatacaggcctgcccactcgctcccacctgctcttcacgaggagtcctttattcctgcatgtttcctgttctttgggacctttaggagctaacctccacagatgctgatagtctgtagagtcaggaataccatgtaacatgttgaagtagactaaagattagttctttggcaatagcccagtctggacttactatgtacttttgaaaataaaactgcttatttgtaaactctgtaattaggaccttttgctatttgagttatattcctttctaacttcaaacgtctgcattcatgtataatagccattttatgcacagatgaggtgattcccacactttttttcgcagatgtttcattatctggatgagtgtattacataataaatttgaataatggtagtcttccaaatgacaaaaagcaagctagttgatttgtcaattttgagtttaaatgttttgactgcttatcagcaaaaaaaatcaaagaatagcatactaatattaatggaaatgcagagtatatttaattggcatgattttttcatggatgtgtgcttcatttgatctattgtatgtagctcgtgatcacattttctgttggttaacattgttcctagcttatatgatggaattaaatatattctgtgtaaaaa

SEQ ID NO: 139503 - DNA, 752 bp, Homo sapiens
  Payload ID: 7356
  Gene Symbol: H2AFV
  Gene Name: H2A histone family, member V
  Uniprot ID: Q71UI9
  ENST ID: ENST00000308153
  CDS Start-End: 93-479
gcggcggtcggtgctgcgagagcggcggcggcggcgcgggtcggcagcgggagggcgcgcggccgagcggaggcggagtcggcgccgagaacatggctggaggcaaagctggaaaggacagtgggaaggccaaggctaaggcagtatctcgctcacagagagctgggctacagtttcctgtgggccgcatccacagacacttgaagactcgcaccacaagccatggaagggtgggtgccactgctgccgtgtacagtgctgcgattctggagtacctcactgcagaggtgctggagctggcaggtaatgcttctaaggatctcaaagtaaagcgtatcactccgcgtcacttgcagcttgcaatccgtggtgatgaagagttggattctcttatcaaggctaccatagctgggggtggtgtgatccctcacatccacaaatctctgattggaaagaagggacagcagaaaactgcttagagggatgctttaaccaaccctcttcctccccgtcattgtactgtaactgggacagaagaaataatggggatatgtggaatttttaacaacagttaaatggaaaagcatagacaattactgtagacatgataaaagaaacatttgtatgttcttagactcgaagtttgataaaagtaccttttcatgtggtgacagttgtgtgttgattggctaggtttctcccgtgtgttttatacaaaaatggaattgataaaccattttttacaaaattaa

SEQ ID NO: 139504 - DNA, 687 bp, Homo sapiens
  Payload ID: 7356
  Gene Symbol: H2AFV
  Gene Name: H2A histone family, member V
  Uniprot ID: Q71UI9
  ENST ID: ENST00000350771
  CDS Start-End: 106-414
tccggctccggcggcggcggtcggtgctgcgagagcggcggcggcggcgcgggtcggcagcgggagggcgcgcggccgagcggaggcggagtcggcgccgagaacatgtttcctgtgggccgcatccacagacacttgaagactcgcaccacaagccatggaagggtgggtgccactgctgccgtgtacagtgctgcgattctggagtacctcactgcagaggtgctggagctggcaggtaatgcttctaaggatctcaaagtaaagcgtatcactccgcgtcacttgcagcttgcaatccgtggtgatgaagagttggattctcttatcaaggctaccatagctgggggtggtgtgatccctcacatccacaaatctctgattggaaagaagggacagcagaaaactgcttagagggatgctttaaccaaccctcttcctccccgtcattgtactgtaactgggacagaagaaataatggggatatgtggaatttttaacaacagttaaatggaaaagcatagacaattactgtagacatgataaaagaaacatttgtatgttcttagactcgaagtttgataaaagtaccttttcatgtggtgacagttgtgtgttgattggctaggtttctcccgtgtgttttatacaaaaatggaattgataaaccattttttacaaaattaa

SEQ ID NO: 139505 - DNA, 596 bp, Homo sapiens
  Payload ID: 7356
  Gene Symbol: H2AFV
  Gene Name: H2A histone family, member V
  Uniprot ID: Q71UI9
  ENST ID: ENST00000349299
  CDS Start-End: 51-323
ggcagcgggagggcgcgcggccgagcggaggcggagtcggcgccgagaacatggctggaggcaaagctggaaaggacagtgggaaggccaaggctaaggcagtatctcgctcacagagagctgggctacaggtgctggagctggcaggtaatgcttctaaggatctcaaagtaaagcgtatcactccgcgtcacttgcagcttgcaatccgtggtgatgaagagttggattctcttatcaaggctaccatagctgggggtggtgtgatccctcacatccacaaatctctgattggaaagaagggacagcagaaaactgcttagagggatgctttaaccaaccctcttcctccccgtcattgtactgtaactgggacagaagaaataatggggatatgtggaatttttaacaacagttaaatggaaaagcatagacaattactgtagacatgataaaagaaacatttgtatgttcttagactcgaagtttgataaaagtaccttttcatgtggtgacagttgtgtgttgattggctaggtttctcccgtgtgttttatacaaaaatggaattgataaaccattttttacaaaattaa

SEQ ID NO: 139506 - DNA, 628 bp, Homo sapiens
  Payload ID: 7356
  Gene Symbol: H2AFV
  Gene Name: H2A histone family, member V
  Uniprot ID: Q71UI9
  ENST ID: ENST00000381124
  CDS Start-End: 110-310
attgtccggctccggcggcggcggtcggtgctgcgagagcggcggcggcggcgcgggtcggcagcgggagggcgcgcggccgagcggaggcggagtcggcgccgagaacatggctggaggcaaagctggaaaggacagtgggaaggccaaggctaaggcagtatctcgctcacagagagctgggctacagtttcctgtgggccgcatccacagacacttgaagactcgcaccacaagccatggaagggtgggtgccactgctgccgtgtacagtgctgcgattctggagtacctcactgcagaggtgtgatccctcacatccacaaatctctgattggaaagaagggacagcagaaaactgcttagagggatgctttaaccaaccctcttcctccccgtcattgtactgtaactgggacagaagaaataatggggatatgtggaatttttaacaacagttaaatggaaaagcatagacaattactgtagacatgataaaagaaacatttgtatgttcttagactcgaagtttgataaaagtaccttttcatgtggtgacagttgtgtgttgattggctaggtttctcccgtgtgttttatacaaaaatggaattgataaaccattttt

SEQ ID NO: 139507 - DNA, 589 bp, Homo sapiens
  Payload ID: 7356
  Gene Symbol: H2AFV
  Gene Name: H2A histone family, member V
  ENST ID: ENST00000437072
  CDS Start-End: 112-342
gtattgtccggctccggcggcggcggtcggtgctgcgagagcggcggcggcggcgcgggtcggcagcgggagggcgcgcggccgagcggaggcggagtcggcgccgagaacatggctggaggcaaagctggaaaggacagtgggaaggccaaggctaaggcagtatctcgctcacagagagctgggctacaggtgctggagctggcaggtaatgcttctaaggatctcaaagtaaagcgtatcactccgcgtcacttgcagcttgcaatccgtggtgatgaagagttggattctcttatcaaggctaccatagctgggggtgagaagagaaggtgttcttagatcagaagatgccattgtattaggtgacggcaaggttttgctgatttagtggaacaagattctactgggatgtgtgctgagctgaaccaaggaactgcccgaatgtgctgaacaaggacatttgcttctcagatacgtgaattcaattttaagcaagattcttgatctgcttcagagcagctttgatttaaagtaatttcagagcgcttttccttgcatgagtaattttctgaatgtataaaatatt

SEQ ID NO: 139508 - DNA, 1041 bp, Homo sapiens
  Payload ID: 7356
  Gene Symbol: H2AFV
  Gene Name: H2A histone family, member V
  ENST ID: ENST00000446531
  CDS Start-End: 113-481
ggtattgtccggctccggcggcggcggtcggtgctgcgagagcggcggcggcggcgcgggtcggcagcgggagggcgcgcggccgagcggaggcggagtcggcgccgagaacatggctggaggcaaagctggaaaggacagtgggaaggccaaggctaaggcagtatctcgctcacagagagctgggctacagtttcctgtgggccgcatccacagacacttgaagactcgcaccacaagccatggaagggtgggtgccactgctgccgtgtacagtgctgcgattctggagtacctcactgcagaggtgctggagctggcaggtaatgcttctaaggatctcaaagtaaagcgtatcactccgcgtcacttgcagcttgcaatccgtggtgatgaagagttggattctcttatcaaggctaccatagctgggggtggtatgtattactacttaagccttgattcttattggtctttctgactaatatatcgttcagatcaatgatatagtatatttgatcggttaactagaaagcatataaactttaatttcataaatactaaatctataacaattctaagcttttcataatgatctgaataaatatttcaccttctagccatatgtaatgctatttttattttagccagttctttgtctaaatttcatatgatacttaaagcctgatgtttaacatatttcccatacttttttaactgtgtttgaaaaatgagttggagaagttgcataacatacactggaaagggttgaaataaatacacttgaaaagtgggtcaggatcaatgaaagtgagaggtaagttggtggttcttaatcttctttggataaccctcaaagaacctcgtgaaagctgtggttacagctgggcacggtggctcacacctgtaatctcagcactttgggaggctgagaggccccggatcacccgaggtcaggagttcaagaccagcctggccaacgtggtgaaaccccatctctactaaaaatacaaaaattagctgggcgtggtggtgcacacc

SEQ ID NO: 139509 - DNA, 439 bp, Homo sapiens
  Payload ID: 7356
  Gene Symbol: H2AFV
  Gene Name: H2A histone family, member V
  ENST ID: ENST00000521529
  CDS Start-End: 70-192
ggcggcggcggcgcgggtcggcagcgggagggcgcgcggccgagcggaggcggagtcggcgccgagaacatgtttcctgtgggccgcatccacagacacttgaagactcgcaccacaagccatggaagggtgggtgccactgctgccgtgtacagtgctgcgattctggagtacctcactgcagaggtgtgatccctcacatccacaaatctctgattggaaagaagggacagcagaaaactgcttagagggatgctttaaccaaccctcttcctccccgtcattgtactgtaactgggacagaagaaataatggggatatgtggaatttttaacaacagttaaatggaaaagcatagacaattactgtagacatgataaaagaaacatttgtatgttcttagactcgaagtttgataaaagtaccttttcatgtggtg

SEQ ID NO: 139510 - DNA, 1373 bp, Homo sapiens
  Payload ID: 7357
  Gene Symbol: H2AFX
  Gene Name: H2A histone family, member X
  Uniprot ID: P16104
  ENST ID: ENST00000375167
  CDS Start-End: 56-487
cgggcgtctgttctagtgtttgagccgtcgtgcttcaccggtctacctcgctagcatgtcgggccgcggcaagactggcggcaaggcccgcgccaaggccaagtcgcgctcgtcgcgcgccggcctccagttcccagtgggccgtgtacaccggctgctgcggaagggccactacgccgagcgcgttggcgccggcgcgccagtgtacctggcggcagtgctggagtacctcaccgctgagatcctggagctggcgggcaatgcggcccgcgacaacaagaagacgcgaatcatcccccgccacctgcagctggccatccgcaacgacgaggagctcaacaagctgctgggcggcgtgacgatcgcccagggaggcgtcctgcccaacatccaggccgtgctgctgcccaagaagaccagcgccaccgtggggccgaaggcgccctcgggcggcaagaaggccacccaggcctcccaggagtactaagagggcccgcgccgcggccggccgccaggcctccccatgccaccacaaaggcccttttaagggccaccaccgccctcatggaaagagctgagccgcttcagactgcggggcaagcgggccgcggctcccttcccctcccctcccctcgcccgccttcgccgcccggcctcgagtccccgcccgcccccgctcccgtcccgcaccgcctgccgcgtcggcctcgggccctgccctgtccgccgtccgccctccggtagggttcgggccttccggatgcggcttgggcgctcttcggggacctccgtggcgcggaagacccgagcctgccggggggaggccggcggcgccgcacctgcccgcctcggcgttcgtgactcagccgccccatcccgagtcgctaaggggctgcggggaggccgcagcaccttctggaagacttggccttccgctctgacgcagggccgaggtgggcagtccaggccgagaggccggcggccctgaaggtctgcgctggggccgggacgaagcacttggtaacaggcacatcttcctcccgagtgactgcctcctaggaggacatttaggggagggcagaggcctgcagtttggcttcacggctggctatgtggacagcaagagtcgttttcgcggaagccgactggcagccaggcctgtcgggccccccgacgccgccccatttcccttccagcaaactcaactcggcaatccaagcacctagataccagcacaagtcggttaatccctgtctggactgagcctccgttggcttctgaactggaattctgcagctaacccttccacgactagaaccttaggcattggggagttttagatggactaattttattaaaggattgtttttttt

SEQ ID NO: 139511 - DNA, 1614 bp, Homo sapiens
  Payload ID: 7357
  Gene Symbol: H2AFX
  Gene Name: H2A histone family, member X
  Uniprot ID: P16104
  ENST ID: ENST00000530167
  CDS Start-End: 74-505
acagcagttacactgcggcgggcgtctgttctagtgtttgagccgtcgtgcttcaccggtctacctcgctagcatgtcgggccgcggcaagactggcggcaaggcccgcgccaaggccaagtcgcgctcgtcgcgcgccggcctccagttcccagtgggccgtgtacaccggctgctgcggaagggccactacgccgagcgcgttggcgccggcgcgccagtgtacctggcggcagtgctggagtacctcaccgctgagatcctggagctggcgggcaatgcggcccgcgacaacaagaagacgcgaatcatcccccgccacctgcagctggccatccgcaacgacgaggagctcaacaagctgctgggcggcgtgacgatcgcccagggaggcgtcctgcccaacatccaggccgtgctgctgcccaagaagaccagcgccaccgtggggccgaaggcgccctcgggcggcaagaaggccacccaggcctcccaggagtactaagagggcccgcgccgcggccggccgccaggcctccccatgccaccacaaaggcccttttaagggccaccaccgccctcatggaaagagctgagccgcttcagactgcggggcaagcgggccgcggctcccttcccctcccctcccctcgcccgccttcgccgcccggcctcgagtccccgcccgcccccgctcccgtcccgcaccgcctgccgcgtcggcctcgggccctgccctgtccgccgtccgccctccggtagggttcgggccttccggatgcggcttgggcgctcttcggggacctccgtggcgcggaagacccgagcctgccggggggaggccggcggcgccgcacctgcccgcctcggcgttcgtgactcagccgccccatcccgagtcgctaaggggctgcggggaggccgcagcaccttctggaagacttggccttccgctctgacgcagggccgaggtgggcagtccaggccgagaggccggcggccctgaaggtgagtgaggccctcggcagctgcagccggggtgtctggtacccccccggcgtggtgcttagcccaggactttcagacgcggccgctggccgggaggctttggtgggagagacgcgatcgccgatttcggtctggcgccccttctgcggccgggacccaggcctttcacatcagctctccctccatcttcattcataggtctgcgctggggccgggacgaagcacttggtaacaggcacatcttcctcccgagtgactgcctcctaggaggacatttaggggagggcagaggcctgcagtttggcttcacggctggctatgtggacagcaagagtcgttttcgcggaagccgactggcagccaggcctgtcgggccccccgacgccgccccatttcccttccagcaaactcaactcggcaatccaagcacctagataccagcacaagtcggttaatccctgtctggactgagcctccgttggcttctgaactggaattctgcagctaacccttccacgactagaaccttaggcattggggagttttagatggactaattttattaaaggattgttttttttttaaatggagcgtttgttttcattt

SEQ ID NO: 139512 - DNA, 1881 bp, Homo sapiens
  Payload ID: 7358
  Gene Symbol: H2AFY
  Gene Name: H2A histone family, member Y
  Uniprot ID: O75367
  ENST ID: ENST00000304332
  CDS Start-End: 173-1288
actgtctacattagtaattcccaacttgggtccgaaagtgaacttttgctgaagcgaagtagctaaccgcttccatgtgcaaggcaggttccagacttcggggtgaggaggattaactgaaggaccccaggggaaccggtgtgctcactgatccgcctccagggccaccgccatgtcgagccgcggtgggaagaagaagtccaccaagacgtccaggtctgccaaagcaggagtcatctttcccgtggggcggatgctgcggtacatcaagaaaggccaccccaagtacaggattggagtgggggcacccgtgtacatggccgccgtcctggaatacctgacagcggagattctggagctggctggcaatgcagcgagagacaacaagaagggacgggtcacaccccggcacatcctgctggctgtggccaatgatgaagagctgaatcagctgctaaaaggagtcaccatagccagtgggggtgtgttacccaacatccaccccgagttgctagcgaagaagcggggatccaaaggaaagttggaagccatcatcacaccacccccagccaaaaaggccaagtctccatcccagaagaagcctgtatctaaaaaagcaggaggcaagaaaggggcccggaaatccaagaagcagggtgaagtcagtaaggcagccagcgccgacagcacaaccgagggcacacctgccgacggcttcacagtcctctccaccaagagcctcttccttggccagaagctgaaccttattcacagtgaaatcagtaatttagccggctttgaggtggaggccataatcaatcctaccaatgctgacattgaccttaaagatgacctaggaaacacgctggagaagaaaggtggcaaggagtttgtggaagctgtcctggaactccggaaaaagaacgggcccttggaagtagctggagctgctgtcagcgcaggccatggcctgcctgccaagtttgtgatccactgtaatagtccagtttggggtgcagacaagtgtgaagaacttctggaaaagacagtgaaaaactgcttggccctggctgatgataagaagctgaaatccattgcatttccatccatcggcagcggcaggaacggttttccaaagcagacagcagctcagctgattctgaaggccatctccagttacttcgtgtctacaatgtcctcttccatcaaaacggtgtacttcgtgctttttgacagcgagagtataggcatctatgtgcaggaaatggccaagctggacgccaactaggctgagcaatgacagaaccagctgcaccatgtaccccaccttcagtttaaaagaaaaaaaaaatccccttcactcctactgggaggtgggacccctttcattttcagttttgctcatctagggaaaataaggctttggtttccagtttaattgtttttgaccttctaaaatgtttttatgttagcactgatagttggcattactgttgttaagcactgtgttccagaccgtgtctgacttagtgtaacctaggagattttatagttttattttaatgaaaccctgattgacgcacagcagtggggagaacagcgtcttttacctgtcaccgaagccaggaagccccgtttgtaagcgtgtgttgtggtgctttattgtacatcctccagtggcgttctttttactctaatgttcttttggtttcccccctcagaagaatcatgaatttgcaacagacctaatttttggttactttttgtcttattgatggatttgaaaatgaaagatttaataaggcaaagcagaatctgttgtccttaattatatttgcaatttggaatttgtgtgagttgatttagtaaaatgttaaaccg

SEQ ID NO: 139513 - DNA, 1859 bp, Homo sapiens
  Payload ID: 7358
  Gene Symbol: H2AFY
  Gene Name: H2A histone family, member Y
  Uniprot ID: O75367
  ENST ID: ENST00000312469
  CDS Start-End: 184-1293
gccgggcggagggggagagcgcgggccgcgcgggcgggaagcgaagaggcgggcgggccagcgaggagcgcggagagaaaaggcgcgagcggccaggagggctcaggccgagacaccttgcagctgccgccgccgccaccgagccgccgctgtgctcactgatccgcctccagggccaccgccatgtcgagccgcggtgggaagaagaagtccaccaagacgtccaggtctgccaaagcaggagtcatctttcccgtggggcggatgctgcggtacatcaagaaaggccaccccaagtacaggattggagtgggggcacccgtgtacatggccgccgtcctggaatacctgacagcggagattctggagctggctggcaatgcagcgagagacaacaagaagggacgggtcacaccccggcacatcctgctggctgtggccaatgatgaagagctgaatcagctgctaaaaggagtcaccatagccagtgggggtgtgttacccaacatccaccccgagttgctagcgaagaagcggggatccaaaggaaagttggaagccatcatcacaccacccccagccaaaaaggccaagtctccatcccagaagaagcctgtatctaaaaaagcaggaggcaagaaaggggcccggaaatccaagaagaagcagggtgaagtcagtaaggcagccagcgccgacagcacaaccgagggcacacctgccgacggcttcacagtcctctccaccaagagcctcttccttggccagaagttgcaagttgtacaggctgacattgcctcgatcgacagtgatgctgtcgttcacccgacaaacactgacttctacatcggtggtgaagtaggaaacacgctggagaagaaaggtggcaaggagtttgtggaagctgtcctggaactccggaaaaagaacgggcccttggaagtagctggagctgctgtcagcgcaggccatggcctgcctgccaagtttgtgatccactgtaatagtccagtttggggtgcagacaagtgtgaagaacttctggaaaagacagtgaaaaactgcttggccctggctgatgataagaagctgaaatccattgcatttccatccatcggcagcggcaggaacggttttccaaagcagacagcagctcagctgattctgaaggccatctccagttacttcgtgtctacaatgtcctcttccatcaaaacggtgtacttcgtgctttttgacagcgagagtataggcatctatgtgcaggaaatggccaagctggacgccaactaggctgagcaatgacagaaccagctgcaccatgtaccccaccttcagtttaaaagaaaaaaaaaatccccttcactcctactgggaggtgggacccctttcattttcagttttgctcatctagggaaaataaggctttggtttccagtttaattgtttttgaccttctaaaatgtttttatgttagcactgatagttggcattactgttgttaagcactgtgttccagaccgtgtctgacttagtgtaacctaggagattttatagttttattttaatgaaaccctgattgacgcacagcagtggggagaacagcgtcttttacctgtcaccgaagccaggaagccccgtttgtaagcgtgtgttgtggtgctttattgtacatcctccagtggcgttctttttactctaatgttcttttggtttcccccctcagaagaatcatgaatttgcaacagacctaatttttggttactttttgtcttattgatggatttgaaaatgaaagatttaataaggcaaagcagaatctgttgtccttaattatatttgcaatttggaatttgtgt

SEQ ID NO: 139514 - DNA, 924 bp, Homo sapiens
  Payload ID: 7358
  Gene Symbol: H2AFY
  Gene Name: H2A histone family, member Y
  ENST ID: ENST00000423969
  CDS Start-End: 202-804
agttcactcggcagcggcgccgggcggagggggagagcgcgggccgcgcgggcgggaagcgaagaggcgggcgggccagcgaggagcgcggagagaaaaggcgcgagcggccaggagggctcaggccgagacaccttgcagctgccgccgccgccaccgagccgccgctgtgctcactgatccgcctccagggccaccgccatgtcgagccgcggtgggaagaagaagtccaccaagacgtccaggtctgccaaagcaggagtcatctttcccgtggggcggatgctgcggtacatcaagaaaggccaccccaagtacaggattggagtgggggcacccgtgtacatggccgccgtcctggaatacctgacaggaaacacgctggagaagaaaggtggcaaggagtttgtggaagctgtcctggaactccggaaaaagaacgggcccttggaagtagctggagctgctgtcagcgcaggccatggcctgcctgccaagtttgtgatccactgtaatagtccagtttggggtgcagacaagtgtgaagaacttctggaaaagacagtgaaaaactgcttggccctggctgatgataagaagctgaaatccattgcatttccatccatcggcagcggcaggaacggttttccaaagcagacagcagctcagctgattctgaaggccatctccagttacttcgtgtctacaatgtcctcttccatcaaaacggtgtacttcgtgctttttgacagcgagagtataggcatctatgtgcaggaaatggccaagctggacgccaactaggctgagcaatgacagaaccagctgcaccatgtaccccaccttcagtttaaaagaaaaaaaaaatccccttcactcctactgggaggtgggacccctttcattttcagttttgctcatcta

SEQ ID NO: 139515 - DNA, 2789 bp, Homo sapiens
  Payload ID: 7358
  Gene Symbol: H2AFY
  Gene Name: H2A histone family, member Y
  Uniprot ID: O75367
  ENST ID: ENST00000511689
  CDS Start-End: 595-1713
aacagccattgtgccttcccactgggttagtgggaaggttcctaaagatgccgtggcagcgacagtcccgtgctcagagccaggcacacagtaggcgttcactcgagacgcagagtctgggacgcgccctgaagaagctcctctccaggggcctggcccttcccaaggactgggctctgggcgtccccggggtcatgggtcagacctcgcgtccggggtgcgggctggtgcctgggcgcagagcggccggcgtcaacgggtagggcgcgggcccggggtcaaggccggggcgccgggcggcacgggcgcggaggccggacgctcggggccgcgaagggatgtgacgagcggcgcgctgtgcattgtgggaagccggccgcgaggactggttccagttcactcggcagcggcgccgggcggagggggagagcgcgggccgcgcgggcgggaagcgaagaggcgggcgggccagcgaggagcgcggagagaaaaggcgcgagcggccaggagggctcaggccgagacaccttgcagctgccgccgccgccaccgagccgccgctgtgctcactgatccgcctccagggccaccgccatgtcgagccgcggtgggaagaagaagtccaccaagacgtccaggtctgccaaagcaggagtcatctttcccgtggggcggatgctgcggtacatcaagaaaggccaccccaagtacaggattggagtgggggcacccgtgtacatggccgccgtcctggaatacctgacagcggagattctggagctggctggcaatgcagcgagagacaacaagaagggacgggtcacaccccggcacatcctgctggctgtggccaatgatgaagagctgaatcagctgctaaaaggagtcaccatagccagtgggggtgtgttacccaacatccaccccgagttgctagcgaagaagcggggatccaaaggaaagttggaagccatcatcacaccacccccagccaaaaaggccaagtctccatcccagaagaagcctgtatctaaaaaagcaggaggcaagaaaggggcccggaaatccaagaagaagcagggtgaagtcagtaaggcagccagcgccgacagcacaaccgagggcacacctgccgacggcttcacagtcctctccaccaagagcctcttccttggccagaagctgaaccttattcacagtgaaatcagtaatttagccggctttgaggtggaggccataatcaatcctaccaatgctgacattgaccttaaagatgacctaggaaacacgctggagaagaaaggtggcaaggagtttgtggaagctgtcctggaactccggaaaaagaacgggcccttggaagtagctggagctgctgtcagcgcaggccatggcctgcctgccaagtttgtgatccactgtaatagtccagtttggggtgcagacaagtgtgaagaacttctggaaaagacagtgaaaaactgcttggccctggctgatgataagaagctgaaatccattgcatttccatccatcggcagcggcaggaacggttttccaaagcagacagcagctcagctgattctgaaggccatctccagttacttcgtgtctacaatgtcctcttccatcaaaacggtgtacttcgtgctttttgacagcgagagtataggcatctatgtgcaggaaatggccaagctggacgccaactaggctgagcaatgacagaaccagctgcaccatgtaccccaccttcagtttaaaagaaaaaaaaaatccccttcactcctactgggaggtgggacccctttcattttcagttttgctcatctagggaaaataaggctttggtttccagtttaattgtttttgaccttctaaaatgtttttatgttagcactgatagttggcattactgttgttaagcactgtgttccagaccgtgtctgacttagtgtaacctaggagattttatagttttattttaatgaaaccctgattgacgcacagcagtggggagaacagcgtcttttacctgtcaccgaagccaggaagccccgtttgtaagcgtgtgttgtggtgctttattgtacatcctccagtggcgttctttttactctaatgttcttttggtttcccccctcagaagaatcatgaatttgcaacagacctaatttttggttactttttgtcttattgatggatttgaaaatgaaagatttaataaggcaaagcagaatctgttgtccttaattatatttgcaatttggaatttgtgtgagttgatttagtaaaatgttaaaccgttgttgtgactggtgtgttccagttattgtgcccgtgagtcacaggtcttaagtcggcttctgcagtcccaggatgtgggggcagggcagtccatccccctcaacccccaccctgctcccacaactccttggatgctccacagtgttcactgcaacctgggtgggtgtgggccatctgctggccccagtggtttgtagagagaatttttataaagtctcaccttttggttctgtgtgacccttgggccagggtgttatccccattccccgttccacagatgaaggagggagtgtatccaaagccgtgcaggtggcatgtggcaggctccagaccctgagcccagctctctcctaccattgtccccttctgacagtctgtgacttagggctgggcctggccacttgctgatgaagctgctggagcctcattccctctgccgaggctgctgggtctgtcatccctgcaggacaggatccctggca

SEQ ID NO: 139516 - DNA, 1905 bp, Homo sapiens
  Payload ID: 7358
  Gene Symbol: H2AFY
  Gene Name: H2A histone family, member Y
  ENST ID: ENST00000506671
  CDS Start-End: 211-708
actggttccagttcactcggcagcggcgccgggcggagggggagagcgcgggccgcgcgggcgggaagcgaagaggcgggcgggccagcgaggagcgcggagagaaaaggcgcgagcggccaggagggctcaggccgagacaccttgcagctgccgccgccgccaccgagccgccgctgtgctcactgatccgcctccagggccaccgccatgtcgagccgcggtgggaagaagaagtccaccaagacgtccaggtctgccaaagcaggagtcatctttcccgtggggcggatgctgcggtacatcaagaaaggccaccccaagtacaggattggagtgggggcacccgtgtacatggccgccgtcctggaatacctgacagcggagattctggagctggctggcaatgcagcgagagacaacaagaagggacgggtcacaccccggcacatcctgctggctgtggccaatgatgaagagctgaatcagctgctaaaaggagtcaccatagccagtgggggtgtgttacccaacatccaccccgagttgctagcgaagaagcggggatccaaaggaaagttggaagccatcatcacaccacccccagccaaaaaggccaagtctccatcccagaagaagcctgtatctaaaaaagcaggaggcaagaaaggggcccggaaatccaagaactcttgtacctcaaaatgagtctgagctcccccttggagaaacgctgagaactggttgtggtttagtttcctgtttccccttgggtgttatgggtgaggcttgggagctgcctctctattaggatgcctgtgtctgtgtggcccacattctgacccttccgtctgtgcaagaagaagcagggtgaagtcagtaaggcagccagcgccgacagcacaaccgagggcacacctgccgacggcttcacagtcctctccaccaagagcctcttccttggccagaaggaaacacgctggagaagaaaggtggcaaggagtttgtggaagctgtcctggaactccggaaaaagaacgggcccttggaagtagctggagctgctgtcagcgcaggccatggcctgcctgccaagtttgtgatccactgtaatagtccagtttggggtgcagacaagtgtgaagaacttctggaaaagacagtgaaaaactgcttggccctggctgatgataagaagctgaaatccattgcatttccatccatcggcagcggcaggaacggttttccaaagcagacagcagctcagctgattctgaaggccatctccagttacttcgtgtctacaatgtcctcttccatcaaaacggtgtacttcgtgctttttgacagcgagagtataggcatctatgtgcaggaaatggccaagctggacgccaactaggctgagcaatgacagaaccagctgcaccatgtaccccaccttcagtttaaaagaaaaaaaaaatccccttcactcctactgggaggtgggacccctttcattttcagttttgctcatctagggaaaataaggctttggtttccagtttaattgtttttgaccttctaaaatgtttttatgttagcactgatagttggcattactgttgttaagcactgtgttccagaccgtgtctgacttagtgtaacctaggagattttatagttttattttaatgaaaccctgattgacgcacagcagtggggagaacagcgtcttttacctgtcaccgaagccaggaagccccgtttgtaagcgtgtgttgtggtgctttattgtacatcctccagtggcgttctttttactctaatgttcttttggtttcccccctcagaagaatcatgaatttgcaacagacctaatttttggttactttttgtcttattgatggatttgaaaatgaa

SEQ ID NO: 139517 - DNA, 1314 bp, Homo sapiens
  Payload ID: 7358
  Gene Symbol: H2AFY
  Gene Name: H2A histone family, member Y
  Uniprot ID: O75367
  ENST ID: ENST00000510038
  CDS Start-End: 133-1251
gtctacattagtaattcccaacttgggtccgaaagtgaacttttgctgaagcgaagtagctaaccgcttccatgtgcaaggcaggttccagacttcgggtgtgctcactgatccgcctccagggccaccgccatgtcgagccgcggtgggaagaagaagtccaccaagacgtccaggtctgccaaagcaggagtcatctttcccgtggggcggatgctgcggtacatcaagaaaggccaccccaagtacaggattggagtgggggcacccgtgtacatggccgccgtcctggaatacctgacagcggagattctggagctggctggcaatgcagcgagagacaacaagaagggacgggtcacaccccggcacatcctgctggctgtggccaatgatgaagagctgaatcagctgctaaaaggagtcaccatagccagtgggggtgtgttacccaacatccaccccgagttgctagcgaagaagcggggatccaaaggaaagttggaagccatcatcacaccacccccagccaaaaaggccaagtctccatcccagaagaagcctgtatctaaaaaagcaggaggcaagaaaggggcccggaaatccaagaagaagcagggtgaagtcagtaaggcagccagcgccgacagcacaaccgagggcacacctgccgacggcttcacagtcctctccaccaagagcctcttccttggccagaagctgaaccttattcacagtgaaatcagtaatttagccggctttgaggtggaggccataatcaatcctaccaatgctgacattgaccttaaagatgacctaggaaacacgctggagaagaaaggtggcaaggagtttgtggaagctgtcctggaactccggaaaaagaacgggcccttggaagtagctggagctgctgtcagcgcaggccatggcctgcctgccaagtttgtgatccactgtaatagtccagtttggggtgcagacaagtgtgaagaacttctggaaaagacagtgaaaaactgcttggccctggctgatgataagaagctgaaatccattgcatttccatccatcggcagcggcaggaacggttttccaaagcagacagcagctcagctgattctgaaggccatctccagttacttcgtgtctacaatgtcctcttccatcaaaacggtgtacttcgtgctttttgacagcgagagtataggcatctatgtgcaggaaatggccaagctggacgccaactaggctgagcaatgacagaaccagctgcaccatgtaccccaccttcagtttaaaagaaaaaaaaaa

SEQ ID NO: 139518 - DNA, 1980 bp, Homo sapiens
  Payload ID: 7359
  Gene Symbol: H2AFY2
  Gene Name: H2A histone family, member Y2
  Uniprot ID: Q9P0M6
  ENST ID: ENST00000373255
  CDS Start-End: 265-1383
gagcaatcccttctccctcctcctcctccccccgctactatccgcggcccagagaactgccgcttgccgccattgacacgcacagatagaacccaaagaaaggcaaagagtcctgcccggcaccggcgccgcgtgggccaaacctgcgcccgtggaggggcgcgcagagggcaccgggcgccgggagcaggcggcgcagcaccagcattgtgttagtgccgggaggccactgtgtcagcaagctgagagggaaactgaagcaagatgtcgggccggagtgggaagaagaaaatgtccaagctgtcccgttcagctagggcaggtgtcatctttccagtggggaggctgatgcgttatctgaagaaagggacgttcaagtaccggatcagcgtgggcgcccctgtctacatggcggcagtcattgagtacctggcagcggaaattctagaattggccggcaatgccgcgagggacaacaagaaggcccggatagccccgagacacatcttgctggcagttgccaatgacgaggagctcaaccagctgctaaaaggagtgaccatcgccagtggaggcgtcctgcccagaattcaccccgaactgctggccaaaaagcgagggaccaaaggcaagtcggaaacgatcctctccccacccccagagaaaagaggcaggaaggccacgtcaggcaagaagggggggaagaaatccaaggctgccaaaccacggacgtccaaaaagtccaaaccaaaggacagcgataaagaaggaacttcaaattccacctctgaagatgggccaggggatggattcaccattctgtcttctaagagccttgttctgggacagaagctgtccttaacccagagtgacatcagccatattggctccatgagagtggagggcattgtccacccaaccacagccgaaattgacctcaaagaagatataggtaaagccttggaaaaggctgggggaaaagagttcttggaaacggtaaaggagcttcgcaaatcccaaggccctttggaagtcgccgaagccgccgtcagccaatccagtggactcgcagccaaatttgtcatccactgtcacatccctcagtggggctccgacaaatgtgaagaacagcttgaagagaccatcaaaaactgcctgtcagcggcggaggacaagaagctaaagtccgtcgcgttcccgcctttccccagcggcagaaactgctttcccaaacagactgcggcccaggtgaccctcaaagccatctcagcccactttgatgactcgagcgcgtcctcgctgaagaacgtgtacttcctgctcttcgacagcgagagcatcggcatctacgtgcaggagatggccaagctcgacgccaagtagccgccgcactttccagcagggatcggaggacgacccgagtcccaagagtggggttttgctttttaaaaggagagaggaggggtgatggcaggggagtggagggtggccgggcaggtcctgccggcgcagggagccctctgcccttcacactctcctccaaaagagcctccatctgtaaggaagcaggtctccgcgaggggtttctttccatgtgttttcctcctgttgttttagaacttttttaaaaaaacagacctcgttttagatttatagcattgacttttacacacattcacacaagaaaaaaatcctttcaaaattcttaaatcttctgttcctcctttttccaagggaagagggcaaaaagtggcctgggctctgttggtgtgcgtgttccgtggcggagagaagaaaatgggaaagacatctcactggtgcttttctcttttgttttagtgccccccgcccccatccctataatatctgtaactactcctaaaaaggttttgattcaggcttttttttggtttcattttgtttttttaagaaaaagaaaatgaaaggaaaaaaataaaagatccagtgtctttcttacaa

SEQ ID NO: 139519 - DNA, 908 bp, Homo sapiens
  Payload ID: 7359
  Gene Symbol: H2AFY2
  Gene Name: H2A histone family, member Y2
  ENST ID: ENST00000455786
  CDS Start-End: 181-908
gatagaacccaaagaaaggcaaagagtcctgcccggcaccggcgccgcgtgggccaaacctgcgcccgtggaggggcgcgcagagggcaccgggcgccgggagcaggcggcgcagcaccagcattgtgttagtgccgggaggccactgtgtcagcaagctgagagggaaactgaagcaagatgtcgggccggagtgggaagaagaaaatgtccaagctgtcccgttcagctagggcaggtgtcatctttccagtggggaggctgatgcgttatctgaagaaagggacgttcaagtaccggatcagcgtgggcgcccctgtctacatggcggcagtcattgagtacctggcagcggaaattctagaattggccggcaatgccgcgagggacaacaagaaggcccggatagccccgagacacatcttgctggcagttgccaatgacgaggagctcaaccagtccaaaccaaaggacagcgataaagaaggaacttcaaattccacctctgaagatgggccaggggatggattcaccattctgtcttctaagagccttgttctgggacagaagctgtccttaacccagagtgacatcagccatattggctccatgagagtggagggcattgtccacccaaccacagccgaaattgacctcaaagaagatataggtaaagccttggaaaaggctgggggaaaagagttcttggaaacggtaaaggagcttcgcaaatcccaaggccctttggaagtcgccgaagccgccgtcagccaatccagtggactcgcagccaaatttgtcatccactgtcacatccctcagtggggctccgacaaatgtgaagaacagcttgaagagaccatcaaaaactgcctgtcagcggcggaggacaagaagctaaagtccgt

SEQ ID NO: 139520 - DNA, 979 bp, Homo sapiens
  Payload ID: 7360
  Gene Symbol: H2AFZ
  Gene Name: H2A histone family, member Z
  Uniprot ID: P0C0S5
  ENST ID: ENST00000296417
  CDS Start-End: 219-605
ctcaaggacgcgtcccgagggcgggtggcagccattggtgggatgagcaatccgagttcccggatgagggaacattctgcagtataaagggagcagggaaggcgggagacagcgcagtttgaatcgcggtgcgacgaaggagtaggtggtgggatctcaccgtgggtccgattagccttttctctgccttgcttgcttgagcttcagcggaattcgaaatggctggcggtaaggctggaaaggactccggaaaggccaagacaaaggcggtttcccgctcgcagagagccggcttgcagttcccagtgggccgtattcatcgacacctaaaatctaggacgaccagtcatggacgtgtgggcgcgactgccgctgtgtacagcgcagccatcctggagtacctcaccgcagaggtacttgaactggcaggaaatgcatcaaaagacttaaaggtaaagcgtattacccctcgtcacttgcaacttgctattcgtggagatgaagaattggattctctcatcaaggctacaattgctggtggtggtgtcattccacacatccacaaatctctgattgggaagaaaggacaacagaagactgtctaaaggatgcctggattccttgttatctcaggactctaaatactctaacagctgtccagtgttggtgattccagtggactgtatctctgtgaaaaacacaattttgcctttttgtaattctatttgagcaagttggaagtttaattagctttccaaccaaccaaatttctgcattcgagtcttaaccatatttaagtgttactgtggcttcaaagaagctattgattctgaagtagtgggttttgattgagttgactgtttttaaaaaactgtttggattttaattgtgatgcagaagttatagtaacaaacatttggttttgtacagacattatttccactctggtggataagttcaataaaggtcatatcccaaa

SEQ ID NO: 139521 - DNA, 1882 bp, Homo sapiens
  Payload ID: 7361
  Gene Symbol: H2BFM
  Gene Name: H2B histone family, member M
  Uniprot ID: P0C1H6
  ENST ID: ENST00000355016
  CDS Start-End: 29-493
aaccgtcactctctgttcttgctatctaatggccgctgcttccgccatggctgaggcttcctctgagacaacctcggaggaaggccagagcatccaggagcccaaagaggccaactccacgaaggcccagaagcagaagaggcgagggtgccgaggctcccgcaggcgccacgccaaccgccgtggggacagcttcggggacagcttcaccccctatttcccccgggtgctgaagcaggttcaccagggcctcagcctttcccaggaggccgtgagtgtcatggattctatgatccatgacatattggaccgcatcgccaccgaggctggtcagctggcccattacaccaagcgcgtgaccatcacctcccgggacatccagatggccgtgcgactgctgctgccggggaagatgggcaagctcgccgaggcccagggcacgaatgccgccctcagaacttcattatgtgcgatatggcaacagagaaagtgaatatgctgatacaagaagcaagaaaccttccttacttccaggtgtgtgtcagtaggattacggagtgtccacggaaacagctcatgccctagtgtacagtggtacagccaatgagtgacctgcagtctatgagcaacagtcattgacccaatgtggggggagtgacccaagctgaacccacagcagccttcctgttatattcaacctggtgtttaaaggaacggcagtgtgattctttacctgatgtttttgtttgcattgcttgtaatcatgatcttttagggatatgaatccaaagctaagattagaatatgtaccttgtccctaacatcaagttatacagaacattggcaaccattagtagaagtcagataaggcttatttcctcaaaagattagcatatttatattcatgttaatattaatataggctacctttcattgtgctctcttctgggtcccaagtcttggcattttaagcatttttttctataagtgtattgctgaatttcagagcaggtgctcactttcccattgctttccttttccattgatttccagtcgcccgagtatgtggacaagagaacatactctgggactgcaacccacaggaatttattatgttgtgccttgaagctcaacatgtggccatttttgttaaatgtttcccgtaaattttgaaacatctcataaacaacccttctccttcatatgtagaaaccagtaaaggatggcactctcagtcaaaccatgaaacaaaagctggataaatgacaaaaatcaaaattttcttgagcccatcagaagtgggaaagaaccaccccagagggcccaacacatagccacatagattattccaccatttaaagaggaccccttggtcaagagggaaacagggtcagggcaagatggtagccagagcttccctgagtagtgcagatgggaagaggggaaggtcacctccagagctccacttgggatccatagagaaatgatatagaaccaagaagtccactcattgggatctgttactttctgtttttccagattattagaaaaatattacagaaatagctgaagagaaatgttatgaaaatagttgaagttgtgcttattgcacgaggagaccaagaaaaaccccacaaaatcagctgcaagtaaatccttctggatggtgccaccaaatgttcctacaagtccggaacaacccttgccaaaccaaagacccttgccagaaccctgcttcttcccagagacagagctgtgtacctgacaaaacaccacatctcactcagtgacttatttctcattatgctaattgttttgctgtaaaatgccaatgtttctgtgaattaagacatacgaataaatttctgaagttacccttgca

SEQ ID NO: 139522 - DNA, 524 bp, Homo sapiens
  Payload ID: 7361
  Gene Symbol: H2BFM
  Gene Name: H2B histone family, member M
  ENST ID: ENST00000417637
  CDS Start-End: 1-159
ctggcccattacaccaagcgcgtgaccatcacctcccgggacatccagatggccgtgcgactgctgctgccggggaagatgggcaagctcgccgaggcccagggcacgaatgccgccctcagaacttcattatgtgcgatatggcaacagagaaagtgaatatgctgatacaagaagcaagattattagaaaaatattacagaaatagctgaagagaaatgttatgaaaatagttgaagttgtgcttattgcacgaggagaccaagaaaaaccccacaaaatcagctgcaagtaaatccttctggatggtgccaccaaatgttcctacaagtccggaacaacccttgccaaaccaaagacccttgccagaaccctgcttcttcccagagacagagctgtgtacctgacaaaacaccacatctcactcagtgacttatttctcattatgctaattgttttgctgtaaaatgccaatgtttctgtgaattaagacatacgaataaatttctgaagttacccttgca

SEQ ID NO: 139523 - DNA, 465 bp, Homo sapiens
  Payload ID: 7361
  Gene Symbol: H2BFM
  Gene Name: H2B histone family, member M
  Uniprot ID: P0C1H6
  ENST ID: ENST00000598335
  CDS Start-End: 1-465
atggccgctgcttccgccatggctgaggcttcctctgagacaacctcggaggaaggccagagcatccaggagcccaaagaggccaactccacgaaggcccagaagcagaagaggcgagggtgccgaggctcccgcaggcgccacgccaaccgccgtggggacagcttcggggacagcttcaccccctatttcccccgggtgctgaagcaggttcaccagggcctcagcctttcccaggaggccgtgagtgtcatggattctatgatccatgacatattggaccgcatcgccaccgaggctggtcagctggcccattacaccaagcgcgtgaccatcacctcccgggacatccagatggccgtgcgactgctgctgccggggaagatgggcaagctcgccgaggcccagggcacgaatgccgccctcagaacttcattatgtgcgatatggcaacagagaaagtga

SEQ ID NO: 139524 - DNA, 460 bp, Homo sapiens
  Payload ID: 7362
  Gene Symbol: H2BFS
  Gene Name: H2B histone family, member S (pseudogene)
  Uniprot ID: P57053
  ENST ID: ENST00000599962
  CDS Start-End: 51-431
cccgttttcacgatctgctgctcgtctcaggctcgtagttcgccttcaacatgccggagccagcgaagtccgctcccgcgcccaagaagggctcgaagaaagccgtgactaaggcgcagaagaaggacggcaggaagcgcaagcgcagccgcaaggagagctactccgtatacgtgtacaaggtgctgaagcaggtccaccccgacaccggcatctcctctaaggccatgggaatcatgaactccttcgtcaacgacatcttcgaacgcatcgcaggtgaggcttcccgcctgccgcattacaacaagcgctcgaccatcacctccagggagatccagacggccgtgcgcctgctgctgcccggggagttggccaagcacgccgtgtccgagggcaccaaggccgtcaccaagtacaccagcgctaagtaaacttgccaaattgatgcctgcagctcctg

SEQ ID NO: 139525 - DNA, 894 bp, Homo sapiens
  Payload ID: 7363
  Gene Symbol: H2BFWT
  Gene Name: H2B histone family, member W, testis-specific
  Uniprot ID: Q7Z2G1
  ENST ID: ENST00000217926
  CDS Start-End: 28-555
cgtgaagctggcccgagacgtggagccatgctgcgtaccgaagtgccccggcttccccggtccacaaccgccattgtctggtcgtgccatctaatggccactgcctccgccatggctggaccttcctctgagacgacctctgaggaacagctgatcacccaggagcccaaagaggccaactccactacgtcccagaagcagagcaagcagaggaagcgagggcgccatgggccccgcaggtgccactccaactgccgcggggacagcttcgccacctatttccgccgggtgctgaagcaggttcaccagggcctcagcctttcccgggaggccgtgagtgtcatggattctttggttcatgacatattggaccgcatcgccaccgaggctggtcacctggcccgctccaccaagcgccagaccatcactgcctgggagacccggatggctgtgcgcctgctgctgccggggcagatgggcaagctcgccgagtccgaaggcacgaaggctgtcctcagaacttcactgtatgccatacagcaacagagaaagtgaatacgctgatacaagaagcaagaatattagaaaaatgtcatgaaaatagttgaagagaaatgctcactgcacaaggagaccaagaaaaaccccccacgaaatcagccacaactaaatcgctctggacggtgccgccaggtgaccctacatgtccggagcaacactttgaaaaccaaagacgcttggcagaaccctgttcctttccagagacagagctgtgtaccttgtctaaaacaccgcatctcactcagtgacttatttctcattatgctaattgttttcgctttaaagcgccagtctttctgtcaaatgggacatacaaataaatttctaaaatta

SEQ ID NO: 139526 - DNA, 528 bp, Homo sapiens
  Payload ID: 7363
  Gene Symbol: H2BFWT
  Gene Name: H2B histone family, member W, testis-specific
  Uniprot ID: Q7Z2G1
  ENST ID: ENST00000611083
  CDS Start-End: 1-528
atgctgcgtaccgaagtgccccggcttccccggtccacaaccgccattgtctggtcgtgccatctaatggccactgcctccgccatggctggaccttcctctgagacgacctctgaggaacagctgatcacccaggagcccaaagaggccaactccactacgtcccagaagcagagcaagcagaggaagcgagggcgccatgggccccgcaggtgccactccaactgccgcggggacagcttcgccacctatttccgccgggtgctgaagcaggttcaccagggcctcagcctttcccgggaggccgtgagtgtcatggattctttggttcatgacatattggaccgcatcgccaccgaggctggtcacctggcccgctccaccaagcgccagaccatcactgcctgggagacccggatggctgtgcgcctgctgctgccggggcagatgggcaagctcgccgagtccgaaggcacgaaggctgtcctcagaacttcactgtatgccatacagcaacagagaaagtga

SEQ ID NO: 139527 - DNA, 1308 bp, Homo sapiens
  Payload ID: 7364
  Gene Symbol: H3F3A
  Gene Name: H3 histone, family 3A
  Uniprot ID: P84243
  ENST ID: ENST00000366813
  CDS Start-End: 376-786
ttttcttttgacttgtttgtggatggaatgtttacagacatttctaattactgctttaattaaataaattggatcaaaggccgttcgaggtatttttgttttgccgtttgtcgctcagaattggcattttgagaggtgattgatactgctaacaattttctagtactctagtttgtttcaagaagagattttgggtagacgtaatcttcaccctttcaaattatataacaatacgaacattattttttatactgatcataatttccagatttggggagggggtgatcgtggcaggaaaagttgtatgtttggtagttgcatatggtgatttttgatttttcaatgctggtaggtaagtaaggaggtctctgtaccatggctcgtacaaagcagactgcccgcaaatcgaccggtggtaaagcacccaggaagcaactggctacaaaagccgctcgcaagagtgcgccctctactggaggggtgaagaaacctcatcgttacaggcctggtactgtggcgctccgtgaaattagacgttatcagaagtccactgaacttctgattcgcaaacttcccttccagcgtctggtgcgagaaattgctcaggactttaaaacagatctgcgcttccagagcgcagctatcggtgctttgcaggaggcaagtgaggcctatctggttggcctttttgaagacaccaacctgtgtgctatccatgccaaacgtgtaacaattatgccaaaagacatccagctagcacgccgcatacgtggagaacgtgcttaagaatccactatgatgggaaacatttcattctcaaaaaaaaaaaaaaaaatttctcttcttcctgttattggtagttctgaacgttagatattttttttccatggggtcaaaaggtacctaagtatatgattgcgagtggaaaaataggggacagaaatcaggtattggcagtttttccattttcatttgtgtgtgaatttttaatataaatgcggagacgtaaagcattaatgcaagttaaaatgtttcagtgaacaagtttcagcggttcaactttataataattataaataaacctgttaaatttttctggacaatgccagcatttggatttttttaaaacaagtaaatttcttattgatggcaactaaatggtgtttgtagcatttttatcatacagtagattccatccattcactatacttttctaactgagttgtcctacatgcaagtacatgtttttaatgttgtctgtcttctgtgctgttcctgtaagtttgctattaaaatacattaaactat

SEQ ID NO: 139528 - DNA, 1863 bp, Homo sapiens
  Payload ID: 7364
  Gene Symbol: H3F3A
  Gene Name: H3 histone, family 3A
  ENST ID: ENST00000366814
  CDS Start-End: 122-493
atctttcaattgtgttcgcagccgccgccgcgccgccgtcgctctccaacgccagcgccgcctctcgctcgccgagctccagccgaaggagaaggggggtaagtaaggaggtctctgtaccatggctcgtacaaagcagactgcccgcaaatcgaccggtggtaaagcacccaggaagcaactggctacaaaagccgctcgcaagagtgcgccctctactggaggggtgaagaaacctcatcgttacaggcctggtactgtggcgctccgtgaaattagacgttatcagaagtccactgaacttctgattcgcaaacttcccttccagcgtctggtgcgagaaattgctcaggactttaaaacagatctgcgcttccagagcgcagctatcggtgctttgcaggtaaaatggtgggtgggaagactcagagtttgtattcctgttgtgtaccaagaacagttccaaattgttgcatgtgcttatatcatttaatcacaagcctgtcaggtagttgatattgttacttcactgttgagacttcagaaaggttaaattgctcaaggtcatacacgtagaaaatggcaaaaccataatttgaacctatttgactccaaggcttagtgcacattccattataccatttaaaattttgaaacattgcactaaaaacaatatttaaagaaaatcctctggtttggtttatggatgctgcaggacattaagaagaacttgagactagaggtctatatttgtagtaacaatttcaaacaacagtgcctagaataaaagaaatgtctcttcaggtcctgaagaaacatataggtagagagagcttaatacctaggatgggaataggcagtattaaaaaattatgcattaagacgtaaaaggagcagtgagtggaggataggattggattggcaagattgggggaacggtgcttaaaggtgatactggacgtgtaaaggggccaggatttgccttgtggtttcctaaaggggattagggattgccacttacatgtggagcatattgaatttaatcttaatctctagcatgtcaggacttagagaaatactgttctagagatatttatgtatttgagatatttgtggtttaagttaagaccaaaacttgaaattcctacaagatacttgataaaggtatgtagacgtcattaacatcagtcacttaagtaacctattttatattgtgtggttggattctttagttgcaagtatcccagaatacagtaaagctaccacctccatcagaagcatgcagttgggggtcgttaaaaatgctgattgttaggcaccattgcagacctgaatcattctgggggtggggagggggcatccagaatctaagtacattccattggaggattttcaaggctgctgttgctgtgctgggcttttgctttatgtatgagaaagataggataggtggattccaccctgaagtgtaattggtcgagctgtttctatggttaatctaaacttcatttgattggtgaattccaggagtaggcatccattaaattctcagtgagttgctgaaatttcaactactaaaatcttccatgtttttacttaaaactttattttctgttttaatagccgattatcttcagttcttatttattactaaatacagaaatgttactaagattcgtaagcattggtacaaagctgctaatattttctagttagaactgtgcttaaagaacaatactgtacttgaaaagtgtagcgtttttagcttaaatgtcaataatgtagccttttaaattgaatttactaaacaatctgggtaaaagactcatctttctaaaattattcacatgtaaacttccattg

SEQ ID NO: 139529 - DNA, 1088 bp, Homo sapiens
  Payload ID: 7364
  Gene Symbol: H3F3A
  Gene Name: H3 histone, family 3A
  Uniprot ID: P84243
  ENST ID: ENST00000366815
  CDS Start-End: 158-568
ggcggcgtgtgttgggggatagcctcggtgtcagccatctttcaattgtgttcgcagccgccgccgcgccgccgtcgctctccaacgccagcgccgcctctcgctcgccgagctccagccgaaggagaaggggggtaagtaaggaggtctctgtaccatggctcgtacaaagcagactgcccgcaaatcgaccggtggtaaagcacccaggaagcaactggctacaaaagccgctcgcaagagtgcgccctctactggaggggtgaagaaacctcatcgttacaggcctggtactgtggcgctccgtgaaattagacgttatcagaagtccactgaacttctgattcgcaaacttcccttccagcgtctggtgcgagaaattgctcaggactttaaaacagatctgcgcttccagagcgcagctatcggtgctttgcaggaggcaagtgaggcctatctggttggcctttttgaagacaccaacctgtgtgctatccatgccaaacgtgtaacaattatgccaaaagacatccagctagcacgccgcatacgtggagaacgtgcttaagaatccactatgatgggaaacatttcattctcaaaaaaaaaaaaaaaaatttctcttcttcctgttattggtagttctgaacgttagatattttttttccatggggtcaaaaggtacctaagtatatgattgcgagtggaaaaataggggacagaaatcaggtattggcagtttttccattttcatttgtgtgtgaatttttaatataaatgcggagacgtaaagcattaatgcaagttaaaatgtttcagtgaacaagtttcagcggttcaactttataataattataaataaacctgttaaatttttctggacaatgccagcatttggatttttttaaaacaagtaaatttcttattgatggcaactaaatggtgtttgtagcatttttatcatacagtagattccatccattcactatacttttctaactgagttgtcctacatgcaagtacatgtttttaatgttgtctgtcttctgtgctgttcctgtaagtttgctattaaaatacattaaact

SEQ ID NO: 139530 - DNA, 799 bp, Homo sapiens
  Payload ID: 7364
  Gene Symbol: H3F3A
  Gene Name: H3 histone, family 3A
  Uniprot ID: P84243
  ENST ID: ENST00000366816
  CDS Start-End: 345-755
cgcgacacagccatcttgcgtcgggggcccgggcccgggaggagagcgagccccgtcccctgatcccggaggccaacaccggcgaggggctgccctgcacgcaggcggccggcccaggagtcttagcggatcaagttgtctacggcggactcgggccggtcccgcaggacccggccgcacttggccgagcgcgcaggcgggaaggaggccgtcggtccgcccctcccgctgccgcagcggccagccgccgccgcgccgccgtcgctctccaacgccagcgccgcctctcgctcgccgagctccagccgaaggagaaggggggtaagtaaggaggtctctgtaccatggctcgtacaaagcagactgcccgcaaatcgaccggtggtaaagcacccaggaagcaactggctacaaaagccgctcgcaagagtgcgccctctactggaggggtgaagaaacctcatcgttacaggcctggtactgtggcgctccgtgaaattagacgttatcagaagtccactgaacttctgattcgcaaacttcccttccagcgtctggtgcgagaaattgctcaggactttaaaacagatctgcgcttccagagcgcagctatcggtgctttgcaggaggcaagtgaggcctatctggttggcctttttgaagacaccaacctgtgtgctatccatgccaaacgtgtaacaattatgccaaaagacatccagctagcacgccgcatacgtggagaacgtgcttaagaatccactatgatgggaaacatttcattctcaaaaaaaaaaaa

SEQ ID NO: 139531 - DNA, 2705 bp, Homo sapiens
  Payload ID: 7365
  Gene Symbol: H3F3B
  Gene Name: H3 histone, family 3B (H3.3B)
  Uniprot ID: P84243
  ENST ID: ENST00000254810
  CDS Start-End: 134-544
gagcgcagagcggtttggtcgttcgttgggcggtgctggtttttcgctcgtcgactgcggctcttcctcgggcagcggaagcggcgcggcggtcggagaagtggcctaaaacttcggcgttgggtgaaagaaaatggcccgaaccaagcagactgctcgtaagtccaccggtgggaaagccccccgcaaacagctggccacgaaagccgccaggaaaagcgctccctctaccggcggggtgaagaagcctcatcgctacaggcccgggaccgtggcgcttcgagagattcgtcgttatcagaagtcgaccgagctgctcatccggaagctgcccttccagaggttggtgagggagatcgcgcaggatttcaaaaccgacctgaggtttcagagcgcagccatcggtgcgctgcaggaggctagcgaagcgtacctggtgggtctgttcgaagataccaacctgtgtgccatccacgctaagagagtcaccatcatgcccaaagacatccagttggctcgccggatacggggagagagagcttaagtgaaggcagtttttatggcgttttgtagtaaattctgtaaaatactttggtttaatttgtgactttttttgtaagaaattgtttataatatgttgcatttgtacttaagtcattccatctttcactcaggatgaatgcgaaaagtgactgttcacagacctcagtgatgtgagcactgttgctcaggagtgacaagttgctaatatgcagaagggatgggtgatacttcttgcttctcatgatgcatgtttctgtatgttaatgacttgttgggtagctattaaggtactagagttgataaatgtgtacagggtccttttgcaataaaactggttatgacttgatccaagtgtttaacaattggggctgttaagtctgaccatacatcactgtgatagaatgtgggctttttcaagggtgaagatacaagtcttaaccacagtgtaacttacagtttcctttaaaaaaaaaaaaagtaaacctggcagctatagaatacactatgtgcatttataatagctattttatatattgtagtatcaacatttttaaattaaatgttttacattcacaagtggtggggagtcttgtcattaaggtgtgtgtaatttagagtccagttggttttcttctgactgcacttgttctcatagtagtaaaatgctatgcgcatttataccttgcataagtcctcattctaccacatgttaaccctctagctgataatgcaaacactaactgggggattttatttataagggctctagaaaaaacgagttattcacaccagcatcatcttaactaacattctgaactagttagtgcagcttttcattgtgttgtgtggttggtctcataactaggttgagtttttctcctctgctgaggaaacagtaccgaagttctttttcttgtggcatttgtattataaaaacttggtgtgggggaggagcacaaaactccagcccactgaacctctgccaattaagatggtgttgggttaggttacatctggttactgtcctgggaaaatcatttttatagagatggccttccaagtggttttaaaatttactgaagtttttaggtcaattatgtatgttgactaaatttacaaataaacttgtttatccaactaagtgtccaaaacctaaattgaatgtactaagttttcacatgtcccattatctaggtccttgtatactaatgttttgaacttagatcatttcaggtgttgtttggtggataaaggaaccttttatttataaagatactgtagaaagcatgtgaacagctctctgcttgattaagatgccataatagtgctgtatttgcagtgtgggctaagacaaagtatattaataagcttttcagcccccccactcccgttccgtagtgtagaagcccacaggtgtagaactcagtcttaaacttcagtatgaaaccagtttccttgtgcgatgatggccactaaagcatagtacgtggatgtcagtgagacagcatgagagccagcagtcatcaaagcgttccacgtttgaagttagcaactgcttaaagttataccccattaaaattgctttctcaaaagtttgggttagtttcaaatgtgatattttggagggaaggtaaagtaggtatctttcaggtcgtgataatgagctcctatgaaaggatgcaatataatgacccgcttttctagaaagttcataatcagctctggaacaagcacacttgattcctcactgtgcttcagaatgagattaagatcagatgttggaacgtgctatgctgtagcgtgtctggaaacaaagtacacaaacctggctacggtgatgagttagcttctgcttactacctgtgacaacccaagtgggtgacactagtgaaccttctccagtctgcaggctggcatagaaggctcttagattatattgggcagcttgcaatctgccgaagcagtgacttgcatttccacacttggcttgagcactcaacccagaaggcgaagatagcttttggttgtaggcggcttcctgtatgggatatccctcggtaagggtaaaggagcagaggcaaaggagaaaagcagaagttgcagctgatgcaggtatcctatgcccttgatggatgagactaaaataaaatttttgaagttaa

SEQ ID NO: 139532 - DNA, 468 bp, Homo sapiens
  Payload ID: 7365
  Gene Symbol: H3F3B
  Gene Name: H3 histone, family 3B (H3.3B)
  ENST ID: ENST00000586270
  CDS Start-End: 73-468
gcgcgccgcggccgttgggagccgagcggcgggggctgctcgggccgctggcgtcgggtcgggtgaaagaaaatggcccgaaccaagcagactgctcgtaagtccaccggtgggaaagccccccgcaaacagctggccacgaaagccgccaggaaaagcgctccctctaccggcggggtgaagaagcctcatcgctacaggcccgggaccgtggcgcttcgagagattcgtcgttatcagaagtcgaccgagctgctcatccggaagctgcccttccagaggttggtgagggagatcgcgcaggatttcaaaaccgacctgaggtttcagagcgcagccatcggtgcgctgcaggaggctagcgaagcgtacctggtgggtctgttcgaagataccaacctgtgtgccatccacgctaagagagtcaccatcatgcccaaagacatccagttggctcgccggatacgg

SEQ ID NO: 139533 - DNA, 576 bp, Homo sapiens
  Payload ID: 7365
  Gene Symbol: H3F3B
  Gene Name: H3 histone, family 3B (H3.3B)
  Uniprot ID: P84243
  ENST ID: ENST00000589599
  CDS Start-End: 145-555
ggagcgcagagcggtttggtcgttcgttgggcggtgctggtttttcgctcgtcgactgcggctcttcctcgggcagcggaagcggcgcggcggtcggagaagtggcctaaaacttcggcgttgggtaggcgttcgtgaaagaaaatggcccgaaccaagcagactgctcgtaagtccaccggtgggaaagccccccgcaaacagctggccacgaaagccgccaggaaaagcgctccctctaccggcggggtgaagaagcctcatcgctacaggcccgggaccgtggcgcttcgagagattcgtcgttatcagaagtcgaccgagctgctcatccggaagctgcccttccagaggttggtgagggagatcgcgcaggatttcaaaaccgacctgaggtttcagagcgcagccatcggtgcgctgcaggaggctagcgaagcgtacctggtgggtctgttcgaagataccaacctgtgtgccatccacgctaagagagtcaccatcatgcccaaagacatccagttggctcgccggatacggggagagagagcttaagtgaaggcagtttttatggcg

SEQ ID NO: 139534 - DNA, 551 bp, Homo sapiens
  Payload ID: 7365
  Gene Symbol: H3F3B
  Gene Name: H3 histone, family 3B (H3.3B)
  Uniprot ID: P84243
  ENST ID: ENST00000586607
  CDS Start-End: 122-532
aagcaagtgtggccctcgtggacaacctacgagccttagggacacaaaaggcttcctgcgcaaactgcacggaatctcctgacaggacttcacgttaatcatcattcataggtgaaagaaaatggcccgaaccaagcagactgctcgtaagtccaccggtgggaaagccccccgcaaacagctggccacgaaagccgccaggaaaagcgctccctctaccggcggggtgaagaagcctcatcgctacaggcccgggaccgtggcgcttcgagagattcgtcgttatcagaagtcgaccgagctgctcatccggaagctgcccttccagaggttggtgagggagatcgcgcaggatttcaaaaccgacctgaggtttcagagcgcagccatcggtgcgctgcaggaggctagcgaagcgtacctggtgggtctgttcgaagataccaacctgtgtgccatccacgctaagagagtcaccatcatgcccaaagacatccagttggctcgccggatacggggagagagagcttaagtgaaggcagtttttatgg

SEQ ID NO: 139535 - DNA, 783 bp, Homo sapiens
  Payload ID: 7365
  Gene Symbol: H3F3B
  Gene Name: H3 histone, family 3B (H3.3B)
  ENST ID: ENST00000591890
  CDS Start-End: 114-392
gttcgttgggcggtgctggtttttcgctcgtcgactgcggctcttcctcgggcagcggaagcggcgcggcggtcggagaagtggcctaaaacttcggcgttgggtgaaagaaaatggcccgaaccaagcagactgctcgtaagtccaccggtgggaaagccccccgcaaacagctggccacgaaagccgccaggaaaagcgctccctctaccggcggggtgaagaagcctcatcgctacaggcccgggaccgtggcgcttcgagagattcgtcgttatcagaagtcgaccgagctgctcatccggaagctgcccttccagaggttggtgagggagatcgcgcaggatttcaaaaccgacctgaggtttcagagcgcagccatcggaggctagcgaagcgtacctggtgggtctgttcgaagataccaacctgtgtgccatccacgctaagagagtcaccatcatgcccaaagacatccagttggctcgccggatacggggagagagagcttaagtgaaggcagtttttatggcgttttgtagtaaattctgtaaaatactttggtttaatttgtgactttttttgtaagaaattgtttataatatgttgcatttgtacttaagtcattccatctttcactcaggatgaatgcgaaaagtgactgttcacagacctcagtgatgtgagcactgttgctcaggagtgacaagttgctaatatgcagaagggatgggtgatacttcttgcttctcatgatgcatgtttctgtatgttaatgacttg

SEQ ID NO: 139536 - DNA, 795 bp, Homo sapiens
  Payload ID: 7365
  Gene Symbol: H3F3B
  Gene Name: H3 histone, family 3B (H3.3B)
  ENST ID: ENST00000592643
  CDS Start-End: 113-454
ttcgttgggcggtgctggtttttcgctcgtcgactgcggctcttcctcgggcagcggaagcggcgcggcggtcggagaagtggcctaaaacttcggcgttgggtgaaagaaaatggcccgaaccaagcagactgctcgtaagtccaccggtgggaaagccccccgcaaacagctggccacgaaagccgccaggaaaagcgctccctctaccggcggggtgaagaagcctcatcgctacaggcccgggaccgtggcgcttcgagagattcgtcgttatcagaagtcgaccgagctgctcatccggaagctgcccttccagaggaggctagcgaagcgtacctggtgggtctgttcgaagataccaacctgtgtgccatccacgctaagagagtcaccatcatgcccaaagacatccagttggctcgccggatacggggagagagagcttaagtgaaggcagtttttatggcgttttgtagtaaattctgtaaaatactttggtttaatttgtgactttttttgtaagaaattgtttataatatgttgcatttgtacttaagtcattccatctttcactcaggatgaatgcgaaaagtgactgttcacagacctcagtgatgtgagcactgttgctcaggagtgacaagttgctaatatgcagaagggatgggtgatacttcttgcttctcatgatgcatgtttctgtatgttaatgacttgttgggtagctattaaggtactagagttgataaatgtgtacagggtccttttgcaataaaactggttatgacttga

SEQ ID NO: 139537 - DNA, 586 bp, Homo sapiens
  Payload ID: 7365
  Gene Symbol: H3F3B
  Gene Name: H3 histone, family 3B (H3.3B)
  ENST ID: ENST00000587171
  CDS Start-End: 133-586
agcgcagagcggtttggtcgttcgttgggcggtgctggtttttcgctcgtcgactgcggctcttcctcgggcagcggaagcggcgcggcggtcggagaagtggcctaaaacttcggcgttgggtgaaagaaaatggcccgaaccaagcagactgctcgtaagtccaccggtgggaaagccccccgcaaacagctggccacgaaagccgccaggaaaagcgctccctctaccggcggggtgaagaagcctcatcgctacaggcccgggaccgtggcgcttcgagagattcgtcgttatcagaagtcgaccgagctgctcatccggaagctgcccttccagaggttggtgagggagatcgcgcaggatttcaaaaccgacctgaggtttcagagcgcagccatcggtgcgctgcaggtaagacaaaggcctggagccgggggagggctgggcggtttccgctccccgagtgggattaatagtgcggctctcgtcctcaacaggaggctagcgaagcgtacctggtgggtctgttcgaagataccaacctgtgtgccatccacgctaagagagtcaccatcatgcccaa

SEQ ID NO: 139538 - DNA, 551 bp, Homo sapiens
  Payload ID: 7365
  Gene Symbol: H3F3B
  Gene Name: H3 histone, family 3B (H3.3B)
  Uniprot ID: P84243
  ENST ID: ENST00000587560
  CDS Start-End: 113-523
cgggaggcccggcggtggggccaggatctgttcctccccccgcagccctggggggcggcccgggtgagcgcggcggccttatcttcggggcgtctttcttaggtgaaagaaaatggcccgaaccaagcagactgctcgtaagtccaccggtgggaaagccccccgcaaacagctggccacgaaagccgccaggaaaagcgctccctctaccggcggggtgaagaagcctcatcgctacaggcccgggaccgtggcgcttcgagagattcgtcgttatcagaagtcgaccgagctgctcatccggaagctgcccttccagaggttggtgagggagatcgcgcaggatttcaaaaccgacctgaggtttcagagcgcagccatcggtgcgctgcaggaggctagcgaagcgtacctggtgggtctgttcgaagataccaacctgtgtgccatccacgctaagagagtcaccatcatgcccaaagacatccagttggctcgccggatacggggagagagagcttaagtgaaggcagtttttatggcgttttgta

SEQ ID NO: 139539 - DNA, 1057 bp, Homo sapiens
  Payload ID: 7366
  Gene Symbol: H3F3C
  Gene Name: H3 histone, family 3C
  Uniprot ID: Q6NXT2
  ENST ID: ENST00000340398
  CDS Start-End: 76-483
ggctcttcctcgggcagcggaagcagcgcggaggtcggagaagtggcctaaaacttcggcgttgggtgaaagaaaatggcccgaaccaagcagactgctcgtaaatccaccggtgggaaagccccccgcaaacagctggccacgaaagctgccaggaaaagcaccccctctacctgcggggtgaagcctcatcgctacaggcctgggaccgtggcgcttcgagagattcgtcgttatcagaagtcgaccgagctgctcatccggaagctgcccttccagaggttggtgagggagatcgcgcaggatttcaacactgacctgaggtttcagagcgcagccgtcggtgcgctgcaggaggctagcgaagcgtacctggtgggtctgttggaagatactaacctgtgtgccatccacgctaagagagtcaccatcatgcccaaagacatccagttggctcgccggatacggggagagagagcttaagtgaaggcagtttttatggcattttgtagtaaattctgtaaaatactttggtttaattggtgactttttttgtaagaaattgtttatatgttgcatttgtacttaagtcattccatctttcactcaggatgaatgcgaaaagtgactgtttacagacctcagtgatgtcagcactgttgctcaggagtgacaagttgttaatatgcaaaacggatgcgtgatatttcttgcttctcatgatgcatgtttctgtatgttaatgacttgttgggtagctattaaggtactagaattgataaatgtgtacaacagggtccttttgcaataaaactggttatgacttgatccaagtgtttaacaattggggctgttaagtctgaccatacatcactgtgatagaatgtaggctttttcaagggtgaagatacaaaccttaaccacagtgtaacttatagtttcctttaaaaaaaaaaaattaaacctggcagctatagaatacaatatgtgcatttataatagctattttatatattgtagtgtcaacattttcaaattaaatgttttacattcacaa

SEQ ID NO: 139540 - DNA, 1895 bp, Homo sapiens
  Payload ID: 7367
  Gene Symbol: HMX1
  Gene Name: H6 family homeobox 1
  Uniprot ID: Q9NP08
  ENST ID: ENST00000400677
  CDS Start-End: 204-1250
ccgatcagctgtcggcgcgcactcgctcccggcccggcccagcccagcccggcgcggaggccgccgcctgccctgcggggcccgacgccagcggtccgggtagcagctccagggccggcccgcgcgtgcgcccgggagccgcgcgccaccatccccagcggggaccgaggagcccggccgagcccgagaagcccgcggccgcgatgcctgacgagctgacggagcccgggcgcgccacgccggcccgcgcctcctccttcctcatcgagaacctgctggcggccgaggccaagggcgcagggcgcgcgacccagggcgacggcagccgggaggacgaggaggaggacgacgacgaccccgaagacgaggacgccgagcaggcgcggcggcgacggctacagcggcggcgacagttgctcgcgggcaccgggcccggcggggaggcgcgggcccgtgcgctgctcgggccgggcgcgctgggcctcggtcctcggccgccccccggtcccgggccgcccttcgctctgggctgcggaggcgcagcgcgctggtacccacgggcgcacggtggctatggaggcggcctcagtcctgacaccagcgaccgggactcaccggagacgggcgaggagatgggccgtgcggagggcgcctggccgcgaggccccgggccgggagcggtgcagcgggaggcagcggagctggcggcgcgtggcccggcggccggcacggaggaggcgtcggagctggccgaggtccctgcggcggctggggagacacgcggcggcgttggcgtgggcggcggccgaaagaagaagacgcgcacagtcttctcccgcagccaggtcttccagctggaatccaccttcgacctgaagcgctacctgagcagcgccgagcgcgccggcctggccgcctccctgcagctcaccgagacgcaggttaagatctggttccagaaccgccgcaacaagtggaagcggcagctggcagccgagctggaggcggccagcctgtccccgccgggagcgcagcgcctggtccgcgtgccggtgctctaccacgaaagccccccggccgcagccgccgctgggcccccggccaccctgcccttcccgctggcgcccgccgcgcccgcgccgcccccaccgctgctcggcttctccggggccctcgcctacccgctggccgccttcccggccgccgcctccgtgccctttctgcgggcgcagatgcctggcctggtgtgagccccgcctgccgggccctctccccacgaccctgtggacctgtgtggacgcgcgattcagcggcaggcgcagggctcagggggcgttagggaagggatggtcgctcctgcggcctcctagatacctcgggagcgcaggccgcggccgggcgggcctcagcttctgtggggagcgcctctagaatgtaatgggacgccccacccatttgccaggctggatccccactcgaacagggggccatgcagagactctgggctgcgcagcccccggcgccacggccaccccccggcctcagcgaggagcggtcggccatggccacccggggcagctgccctcaggccaagcccagcgcaacaaaggaaaactacgaaccggctgtccaaggctgagcggtgactgtccccacagactgcccccaacactaaacgtccctttcctgggacccagacagcaggccggcccggagggctgtgctacccctctcgcgggtgctggtggagaaaggaccctggacctgtgggtcccatcgtccgttccaggagcaggcaggctggggctctctgcagacgtcgcagcctccgggttgttgtttttttaaatgaatctacttatttgcgtatggaataaaaagggacattttctgga

SEQ ID NO: 139541 - DNA, 651 bp, Homo sapiens
  Payload ID: 7367
  Gene Symbol: HMX1
  Gene Name: H6 family homeobox 1
  ENST ID: ENST00000506970
  CDS Start-End: 9-581
cggccgcgatgcctgacgagctgacggagcccgggcgcgccacgccggcccgcgcctcctccttcctcatcgagaacctgctggcggccgaggccaagggcgcagggcgcgcgacccagggcgacggcagccgggaggacgaggaggaggacgacgacgaccccgaagacgaggacgccgagcaggcgcggcggcgacggctacagcggcggcgacagttgctcgcgggcaccgggcccggcggggaggcgcgggcccgtgcgctgctcgggccgggcgcgctgggcctcggtcctcggccgccccccggtcccgggccgcccttcgctctgggctgcggaggcgcagcgcgctggtacccacgggcgcacggtggctatggaggcggcctcagtcctgacagcacacagaagattacacctcagcctgtgcagtgtggagaggggcaggtgaccagagctgataaatacaaagtgaacagaagtgacagtgggagcctctggatggcggaggaggccgcagggactggatggtgcagccacaacacggtggagcctttgtcagcctggacccccgagtgaccgcgtggagcagtgttcccacagggggcactcagtgtgagcaagaaataaaccttagtgtgtgcaccca

SEQ ID NO: 139542 - DNA, 1879 bp, Homo sapiens
  Payload ID: 7367
  Gene Symbol: HMX1
  Gene Name: H6 family homeobox 1
  ENST ID: ENST00000617742
  CDS Start-End: 204-1325
ccgatcagctgtcggcgcgcactcgctcccggcccggcccagcccagcccggcgcggaggccgccgcctgccctgcggggcccgacgccagcggtccgggtagcagctccagggccggcccgcgcgtgcgcccgggagccgcgcgccaccatccccagcggggaccgaggagcccggccgagcccgagaagcccgcggccgcgatgcctgacgagctgacggagcccgggcgcgccacgccggcccgcgcctcctccttcctcatcgagaacctgctggcggccgaggccaagggcgcagggcgcgacccagggcgacggcagccgggaggacgaggaggaggacgacgacgaccccgaagacgaggacgccgagcaggccggcggcgacggctacagcggcggcgacagttgctcgcgggcaccgggcccggcggggaggcgcgggccgtggctgctcgggccggcgcgctgggcctcggtcctcggccgccccccggtcccgggccgcccttcgctctgggctgcggaggcgcagcgcgctggtacccacgggcgcacggtggctatggaggcggcctcagtcctgacaccagcgaccgggactcaccggagacgggcgaggagatgggccgtgcggagggcgcctggccgcgaggcccgggccggagcggtgcagcgggaggcagcggagctggcggcgcgtggcccggcggccggcacggaggaggctcggagctggccgaggtccctgcggcggctggggagacacgcggcggcgttggcgtgggcggcggccgaaagaagaagacgcgcacagtcttctcccgcagccaggtcttccagctggaatccaccttcgacctgaagcgctacctgagcagcgccgagcgcgccggcctggccgcctccctgcagctcaccgagacgcaggttaagatctggttccagaaccgccgcaacaagtggaagcggcagctggcagccgagctggaggcggccagcctgtccccgccgggagcgcaggcctggtccgcgtgccggtgctctaccacgaaagccccccggccgcagccgccgctgggcccccggccaccctgcccttcccgctggcccgcccgcccgcgccgcccccaccgctgctcggcttctccggggccctcgcctacccgctggccgccttcccggccgccgcctccgtgccctttctgcgggcgcagatgcctggcctggtgtgagccccgcctgccgggccctctccccacgaccctgtggacctgtgtggacgcgcgatcagcggcaggcgcagggctcagggggcgttagggaagggatggtcgctcctgcggcctcctagatacctcgggagcgcaggccgcggccgggcgggcctcagcttctgtggggagcgcctctagaatgtaatgggacgccccacccatttgccaggctggatccccactcgaacagggggccatgcagagactctgggctgcgcagcccccggcgccacggccaccccccggcctcagcgaggagcggtcggccatggccacccggggcagctgccctcaggccaagcccagcgcaacaaaggaaaactacgaaccggctgtccaaggctgagcggtgactgtccccacagactgcccccaacactaaacgtccctttcctgggacccagacagcaggccggcccggagggctgtgctacccctctcgcgggtgctggtggagaaaggaccctggacctgtgggtcccatcgtccgttccaggagcaggcaggctggggctctctgcagacgtcgcagcctccgggttgttgtttttttaaatgaatctacttatttgcgtatggaataaaaagggacattttctg

SEQ ID NO: 139543 - DNA, 1628 bp, Homo sapiens
  Payload ID: 7368
  Gene Symbol: HMX2
  Gene Name: H6 family homeobox 2
  Uniprot ID: A2RU54
  ENST ID: ENST00000339992
  CDS Start-End: 258-1079
cgggcgaggaaggggcatttgcaccggggctgggcgggcgcacccagagccaggcgggcaggaacccctgcgcagccatccggtgcctgcatgtccctggcgcggaagggacgcctcaccagcctcggcgccccctccccctagatttcctccccgcccctccccactgcctgcctgctgcaccaccttccacccagatcacccagatcgtctctaaagggagttcttggtttccttcgatttcttatgaacccaggatgggcagcaaagaagatgcgggcaaggggtgtccggcggccggtggcgtctccagcttcaccatccagtccatcctgggcgggggcccctcggaggcaccgcgggagcccgtcggctggccagccaggaagcgcagcctgtccgtgtcctcggaggaggaggagccggacgacggctggaaggcgcccgcctgcttctgcccagaccagcacggccctaaggagcagggccccaagcaccatccccccatcccttttccttgcctgggtacccccaagggcagcggaggctcgggcccgggcggcttggagcgcacgcctttcctctctccttcgcactcggactttaaagaagagaaagagaggctcctgcccgcgggctcgccctcgccggggtccgagcggccgcgggacggcggcgctgagcggcaggccggcgcggccaagaagaagacgcgcaccgtcttttcgcgcagccaggtgtaccagctcgagtccaccttcgacatgaagcgctacctgagcagctcggagcgcgcctgcctcgcctccagcctgcagctcacggagacccaggtaaagacttggttccagaaccgccgcaacaagtggaagcggcagctctcggctgagctggaggcggccaacatggcgcacgcgtcggcgcagactctggtgagcatgccgctggtgttccgggacagttcgctgctgcgcgtgccggtgccgcgctcgctcgcctttcccgcgccgctctactacccgggaagcaacctctcggccttacctctctacaacctatacaacaagctcgactactgaccggcccgccgccccgcgccgcccccagctgcccgcagagccgggcgcgtactgtactgtaagcagggctccggagcaaggcggcgtgtttccagaaatatgaagaaatacaccatgtgtattcattagctcttatttatggtctctgccctactttttgttttgattgtttcgggtatttattggcattccctaagtcagagagcctgcttcctacctagaccgaaccagtacgctttgaaaaccattcggagtgagatgttctcgggtggtggtgggaaagggagttttggccagacaggctgtggttggtagggaaaaaaatcaggaaaacacctacaaaaccaggtacactcctcccccatatatacacctgtatatatgtacatgcatacacgctcggccaagccaggccctcagaggctttggacaattactaaattgcttcttttcgtttccctcatcccgaggatggtagggacgaaaaggggagagttcagatctgtaaatatttttaaaaagaaaaaaaaataaaacattttaaacatc

SEQ ID NO: 139544 - DNA, 1173 bp, Homo sapiens
  Payload ID: 7369
  Gene Symbol: HMX3
  Gene Name: H6 family homeobox 3
  Uniprot ID: A6NHT5
  ENST ID: ENST00000357878
  CDS Start-End: 90-1163
tatggtctgatttccggcctctcgcctgctcgccccgccgcccgcctgtcccgctccctccctcccggggacccggaggagaggggaccatgccggaacccgggccggacgctgccggcaccgccagcgcacagccccaaccgccgccgccccccccacccgctcccaaggagtccccgttctccatcaagaacctgctcaacggagaccaccaccggccgccccctaagcctcagccgcccccacggacgctcttcgcgccagcctcggctgccgccgccgccgccgctgccgctgccgcggcggccaagggggccctggagggcgccgcgggcttcgcgctctcgcaggtgggcgacctggctttccctcgctttgagatcccggcgcagaggtttgccctgcccgcgcactacctggagcgctccccagcctggtggtacccctacaccctgacccccgccggcggccacctcccgcgacctgaagcctcggagaaggccttgctgagagactcctcccccgcctccggcacagaccgcgactctccggagccactgctcaaggccgaccccgatcacaaggagctggactccaagagcccggacgagatcattctggaggagagcgactccgaggaaagcaaaaaggaaggcgaagcggcgccaggcgcggccggggcgagcgtaggggcggcggcggccactccgggcgcagaagactggaagaagggcgctgaaagtccagagaagaagccggcgtgccgcaagaagaagacgcgcacagtcttctcgcgcagccaggtcttccagctcgagtccaccttcgacatgaagcgctatctgagcagctcggagcgagccggcctggccgcgtccctgcacctcaccgagacgcaggtcaagatctggttccagaaccgccgcaacaagtggaagcggcagctggcggcggagctggaggcggccaacctgagccatgccgcggcgcagcgcatcgtgcgggtgcccatcctctaccacgagaactcggcggccgagggcgcggcggctgcagccgcgggggccccggtgccagtcagccagccgctgctcaccttcccgcaccccgtctactactcgcacccggtggtctcttccgtgccgctgctacggccggtctgaggccccagag

SEQ ID NO: 139545 - DNA, 5351 bp, Homo sapiens
  Payload ID: 7370
  Gene Symbol: HR
  Gene Name: hair growth associated
  Uniprot ID: O43593
  ENST ID: ENST00000312841
  CDS Start-End: 666-4070
ggtgctggaggaggaaaccggcggagcagcttccccactctcagttgcgcttctggcgatggcgatcagaggtcctgctgcgctctccgccgcgctctacctccattagccgcgctgcgcggtgctgcgccctcgccggtgcctctctcctgggtcccaggatcggcccccaccatccaggcacgacccccttccccggcccctcggcctttcccccaactcggccatctccgacccggggcgcgtgttccccccggcccggcgccttctctccctccgggggcacccgctccctagccccggcccggccctccccgcggcgcagcacggagtctcggcgtcccatggcgcaacctacggcctcggcccagaagctggtgcggccgatccgcgccgtgtgccgcatcctgcagatcccggagtccgacccctccaacctgcggccctagagcgcccccgccgccccgggggaaggagagcgcgagcgcgctgagcagacagagcgggagaacgcgtcctcgcccgccggccgggaggccccggagctggcccatggggagcaggcgcccggtgccggccacgacgaccgccaccgcccgcgccgcgaccggccggtgaagcccagggacccccctctgggagagccccatgagggcaggagagtgatggagagtacgcccagcttcctgaagggcaccccaacctgggagaagacggccccagagaacggcatcgtgagacaggagcccggcagcccgcctcgagatggactgcaccatgggccgctgtgcctgggagagcctgctcccttttggaggggcgtcctgagcaccccagactcctggcttccccctggcttcccccagggccccaaggacatgctcccacttgtggagggcgagggcccccagaatggggagaggaaggtcaactggctgggcagcaaagagggactgcgctggaaggaggccatgcttacccatccgctggcattctgcgggccagcgtgcccacctcgctgtggccccctgatgcctgagcatagtggtggccatctcaagagtgaccctgtggccttccggccctggcactgccctttccttctggagaccaagatcctggagcgagctcccttctgggtgcccacctgcttgccaccctacctagtgtctggcctgcccccagagcatccatgtgactggcccctgaccccgcacccctgggtatactccgggggccagcccaaagtgccctctgccttcagcttaggcagcaagggcttttactacaaggatccgagcattcccaggttggcaaaggagcccttggcagctgcggaacctgggttgtttggcttaaactctggtgggcacctgcagagagccggggaggccgaacgcccttcactgcaccagagggatggagagatgggagctggccggcagcagaatccttgcccgctcttcctggggcagccagacactgtgccctggacctcctggcccgcttgtcccccaggccttgttcatactcttggcaacgtctgggctgggccaggcgatgggaaccttgggtaccagctggggccaccagcaacaccaaggtgcccctctcctgagccgcctgtcacccagcggggctgctgttcatcctacccacccactaaaggtgggggtcttggcccttgtgggaagtgccaggagggcctggaggggggtgccagtggagccagcgaacccagcgaggaagtgaacaaggcctctggccccagggcctgtccccccagccaccacaccaagctgaagaagacatggctcacacggcactcggagcagtttgaatgtccacgcggctgccctgaggtcgaggagaggccggttgctcggctccgggccctcaaaagggcaggcagccccgaggtccagggagcaatgggcagtccagcccccaagcggccaccggacccttttccaggcactgcagaacagggggctgggggttggcaggaggtgcgggacacatcgatagggaacaaggatgtggactcgggacagcatgatgagcagaaaggaccccaagatggccaggccagtctccaggacccgggacttcaggacataccatgcctggctctccctgcaaaactggctcaatgccaaagttgtgcccaggcagctggagagggaggagggcacgcctgccactctcagcaagtgcggagatcgcctctgggaggggagctgcagcaggaggaagacacagccaccaactccagctctgaggaaggcccagggtccggccctgacagccggctcagcacaggcctcgccaagcacctgctcagtggtttgggggaccgactgtgccgcctgctgcggagggagcgggaggccctggcttgggcccagcgggaaggccaagggccagccgtgacagaggacagcccaggcattccacgctgctgcagccgttgccaccatggactcttcaacacccactggcgatgtccccgctgcagccaccggctgtgtgtggcctgtggtcgtgtggcaggcactgggcgggccagggagaaagcaggctttcaggagcagtccgcggaggagtgcacgcaggaggccgggcacgctgcctgttccctgatgctgacccagtttgtctccagccaggctttggcagagctgagcactgcaatgcaccaggtctgggtcaagtttgatatccgggggcactgcccctgccaagctgatgcccgggtatgggcccccggggatgcaggccagcagaaggaatcaacacagaaaacgcccccaactccacaaccttcctgcaatggcgacacccacaggaccaagagcatcaaagaggagacccccgattccgctgagaccccagcagaggaccgtgctggccgagggcccctgccttgtccttctctctgcgaactgctggcttctaccgcggtcaaactctgcttgggccatgagcgaatacacatggccttcgcccccgtcactccggccctgcccagtgatgaccgcatcaccaacatcctggacagcattatcgcacaggtggtggaacggaagatccaggagaaagccctggggccggggcttcgagctggcccgggtctgcgcaagggcctgggcctgcccctctctccagtgcggccccggctgcctcccccaggggctttgctgtggctgcaggagccccagccttgccctcggcgtggcttccacctcttccaggagcactggaggcagggccagcctgtgttggtgtcagggatccaaaggacattgcagggcaacctgtgggggacagaagctcttggggcacttggaggccaggtgcaggcgctgagccccctcggacctccccagcccagcagcctgggcagcacaacattctgggagggcttctcctggcctgagcttcgcccaaagtcagacgagggctctgtcctcctgctgcaccgagctttgggggatgaggacaccagcagggtggagaacctagctgccagtctgccacttccggagtactgcgccctccatggaaaactcaacctggcttcctacctcccaccgggccttgccctgcgtccactggagccccagctctgggcagcctatggtgtgagcccgcaccggggacacctggggaccaagaacctctgtgtggaggtggccgacctggtcagcatcctggtgcatgccgacacaccactgcctgcctggcaccgggcacagaaagacttcctttcaggcctggacggggaggggctctggtctccgggcagccaggtcagcactgtgtggcacgtgttccgggcacaggacgcccagcgcatccgccgctttctccagatggtgcagggcctggtgagcacagtcagcgtcactcagcacttcctctcccctgagacctctgccctctctgctcagctctgccaccagggacccagccttccccctgactgccacctgctttatgcccagatggactgggctgtgttccaagcagtgaaggtggccgtggggacattacaggaggccaaatagagggatgctaggtgtctgggatcggggtggggacaggtagaccaggtgctcagcccaggcacaacttcagcaggggatggcgctaggggacttggggatttctggtcaaccccacaagcaccactctgggcacaagcagggcactctgttcccctcccccttaagccaacaaccacagtgccaccaagctcacacctgtccttctcaggctggcatctcccccaccctgtgccccttttcatggtaccaggcccgcactgggggcaattgacttcctccaatccccactcctccgagacccaggagacaaacagcccttccttggggaaacttgggaatcattctggcttaaacaacacctcctcctgctgctcactcccgctgagcccactctactgccccagctccgtttctaccaccgcatcctcactgggctcactgcaggcatgctgaacaaggggcctccaaccttctgccctcctgccaaaagatctggggagtgtgaggagagggtggcatcaggagctgctcaggcttggcggagggagcggcatgggcgatgtcactcagccccttcccggtccgcccgcttccctccttcatgatttccattaaagtctgttgttttgtgactgctgccagtgtggttggccctgcccctgcaggccacatggtccagggagggagggggacatggaaatctgccttagagacaaatggagtagggcagcccggagctggggcccaagggacaggacaccactgcctgctcttcgtctggggcctggggccttgcctcccactgaggagactttgggtggggtggggggctgtcccccaaagatgctcctgagtgcaagagcaggcaaggcagagtcctggggcacagccacgaggtgacctccctgtgcagagactcccgagccctactccacccagcaagctccagtccgccccatctctcccgtctaccctgacctggagatccagaagtatggcccagaagagcccttgccccgcctgtctgcccttggtggcagtggccatggccgacgccaggcccagccaccctgggactgagcctgactgcttcagacagccgacccctccttgtccccgctccacgcccgcagcctcctggtggcgctccgccctctcccgcttcctttgtgtatctcagccctacaaagaaaaacactcccactcttgtcatacctaattgttcctgctgtggtttggggaattttttttattaaataaagttttttattataagggtaa
